United States Patent Application Publication US 2011/0014706 A2 - sequence listing, part 25

SEQ ID NO: 49198 - DNA, 869 bp, Arabidopsis thaliana landsberg
aagccagaccatggatcctatggaactgcagaatcttatcaatgtgcagtcagagatgtacccattaggccctgctattgctctggcttatctgtccgtcttaaaggactgtgaggcccattgtctgcatgaagggtctgaagtgaagaggcttggaggccttcatgtgattgggacttcattgcatgagtctcggagaattgataaccaggtaagctattggttttacttctctgcctggatgctacattttttaatctaatgtgctagttttagatacttaagccaaccctttccccaaacctttaatttccagtacattatattgatttgcggacctttaaaattttggctactatctagaatggtagtatgatgaagagagaagaactacataaccattcatatttttccccgagggaaatatgctaatttgttctctcgaattatcaatattattaattttatcctgtttgatggaatcaaatgactagatagataattatctaagtttctgcctccatattatttcttatagcttcgtggcagagctggaaggcaaggagatcctggatccacgcggtttatgataaggtaatcaccacatctattattctcctgaaccagagaaactctctgtattagcgaagttacttacgtaaaagattctttactgctttgatatattaactttgcaccaatctgaatatgttagggaataatacctgcctttgctctgcgacatgatttctattactgttggtttgcttacagcttgcaagatgagatgtttcagaagtttaattttgatactgagtgggctgtgagacttatatcaaagattacaaacgattaacacttaccaattg

SEQ ID NO: 49199 - DNA, 471 bp, Arabidopsis thaliana landsberg
atctgggagcaggtgtagccagatttcgacaggggtaggtcgctagatttggatatctatccctttagactggtagagagattttaaacatctggagattttatcattttttacagaaaagagtagtagatataatatttgatttcagttattatattttatgctgtcttatgaggattggacgatgatataggcaataacagtgacttcgatgtgggtaactggatatcagaaacctatgttcagctatactacacttgtgttccatagatgcacctgtaccctatgatatgttgtagaagtaccgcaacatggccttctactataacgaatcctatgggctcccgcgtccgctctcacctcaccggtcgctcctctacgcctctctcgtcatcacctccgtcatccttctcgccctagctccggctcgcctttgacactatgggaatggaggtttctatgatctgcttg

SEQ ID NO: 49200 - DNA, 555 bp, Arabidopsis thaliana landsberg
ggccctgaatcatccaaaaaacacttaaggatttttttgttctctcgaactactaaaacacctaaaaagtcaagacttttacctgaagtccacggcggagaggtctgacaggtcctttagcagtatgagatccgagccaaggagtgtgtctccatacaagcttgccattgcagccagcacgaaccttactaccaccaacagcaagctcaacataccacatgtctggattcatctgccaaagaacaaaacctccagtctcagccttagatgggtttcgattcctaacggttcttgtagcagtttcaagctctgaagtaatcatcttgagcttccccatcgcataagcgtttttaatggagttttgtagcttctgaccaccagaagctgcagtgtactgtctgaagaatatactgagcagatgatgtttcctgcaagaaatagtaagaacaaagaagattcagtaaaaatgataaacagtaaaagtgttcaaataaggctcagaagaagaaaccaaagaagaaaaatcaaaactttggtttaatacttcaatggttt

SEQ ID NO: 49201 - DNA, 676 bp, Arabidopsis thaliana landsberg
tcacagacggacgtacgaccactgctcgagccaaaaccggattgtgtatatctaccgagggtacagctctatatccacaatcgactaaaagatggaagaaaacaaaaattaaaaaaactaatcaataataaacaaaatgacatgacacgagactaaacaaaaacccattaaatcgatattaagagactgatatcattgcaacatatgacatgacacgttgaaaatcaggcaatgaacactcacgacttcactttgacacgtgtacatcactcaaccttcacgtggaactacgtcaacaagtgctcccttcttcataaattctagtactcctacaagcttctgcactgtcaactacattcttatccatttgaatcatcatgtcaggcgtgtctcttgcggttggtccaagaaccgacgtggacaaaacggcgtcatccagtgagaagggacggtggtcggggatgacggcgataggaggtggcagtggaggtttgatggggtcgttaagggttatagagctacagctagtcgcgttcatactagttttctcagcaagcggtctcgtaccaatacttgacatgctttttccagcgtttgcgtctatctatataatcgccctctcgcgtttagctttcccttctcacggcgtttccaccgctatcccccaaagtgttcc

SEQ ID NO: 49202 - DNA, 520 bp, Arabidopsis thaliana landsberg
ttctctgtctcctcgtgaagatcgacatgaaaacaaagacaagaatggtggcaaacaaggctccaccagaaactccaagcaagatcgctatacggttctgttttctttgtttcttattgatagggatagtgacttgtggtgtgtcaattgttgaagacacattgttgcatgatattgaagagaacgaaaggcatggatttcccgttatcctgaaaaaaagaagcaattcagtaacatgcacaagaacagaatagtgtagcaaatgccgagacagaaatcgtgtatacctgacttccagacccgttatgttaagagactgtggcaagggacctactaagttattgttttccagattcctgagaagaagtaacataaagattctcttctgtgtgaatatggtatgtacaagctacttcttgatgttaatgtttacttacaggagacgaagtttcttcagctttcctaatgtttcaggaactgatccttgtaagctgttgttttgcaggtcccttcaagaaat

SEQ ID NO: 49203 - DNA, 530 bp, Arabidopsis thaliana landsberg
  unsure (1)..(530): unsure at all n locations
ttcaaaagctcaccctgggctgcgttttaaattgatagctcaatttgtctcattctcatagcatttcttgattccatgagtattccagtttcatcaaccatatttaacccacgtacagttgatatttgtgtttagcaacggggaacgatcccttatgggagacctttttgggcttctctctgcgggctctcatggacttcttacaggttagaaatgattaatctttaaaggtttagagtattagtgtgttggggaggataacctcattgatggcttgtacccttctgatattgacaacacagtgcttcttaagacgtttgccggtgaagaaggagaaggggttgatgtccaacagctgtttggcatcataggattatttacacttgttgctctctggtggcttggtatactaatatcttccattcatttttcccagtgtatcatccgagacacgtaacgtatgagacatggaaccgttgactcttattcaccccgtttgtcttttggttgtctgtttncgtgtggccctt

SEQ ID NO: 49204 - DNA, 672 bp, Arabidopsis thaliana landsberg
  unsure (1)..(672): unsure at all n locations
aagcccttaacattggagaggccagaagacatgaactttgagttttcttaagcatcaaataatgtgatccacttctgacaaatatgaagcatcggaacaaaaggaatataaaagaagactctcaaaaagtcttattgtgatgtaacagttaccatagcacattctgaatcttgattggatcaaagtcaaagacttccccacttgatattctccccagctgcacaatcacacatgttcacaaaannnnnnnnnnnnnnnnnnnnnnnnnnnnnnnnnnnaaaaatatctctttataagcatgttttgactctgtttttgagactttggtataattccgagaatctgaaagtggttttgtttcttcatttcctgatacaaccgcattggtatgtctgaattacgttcaaacatttacaaattcaaaaatcacatgaactctctacctatgccaaatgtaaggtcagagacatcattatttgggcctgtgcacaataaagcctagtaaatagaaatcatgggccaaagaaaacagacaaagcccatttactctcttcactctgcagtcaaacagagcatcttgataaggcctgacatttagtttgcagtgaattccgtgtgcaaaaagatactcgcaccttatttatatatagtaaaagaagctgaaacatcata

SEQ ID NO: 49205 - DNA, 557 bp, Arabidopsis thaliana landsberg
  unsure (1)..(557): unsure at all n locations
tgtctatgaattagtcaaatagttgattcaagggttaaaatcacggttcgctaccaaaatacaattcaagtggtaaataatagtcagtaccacaatcaaacagtagacatcactaaacaagcttacttggtgctggctgacaagctcagtcataacctctatggccacctcaaacgagaaggacaccttcatcggtcacacaacaacaaaacaacgcgtgacancgtgaatgcacaactaattccttgacgtacacttttcagcccttataaggaatcggaggctgcaatgttcgcacctgcagcgagttgaacgcaaaagtgagaagtgggtgcctggcaagcgaggctgccggcgtctctgagaagcacctcacgcggacctacggcattgtcgtttttgtcagcaagcgcgctagagaagaaagcagccgagcgcgaagtangtgcagggcgcgtacttacgtacccagctcagtaggcacggagattctgcggttgcgtcgtcgaggggaacccgtcgtcatcggcgggtccttctcggattgcaggtggagg

SEQ ID NO: 49206 - DNA, 501 bp, Arabidopsis thaliana landsberg
tcgcatttgagcttttgattcttccgatgtttgatgaagcttgattgttggggttttgtatccggtttgatttttctctgttgcgtctcttgatgattgataaaggttcgattttgggatgattctggattttacaaaccctattttactgttctttctacaatttaaacagaaaagtcgtcttttttagtctacaaaatagaaccattggctggtgcaatactaaaaatttcgtcgtttttttggtagatgaatttcctaagtgatacacttctataatcggaccaaccgttctctataaagtcttcacctttccaatttgtaagattcgctaattaatgttgtgaagattagcttagtgagtaactttcttgttgatttggttctagggttaaatactaaacctttattagttcttctcttctgcagacgaatgtttttggtttcgagaatttgctgaaatctattcacggtggtaggttttaagtctttttgattttt

SEQ ID NO: 49207 - DNA, 257 bp, Arabidopsis thaliana landsberg
atatagagatcgatgattcttagacccttttttaccaatgaattgtttaaataggtcccacttcaacacaagtcttccaatattgactatacttcaacatatatatatatatagttttaaatgaactgaaaaacataaataggaaaatgcttactaatgaataagactatgattctggaattacaggggtgcgtttatatcccctttcagttgaactacatgtggttgaatttaaaaagggagatcgggaggtcgac

SEQ ID NO: 49208 - DNA, 605 bp, Arabidopsis thaliana landsberg
gcaaatcactttttctgttttttcttctttcgtaattcctggaggaactgttaataagctttggccttttgttaattattggtttagaaatatgattataagaagaaattaaaaagctcacctgattgagagctagcttaaagttcagaatgatcttgaaggaaagatgatttatactcacattatacggatggtgatacaaaatatacttaaaattaatcttcttaaccttataaacattatatgtcaaaatcaacaaatttcgattagaaaagatgtgggggaaagtgaaaacgtatgcaacaattctttagttaacctattagggagacacttttatgtctcttgtgcatcctttctccaaccccaccggagccaatcatcgactctcctcacgctcctttacccgtcattttcttagatctctacttcttttatcatttctctttgtttgcaatattcgtaactccgaaactattttcgttcgtatttatgaaactaattgtgtatacaaatcatgtatagaaagaagatttttgctgtaagaaattagttatgttctcttgttggttaatgaaaacaagaggggaactaaaagagtataa

SEQ ID NO: 49209 - DNA, 604 bp, Arabidopsis thaliana landsberg
atgaaatttcgttgtcgaaatgatttcattccctagtagaagtgtcatataaattaggaccactgcttgtacattcgtcagaaattaagacctgcacatttataattctgctgacccttttttccaattattgctagatgtacggcctccacatgttttttttttctcatatttttgttaataaatttggacatattgaaatctatactacatctctctagtcagatatatagatcgtccattttagattccattgcggatctcataatcaagttgtttttatcttggccgtattgataggatctcttcaatatcatgaaaaatggtaaaaattgtaacaagtatctccgcaaaatctaattataccttatggtcgcttctttgggatttctacttcgtctatgacgaggtgaattttcagacatcgcaattgtttttgcttgttttgtttaaaatttgggaggtgaaattattttacgaatgtttctgtttagataatgagcaatattttgactgtaaattatatgcgatattttaagaagtgtttagacaatataatataggtataaattatgtccaaatttttctttctaatttttactac

SEQ ID NO: 49210 - DNA, 509 bp, Arabidopsis thaliana landsberg
aatattgaaagattttgagtaaaaagattagattatttacctgggcaaagttggcgaggactagaagtgggaatgtgcctaagatgagaagtgagactctccattctactatgaaagcaactatgaaggatgtgagaagtgaagtcatgttttgtagaattactgagattctctcggctattgcggatttaacatctgctgcatcagtagctaaccgtgcagcgatcaggcttgagttgtgttcatcctcatcgaaccaaccaacttcgtttctcaagatagctatataagaacaatcaagaaaccaaaataagaaatgggaaagaggttttaagcaaattcaggagattttgatacatacctgagagcatcattcttcttactcttgttgtgagattttctcccattatgctaaagaagtaatgttggatcaaataagcacccacagcgtagagaccagcacctatgtagatgaagacatactcttttgttttcctttccattgaatc

SEQ ID NO: 49211 - DNA, 1044 bp, Arabidopsis thaliana landsberg
tttctatatcaaatagtgtagttaaccagaataaaaaggttttattataaaaagtaccaaagaaatggaccgtagtcaccatttacatggttacatggcgcgacacgtagtgtcacttaatgctgcaagtgttttttcctctttgttttttgcctccctgaatattttaaatttgttatataaaatattttctgctgacgagttttagttactctagtttctaaaatggtctagaaaaagttgtggtatataaatataataactcggtaatgggctacgtacagagtcagccacgtaacactaaatggatgtgtcatggacccgtattacactcgccatcattatacacggatcaattgtgtgtacattttacaattaaacataatatttgattaaagaaattttgtttatcaaatctgaaatagctaattcccactagaaaattattcaaaacatagttgactttacataatgattcggggacagaaaaataactatcatggtgttaagtggtttggaaacaagtcaaaacttatttattatcacttatattaactatgacttttagaaaacgaaatacataactatttttctccctgttgagaacttgcattatttgaggggttaaaactacattatcattctctactacatgtatgccacaactagaaagacgaattccaaaaaccaaagaaaataggaaactactcgacctttgttttctaacgtcaatccaccacatgatatttgtggtttttagcgtaataattaagttctaacacaccacatgatttgctaagctaccagtactactttctttgttaggccgtgagaaattgaatattccttcctcttattctgcatattctttgtatttgttttgttacctacctcttctagtgtgtagcctacgtaaatatacactcaagttgttttgatgtaaccggttttctccaccgaaaataatattgtgaccacaagtttacactacatatcaattcctacttattataactacacttattaaatataatgcatgaatag

SEQ ID NO: 49212 - DNA, 905 bp, Arabidopsis thaliana landsberg
  unsure (1)..(905): unsure at all n locations
cgaccattaggtaggtcagaaaatatggatttcgagtctataccttttggtgacctttttatcgcgtcaatcggatttgagagatccttaagataatatgcacaaaagtaactaacgctccaaaacatctaatagaaaaccgtgtgatcattatattaatcttaaaccacaaacatacataattacttaaccatgaaatggtcgaaataaagtgtgattacaaaatttatagcatcttcgaggcagtccactgcttttagatcctttatttctacaatttcagatgtctctttgccacaatctaactcttaattttttcatactgtatatgatagtcatagctattatcaacagttttatttcaaacttgacgaacaatctaaactagataaaaagttaggaaagtcgtaaataccaagcagaattgagataccacttcttggaaaaatcaacagctctatttaatgaaaatattgccaacttatatcgaaatactttggaatatatgagaagtcatagatacgtgtcactttggttgcacttgtaaaacccatccacgccgacgcagcatttgtcaacgcccatctctcgcgtcccacgtttgactcacatgattcctgcttcggtgataagccactcttatttttagtttgcaatttcccgtctgtgagacgngagtgttcttttttttcttctcaatactaaatttattgtattagttttgcttgaaataaaactgataagaatgagttatagcaaccacaaattgttttgggtagattttactttctatactttattggaaacatgaacaattcaagacatagatggtttctaatatagcaccaaaatctatggtttttaattntactaaaaaacaatttcttagaaaaaaaagaacccat

SEQ ID NO: 49213 - DNA, 1134 bp, Arabidopsis thaliana landsberg
tgatatataaaattaaattaaggtaggggtgtatataaatactgcatatataataaatgtgacacaaataactaaaacaaaatattttatgcattttatagataatataataataataatatatacatatatatgtatgtagtttaaaaacgtaggagagagaaataaaagtgcataaattttttagtagaaaagaaaatgtggaacaatcgttgtataaatgacactatcaatgtttgtatagcaaatgaccctttaaattgcgaaaagcataatgagattgagagcaatcgctactaaaccattgatctcatctaccagccataataaccagaaaatcatatttgaattttagatttgatgagtattgctacttattgaatcaatgatgaaataattttacttggttacagagaaacataatcaattaaacatttaaaaaggagagaatgtggtggccaaagaaccaaaccattctcagaacaaaaaaagaggattaatcgtatcacaatatctttatttccatctagatatataattaatcgtatttttgctatgaatttttagttatttttcaacaaatttcaaacaattatgttaaacagccaaaaacacaaacaatcaaatgagagggagataagttttagggggcatattggatatatgttttggatttatttggaaaaaataaaatcttacatttgagagatattttgttttgttgatttaagctaaacataaacagaatcttatataaaaaaattagagagtccgaaattagtttatagcacaaaaacattcagaattctaagatttatgttctaaacatgaacaaaaattgattagtctatagaactaacgtgtccagatacaaccactctcttctttttgtctttcttgaccttctccaacaaaatagaactgatatctttggtgagaaaatttgcttcttcgacaatgattacattattgactaatcgtttgaagtatctcagaagaggtgtagatgtatttttagaagcatccattggaatagtagtcaaaatcttgtccatgatagctttacacttctcatcatgtatcgtcttctaagagcgacgcgtcttagggaatgaagttttaggaatataaacc

SEQ ID NO: 49214 - DNA, 651 bp, Arabidopsis thaliana landsberg
gagcccttttagtttgggatcaaccaataacttagtcggtctctgcgagttccgttaagaaaccacgccgtggtatagagaaagagaggaaagccaaagccgacgacgacgaagatgagagagacggtgaagttgataagcatggaaggtttcgagttcgtcatcgacagagaagccgctatggtttctcagactatccgaagcatgctcacttctccaggtttcttctcctcttttgttgtagagttggtgatcgtaatcaagattctgatctagtcatcttacttggatttgacggattctgagatacttaatctgatttagttgggaattggcctcaatttgagagaaatctagcgagagattatgctcaatcggaaattcaattacgtaatttgaataaagaagcaagtccaaattcataagatcattctcaatttcattatgtagatgctaaatttagtaattctgttgttatttggtatggtaggtggtttctcggaatcgaaagatggcgtagtgactttccctgatataagcaccacaatactagagaagatttgccagtacttctactggtctcttcaatactccaggttccattatctaactcgcttttcacctcttgctcttcattgatctctagaacat

SEQ ID NO: 49215 - DNA, 839 bp, Arabidopsis thaliana landsberg
aactaacattatgcgattaaatcaccaatactaaatcttacttatataatttaatttaaatttatttggctaacttttgtgtgcttcctctaactttattgattgatggatttgtaacgtaaaaacttaacgatccaacaaaagaacacaaaatttaataatctctaattaatgtttacacaaatcataagatgtttaaaaaaaaaaaaaaagaagaagatgagttgaaacagaggcacgtgaagctctgtttaatagcaagtttttattattttttagctctttactatttttgagtctcttttgtcaatgttttaaacataaactcttgtaaatattgtatagcatgataaatcagttaaacatttcatccaaaataataataattgtatggtgttgttaaaaacttccgaaggagctggcgccaaaaactgatcttttcgaacggactagtatacaagaaatcattaacttcctcttctggtaattaattaagtaatcgtatttaattaatcaataaaatgaaattgtcatttttactcatgtcaataatactcaatagtcgtgaaaaaatcaaaccctagattcaagaattaaattaaacaaatgtccttctccgcacgatttcgaaggtattaacaccctaaattaatgtttccactttgttttttttttttgtttttaattttctgattagtaaattttgatgaatgagttccaataaagatagcgactcagagaacagcctccaaagcgagaagaagatcaagaagggtctctctctcttcctcttcaatttttttaattttgaatctcttcgaatatgtgacgacgtgaaa

SEQ ID NO: 49216 - DNA, 640 bp, Arabidopsis thaliana landsberg
gtgatgcgtgtgtgtgtctatgtatatatatatcttcaattttcttacttgtacctcatctctgatctccatgaccgtgtgatactgatgtctcaccttctctcccatatgttatcttcaagttttagtttttcttttttcatctctcttaaattatttagatagagtaaaaactacttggttggaatattggacgttattaaggttagttttatatatctatatactgactatatatacccatataagatactcgtatgatctcttatcatcttttcttctttaaggtccaaaggaattgtttttatctcttgttttgaatttctttagaaataatacttcctaattattaagtacatgttaaaactgacaacattatattattggcatcgttttataattattccatgtcttttgatttataaattttggatccacgtttaggttgctttaacactgtgacgttctcacttccagagcattcgttattattagctagtaacaatgaatacaatttgtagtttagaaaaatacaggtcgatgattatttcttagctagcatataaaacatctatgagattccgaccaaaaagtaatcattacgattctataaattagatttgtttccgttatagattta

SEQ ID NO: 49217 - DNA, 473 bp, Arabidopsis thaliana landsberg
  unsure (1)..(473): unsure at all n locations
ccaagttgtgactttctaactatatatatgcatgcacagttcttattgtttataatagtgaggtattgctttaatgctttgtgagatatgctttaatcattcatggatttgtgagtatttattattactaacttctatatggatgtaggacccgtgtgaattcatcgatcgtattctagatttggatcgtgactggtgtattttctataccaaacttttgtttttgatatgtttttgaattatcgatgtcgtttccgttgaagccacttctaattctactctgcaaacaaaagatggaaaacatttcgcgcaccgatcgaagacctcaacgaggaaaagtacgttttacgtatacagtggaaagtacccatgagctaaaagtcaaagtcgcagctactgcctacagcttggaagtctactctannnnnnnnnnnnnnnnnnnncaaagcactagctagcagcaagcgtacgta

SEQ ID NO: 49218 - DNA, 627 bp, Arabidopsis thaliana landsberg
gtttctcatgctggactcaaacttttataatctctgtgtgcatataggtcaagtggggtatttaaggctctaaaagctgagagatgtggttgttactctcgtggtatttcccccatcagtgagacctcaaaacctatcagggctgtttcggtatcttcttcaacaaagtattatgatttcactgtgattggtagtggagtagcgggtctgcgttatgctttagaagttgcaaagcaaggaacagtcgcagtgattaccaaagatgagcctcatgagagtaacacaaactatgctcaaggtggtgttagtgctgtgttatgccctttggattctgttgaaagtcatatgcgggacactatggtcgctggtgctcatctttgtgatgaagaaaccgtaagagtaagttccctttgttgctgatcattacctcaaaactgtttgataagtgcttgtgttagtctcgtgcataagcattttgtaatggtctaaacctgtctcacttttctgtatctgaatgttctttttcaggttgtgtgtactgaagggcctgaaaggattcgtgaactgattgcaatgggagcatcatttgatcacggcgaggatggaaatttgcatttggccagagag

SEQ ID NO: 49219 - DNA, 626 bp, Arabidopsis thaliana landsberg
  unsure (1)..(626): unsure at all n locations
gcgtntcagtaattaccagcttgcatctcagaagtccattattatttacatatcatcatcacatgctatacacaatcaataccttatgtcaatatctaaaataagtctataatcattaatacttgtatttataccaatagtatatcgtttattaaatattattcatactttatacataaatattccactaggttctgaacttgtagtactactattaataactccgtcaaataactactcaaaagaacctctttatctctctcgttttatgatctctctcgtctatctttcaaagaaacaaaaagaatgagaaagaaagtaagtagtagtggtgacgaaggaaacaatgagtacaagaaaggtttgtggacagtagaagaagacaaaatcctcatggattatgtcaaagctcatggcaaaggtcactggaatcgtattgccaaaaagactggtctctttcctctctatctctctctctaatcgnattgacataatttatgaattctttatcacatgattttcttttacgaatggtttaaagttaagggtctatatatnatatatngttatttagattaacttttaatctatgttgatagagtccatatatcgcaaagcaacttgaa

SEQ ID NO: 49220 - DNA, 770 bp, Arabidopsis thaliana landsberg
  unsure (1)..(770): unsure at all n locations
ttcccacaatttgattgcattttatccatggagaaaattcatttaactctagttaaacttttgggggtggatatttatgacagtggttactgaaattattacttggcacagcgtaatggtaaagaatgggtcgtgttcgccacttcttaggcctttcagttggtctaatacaggtaggttacatgggggctaattgcttttcaccttttagattttaaagcagaacattagtgacattccttataaacctgagtcaacaatcagagaagggatgaaagctgaagagagaaaattcaactatagctgtgatataacatacaccaataactcggtaagtatatcattcatatcgattcttctacttggattaattttttttaatctgtcatctcccaccaacactttttgcatacctcaggagcttggatttgattatctacgagataaccttacttcaaaccgtgaacaacttgttatgagatggtagatcccataaatctattcattccttagtgttgttcaatagtgactgtttatgacgtacaggccaaaaccatttcactttgcaatagttgatgaagtggactcagtcctcattgatgaaggcagaaatcctttgctaattaatggtgaggtaatgcagttcatttcgataagcttagaaagttatttgtctccggggattcagatatttgaattatagtttgaacaatgttaaaaacggnggatgcatcagagtaataaacgataactttgggacacaattcacc

SEQ ID NO: 49221 - DNA, 709 bp, Arabidopsis thaliana landsberg
  unsure (1)..(709): unsure at all n locations
gattaaattttatatttactaaacaaaaatgcttttattttatttaatttaatgtttttagtattagtcctgattggtgcaaaattaatagttattatttgatttaattaaaattttaatatcaatcctaatttgtgcaaaataaatagttcaaaaacaaagagaataaaatgagagttatcttgcacggactccttttgctttttcctttttttttcttgttcagagttcaactgaaactgtttaaattccgaattgaatcgaggaggacttttatggagtttatggctcagagtcaatatgactaaaaaaataagtaactagttttcttaatcataacactttattatagtttaaatgtttacaaaaaggattctacaaggaatcaaccaaaggatgatgatccacattccacacactagctggcctctttgtcacagctccacaactaaaaaaatgcaactactcaatcccgacaacaagaagtaacaaatgatgaacatttcgtaactcaagaatcgtagacaaaataaaaaaaaatcaaatcagattagattagaacataaaccaatctaatcaagtttctcagacagatcaaatgtctttttcctcttcttctgtgtcaatttctttccttggtttttgtgaagtattatatctatagttcttgattccattcngttcgtcctggtttttaagcttaggactc

SEQ ID NO: 49222 - DNA, 591 bp, Arabidopsis thaliana landsberg
cattgagatgaacaaccacaagtgtcaaaataactgaaaaggaaaggttaatgtaatgtattattattaccttgaatttatctctgctttggcagctcgtttagcttgttgtttctgtttcacttgtttgtaaaattcatcttctgatccaccatcattatcaaccatgtcattgttatcaccatcgttatcatcctcatcatctgatgcaaatgccccatttttattcctgccatctccctctgatgacttcacaccagctccagccaaaactctgagctcaaactttctacgccgttctccaatatcatctctttgcggtaaatcatcatctccagaaatagtcttccaaaacataaggtgaaaagattatgaaaaatactagcgtaaaaagtaacaaagacatatctaagtttcacatctgtgatatgttgttaccttgggcttccgtttggtggacacaagcttggtgagcttatcagctgttacattatgtgtgctattgtctgcatcatccacataatcatcgaatgtctctagctttctggttagatgcgaattaagaaaataattatattatacatcacaatc

SEQ ID NO: 49223 - DNA, 702 bp, Arabidopsis thaliana landsberg
tcactatgccacacgtgttgctgtactaatatgacttatagtagttagctatacagattagcattctacatattctatgagtttgaatccgaatctaaaatcctctactcaaagaaaatgagatgttgctcatccgattcattcgaaacttacgtgatcgacacttttgaattgagtattagaaggagaagtcaaaatgtaaacacgattagtatgtctgccacaaataaaaggtaggaagtacattaccattgacattgttgtctcttccattaatatacatcatcccaacctacggctcaaatggtaacaacttggaatctttagagagaataatccggacgcattttatagaagaagaatcaaggtcgttttcaaatgttcaatcacgctaatgttcaagcagtggaagacacatttgacgtctcagtctctttggacaagactttgtgttcgttatatgtttatatccaaccaaaccgccacatgattttgtaattttgttatatgtcataaacaaaaactctcttttatatttgtctgtttcgattaaagatacaaattaaaagatgaccacttaaaacccctcttttctcttccctactaaaatcttgtttttttcataatgataaataatgactcagggtttataataatgttatgactatgtcacatgtatagaatagtaaataaaaaagggct

SEQ ID NO: 49224 - DNA, 783 bp, Arabidopsis thaliana landsberg
acatactgttggggtatcagattcttaacaaatcatgaggatttatagcataatgcatttgttccaccattaatctactaatttactatagtcgggtcacattaaaacgtagtttaatgttaccgaaaatgtgtaaaatattagttggatttaaattgaatggtctacatatattaagggaaaagaagtatctgggtgggatctttggtccacatattagcaacatccaattcaacactttctgatgttcaagacaaacatacacacaagttctcacgcaagatccactacctccattatcacacataattaaattataagacaaactgacccattaaccaatacgtgtgtatgctcatatacgaatgttttaacctgattagcttctttctttcttttttacaacttcacgatagctaattttttttttttttttttttgtcaatcaatcgcaaaaaaaaattagctatcgtgaagttgtaaaaaattcactatttttgtaagaaattccacttttgaaatgagatggaattactacaaatgaagaagaagatgtatctgtttgtgtttggataaatagccgatgctagttctatctattgaagtttattgccgatgagtaggctttggggtataaaatctaactctaggtttagtgctaaaattggtccaccaatgtgtgtttcatttcaagaatcctagaatcaaatcaaagtggtaaaaacggtggttagaaagcaaaactatgagtaagtctaagtttgttaggttagattttgattt

SEQ ID NO: 49225 - DNA, 1032 bp, Arabidopsis thaliana landsberg
atattaaattgtaatgcccaatttctagtttgctcgcgaggtgctttctgttctgtttggatttaaggatagaaaaatgtcagtgaccattgacatttcaatgtctgtgttgcgcagcttatcttgccaatttgaggtttgcacaaatctcttgcatcttaattatctatcgtcttgtgtacatcgagtaacaatttccacagactgctcctttatcttttgctagattggatgactttaggtttctgctagcttctcagttgatgttttactgcaaacttccaatgccttataacagtgttcctttttcaggatgaaagtaatgagaatttaatggagttttttgacctagtcgattattgcgctcacaagtttcgagcagcaggagacatgtactgtgcaaaagtttcaaaaaaattgaatgagatggcagctattttcgtagaggtagttttactctccttggcatgtaaacttgcctcaacttagtcatgaattatcttggtgtatgagttaatttataattgactggttggcaggcaataccccaacttaatttggttcttagactgtattcgaccgggctgtccatcacggtttgcaattccaagctcggagaaattaagctagaagattcaacagatgattggaagattcaagctatgtttgatgatgatgctagatggcaaagcttagtttctttactcggcatggttgatagttactcaggtgatgagggcaatcagactggttcatcatcgattggtgggcataggaactacaacaataaaacacatgatagctgtaaagacaggaacaagattacttgttggccacaatacgtagatgccttgaaattcttgtgccaaccgcttgcagactttatatattctgtgaaaagaaagattgtgctggagacagaaatgtcatgcgcctctgctcatctaattactattcacgatgcctttctccagttttgtgatggctgtctcttccttcagaggtaaggtgatcattatctgtcccttatgc

SEQ ID NO: 49226 - DNA, 684 bp, Arabidopsis thaliana landsberg
ctgatccaaaatcaagattctcttgataaacagaaatatgtatgtttcatcactttgtttatagcaatgagtatagagtccaccaaaaggagtatatatgttcatagatcccatacatgcatgtatgtgctcatatattataatattatgtagtcaacacgtctcgatatgtacatctgtcgatgacatacacatgcctcatatgaaagctactagctttcgtgtggtgtccaaagaagaacaattggagaacttgtcgcacctttttatatacaaaaaaggatgtgacatataactttagggagacggtactaacacaactgtattctcgtctaccaggcaccagcataaccaaaacataacacatttcagggtgagggggatgaataattcgagaattgtgcataggtacattcataaaattaaatcataaacataacacgtttcagggtatacgatgagatgaaacatttattttcaagaaacgcatatcttaatatcatttataaaacttaatagcgtaaaccgaaaacgcaatgtgatcaatcgtccagtgatattttatacgtttaaaagcttaatacaaattaactataaaacaaaaaccatcagttaatcaatatacatatcacaatgatgaaaacagacgaagacgaaaacaaaaaagaagatcaatatacatat

SEQ ID NO: 49227 - DNA, 263 bp, Arabidopsis thaliana landsberg
tgcaagatttcaggtacatcaaaaagagtgcgaagatgatatggaagaaggagtatgagtaactcacaggccgtgcctcggcttcaccactcttcttcccgtcctcagggtcccctaacaatgcatccttcacacctgaaaaacgtttccagtaaaaaagaagaaacagaaatccgagtctggttcagaattattattcacaaaaccgagaaaaccattgcccaggcgtgttgaagaggtgggctcagggtacctgatctggg

SEQ ID NO: 49228 - DNA, 543 bp, Arabidopsis thaliana landsberg
tcttattatggagcaacttgcatgaaaacaaattaagtttcgagtatggaacttgcactggatccaaccattctcaatggtgactccacgaaagctatatatatcaatatatgttatatgtatcagtgcatacatacacaaaacacaagaatataattagtattgggttgtctcaacgaatattagaatagcgtaatcatcgatgttagtagtctcagtttcacgataagaatttttcagcattaatcatcgatgtttagcagtcttaaattggtttcttgttgatcattacatgatgagaaatattatctggatttttatttttttactttaacaaggaaaaagaacgatatgaattttcttttattgttcaaaattagtttcatacttttatatacttttgaattatatagtcaaaaagttctttaaggggtgtgagacaattatggtagaattgtattgttaggacatattagacaagctaagtaaggatgcaacacgtggcagttacaatgatgtagacataattatatcgtacacaaa

SEQ ID NO: 49229 - DNA, 542 bp, Arabidopsis thaliana landsberg
gctggaggcgctgctacatggccctcaaccgtcgtccttcctgtctaggtcgtacgacctcgtgagcgagccgacgctagacaggatccttgtcggccttcttccagccagcaccaccgccccccgtccggccagcgccgcaacctcgtcccctcctccggccagggccgccaccgcctcttctcccatgtccgatggccgcctccaccctggctttgccgctgcaacccttcctcttccctccgcgggtacagccgcctcgctgaccgcgggtgtcgtcgccttccctcccctcagcgcgggcacgggcctccactccgccgccctgcttgtaggcgtcggcacttgccccaccctcatgtccgacgcggcctccttccttgcgcccgccagcacctcggtctccttcgacgatgtggctgcactcccctctttcttgcgccggtgtctggcctgacagagccgccaccctctcctgcgtcaaccgtgcgctgtcttggccccgtgagcacaaacgctgctcttcctcttgccgctgacga

SEQ ID NO: 49230 - DNA, 509 bp, Arabidopsis thaliana landsberg
agagagtctagacgattgctactggcggttctctatgacaaccgccagtagaaatggtttctactggcggttctctatgtcaaccgccagtagaaatggcttctacagtctgtggaagccatttctactagcggttctcgttatcaaccgccagtagaaatggcgcctatataaagggtggcgcgcgggagcgaaaattttacaagtccctggcgccagttcacttgaagacgacgccgtcatgctgctggatttcgcacccgagggttttcgccggcgatcgtccccgcgcccgtccccacgccgccattcccgcccccgcaccgccgtctccaggtttctttctctttcccctaatctgtaccgccgccgtctacgtaccgcgccgggccgccgccgccgccgccgcattttagtaaacctaggcacgcgccgcgccgagatggaggaagagagatgaaggagagggagatggaagagagaggagggagaaggagatggaggagaga

SEQ ID NO: 49231 - DNA, 827 bp, Arabidopsis thaliana landsberg
gtaattgattgatcttgtctgaagttcaaattgccacaaagtttagagtcaagcatttgacgttgtctattatgagtctatcatcagttataagtggtttggctgcagaaccaaatcatatgtaccaaatttctcgttcggtctcttcttttctttcaagtctttattggtaaaaccgcttttgcctgttttctccatctcctgtttcttgtgttgtgtctttctatccagcttctctgttatcagtcttttttctttgccacttcctcgtcccgaccaaattgagatcctttttggcttttaaaaatgaatttccattccccaaatgcaacttgacttactcaaatgcaacgacaaatttgataacgagaccggtgtagtgacgaagctagacctatatggtgcatgtctcagaggctccctcaatgctaatagtagtcttttcagagttcatcacctcaggtatctcgatctcgcttacaaccactttgactcgtcctcattcttcgcccaacttggaagactcaccaactgagaggtcttgcatctaactggtatgggcttagtcggagaaattccatcctcaatcagtagcctaagccgtctttacttccttgagcctttcacaaaacgaactgaccggtagttttccccctttatacaatctaaccaataatcacttttctggaaaccttccttgttctctactcaccatgcctcttgtgtcagagattcatttggaccaaaaaccatcttagctactctcttgaaactatgaattgctcttcatcatcatctctgcttgaacattccttgactatataacc

SEQ ID NO: 49232 - DNA, 121 bp, Arabidopsis thaliana landsberg
ctagccatatttaacgttagatttctttttgcttacttaaagtatttaaatattttttgctcatataacactttattcatttataccctacactcataatatgccctaaacactctaaaga

SEQ ID NO: 49233 - DNA, 1321 bp, Arabidopsis thaliana landsberg
gacattctggtttttaagactccctctaagatccccttccatgtgcaaaatgcctttgattggtgacattagttttctcaaagagtgaacaatatcagtagctgatgattcaacaacctcaaccaaggtaggtatcaaactaacagggaaattcagaacagcaaaatgaagatttgtttttggccccaataaggtcccatctgcgtgcagtgtagcgtttcctttttgaatgagcatctccttaagacgtaaaccatcatcattgttatacgaaccagtagccagaacacgctgtgttttgtaagtcccccactcccaatcatctccatggaagtcaaattcggcctggtattagatgtaagaggaaaacatttaaacaagacatcactagaaattctcacttaaatatctcactcataaaaagttttttctaaagacaattgcacccgtctccttggacacgaaagcttatgaaaaccaatttggagtgtcctttagatgatgacaaccttaaccctttattttaaaaacgagatgacagggttatttttataccaaagtgtctccattgcctccaccactagcatcaagcgaaccatgccaatgacccttgagctcagctaaacctggaagacttagatcttcaagaacgacttcacttggtggagtataatacccacgtatctcctgattttaaggaaccatataatttagcataggaaagaactaaaggcgagcttaatggtgtctacacaggtttttttgttcttattatagaatctgctttctgtattagaagcctgttagctacttcgaaaggacagaaggcataatatttaatacattacctcaagcaagtctcgaagattttcagcttgtagacagagattttgaacgctttggatgaaaagatcctgccataccaaccaagaaacccaaacagtcagaggcatccagctcaaagaggagatgagaacatatttttggagtacacgaacatgaaaatgctctagcaggtgtttttcttgaaccaacattttagaacatggctaatcacaatataagcatatgatttagcaataacctttgatcttgagtgaacagctggatctgtacttcttgaaagaagccttgcaagaggaagcatctcagcaacctctgccttaggcacttcaagtctcattctccatcttcccatggaggatataacacttcctagatgaccagtcatggctctcattaaaaaactgccagcttccttctgaccaaggtctcgggcacgggaaccccgcaatacatattcaccttgaagctcataccg

SEQ ID NO: 49234 - DNA, 480 bp, Arabidopsis thaliana landsberg
gattaaggatctgatcacacaacgagccagctattaaatctattgttcttccaatacattttagtctaaagacaacaaatataagtaggaacatatggattaatccctaggccacgggctcagtggatcgaggcttgtatccgcccagccacttatcataaatttacactcacaggtcacaaaatcacagaatcaacaaagaacttaagcaacaaaaccaatagagaagacatacaacagaaaatttaataattgagttgtcttatgtaatgctcttatttaaaatctttataggtaaaactcagacttatgataaatcttataaagaaaaaagagtgcaaccaccttataaattaagacttataaaccattgtttaacacataaacaagtctcacaacttcacaatcacaaactctcgatcttagtcactcatggatcattcactaactcagacttcacacacagtccttcagtcccac

SEQ ID NO: 49235 - DNA, 719 bp, Arabidopsis thaliana landsberg
  unsure (1)..(719): unsure at all n locations
gataaaaaaggtacagctacaacataaatttaaaggtattcttttgcatcaacgtctactgactaaaaatacttgtttattgtataatgactctagttttacttttaacaacgaagagaaaggtggcagaatttttttaatattccaatggtaaaaaagcatcgtaaaaggaagcctatggtcagagtctcattgacacatcggtctcgcttgtaatacgtaaaactcagcctatctcactcacattacttttttcgaaattttaattcatatatcggtttccgcatatatttaacttttgtattcaaagcttattaaaaaatcgggaaaaatctaaacatcataagcaaaacaaatccgatcaatatgtttaaattctgtaatacaagaacaatataaacaaaaacatattattcagaaagcaatgatacattatttgaatattgtgtgtaagagtgaacgacaagatcatacgtcagagataatcgactggtaacaactctgatcttttccaacttttggtcaaagtcaaaccatttggtcatttttacagtaaattattgagtaatatgtcatttactcatttcttttgaggaaaactctntttttatcagaaaacaaaaacaaattacttatttttgttntgggctcaagacaaaagttctttttttaaaaatattagcccaggtaatctatacaggccccattaagcccatact

SEQ ID NO: 49236 - DNA, 1002 bp, Arabidopsis thaliana landsberg
aaaagaatgtctattgcggatccttcatcgtcttcacttatcaactttctaatgtaactgaaacattttattgtggattcttggtggatgctaaggagatatgtgaagtattgaccgaaaatacagtgagattgtttttcttttacatatgattttcatgtttgagtactactccatatgaattgaagaacgtcatttataacctaatagattattgtgactgttgtaaaatactaaagttttttttcaggaactgaaaatgtgctaggcatgtctttcaacacatcagaaatcgatgagtgtaatctcagaaatcgattgtttgtaaatggacaatcgttcaaaggaatgcgtaatctcacatttctaaaattttacaaggagtggtcgatcgcgagagactggtgaaagcagattgtgtttacctcagggattcatttaattggcccggaaactcagattgctatatatattgggatgaatatccgttgacgagtatctgtttcaattttagggctgaaattttgattaaactcacaatggagaatagcaagtttgaaaagttgtgggaaagtccaggtactacttttgtgtttttatttattagtcttcaatggtttaacttagttctttattagagcattatttacttcttattctgtccaatttataaatatcccaaagagtcaaatgtgatttattttataaaaaaaaattgagtgcaagtacttactatctttctcgccattatgtatcagccaaacttatcttcttgagacttcgaagttggttagaatatgaatatcaataatacaagttggttaggtatcaaaaacaacttcacacccttaaaactcaaactacacaaaagaaaaaaatataaaattttaataccgggttcgtatctgcatgagtgttcatgtaacttttttttttttttttaatgttgatggaaaaaaagcaaaaaacttcttattcaaaattcaatttgtttttctttat

SEQ ID NO: 49237 - DNA, 980 bp, Arabidopsis thaliana landsberg
aatgaataataattaaagactatatctcgcactggaacaaaaggcactgcatattgaaaagggccttttaccttcagtagcttccaacattcccagaagtactgtagaaacttttcctcagatatatccaagctgaaaagcgaaacaacattcaaattcgtctcttgcttgttcatataacattgaacatcaatatattgatgaacttacccatctattcggaatctttccctcacatcaatcaagtgaggagatgtaaacattccggttcgaaacccacaattacgtaaaattgcctcactgaagacacatgttgaaccctgaaatacaaaaattacaaagccagaacccaagaaaatcagtagctacttatagatattctagtcatcaaaattacttccataccgcataagctataattatgggacactggaattccagactttagaaatcggaattgcaggctcagacatgcattagatggtaccatcaaatataatgattaatcagcatatattgttaaccatcgagtgatctgatttttctgttaagtgctaattgctcgaaattggaaacaacagcatctcacataagtgctacattccttctactgacttatttttcacgttacattttaaatcttaggacctgcgctaaagtgaaacagcaacttacctttccttttgttcctgcgacatgaataacttttagttcttttattttgtcttccaggtccaaaatctgtatttctcaaaccaaaacagcagacaaattcacagtattaaggtaaaagtcttcaacggaaaggataaaacaaattgacttgaatcacaacactccagaattctcaatggccagaggcaacataagtcattgatctctcaacagagaaggcccagataagctcagtctaaagagaagaaaaatctaccaaattccatgatcatttgagacagtcaagatgagtatcttacatcatg

SEQ ID NO: 49238 - DNA, 415 bp, Arabidopsis thaliana landsberg
ttttttttttttttttttttttttttttttttttttttttttcttttttttttttttttttttttttttttttttttttctttttattttttttttttttttttttcttttttttttttttttttttttatttttttatttttttttttttttttttttttttttttttttttttttttttattgctttcttcagtttgtctgcttttcattttttttttttaattttcttttttttctttatgttatttgttttgttttctgtttttttttttttttttcttttttttttttttttttttgttttttttttttttttattttttattcctatttatttttattttattgttttttgttttttatatttgttttgtttttttttttatttttttttttttttttttatttttttt

SEQ ID NO: 49239 - DNA, 501 bp, Arabidopsis thaliana landsberg
agttcttggtcttcaagctgtgatttgagtttcaagttcttttctttggtgttggttggaatttggttactgctcttatgtgtttggttcttgttctttgtttttggtggttcttgtgtacttggccttggagatgattcttgcgtttctctatacactagtttgattatgcgttgtctgcattttgtgggaaagcttgatccttttagaccaaaagtaactatgtccttgttagctctgagaagtgtgtatgagattagatgatctatctggtctgagggagctaatgcattcatttgattttgatgctgcagttgaatctacagcaagaaattaaagttggagcttcactttgagtgaaaccaaaatggatatcgggttgagaatttttgtcgttttcgtgcttcttgctgctgtgacagcagaagtccatcttgtgactatggaaggagatccaatcaaaagaaacaaaggtggcgaaaatggttttgaagcaacccc

SEQ ID NO: 49240 - DNA, 799 bp, Arabidopsis thaliana landsberg
  unsure (1)..(799): unsure at all n locations
gattcgatctgaaccaaaatacatattccaagccatattttaatatatggttcaaatggatgtgtgcagatttttaaagatctaatagatgtacgcttcataatgcttaatataggggaaagtatatggtttagtgtgaggttttatcctcaatcagccaactcacacatttctcttattatccgnnnnnnnnnnnnnnnnnnnnnnnnnngaagaaaaattactgagaaaactaattaaagacgagttatctaaaggggaagagaaaacataacaaagctgtgtaatagaatcgaccttaatatatcctcctgtgtcttccacnnnnnnnnnnnnnnnnnagacttgagacttgagagtaaaccctatatatctattatctgtatccgaaaggcttcgagacactcctacttaatcggatcggagtctccttcacactaagcacataaaccttcaaatctccaattacatcgttatcaaacttgtactatatatttcccctagtgctctagttgtctttaaatatgagcatcccaatgctctttattttttaaaaaattggagttgggcttataagttatactatatgagaaggagaaacggttctgaaatgagaaacatttatcatgtcatttagctagtgattcaactattagaaaataaaaaataaaaaaataattatataatcaaacgtttattctgttttcctttgagagactcttattaaatggacgtgttttaagagattgtgtgatatctcacaccaatcatatttatagatatatagctctatatatat

SEQ ID NO: 49241 - DNA, 1047 bp, Arabidopsis thaliana landsberg
aacaaatcatggagagaaatcgcgatttgggtgttcacgtttttgcttcatgatctcgcctcgacaaggcagctaggagatttttatccaagatcgcctcggatccgatattcttagattctgccattattattatgtgagggagggaatattcataaagaaaattgtggagtatctaaataaattgttggaagcatccttttttttttttcattgaacgcaccctttttttttatggacttggcagatttggtaaaaataagagttctagtttcgaaaattcaactgcacctatattaacttaatttatatcaaacttaacccattaaacctaaccaagctctatgctcgagataagattccacaacatttcaagtattcataccggagaaatgtactatagggttaaaatacggaacgcggaaagcaagctctttaactttaaaataacattaaacctaagtaaccacttcatggtggaataatgtttacatgattcattctataaattgatttgagtctcttcaatgcgatttgataacttaaaatatcttaatcgccaagaatactagtttttctacagatagcaagagaccaaatctaatcattcaaatgaaaataacactctaaaacctacaaaaacacttcttataactgtaaaaatatattgcaatctacctagatgacacaattctagatgcccccatgaacatgatcaacttttctatgtttcatatttatttattcctcagtaaaaatatattgcaatctacctagatgacacaattctagatgcccccatgaacatgatcaacttttctatgtttcatatttatttattcctcagtgattgcctccctgggtttgtagtgggtcgggccgagtaaaaattggccgatgttaacaatcatatccatatctgtatttgcaactccaagatttatcctccacttattttcgtatcatgacattttatgcgacaactcttattttgaatcatgattcttaaagattacagacaggaccggcatttgaagtccacatata

SEQ ID NO: 49242 - DNA, 800 bp, Arabidopsis thaliana landsberg
ttatgcaaaaactaaatttttataattttgtgactcttcagtctttattttctgcagtaattttttttttattggcctctctctttaactaaatatcaaattatgtttttaatgtgaaaagtatataaaaaaaagaattgattattttctaaatttttttgcttttaggcaaaacaatctaatatagaacatagtgagtattgtttttctcaacggatctattggttctataagaccattcttttgattagctaatcagagtatatcatattaaaaggctgtaagatttccagctattaagaatcgacttcagcactatactattactatctctctttcattttacttgatgtttaagatttttacatacaaattaagaaaacacataacttttatttagtttatctatttacataaaaaaatcattaaatcaaatgaattcaaccaattatattagaaacatactgaaaacattattgttcaaaaagattaaatacatttattttttgtatagaaagttaaaatatcactcaaaatgaaacaattttattttctttctaaaacatcacttaaaatgatacaaaggaattttaacttcttaatacttttaatggtggggggggttgtacttagttttacttgtaaaaaagctgtaagatttaaagctattattttttacgttttatattaaattatttcgataactataatgtgacaacttataattggctcactaaaactctatcatatatattaaaaatacattgtgcaatatagatcgagcttcgtcgacttttttt

SEQ ID NO: 49243 - DNA, 1012 bp, Arabidopsis thaliana landsberg
tccaatggaaaaaataacatttatttttttttgtaaatcaataaatttgttcatataaaaaaaattttatttattaattgctaatgattaaaataattaaaaattcaatgttgaaacgtatcaatatttggtatgttatgagatatgcatactcacgacatggtaaatgttgcaacgtatcgtaatatgcatattaaaacggggcaagtccgtctagtccttttcactcagcgttagacacattcgtttattctatgttttgtttgggagagaataatgaagtttcaatcgccgatccatacaaactattaagagccaggaaagcaaatcttggctccatgagattggcgagcttttctgacgcacctagattcttttgtaagagaggtttttttcctctctctatcttccattcacatttgttttaatattgaaaccgacagtttgaaccgtataggttattcttaaatattatctgtcaagattcaagaacaaaatagctcgatagtaatttttgatgatctatacattgcaaaacatggaacagcaatcgttataataaacaagttattatgaaaatgactataaacttactcacatatctatagtgactaaaatactgaaatacaagatggctaaattgttaatgttcgtataatctgctcttaccgtcttacgtgcatgcaaacataataataataataaaaaccagacagaagactgatcgttcaacccgcggagagatcatatcacttaatacataaacagaaaataaccaaatctagttttgtttagacgactttagagaaatggaaaaagcaaatgagagtaaatacgacctaggcaaatgggagtacaatagaaaagtgaaaagccatatatgatatattgaacctcagtattcaaataagacttatggtagaaacagctaagatgatagcaagagaaagccccaacttcttcaatacgaaactatcttgaaaccgaaaaccttgttcgtcaaccatatttt

SEQ ID NO: 49244 - DNA, 591 bp, Arabidopsis thaliana landsberg
ggtgggttaataggcaaagacaaccacaacaaaagctctatttgtttggcttgtcatgtaaatacccaaaataaaaaactttttcttcttcactcttttgttagagagagctagagaaaagtgtttagactatgagacaagacagttgataggataaacaaaattagtatataatatttgattgataggtttaataaattgttactttatgtgatataaaaattatgtaagtcagaaaacaaagagagaaagcactgcaagatgcagatggagagatagtaacctgcagtgtttatgtctcactgccttggaaatatcacttcctttttttacctcattttaatattccttaagtaggttaaagagatgcctattatgatattgttattatgtttttttattaaggattcatttaatgtgatgtagagtaaccttcaatttttgtcttacagatgtcatttgtctcagagattgtgttacaaatgtatgagattctaacttctaagcatgattaatcatttgggttttgactaaatagtctccatttgcagagagctacaatacaatctcagctctatttacactctttgg

SEQ ID NO: 49245 - DNA, 850 bp, Arabidopsis thaliana landsberg
tttaaacggtccatttttcacatttattacaaacaccaaaaaaaaaagtgaaaaaaatctaacgtaggagaagaaaattggtaaagcaccatcaagcaacgtcatgaataaataaataaaaactctttacaataaattatgtctgcctgtttcaatttaccaaacttcttttgattaaaatctttggaaccaaattaaattttaattacacgaaaatgtgtttgtaagaaaagatagtatcattcatcacatgtaatctctacgcctcttaatcctctcttccctcatccactgcttctttttttaataacccatttcatctctttccccttttacgctcttttctttcttcattttctgtggaaattttcagagcttttctgtgtaaattaaagagttcttttttgaaggaaataggcaatctcatcctgagaatcaaacaaccggaaaattcaataaatgaaacgcctttaattgttttttcttacaaaacttctaagcagattactttggcggagacccatctgattggtatttttgcaggtacacagtttctttcattctctgtctttgttttgtttactttctctaccgctcgacgatcggtcttgaatctatttcatttactggatcgtttttttttatgtggaaatggcttttggtttaatgtgttgattcaattgcaatagctgcgaatctaaaggatcgggattctctaaccttagggactctttctttatgattggagcctctctagtgcttaactgttttttgcttgtgatgaatcggaatgtataaagatgcaatcttggaattcgctttagttatctggagctacaatccctctttt

SEQ ID NO: 49246 - DNA, 520 bp, Arabidopsis thaliana landsberg
gtgggagcatgatagtgcctttcgcctctcgagtactggatgacatggaatgtgctggcatgctttataatcatataagcttttattagctcgaggggtagcagaacgtgtgggtgtgccatagccggagagaaagcctgtacaggcgggaaacgaggacacgatgacataaattgttgtagccagttcaatactgagaagagattttcttttttaggtacttcaaactacacatccttgagaatatactgcaaaggttacctgtatacagccagaccttgggtaaaatgacggacaagcacgattctgcccatgttgaagcaatttctgataaccccaaagcgcccgtagcattgtcttcttcgctttattttgcatcgcaggatacagactggcaccgccaaagcacaaaaaggcttctttggaaaattgacttgcatctcttgccatggatagtattgatgtatttgaccaactttctggaccgcaagtaagtcggcaaagaaatctactctatgat

SEQ ID NO: 49247 - DNA, 978 bp, Arabidopsis thaliana landsberg
ctcttccacagtcggcttggtcactccaccatcccaactactaatcttttcttaatttcattgtttccacatcactcaatatggcttctaaagcgttattgttatttgttatgctcacctttctattggtaattgaaatggaagggaggatacttcgggtgaattcaaagactaaagatggtgagagcaacgatcttttgaaacggttaggttacaatgtttctgaactaaagcgtattggccgagagctttccgtccaaaacgaagtagataggttttctccaggagggcctgaccctcaacatcactcttatcctctgtcttcaaaacctagaatttgactagagtttgtgttgctcccttgccaagtattattatttcatgttaaatattgtagacttctgaagtcaatgtgatgtttgaaaaatcgtataagctgtaagattgaggttctcctgaagtgtacttgtaattaaattcaatgacttgagccaatattttgttttcttcatcaagcgaatgaccacctccgataaacgcatgcatgatattatattttataaggattttggttaaaaaaaaatatatattctcagctcttacagctatcatattactaaaacaatagttttacacacggaagtaatacaaaattatatgaaataaaattagatcatacaatgatttaaaaagtgtttaattaccaccaataaaccattttttatcctcaaagcctaacaatgacattgcgtccaacatcatcaagttatcctactttgaacatacctgactacatttaatttccacactcgcccttctgatatttttagttggtatctctaacgccaataaaagcctaattaaaatacatcatccactagatttacttgacctataatttcacgcaacatgttttcttcatagttataaagttatatggtgctgaaagagtttacccacgaactgagtatctaagag

SEQ ID NO: 49248 - DNA, 948 bp, Arabidopsis thaliana landsberg
atccacaaaacaatgaagttgaaattttgtataaaaatgttagattaataactagagcgcgtgatcgtggtaacgatctttatgaactagaaagatacactgaagcaagatcagcttatgcagaaggccttaagtatgatccatccaatgctactctgttatgttacagagcagattgtttctttaaggttggaatgtgggagagctcaatagaagattgtaaccatgcattgcttatactaccgagttacacaaagcctcgtcttcaaagagctgctttatataccaaggtaaaatatatatggtatgatgacttagttttgcatttcacttgcgctaagtttctttttgatgaaactgtagttggaaagatgggctgaagcagtgagtgattatgagatcttaagaaaggaactgccttatgacaaggaaattgctgaatctttatttcatgctcaagttgcattaaagaaatctcgcggcgaagtagttctaaacatggaatttggaggtgaagttgaggaaatatctagtcttgaagagttaaaagctgcattaactcgtcctggtaagtgatatcttaatcttctatgctcttatagtcagtgaactttcattattaacttgttgtacatatacttcattggcaggagtttcagttgtacacttttttagagcttctgatccacaatgcaaggagatatccactttcgtggacgcactatgtgttcgttacccatctttgcatttcctcaaggtgaaaaaacaaaaactttgaaacaactgtttatatgtaaaccaaagaacaagtaaacttacttgtgaaattgtctttcaacaggtggagattgtaaaatgtccagaagtgggtaatgcagaaagagtgagagttgtgccaacatttaagatatacaaacttgggattcggatgaaagagattgtgtgtgc

SEQ ID NO: 49249 - DNA, 503 bp, Arabidopsis thaliana landsberg
tcccgttggggatattaaagcttgtattctagttcagttagagaatcatcgagattgtgcggcacaagaatcttcgattcagagagtacgattaaattttaaggtaaggggctttatgggaatttgtaaaacaaggcatgagttcgtctttattgctcagaagaagccagagactatctcttgtggagcaaagaatatgattgaaggatcctatgagtgaaccaaattgttttgtgtcttgaagcttcaagggggtttatagggtttatcaaggattcactaattgtgttattgcttcttctgttttgttatcagggaatcacccaattgtgtaatgtaagttctcttcttttacgggttccttcaatttctcatctttggaaacaaagtttgttctttttgggattttactgagattttctgtttcaattctgctttaattttcttttgcagggggattgttttggaacctccttggcctaaaagtattgatgggattagca

SEQ ID NO: 49250 - DNA, 457 bp, Arabidopsis thaliana landsberg
agacgactattatgtttttgttttcacttttaaatttgactttgtataatgtgataggttgaaattgaccaattgacgtaacttggtggtgaaatcaaatgatttgtttctggagtactatatgtttcctttttggtttatacaaatatcttaagttttttatcaaaaaaaaaaatgtaaaagaaagtggttttagctatcttgaaaatcaatcataattagtagttgatcattgcataattgaaatattcgaggattagaaaatacgttttcatggcaagttgatgtgtacattaccgtcaaatcaaatataacgtggatttagaaaataaatagaaaccattgtcagtgcatgcggttcacgtggacgatgttaaatccaggattgtgtttttgctttcaagtcaggtctcatagttgatgggactgaacttagctagctgtaaattgacttttt

SEQ ID NO: 49251 - DNA, 1890 bp, Arabidopsis thaliana landsberg
atatttgggctcaggctcactcagtcataatgggcctttaaacggcccatactaagtcagaacaaagagcaagtaatctcaaaatgtcatcttcttcaaagaaagcaaaagaacaaaaacaaaaaatggaaaaagaataagtttcctttaaatttccccaatatcaaaaatggaagtcttactcaacaacgcacttcttttataaccgtttgacgtgtaagtggtccgcgcactaatctctctctccctctctttcttcttcttccacaaatggcttcttgcgtcaccggaacagaggcagcaatcagagcagcggcatgtagagacggcgaagaagcctctcatctaaagatagtcgccgtcttcgccatctttctcacaagcgttttcggagtttggggaccagttttactcgctaaatactttcatggtaaacctctgtacgataaagcaattcttgtgataaagtgtttcgccgccggcgtgattctctcgacgtctttagtccacgttttaccggaagcgtttgagtcactcgctgattgccaagtgtcgtcacgtcatccatggaaagattttccgtttgctggtttagttacgatgatcggagctataacggctttgttggttgatttaacggcgagtgaacatatgggacacggtggtggtggtggtggtgacggagggatggagtatatgccggtgggtaaggcggttggagggttagaaatgaaagaaggaaagtgtggggctgatttggaaatacaagaaaatagtgaggaggaaattgtgaagatgaaacaaagattagtgtcacaagttcttgaaatagggattatatttcattcggtgataattggagtaacaatgggaatgtcacaaaataagtgtaccattagacctttgattgctgcactttcttttcatcagatttttgaaggtttgggtcttggtggttgcattgctcaggtttgtttctttcttcatttctttttattttcggtaaactagttctcacaaatttaattagtgttgaattagttaggagagaataataaatactatgagaaaaaactagttggttctgactttagacataataatattttaagaaacctagaagaagtaatagtaatatgtagatgttgacatttttgcatatcatagaatgtgacattctaatttagagcagctcatggaccatatcaaaaccataccaataatccaaaaaaccgaaccaatataacattttgtgagtttcattgatagttttttggtccttaggataaaacttaggattgatgagtggtattgtttgatggtcaggctgggtttaaggcagggacagtggtgtatatgtgcttaatgttcgcggtaacaacgccactcgggattgtactagggatggtgatatttgcagcgaccgggtacgatgatcagaacccgaacgcattgataatggagggtttattgggatcattctcttcaggtattctaatatacatgggggtggttgacctaattgcaggggatttcttccataacaagatgctgacgacttgcggtgaatcgggctctcgcctcaagaagctttgctttgcggctttggttttaggttctgcctctatgtcactacttgctctttgggcttagacaaaaagaatttaaggctatatactaatttggccacaggaaatagtatgaatacctaaacctgttttaacatattcgaactttgcgttactttataaatatatctaattatcatttcttcattttccttcattaactgtaagtatatctacacattaaacttctctgctaaaacaactgaaaatgaacttagagctctctcatatactgtactactactaaaaactgtactgatct

SEQ ID NO: 49252 - DNA, 1349 bp, Arabidopsis thaliana landsberg
aatttgctaatatacttcccattgtttctaatctctttttttatgatatttctgtgcatttctaactttaaaaaaaaaaatgagaatagggttgggtcgtatagctgggattgtatctctcgaagtagaaggtgaaaatactcaactagaggctattcagcgtgtaggctcagaactggctatgcatgttgtagcagcaaagcctttgtttttaagcaaagaccttgtttcttctgaagcaatggcaaatgaacgcgagattctaaagtctcaggttagtgtcactttatgttatgaaattgaactgtaatttgtaaaaagtacacaacctgcgttagaaaagtttgcttatcaaatgttgtatatgacaggcagaaagtacaggcaagaatcagatggcgatagagaagattgtggaagggcgtctccgtaagtattttgaagaagttgctctaatggagcaaaagtttattgtgaacgatgctataaacattaaggtatgtgggtcttagcttaaaacacctagtttaccgttttattacctctgcatcgcttgttgaattcaactcttgggctcctattccacagacactggtggataatttgtccaaggaggtaggttctccagtgaaggttaccgattttcttagagtcgaggttggggaaggaatcgaaaggtaaactaaccgtcacccgtatgtccagtacggcttatcattgttgtaagattagtcgcttatgaattttgttttttttgaaggcttgaagcatctgatgaaccagttgctcaaactgcttgaagacaaagaatcaacgacatggttttagatttacagaactctttccttctttggttcctttagagttcatggcttcaacgccttcttgagattatagaatctttctcatgattttgtttctcacacaatatggcaataagagtgattgtgcctaggaagctatgaccagaaaaaaaaaccatgtttgtgttctcctactcctactaagatcattatacaaaaaccttcacttatgtgtttgattttaaggtactcaagtatttgaataagcagatagtgagttcttggctcctccggttaccaacggtcgaaattgacggtttaatataattcatagacaaaaccggtcaactttatattatccacaatcaacgatcaagatcaacgagaaataatcttacggttgatatcatacatctgtattgagttacagtacaccacaaaacactcaataaacactaagcactcttcttctaccttttgattttcgaaaaacgcaaactttctgaaaaagcaaaaacttttgattctctcgagaatcatttactc

SEQ ID NO: 49253 - DNA, 482 bp, Arabidopsis thaliana landsberg
aaatatataggttaaccaagggtaattaaattcaaataagaatattttatataatctcttatttgagtaacaaaatgagttttactacattacctaaaatagaattttggagtgttataccgtccgtcccaatgcaagatgacaaagtccgtccatttatgtaaaaaaacctgcacggcctgacaaccgctacagtagtgcttgcgctatcaactgtgaaagctaaatctgttcacgacgggcacttttcagtgatgtgaaataattttgggaacagtttcatggcctaatctatttcagaccggccgatgaaggataaaatgttcgtagacggcaaatatcgaaatggccaaacctcacccaccattcggccggccggcggcaaacatggtcgagcaaacgtatcgcgcctgtgtgttggaaagtttgcaagagagcatctactctctctgttcgaaagtttgcaagaacaagcgtacgac

SEQ ID NO: 49254 - DNA, 413 bp, Arabidopsis thaliana landsberg
agtcaataaggtaggataaatggacacatggaaacctcaatctctattataggtatagtagtgacatcgtatttatggcaattcgacaattgtttatgtctttctgtcggacgtaacggttttaagaatcgagaaaactttcttgatttagggtccttgcatctatcattcgtgtttgcctttttgagacgaatcatgtgcatgcgagtcagatgatctgacaactgacaaacagagaatccgatgtttaaatattcagtttccgcaaaatttggagatgacttatgaaactcataactcttgaccgatcaattttaacgtgtcctattgaataccgttgtcgttattaattaatggttggataaatgaacacatggaaaccctaatctctattataggtataaagtgccatc

SEQ ID NO: 49255 - DNA, 778 bp, Arabidopsis thaliana landsberg
tgtctgggcaacaaaggttgtctgatattattgcccttgaggtccagacagatgaaccgtctgataaccttcaatgctgtgactagggaatggaccaaggtccctggctgcaccgttcctcgcgggaggaaaagactttggatcgcttgcggaacagcgtttcatccctcccctacagctagggcttgatcatcttttctcctggtacaatttccttggccagctttgaggttgtattcgaacggttcacacacggttggtttctttttgttgttttatttcggttttgattttcgagactgtaatatacaaaacgttctgtattgtaataaataactttgggttgtgtggaacttcttaaacctgtgagcaaagtttcataaaaagtacacaagtccagaaggaactatttaacactttttgtatttgacggaccaagtgaacagaagcataacaacaacagcatctaacttgaagaacatacttaagcgttggatacttggattataaaaaactcaaataatcttcattacatgatatagtaaacagaaagttgacacattctacagtataaggagagaaaaagaaaggagacagaagaagattctacattttgaaaactgcttcttctagcttgactgtgttttggtttatgccatgcctccgctagttgcagtcctaatgatctgaaagagagcaaaaacaaatcatgtagaaggttaacaaatatagtaacatacgcatacacgaagtataatcaaaagattcagattggtta

SEQ ID NO: 49256 - DNA, 915 bp, Arabidopsis thaliana landsberg
aaatttaaggtctgttttatcatcatttgcatgtatgctgaattttattctatgataaactcaagaattagacttaattacgtcggaaagaaaattagactaaattacgtaaaaatatgtatatattggtgatataactagtcccggctaataaacatttcatcttgctttttcaaacgctagatattataatatatgtcaaatgttttttaaaaaatggggtttgctgaaatgtctaaatacgttatcagccaatggtttttctttttaaacttcatttttgtcctcggaccgggtaaaaacaaatactcatcatcaatcctaaagcgttttgaacttaaaaccatctttcatataaatatttatggattatcaaccaatctatggtaattaacttatgtttttttccttctattagctaaagatcagaacaagaaaattaatcccttccccgctgtaaaaacacatctgtttgtatacacagtagattttctcctccccacaggtcaaaatatacttgtttgtataagtatttgacggcatttaatttgtttgtataatgatgtttgggcatccatatcaacataatatatatattggtaactatataattaaatgtgtaatgcagtcatgcagtttatgcctttgcatgaagacaatagtaataaggacgcaacgttttaaaagattgatcgagacgtcaggcccgagagctcagtttgagacagttgtctactataagatctttccttgcatttgtggcccaaaatatataactcgctttttttaatgcaaaatttaattttcaagtaaatttagttgattaattacaaattgcaaagaaaatttagggattagatactaaattaatacccctacattattccccccaaaatagaataaacattttttttt

SEQ ID NO: 49257 - DNA, 561 bp, Arabidopsis thaliana landsberg
  unsure (1)..(561): unsure at all n locations
taatacaaagatttgttaattaacctaagtaatcttggtagtcatgtcctctaatttccaaaccggagacaaaaccggtgagaagatcgctacaaaaattaccaatctctaacaaaattatttaaattaaaaatctccataaacttatttttccctctctgtaattttggataggtttttaatacggtcaaacgcattttttttacttctactaatcaagcacatttgaccatttccggttttggttcaaaccggaaaacgcacgatttcaatttgactgattcgcacgtgtcgtgtgggaatagcacgtggagaatagcaaaaggtcagggggagggaagatagagagatatgttaccgtcacttgcggttgacagatgacggagccggattttccttcaccggccatccatcgtttatagccactgacccacaacaacaccattaaccctttttgcttctgactccaatagtgaagtaaatttccaaacttttgngngcccgcaccgacgtgaagactctttcggtggtgtgttgtgttgtgacttgtgaggtcttctt

SEQ ID NO: 49258 - DNA, 835 bp, Arabidopsis thaliana landsberg
aagagtccaccgcctctataaatataaagtaaataattattgtacaacgttgcaacaaggagaagaaacccggagagcatatctcgtattctttgtaatggtcgaaaaagtatccatcaagcatgaaatcaaccacaatcctaaacctgaagacgcaggaagaatcaaagtctatgtgagtatcctaatgtcggaagatcctataagagattgtcgaccaatactaacattctcattgcctgccaaagaatttcgggatagcttcacgaggtatagatgggaacaactgaattgattagaggacgatgaacgtatcgatgtctctcaggttgatttagtgaggagggaactcagtagacttgtcacccacctcatgttatacttgcataactatcaagcttgtgctctgtcaatttatattacctttaagttcattagtcgtcctcgtgttaggattcttgaacagtgtgtactatcggaaatgacgacgacgtcgagaatattcgaagacgaaaaggatatgtggctcccagtcgatgagagcgtaatgcgcatcgaagagcctaactggaacatctttcacttgtagaaaaggaaacacaacaaaagtgttaatctccttattgctatagaatttagatttgtttcttttcccttttttttttttgttttggtgttatgttttcttataaataaggctgaagctcgtttgtgaacttcatccaagagtttggaggggatttagggtttatcaagaagagacatttgggagttgttggtttggtgtttgtttgaacttcatccaagaggatgaagctcatttttcttatgttgt

SEQ ID NO: 49259 - DNA, 1828 bp, Arabidopsis thaliana landsberg
tgttcaagaaagagagaaatgcagggcatacaaccctaaatgtatgaaatctccatgtgcctgaactgttgcaacgtttgctgtttggtgaagcacagctgctacaggcagcaggcctgaggcctcagatccttgaaagtggtatcaagcaaacaccttaaatattttaagagagaagaaaaaatcaatatcgaagtgcctagactctgcataaagcaaatttagcgtcggccagctcatattcttaatggttctatagaaggaatcactagtgattagtctttttaccttctcaacagtgatgacgcggccgtgcagaacagagtgatctagagatctgatgcaacggttagcatcaccaacacttttcatagagataaaaccaaatccgcgagattctctagtccatgggtccaggacaaggtgaacatcagttacctagaaatatcaaaagctcacaaatgttaaaactcatgaacaaacaaatttctctttaaacattatacactagtgagctactcgaaactgaattgtgttcaaaattaaagataacatccacaacctttccttctttagcgaaatgatcctccagatctctttcagtaacccggtgagacaatccagttacatataaactgttaccaggattctcagcatcgcttgagacactcctaatgtaacaaaagcgatttaaaacaatcagacattagcgcattcaaaagcagcaaacatcaagtcacgacaactcaaacctaagaataagacaaatacctcgtcgggcttctagacaatgaccttgacacagaccttccacgacgcttgtcataaggagatagtgaaggagagtatcttgaccttcttgagtaagacatctacaagaaaatagaacaattaaagaattaagactcttattagcttcaagtgtattgtctaaacttatatgaacatgctaaatcgacccacaaaatcacaaaatctacaagaacaattcaaattttaagctattgtaatatgaagacgacataattatcttattcttaataatcaacttccacataaaacaagatttaagaacttcatcatactcgatcacatgatataaatgctgacatctatctagttattttccatacaagtctagaatcaagcttaagcacatcgaaatttacagcaacgattcagatctaacaacacctaaaagacgatagttccacagaatttcgaaaacaactctgtaaaacggctctaaatcggaaactaaaaaacgaaggataatacaatcgatgaagcaaattaccggcgaacgattctccaagcgcaatggatattccagaactctctgcacctgacgacccaccggagtaaaatgaatttcacgtttccccatagatgagtggggaatatatgtagagaggatttagaaagaagcttcgggaaagtcggacgcgattgaattttaaaaattccatcacatttttcagtttggcgtccggcccagctttatacgatttttcttctcacaaaaggcccaattgtatttcccagattatttgcatttatccaaatttctagtagaattctcaaaaaaaaataaacgattcgagcaaatgtgaaatttgtgataataatattctcaaagttctttatgaaattggccaataactgcagactcttcatggaaccaattgcctctataactgatagatttcgttaacaaccgttttgaagaaacaatacattccgaagtactttaaaaagcagaagaaaatgattcattcagaatacaaaaaaccttcgtcctgaatagcgggaaactggcaggtacatt

SEQ ID NO: 49260 - DNA, 265 bp, Arabidopsis thaliana landsberg
gcttctggtgtctcgaggcggtgttcagcctgctcaagggcattgatctttgctaatccggatacagcgttgtctctgactccaaccccaactacaacaaggtgtgctcgggaaaaaccggtctcgccgaactggttcgtcttcatttcgacccccaaatcatcaatttccgcaagattctggccgtgttttttgccatccatgacccaaccacactgaaccgtcaaggcaacgacattggcacccagtaccgctcggtcatttt

SEQ ID NO: 49261 - DNA, 1133 bp, Arabidopsis thaliana landsberg
agctcacccacatagacattacatttagccatattagcctaatctagccttttgtttcatagatttttataagttttctacaatgtcctatcatttgtgaattaaagaagaaaaaacaaatcttattctcttctccagccgaagagatataaatctggtcttgaaagttttggttacctacaaaacaaatctgtttacgtgtcctaaagagatttgatataaactataattttacaatgacatgtcattcatgtactactatctactaattaacataatttgcgacgaaaaccattcaatcattactatctaattcacatgtcattagtaagatttctacaatcccctatatattacccctcatgctacctacaaattctccaattcattcatttataatctaattcacatttcacagcctctaattaacatccattttagcacacgagaaaaaaagaagctaaaatcgattgctacgatacatgggaaaaaaataacagtggctcacactaaaatctgtaaacaatatgctaaatctattgctcctattaaagactttgactagatactcatacgctacaatgctactacatttgtttcatcaaacaatcgtttattttttttgcatagaaggttaaacagcgggagaaatttagtccatgtacattaaattgatttgaattcataagatagtctgtattaagcactggttggatttgaagtgcaacattgacatacattatatcttcttttttgggcaaaagctttgctttcattcaaactcaatggaatacaaaaattagaagtctactaatttagcgatcacaacaataagattaaaggcatctagagatgcaacacatagtgaacaaggatagtccgacgaatccatgaaggaggagggaataaacaaaggattcaaaactagaagtatataagagatgatggagctttgttgtttgctcggcttcaaaactagaagccaaggacgatccgtttcagaaacagttctctccataaaggaggagggaataaacaaaggattcacaaaaccaggaccagggaggccctctaggtcagatatataatggattggagctatggagtttgacatacattatatctatcgatgt

SEQ ID NO: 49262 - DNA, 1102 bp, Arabidopsis thaliana landsberg
gcaggagattcaaatatccccaatcattttggagcaagtaattagaatttcatataagagaacaagtgtgtaagcatgcaattcaatcgagctctcgcgatatccccaatagacgaatggaggaattcagtcgcaggcggaaagaaaattggcatgatgcagctattcctcgatccgacagatcgtttggaaagaacaatgccttaaaaaccaaacacgttattttttaaagaagacaaacacaagaaagcccactactttaaatatatcacaccaaagcattatatcaaaatccgaataacacaagtaacactgtaacgttcaacccaaatgtggtatgtgtatagtagttagtttacaataatcaatatagcaaagcgtatatccaacaaacgtttcacttgatgtacaaacgataatgtttttttaatttaatttaatattagattcagaaaagaaaaaaaaaagaacgttccaatactcaaaaagaattgcattggaattatctctctgtttatcccaatactcaagctctaggttgtattctaatttaagtgttaaaggtccaccggtgtcttcagtgacgtatacgaccgtggtacatgtttgtttacttcacatgagccaatataccacaatctcccaaaaataaacgcaagatgataaaccacaaaattttacatgaatagtaaatcatattaaagagtactttttatttcaaggtaaacagtacttgttattcagactttagtaatatgtaaaacaatattttcataggaacaaatatataaactagtaagtcatagtaattgcctaattggtacttttaagtctttcaaacaataaattaatatagtacattccaaactataaacatattatgaaaaagtttaattaaaattaattaattaattgagggtttgcaaaaaaaaaggttcaacctccacccaatttcatcactttagacagcaaattattttaaatgaaacaataaattcatatatctgtcttctactataaattaccctctctctctctcttatcatcatcatcaatttatataaccctctcaaaacacacaattttaagattcaaataaaat

SEQ ID NO: 49263 - DNA, 1287 bp, Arabidopsis thaliana landsberg
gaaaccggtgaaccaagatctagctcacggaaatcaggtttgttgatctcggaggttagtgatgaatcacggagatgatcggagagtttgtcagattcagagatgggtttaactgacttgggcattttgagtgttgtggggagtgaaaggaatgaaatttgagagaatcgaagaaaaccctaaaatggagttccggtgagagaaatggttgtttgttaatggagacgacggagaagaatggagaaggagaagatgaatggaggaggaggaggattagatactctgtgaaaaggcatcgaaagagagattggggatctcgtgaattaaaaggttgaagcaaagaatgaatgtgagtgcctagagagagaaaacttgttttttctcagtgaagagaagagagagaggagagaaggttcacagaagaagaggagtgaagatggagaaccagacccaatatttaacattttttaattattattataaattaaaaaagttatttaatattgacaaagaaaaagaaaggttataattaattattctataattaaaaaataaaaatcgaaagcagagtttaataataataaatttctagcaaagtgaaagataataaataacagaattgactttaacaaacttttaaaattatgttcaaaatctacaacacagttccaaattaacaaaacttttttttcttcttggattaaatttttttttaagctacttttttggtaataaacttaaaaaaatggataagaaaatttcggaaatggtaatatattaaatgttatgcaaaaaaataacagttcttgttcaactgctgcttcacgagacatgtttttgattcttgcttttttttttctctccataatttcgctttatcgttgaatcaaagaaataaaaagatgttgacaaaaaattcaacaaaaaaaaaaggtttaagaaaataattgttaatttgtaatttgtaaataactatacttaaaaaaatctgcttacttcgctttcggtactgttcgatttttttctttgtactttggagcttacaacatcctaatagccccactcgcgatttatgggaagtgacgtctacgctcctataacatctatacaaaattgtgttatgtccgaaacaaaaataaaaaaataagagcacctaaaataaaatgtgggaatacactacaaacatttgaaattttttatggttatgtttattattaaaccttttttaataacaatcttggtaaggcgaaaaaaagccaaataaatttaaccctttaccatttattt

SEQ ID NO: 49264 - DNA, 428 bp, Arabidopsis thaliana landsberg
tccggcgttcttggccccgcccggcacgacttccccgccccgcccacgtttccctgcccctgcgcgcgcctcgcgcacttacagctcggcgtggcatggccgtggtgaccccgcgcggcgcccccgtcctgtccccgcggcctggagctcggacggcgtgcctccggtgcgtggccggaactcggctggcgcggccgtggcgaccccgcgcgaccccctgacccggccatggcgcggcccgccctcggcgtcctcgacgcgcagctagcacccgcccgacgcgcggcactcggcccgtccgcggcctcggcatggacgccctcgcactgggcgccgtagccagtctctgcccttgcagagcgtggctctgtgcagcagggctccagtccatcgtggcttcagctcgcgcggtcatggtgccctgcgta

SEQ ID NO: 49265 - DNA, 793 bp, Arabidopsis thaliana landsberg
ttttttacatgaagaatattatttaatgcttaaacgacaatgaaacatgtatgttaacttgacatattattgattagtgttaaaattattatactctagattctagaaagacaggaaaaaggtctcaattatttttggagatatatgaataccaaaaaataaaagaaagatcggagccacatataaaaaagattgatagttctcgtgacagaaaaatagaattattgcatgtcgtctataaaaatatcccatcaaacttaactagttgattcaatcccatcacggtctatgattcaatagttcacatttgacatcactgtttctcaaactttagtaccagattttatgtagctactaataagttcacacaatcacacctattaatccaaattgttaggtgttccaaccgactgggttaatcttttgcaatattcagcctattatgaaaattgatccgctcaattcggcccaacgttaacaaatttgttggcaataaataaaattgatcaacgtttgttatacattattcaaggatcatctcaagttcgatttgatattcgtttatattcatacatatttggaccatcctagttgggtggtcacaaggacaaaaaaaaacagaacaaatatataaaagaaaacacaaaagtgattaagaacttaacacatgagatggacacattttataattgattattgacaaagtaagaccaaatgtgaaagaacatgggccgttacgatatgtgacgatcacaaaatgtaaagaacaaaaaaactaaaaaagaggaagcaa

SEQ ID NO: 49266 - DNA, 1309 bp, Arabidopsis thaliana landsberg
attgagagatcctttagattgaggtgaaaaatgtgggagggatggaagatatcactccaattggtatgtttccattatgatgcacaaagtggagacggcgcggcaaaaagtggagaccaatgaaacgttaacctttagagctggaagcattttactgctggctcgagccataaacggcaaagagcatagaaccctcaattacagacaccacccaagtcacatgcaagcggttcttcgaacttaaccatgagctttatcagaacggaactacaaaaacccgagtatacgatagcggtagttcactctaacaagcgcatttcccgcggtcagctagcacaaaacaagatatcaacgatacacaataacgctaatcgaccctatggtcttactagctcctccaaaacaccggaagaacgaaacacggttcgaaacaacaattggaaatgactacagaatccttactaagggcctttcatatcttctatacagcacacgattaatctcactgttcacgtgagaattggttttgccacgcccaaattcatcactgctccacatttattgggtcttttgttcttcttggtataagcaaatgctaaagatcaatcgtgaaaataaaatgaaattaaggttaatttccaaattcaagagaaaaaatcaacaaaattttagaactcaacttgaaataaaaatttgactaaggttgtttacactaaacaaacattataataatttaggacggaaattattattaaggctgtttacacaataaaaatttgaacgtgtaggaatcttaattagctagctaattttttttctaagattttagagaacaaaatttttatacagaaaataattcactatcgactatctgcatactcagcaaatcggatttaaatccatatacatgcgttactaacaaaaaaagtactaaaccaagagttccggtttccaaagtcctattttatccatttttaatttcattattacttgaaatatttgttacaataattgaaagacgagctattacagtattgttttgatatatcttatctagaagaatagaaatataaacaaatatcagtcatgtctcgaggttaaagttacgcccccaatttaataaaaaaggttaaaacctaaaatctcccaaaagctttgaggtagattactatgatagttacccaacacctacacacaaagaatatgtgctctctcattcttttcctcatctttactccaacaaagcaccaccatttatatatattatatatgttatgttctattgattcttcatgaagctttcttaacc

SEQ ID NO: 49267 - DNA, 800 bp, Arabidopsis thaliana landsberg
ctccaattacgtaaaagagagacttatacagattaactggcagaggcattcttgtcatcccacatagagtatctaacatcccaattgcttcattcaagtgaccgtgaccgcacaatcccttaaacaatctcttacaacaccaaagccataaaccactgcctctctctttgacttgttcaaagcaatgaaacgcctcgagaaaccgatcttgattacaaagctcatcaactactaagctagaggagtttctactaggagcataaccagaagctataattctatctaaatgtgctctagcttcatcaaatctccttaacttaaccaaacaaaaaaccattgaatctaaaaccgacgaatcaggaacaataccgtttccgataacacgttgattgtagaaagtttcggccactccaggctgacccatctccgtaagcttccttatcaatgcaccgtagcaagacgaatcaagttctattccattatcgactgcaaaatcagcaactaaagctgcctctgaaatagaagaagaaccatcaataacacggcgaatcacttcccgagcagagtctaagagacctctccgaccaagtttgactatcaacgacaaacatcgagaccggtggtcaccagaagcggcggagaagacggcggcggaagtggagggaaatagttccgaagaaagagcacaagttgtagcttttctggatttgaagaagcgataacataaagctttcgcctttaacattatctaaaaccccgaatctttcagggcttctcaattaaaagcctctccaaggttt

SEQ ID NO: 49268 - DNA, 1803 bp, Arabidopsis thaliana landsberg
tttgattgaatatgcagagaatgtgttcgacgaaatgtctgtgagaggagtagttccggattctagttcttataagcttatggttattggttgttttagagatggtaagattcaggaagctgatagatggttaactggaatgattcaaagaggatttattcctgataacgctacatgtaccttgattctcactgcattgtgtgagaatggtttagtgaatagagcgatttggtatttccgtaagatgattgatctagggtttaagccaaacttgataaattttacgtctttgattgatgggttatgcaagaagggtagtatcaagcaggcttttgaaatgttagaggaaatggttagaaatgggtggaagccaaatgtgtatacacacacggctttaattgatgggctatgtaaaagaggatggactgagaaagcgtttaggctgttcctggaactcgttcgtagtgatacttacaaacccaatgtgcatacttatacttcgatgattggtgggtattgcaagggagataagttgaaccgtgcacagatgttgcttgagtagaatgaaagaacagggtttgtttccgaacgtgaacacgtatgcaacgctcatcaatggtctctgtaaagcaggaagcttcggtagagcgtacgagttgatgaatttgatgggtgatgaaggttttatgccgaatatttatacgtataatgcagctattgacagtctctgtaagaaatcaagggcacctgaggcatatgagttgctgaataaagcattttcttgtggattagaagctgatggagttacttacactattcttattcaagaacagtgtaagcaaaatgacattaaccaagctcttgcttttttctgtcggatgaataagactggttttgaagccgatatgcgcctgaacaacatactgatagctgcattttgtaggcaaaagaaaatgaaggaaagtgagaggctttttcagttggtggtgagtcttggattgattccaacgaaggagacttatacgtctatgataagctgttattgtaaagaaggcgacattgatctggctttgaaatattttcacaacatgaagaggcatggttgtgttcctgatagcttcacttatggttcactaataagcggtctctgcaagaagtccatggtagatgaagcttgtaagctttcctaagcgatgattgacagaggtttatctcctcctgaggtaactcgagtcacattagcatatgagtattgtaagaggaatgattcagccaatgcaatgattctgcttgaacctttagataagaagctgtggattagaacggttaggacacttgttagaaagttatgtagcgagaagaaagttggagtggcagctctgttctttcagaaattgttggagaaggacagtagtgctgatcgtgttaccttagctgctttcactacagcttgttctgagtctggcaaaaacaaccttgttactgatttgactgagagaatctccagaggagtaggctagtagtgattacatctcccacagttgctttgtactctctgtttgaatagcaaatccacattgtggtggatcaagaaaccgtggaatgtagccgcgttgaggcaatgacatggtatgcttttgctgcgttttttgtcgcctgttcagtagattctaaagactggagagtgggatttagactattatcaccaagtgaagggtatgaatctatctatcaggattttagacatgaacaacaaaacccatgttcttcactctgtggggattaagttgttactgatgtaaa

SEQ ID NO: 49269 - DNA, 857 bp, Arabidopsis thaliana landsberg
gaaaccactggcgaaatgacaaaccaacctctgtttaaaccctgcagatcaaatttttcatattaaattataaatcactacctaccataggaaaaaggataagaaacacagaaccaatatgagaataatattcaagctgatgtgaatgcttgaccatggcattattggtatgaatgatgggattgtaagagcattcacaagtcacaatgatatattcatttgattgaaaatgagaatataagaaactgcagaataacaatgaagacgaaatcattcagaagaacaaaagatgataattaataaatattgattagctaaccaacctgatcgatgtaaaaacactctcccgggcaaatctctcggcgttttgcctctaaattgattcttaacgacaataaaatgggtaacatacaaaagatacagattccttcacggtttcaagacaagtccggagctcgagaatgagaagaggggaaaaaggctttagagtgactgagagagagagtcgtaggagaggagaagagagtaataaatgacagagaagggtgagcctagggaagttcaaaggacatagatttacgtaaataccctcatggtaaagggacatttacaccgacattgctactttactccaagaaacgtcgaaaaggaagtaggggtgttctcggtatgtcagggaataagatgttcagacagaacgcaaaattacacggtttgggttgggaatgaaactacttggaagctgttattgcgtacgtacgcgaagaccggtccgtccggtatgagtgagatagatgaaagacacgtggcaaattaaaaaaaaagtgtaaccatttcccacattcttctgaaaacgc

SEQ ID NO: 49270 - DNA, 743 bp, Arabidopsis thaliana landsberg
tttctgaatgacttcaaaagtatttaccttgaagatgttctgattcagaatgctttattccatgcttttcttttgaattcttcttctccttttttttatgggtggtttgtgaattatctgttacaataaaagttaaaaataaaataagtgaattaactgattacaaaacaacatggatgatatattacagacaagtatgaatcgaaattctgaaaaaatcctcaatcaataaaatcaaagatgaacataaccacatctgcatcggcagatgaaggacaggttttgaaaatgcttatcaaactcgttaaataaaaagtgacgatggttaaatataaattgtaatgaacttaccaataagctaacttttttaagaatgaatttaaaattatttaccttgaagatgtgctgattcatcacactttctttcatgctcttttgaattctttgtctcgccattttgataagtgtgttgtgaaccatctgtcaacatgaaaaaaaaaaaattgaattaacgaaacaaatcaacacatgcatgatatattgtagacaaatatgaatataagagatctctaatcaatgaacgtgacaacaaaacatcattagtctggtttcccaatctcttatcatcgaatcaaaagtatatttaaaacaaaaaaaaaacttaaatgtcgaaattctgaaaatttcctcaatcaataaaatcaaaaatatgctcattaaaaatagcttggaaatcttttcaa

SEQ ID NO: 49271 - DNA, 501 bp, Arabidopsis thaliana landsberg
ctaattctccaaggattttactccatatcgcacacatcaacacacataaaacatcacatcagcggggtattaacaaagaactagtaaaacaacaaaggtatttagagatcaccatgggagcagcagaggttgcgtggttccacaaggccgcaaccatggagaaaactggagcagggagggaacggcgtccatgggaggagttggggtcggccatgggagatggctggaaatggccataggaacaagggaggggctgggagcatccacttgctgcagaaaggggagggcactgcttgctgctagcgtggggagggcgatacatccacgctgtagggacaagctcggccatgggcaaggtgctgttgtgagggaggcagccttggttggagcgtcaccttggagagggggcagcgagcagcatcggcttggagagctagagccagggagggacaacggcagctgctgtttcaaactgcaaccagagaaggagacgctatgggg

SEQ ID NO: 49272 - DNA, 403 bp, Arabidopsis thaliana landsberg
tatgttgccgaagtactgtgtgcttacttcggcgaatgccacacagtggagagtagcgtatagacgcgagtgctagggtctacgacatttcagatcgagagtgtacagacgctgcaatcggacgctccgacaatagtccggccgtccttagctcttccatctctgatagccggatcccgcgagacgcatctggagcttgtatagatcggtgatctcgtgcggctgcgcctgtgacggaattgcctcagtctagaagctgtagtcagtgcaagcgccgcacgctcatggagacacttacgggggcacggccctacgcggccactggactggaatccgcgaagattgtgagacaggcctccggatgtagtcagcagtgctgaatcccacgccaagtctttgtagc

SEQ ID NO: 49273 - DNA, 1791 bp, Arabidopsis thaliana landsberg
taagatacagcaactccttgaaaccaactccggttaatgcatttactctaacatctggtcctttcttatttgcaggatctactttagcaacttccggaactttccagaactcagggtcgtcagcattttcatcttcagacaatagccacccatcagcgtcgtcaccgtctccgttttggatttggtcttcatctactgttgcttcagatgcatcaacagtttcttcagcttttaaatcagcttcgtcttcgtcttcttctcctactccttcgccatcatctagatatttctcttcctccacttcgtcttcttcataatcaatctacaacaaaattcccagtgtgaaaaaaggtggttgcttcttctacttgtatagatggtttatatatcaatcctaccttattccagacttcaatcatattttgaagcttctcttcaggtactccaatttgatttaggacatgaagcactgttgaacgatgctcctcgatatttggagctgttgaatcaactacatgctgcaggggtttaatcatatcaacgccaagtctttctgcagttttctcttctaaatgtaactatggaatattattttatttatttatttagctcttaccagaagtagatcagcttcaacaacttcttccagagtcgattgaaaagctttcaccagctgcaaaaaggcatgagccaagaaaagaaaagtaagtgaaatatcacttgataaaggataagtggaattaaagtaggtatacattacctgtataggcagatctgatatgaatccgacagtgtcactaagaagcacaaagtttctgaaaagaaattgactcttgcgattcagtacaagttcatgtgtaccagaaagttataaacatgattctcaacgtacaaattaacttacccagaaggaagatgggcactcttgagtgtaggatctaatgtggcaaacaatctgcagaggccagaccaaccattcaaaagttatgacttcagtttcaaatttaacagttttaagatagttatgaaaccattgaattataccgctcattgcagtagagagcagtctttgttagtgcacttatcagagtcgattttccctaacaaaagcagataattgatactcagaaagtagactaaaacacttggtttctagctgaaacttcttcggagcaaaattcaaacacttacagcatttgtgtaaccaacaacagcaatggttcctgaactctcaccctctaaccccactcttttcttacgtccagcacgctgcaatagccgtgttcgctgggcttctttaatttgggataacaagcgaatcctccggtctgatattctggtacatcaagattttgtttaacgcatagatttaatattagaaaagagagccatgcactaagtctttcggttaaccaacaattagacaagaccttcggcgttgaagctgaagctcagtttctcctgcaccacctacaaaaccgccaccggttcccttgcttcctgctctcctgcacaacaatttaacaacagtttcatcattgtctcaaaaatcaaaagagtaaagagaatacacaaagtagtatagattaatcactcaccctcgggcactgacaacttcagcttctccaaactgcccaaaagtatggcgttcatcagtaccacgcactcgaaccagtctgctcttattgtacatcaaagcagctaactcagcctgtgaatggatgaaccaatcagctattaataaacctttcctagtatgtaaaaggacaaatctgtattgtcacagtacct

SEQ ID NO: 49274 - DNA, 755 bp, Arabidopsis thaliana landsberg
tattctcgttatattacattaaatatcatattccgagttatttttgcttatcgttaaacacaataccaaatacagctgtaacttttggggattaacatatgctttgttaaaatttgtaaacataccataaattaaaacatgaaaacaaattgaaaaaataaatgatctatcaactataatatgtcatactcatacatttgttcatgtgtacgcgcacatatatgaaaacaaaattatatttactatttaatataaataataaacaccgacttgatatattatctcaaatccagaaatcctctggttgatataatatataattaatcaaatatatatttgaatttatttgataaacttgcttaacttcaagaaacaaatcttaacaatatcataaaactaagagatagtttaatgtgaataaatttagagaattattttgaactaattgcaaaaactgtgtaaattaaaaaatagcttgtaattagttaaattagtcatcttgatctaaattcaatagtttcttaaatttgcattaaaattaaaacattggtatttaaatttattttaatgttatttcaaaaagaaaataatcaattctagaagaatgtgtattccaaaatcttgcaacaatatgatacaaaataaaataaattatttgatttgaaattgaataatttatttggctctaaataaaataatcttgagatatagaattattataattcttttaaaaaatatattaaaaatttgggttt

SEQ ID NO: 49275 - DNA, 884 bp, Arabidopsis thaliana landsberg
ttatttgaccaaaaagatatcaattggcagaggaatacattatctcagattcagagtatttgctgcagacttgtacggtccatctgcagagattaactcaacatttcctatggtccttttttcttggtcaataactttgaatatatactttcttaatttacactaaatttgtgtcatacagtagatgtgagaatggatcgttactttttcaaagatacgcactaacaaagtaacactaaccattagcaggttaattaaggatatctacacccaacccaattaccttcacttttattttgttatcatttgaaaagaaaaaaaagtatatgttatctacttatttaagttaacaagtatttttattttatttttacaagttttcgggttttttcatctatagaaagccattaaaataaggtgttgatttttttggtgaagtttcaataactgtaggggatagaattattagaatagaattttcagttttaaatgaggaacatatacaatatataatgtcggaaaaggaaacagattcagaaattaatgcataggatccaattcatatcaacagagaaatgttttgcgagtctactgtggttcatttccaaatatgcgaccccacgaactgattttagcgtaccatgttgcatcaattcaacaacacgtacgtgcatgctctgctcctcattatactatacctaaacacgcacattgctcaattatacatcgatcattttggagcacatagggacatagccaacataggcaatagctagtgaccatgattgacacattctacatttttttcaacatactaactagaatttctaagaagtttttatactttaagttagagtcttcaacgagctttcgctaaatcgagt

SEQ ID NO: 49276 - DNA, 657 bp, Arabidopsis thaliana landsberg
tccacatactccctcatcatcaccaccaccaccaccatgatgttcctaaaggctgtgtagcgattatggtgggacacgaagacgatgaagaaggtctacatagatttgttgttccgttggtgttcttgagccatcctttgttcttggatctcttgaaagaagctgaaaaagagtatggattcaagcatgatggtccgattacgattccttgcggtgttgatgagtttaagcatgttcaagaagttatcgacgaggagactcatcgccgtcatagtcacggtggtcacggccacaacaaccataaccatcacaacaaccatttgcgatgtttctaaagatctataattcgatttgttggtttggtttggtttgagatgtcattggtttgatttgacagatttctcttttgagattgattagtttgcttaactttttgcttttagttagtttgatgatgatgataaattgataatgatgaaaaaatcaaaagagcaattgaatgtgattttttttttttttttttaaatgtaatcgtgaggaataagggaagaatcatattatttgatttttattttatggaaaggaatgtgaatatttttttcctttctttattttatttgattataacgcgttaaatttgggcatggaccatgttat

SEQ ID NO: 49277 - DNA, 603 bp, Arabidopsis thaliana landsberg
  unsure (1)..(603): unsure at all n locations
atggattaactgactgaaaagagaatttgtagtaccgaccatgggatattgggttttgaaatatcctcaatggttaaagaagcatactataaacattggaaaggtatgtaacatcttttggttacacaagaaagataaggttcttgaagacttggtatgtaataagaagttaagaaccaagtaagaagtgaaggagagacgaaaatggagaaattcacagagtaattgcagattttacaccttttacataatttacaaatattacactctcccaaagagtaaagaaaaattaagtgagagaggacttaaaggcccaaatataaagcccattaggcctatatttaatataaccaatctggaccgttgaatatttattaagcccacataaatcgtgtccgttgattagaagagcccaagagaactctagggttttgtcttataagcttgatctcgcattaggtctttgcgcctcttgccatcttttgtcactcatcttcacaggaaacaatggtaagccctagctaagatctctctttactccatagtttcttcttgattntctcctcaggcttcagattttgggtttcgttcatgtagaaatct

SEQ ID NO: 49278 - DNA, 1103 bp, Arabidopsis thaliana landsberg
tagagaatacatcaaactatgtttatcaaaaagatcacagattgttcatcagttcaatccatatttattattacaactctcactttatggacgaataaatctgtaggttgtgttggcctagttactctatcacttgtagaaatgctcggttcataaatgtcaaatcactctatttaaaatattgcatctcacaatctcaatgtggtcagttttttgtaaggtttcatttggacaagaaaaaaactcactaatagaataagttagttggtccatttaagatattcctggtcccaattctattgggtatatgaaattacatattagagtagatgatcattattcttttatacttgcttgcatatatatgataaaacatataacatgctattgtattatcgattcttggatcatttattagcaactgtgatatttcatataatgccatataaatctatttttagcttgtaagttgtaacagaaaatcaaatatttgaaactttttccttattttcattgttaatacagtttcaaccaactacacagttttatttatttcccgcaacttaacaataaatattaatggttgatatgttaatcgttaacataatacagtttatctcgtggatttttttttaattatttttttttggtgcagaaaatacagtttattatagacataatttaatcgatttagttaaaaaaaagtggttaaatctattgatagaatggttgagaaaaagagagtaaagaagaattataaatttataattgcagtaatgaaagtggaatacgtaaaaaaaataaggttatgtgatcatatcaaattttggtgaaatgcattcacttcctaaatcctaattccatcttcaagttgagacaaaccatgatatatggcaacaggaaaagtaatgtacttcaaccatatatgattatatatgatataattttgtccatcattagctcatttacaaactttaatgaaaagaaagattttactaaacattttttttgtgtgatatatataaaaatattagtcatttgcagttttttccctctattaataaaaaagcccttttggtatcagaaaacgacgtcatcccctt

SEQ ID NO: 49279 - DNA, 181 bp, Arabidopsis thaliana landsberg
tttttttttttttttttatttctttttttattttttttttttttttctttttttttttttttttgtttttttttttttttttttttttatttatttttttttttttttttttttttttttttttttttttttttttttttcttttttattttttttttttttttttttttttttctttttt

SEQ ID NO: 49280 - DNA, 540 bp, Arabidopsis thaliana landsberg
aaaattctcttttggaagtaaacgtggtaaagaaaaacaaaggaagcaatgaagaataaaaagcaagaggaagtttgatgattgaaagatctttttgctgattgacaaaaaaagaaaaatctttttgccaacaatcaaggaaaagaaaacgtcaactactaagaatcataaaaatcaggaatagaagaagaatgaattattgaactccaagtggaaaagctcaatcacacagtgccataatgatcagtcgttgcatatgctttatgagacataaaggatctttgtcttttcatgaatcaagtagaaactagaaatgtagcataaccacaagaaaaatatccacattatttttccaaataatattatttacaaacatttcacaaaaaccctataattctttgtataaaacaacctatattgccttgaacaaaaaaaaaacccctataatttcgcaaaaacataatgaacaaagtaaaccaaaaagatgaacgtaaaaaaaggagctatgcctttctactacattaacaaaaagaaagacca

SEQ ID NO: 49281 - DNA, 676 bp, Arabidopsis thaliana landsberg
gcaagctttgtagattaagggtttcttaaaccagagagccagagctgaatgtgaaagggtaagcgagagtgagactgagagaccaaatccataaacaaaggtgaagaagatcagtgagagttcttactggaatggccagccatgaggagagtgagaaggtagagaaccagaggagccatgttggagttcagagatacaaatggcactgttagacttgttgagagagagagatttctattctgataacttttagagagagaagaaagagagaaagagagagagttatggaagctagtgtactggagattgagagtgacaacttgttccgtgactcttgtttcttctatagcccttcttgagtcagctttttcattattgtagctctcctccgtgtgaacacccgaacttgtaagtacacctttttcaaatttaaaaattaaaacatactttctgatgcttaatcgactagataagtaaaaaggaaagctgtgaacaagttaggatgtcggctagtttgatccatgccatatatattgctatacatattcggagaaacaaaattcactattactaattttctactgtgtacaaacatttacaattttatataaataattgaaaaccgccaaaagtgattgtgtaacgtaacatgtgttgcagagttgcaggtggtggt

SEQ ID NO: 49282 - DNA, 1131 bp, Arabidopsis thaliana landsberg
atgtcatgtttccaaatactaaattcagatagaatcaatataaagggtacctccttgtggatttgagaattgttctcagctaattgagcagcaaatttcctgaatttaaataaagaattaaacaaactcatactacaattttgaaatcgaagcagaaatcaaatgaaatcactcacctagtaactggtcgatgcactggaacaggtggaatcttcttgttacaaatcccatttttcctgagaaaacaattggttactaagataagtctatgcaacgtttttattaaaggatcattgaaagaagaaagtaataaaaatataattactcagtgaatggtctcttgacagcacaaggatagaccggagctccgatgatgttcttgtttatattactcagtgcccttcttgtctgtccattcgtcggaattacctttcctccacgtaaaccccctaacattggcaaaatcatctttttagttaatcaaacaaaagattgatttttgattaaatgggtcttcttgtttttaattctgatctaccttgttgtcgattcatcggtccaatgactccgtgtctgttctcatccgatccacccattattatcttccgtatctgagaatcgcagaaacactcgcatattaacaatccgaattaaaaattgggtcttgaatccgatttgagaatctaaaagactcgacgatcaagaacaagatgtactctcttaaacccatatgaaatcaacactaaagtatttaccttgacgctttcaacgaaactattaacctctctctatctctatctctctgtcagaactcagaagcaaaatcccataacagcaaacacaaatcaacctctggctctcttcaatgatcttcaagagtctctctctttatcttctttctctcacaacgaaaacaaaattgaagaaaaaggggtaaaagagactgtagagagagtaatcaaagatttcgaagacgtgaagagcggttatatgtctgcaacacaccaaataaataatgttggtttacgaatcgttatctttttttcccttttagaatcaacggctagttaatcttaaccgttggatacaacctcagaaaaaaataacctattggaaaagagaatggagccc

SEQ ID NO: 49283 - DNA, 737 bp, Arabidopsis thaliana landsberg
gggggaactcaactagagactaactatttttgtagattttatttacttataacatgcttattataccaaggcaggtgattcagtttatctgaataggctgtttttactctaaccaaattgtcaaccaaaataaatttaaacaagttttcggaacagaagattcccctcaaaacatacaagtcatattatttttctaggacatttttttaccaatgcatacataatttttggtgtgtaatgcacgaattcgtaatcgtattttttcttttgtcgacacttctctgtatatgtctggttagctacaaatgcactaaacattttcacataattgataaaagaagtgcattgtggaccaagaaaaagaagctcaatggtggagactgcaactccttagccgtgtaacattgttttttttttgttaaagtagccgtgtaacattgtgacacacatatttcagttgtccacaatttctaagtgctattgtgcttctcttttacttcttttcccctttttttggcgtcacttttaacttattttatatgtaatttgccttttattacaatgtataaaaaatattctcacgtgagcgttcaaagcatttaaacggtcgataagaaaatttttgagcgtcggcatcattcactcaaagacattgtgaaagccacgaatacaatagaagaaagtgcattttaaaataacatgaacactcttacttagcaatgaatataacaagttca

SEQ ID NO: 49284 - DNA, 1417 bp, Arabidopsis thaliana landsberg
tataaaataaaataattttttttatttcttttttccaaaagggaaaattggtttaaagtaaaattttctacaaatggtggtaaaaaaaagttaaagatttgcccaaaaaaaaggaggggaaaacaaaaaactttgaaatttgggcccaaaaccccatttattataacaaaagtccatctgtacggaaaagattaaaaaagtggagctggtttcaaaactcaaatttgttggaacaataaattagtagtcgtgtaaatttacaaaaacttttgtatattcgtagtcagttttaagagagatctaaaccaatactggtcgttgcttagacagaatccactggtgaactcgtttcgggacatgcgatttctactaggcaaaaagagatctggacaagatgtattcagtgctggcattggaatctataattcatacaattgaatgaaaactatagaattcagtttgctaatatcagtttcagtaaaaccaaaaaattaaaactgagcacaaccctagaatcttttgccctcgtaagtcgtaatgttgaatttgacttccaagttgaatacaattatgcccttcacgtcaaatgtttttttgtcctttttcttttttcgtttttttcttttcttcttttaattatttttcgtcactttttttcgtcaatttaaaatttcttaatttatcttttaattattttttattttgttttgggtcagacttaaataagttgtatctaacacgccaatcttttttaaggtacacatacagagacaaaaagcagcaatggaacatcgttattcgtgaatcaatatccgtcatgtcatggcaataatatgttgcaggttttgatcatgtcaagagatgtgtgttttgccaagtcaaattaaagctgtgtgttaaacaaaaaaaagttcagctaattaaattcttactctcgacaagtcaataactgtgatgctctcaaaggaagatttttttttaatcaaaaagcagaatattagttgtaaaattcaaaacgtgatttttttgaaatcctaatatcgacgcatgttatacggccacgtttgcatttcgagcttacccgtcaaattttttgttctctcgttatttaaaaatcaagtttctgccaagccctaaccctaccttaaccctaggcacctctactcgcaggcggcattgccttttaccaaaatgccattatatctattactttttgtcacaaaaaattccatatatttattagagataactatgatcatactgataataaattgaagttttgcgatatttatgatattattcgatttttatgataccagtaaatgtagcaccagttttgtccctagaaaattggcgcatgtactataaagtttgtctgctttttaatacatttttttttttttttccaatacatttc

SEQ ID NO: 49285 - DNA, 952 bp, Arabidopsis thaliana landsberg
tacgtaactctcaagtacttacggatgaatatacgttcacttaattacaaagggtttcttgcatttttttaactcaaatttcatgtttttattcgggcaaaaacccgcaaaacgaaccaaactttggaaatcacgatcgatcgaaataatatttgacaagtatcaagccacatgcattggttacacatcatattattcaatttgtaattttagctatgtgttgtcctcatgcatcataaattttatttttctctttctcgtcacgcatcatgcattctaaccgtaacctttgtcgttattttctttttccaattttttaaaaattagtgggaactaaaagagttacgtttgttgcaaaaagaaaaatgagttacatttgtagacaaaaagatgaaagagaagtatagacggataaaacaagaaggaaaaagagagagtcgcatttttgttaatgtcacgaatcaaaagtaattcttcttttcaagataattgaatttagagctgtaaatgatcatgagaacttaatgaacgtgtaccaatcaaacgcaacagataatatagacaacacaatataagaaagttaaattgtttatacgaaaattttaatgactcggtatgcacaattgctttttgattagtttattagagagagtgagaaattggatgcaaaacactcctcgaccatgtgtatatataccatcgctaacttaagacatatatcaatcaatcccacaaacctaaattgaaaacaaatatatttccacctgaaacaacataaacagaatggaaccttcaaaacaagaagttccaaagcttatggagacaccaccgaacatatcaaacgattcatcagcaacccagaaaggagaagcaccaaggcaacaacagctaccaaacaataggtacgcactcacagttgacgaggtgatcgagccacacattggaccacttg

SEQ ID NO: 49286 - DNA, 321 bp, Arabidopsis thaliana landsberg
tttttttttttttttttttttttttttttttttttttttttttttttttttttttttttttttttttttttttctttttttttttttttttttttttttttttttttttttttttttttttttttttttttttttattttttttttttttttttttttttttttttttttttttttttttttctgtttttttttctttttttttttgtttattttttttttttttatttttttttttttctttatttatttttctttttttttattttttttttttttttttttgttttatttttcttgtattgtttttttttttgttttt

SEQ ID NO: 49287 - DNA, 1157 bp, Arabidopsis thaliana landsberg
tttttaattacttaattaagccatatccacatgactagaagatatctttaacttatgattgcaacatttatatattatgttttagttattgatattcttacttcattataaatccaaaagatcagcagaagattgatacaatttttattagatcacaatactataagcattatcattaaattgtgagaaatctagcttagacatttgcttcttaattatttcctttaatttgacttgtttttgtttttgatatactgatttgatttttgaaattttaatttcagtatacctaaaacagtagaaagatatcaaaagcgaatacaagatctcgggtctaaccataagagaaatgataattcacaggtaaccaaacttcatagaattgttagtttatcatggttattttcatatatatacatttgctaaaaataaacttatccagagctcaagtaaaaagaaattctatatcaatatctagtacaattttatggtgtagatcctttggtgtaccacttttaaaaaattaatatacatgctaaagtgtatgctttatttatcgaacatgggtgataattttttatattaatatttgtacttacaattttggttaagaaaatatgttttgcatttctcatgatcaaaccttgttgacagcaatcgaaggacgaaacctatggcttggcgagaaagatcgaacatttggagatttcgacacggtttttgaactcaaaatacttatacgaatattttgttatgaatgtaacgtttacattgtaagcgtctatttaccatatgtttaaaaaatatatacatttgcagaaaaatgatgggagaaggacttgacgcatcttctatagaagagttacaacaattggagaaccagttggacagaagcttaatgaaaataagagccaaaaaggtaacttctagattattgtatatgtgatcatttcttagttttaaaataaaatcttcactcttatcatattggtattgtttcatcgagatttatgacaatgacgtgggggccgcctggttcgattatcacaaatgaattgattatgtaaacaatataaacatgggatcattcttttaacactccaaattcccacacaacacacacacactttggaggcatgcatgcatgcatgccatta

SEQ ID NO: 49288 - DNA, 2287 bp, Arabidopsis thaliana landsberg
acatgcaagcaaaattcagccatatcggaaggaaggtaaaagttagaacttatcaacgatgcattgaactagttggagctttatgaaattttacttttttgttcattagcatttgaagttctgtaattgaaacacctaagagagagaaaaaaaatacaatgtatttcaatcgataaacatacttcttcttcatatacttgcatgtttgaattctgataataatattaacacaaatcattcagtaacacgttttggtaaatgattgtcttttaattatcgaaactatattttaaatcctacgtagtctatattaaattactgagaccttgtctaaattattgatatcttgtggtttacaatttcgtgcttcaaaaaaaaaaaaaaaaaaaggtagaatattagtcaaccaagggacgaacaactctagtaaacgattttaaataaacgaaaatggaccaaaaacaattgagaaattgcgaagctgtacactggtctcagggataaagaaaatcatattatgctaaaccacctaatatttattcaaagctacctaattaattttggtatctgtttgctgtaagttaaaccacgatggttcggatgggcttccgtaattaggaccatctaaaacagaactgttattaaagatggttggtaaactataatttgatttcaattaacaccgattaccggtttacacttaaaccacatattttcattaattcttcatcatgtccttctcacgtgactctttccttctccgatcttttttcttttaactcaggactcagagtcaggaacttctctcttaccctagatttcgattttgatttcagttctttctgaatcgatccttctctggccgtaaattctaattcaacggttggttgataaattatggttcaactagatctgcagagctttattctccgggctcgagtgcttaaactttaccgacaagcattgaagatagctcacagagctcctgttcatgttagaggttcgtgtctttcatgtctcttatttgtctatctatgagattcgtcacatagacaagaaatttgcgttcaccgtagatccatctaggggtttagtagatttcggaggataaactttgtttgattcatgtgttgatgttttgtaggggaactgaaacagactgttaggcaagagatggaaaagaacagagactgcaatgacaaacaaaagattcggtatctgattagtgaaggtttagagagaattaaaggacttgatgaaatgttggatatgcagggccattagtattggtgtaagatgatgttcttttacattttttttttgtacttcttctgctttaattgaatgtgatgcaatgctcgattcttcagatagaaattctggtcatctttgtgtttaggctttttcttgcatatgttctttatctctattgattgatatttttcaatgagcaacatacttttctcttctacctggatttgtttgatggttttaagaactctgttctttttgacgttttacccaacaatataacttctgttgtagtcatcttctgctgcaacccatccacaaagcttatcatgcaagattaaaccctttctcgatgggttgcaagagaacatcactaaaatagaagtaacattgttggggaaaaacgtcacaaatccaggtattagagaataggatgctgatcgttgaaaataactatctataaagatggagaagatacgcaagaaagagttgtaaacacaaagctgatcagactttttatttgaagagtttaacagtgcatgacattcaattctgcagaaggtaaaagaacatttggtttctcatatagttattcaatgacaataatacatcatctttagtcgttctgtatccatacccatctgctgtatatagacttacacttcgtatcacgtgtttcagtgtgtggaacaatcacatccttttcttctcaatgcacgtaaaaaattgtctatttgaacccttttcgtataagcatagtaaaacctttatagcatctttcaaattctcatctttgggatgagtcatgatgatctgcattcagaggaaggaatagacaaacggcttcttcggctatgaacgccatatgaggaagcttctccttctctgcctctggagaagacaggtctaaaacgctgagtggtggtgcgttttgggctcaaattttatctaaatccgtctccgtcttattagagaagtagatcatttgcgaacttatgattatattgggcttaactgggcttatacagttcagaaa

SEQ ID NO: 49289 - DNA, 1389 bp, Arabidopsis thaliana landsberg
aataaatcgcaaataaaggagattgaaagggtagttgtcggcaaagatatagaatttttgggggccagtcccgtaatatagaacggtcaactgtcactttgtcagtaggtcaacaaaatgtggggccaacagggtatgaaatgagatgacgtggcccaaccgttagtagccgacaccaacggaccaacctccttcctgtatcttccgacattcactttggttcctctctaatctctctctcaacctttttttggattttcattctaaccacattttatttcatcacatcaatgcattatatatttttcttgattaaactattttgttcatacaagtgaactagtattactttgtttttaaatttatattttctctctaggaaattaataagttccaaaaacacaattttcattttttgtatgataagattaaccttttgaaacgacaatgtcgtattcgtatttaaattattttagtcaataaaattaaacatttaaaataagagaatttgtctgtttttactttcatgaaaccttacataatacatatatttgaatatttgatgaacaatatatatctttttttttaaacaatatattttttagcatgcagaacgggagcacttaaacaagatttgttattttatattaatatacaaccaaactctacattttatataataaaaaaattaatgtacctaaaaacagtttaagtttaactaaaaacctttttttggggagaggtttaatatattcacttaatcatcaatattttggtttgttgagtgcattcggcaaggttgatagatgatgcatgttcaacattggttactttttttttcgtcacattggatactcattgtttaagtttaccattctcgaaaatatttgtttacaatactcgttcataatacttttgtactgatcactatttgactatttgtaatatatttcaaattacaaatatattacaaagtatactacatattttaactactattattgaataaatatactcaatgatagcataaagtataatctactcttaaagtctcaaatagtataccatcaggactttcttggttcagacaaatcactttcacacgtaacacatggaaagatgcaaatgacgagtttgattcccttatacgtgtcatatatagagagtgaagaatctaaatataataattcagccctatagttcatgtatttgattgaaattacttctatttacttaaaagggaaccttacgtatttaagcgtgtatatagtttctcaattgtggaatattcaaagagtgaaaatgtcaaatttcaaatattttatttagaaattatacaaatcaacacaattttgtttaaaaaagtttgagttttttggaattaaatat

SEQ ID NO: 49290 - DNA, 550 bp, Arabidopsis thaliana landsberg
ctagaccctagtacaggagtacgtactatgagcgagcacgatgaggctttgttcggttacaagagaataaatcccaccatgagtttaattcgggtctggattgagtgaatccatatgtcacacccaattctatggtgggattaaatctctactatcctatatgagcagaacgagggcgtccaccacctaccgtgcccccgcccggccccgcgcatctcgctccccgaaaacctctccctccgtgccagggctcatccccaccgtgtctccaccacagcttcacatgcccccgcttccgcgatcctcgcccccgtcccgcatctccccttcctttgttgtcgcgccctcccgagctccgacgcgatgctttccttggagagcagacgccggccttcagaaatctccgcccaagatcgcgccttctgctcccacacgcccggtccacgcgaggcccacaatccctgcgccttcccaatcggcttcgccactcaatccacgtccgcgcacaccagcgcgcctcgcaatccccgcgctctgctgttcatgaaga

SEQ ID NO: 49291 - DNA, 840 bp, Arabidopsis thaliana landsberg
tgtttgaggcgaaaatttggtttatcaatctataaatttggttgaaagttacttatctatggtttcttgattcctgcgttattatgatgaagaaccgccttgttgcactcatcacaaatgtcaaacctggaaagctaagagatgtaatgtcacaaggactggtaatactctcttctgtctgcctcaatccagctcatcaactatcaaaatattgcacactctcacatttgctcattttctgtgttcttgatttctttgccacaggttctttgtgcttcaagtgaagatcactcggtggtagagccgttgctaccacctgctggggctaaaccaggagagcgtgtttcattttcagggtatataattttaacaatataacatcgtacctctttgattgctttctttacatctttctccttcagccatcaaaatcatatatgctcttttctttttattgtttttcttgttatcacaaattcaagaacctttctctcgaaatgtttatctaggattgaaggaaagccagaagacgtactgaacccaaaaaagaagcaactagagaagataacaccggtatgtgttttttgccctttattaggttccagacttaaacaaaccgaagatgcgagtactgtgtttgcattattatacgtaaacattcaatctcacgaggacttcggttaatcacatgcatttgcagggtctctacactgatgaaaatggcgtagccacatacaaaggcataccattcatgacctcggctggaccttgcacttccagcatccccaaggctaccatcaagtagtaaactcagttgatacttctctcatctactctagc

SEQ ID NO: 49292 - DNA, 275 bp, Arabidopsis thaliana landsberg
tgacgggctagtcagggagctcaaagcgtgaggcgtataactcaaccccgagcaatgcgactgcgggattcctcaggtatgcactaaggggtacatcgtctccgatgtcagggcatcgtcgccaacccagcgacaatcgcggccagcaccaacatgaggcccatcattgactttaaacgcgcacagtagatcataggatagtcgtgcggctctaaacggttcgaagtcgcacctctctgagagaggcctaccgctgtactgcctctgaagcaagg

SEQ ID NO: 49293 - DNA, 534 bp, Arabidopsis thaliana landsberg
  unsure (1)..(534): unsure at all n locations
tgggttgcgcctcctctttccacttccccttcgcattcgtcccgtcgcccacgagcgaggccacctgccttcttgcttcattcatgtcaagacacttattcagcttttgtaccctctgtagttcctcgatgatgttgctgccacccccagcccctcgtcattgtcatcctcaccgtcccctttgcttggtgcgctcagtgggtcccactccgcgacgccggtgttctccgagaacagcgggtcgaactcgtcgtcctcgtcgtccctgtcgtcgtcgagggtgtcactcggctgcagcggtggcgacatgggggcatccatatctgtcagcgtcggcgggtgcagggaggggtcatggggaaagaacaggctcgatgttagggtttcgtcgctcgacgtcgccnnnnnnnnnnnnnnnnnnnnnnnnnnnnnnnnnnnnnatagtgacatagcagaggatatacatcagatgctgacatttttctctatcgatgggcaatataaatgaaaatgttgtgtagcattcaaaacttg

SEQ ID NO: 49294 - DNA, 532 bp, Arabidopsis thaliana landsberg
aaaaaccttagtttcatgtggctgcttcccaatgcctgcttgagctcatcgaactgtatagcacaatctcgtttttgcatcccgtggaagtagattttaaggctgaggttgtttctttacttgaactcgaaaagagtgaagaagccaagtcgttgttgagaaaatccagggatgctcttgcaaatctcccttcgttaaactaagcaagcacagagaagattttagttttatgcctgaagttgatataaatgggaattgaatctcctactttgtatttgtttacttatatacaagttcacattgatatatatatcttctaagtttttacttttcttccctgatggtaaaaatttattcacggcttttttagccagtctatctacttcttacattcgaggtttgtgagctgagctcggaaacccaaatttcaaaattggccaaactgcaaatcacgatcaaatcaccatgtatttagaagcttgaccagttccttgtgaagagatcgtgtggcttgcagtcattgcgactacta

SEQ ID NO: 49295 - DNA, 734 bp, Arabidopsis thaliana landsberg
attatacgatcatcatcagtctaatcgcatactaatatcaggtcaacggaagctgaccaggattctacaaagcttgaacttatacacactcttacctctaacatctctctcaacccaatactcttcgaccatatacaaaccattgtagacatatcgtttccctttacgatccaatctctcttctccacgaatcactctcacttgactcttctgcctcatactagtagccaacgccaaattcccttttaccaatttctgatattcagttttcttttgcttgttgatcacgttacctccttcacccgtataaaccatcacaccagagctgtatgtatcattgtatccatacccttctgatgccacgatgcttgtcgtgattctatcatctccgagtttaatgtagtcgataccgcacatcggcttggagtgaagcccgacgacccgaagttcggttttgtactgaaacacatctccgatgttgattccaggaaccgatccgattctcttctctgtgttcacttgttttcccatcttctccaacacagttagtgttttgaggtcgattctgcttgttgcatccaaaaaatctccaccacgttttgcttttttatctcgatccaactggttgtaaactttgttgaaaagactcaatacctcgagcactttcttacgaggagtaggatcacaatcagagtttcccatctccactttttgtctgtgagatgaagtttgca

SEQ ID NO: 49296 - DNA, 722 bp, Arabidopsis thaliana landsberg
  unsure (1)..(722): unsure at all n locations
cttatcttaaagatttgacagtagaaatcagttcgtgtctctccttcttagaccccaagttaccattttaattcaactcctgtttctcctttggcgctttcacatcctcgtggccttttggatcttccttttgcttcaaagctaattgccttgcataagtcgcactcctgcaaaacaaatatcccccaaaattcataaactttcgcaattccacttctcagaaaaattcaaatattcatcaatgtaccttttaaactgtggatccgtagggtctagggcatagtaaggagacgagaatagagctgagaatctcggatcatcaagttcagcagcaggtatcttgtcttccgaaatatcagtctttccttttttagctttccgtttaatattataccctttcagaccattaccatctcctgcattctcatcagctagtaacaactcaagctccgctctacttttttcttccgctgctacttcctccttctttgtctttccttctttcttcttcttcttaagaggaggttcctccataaagaaatcgtcatctccatcatctttcactgcctttctatcaatgttataatcgtcgtcatcatccggagaagaatcatcatccttctgtttattcttcctggctctcttcttctcgcgtctctgccttagatatgtttcccacaccgattctgactggttgtctttctttntaagaatctctttgc

SEQ ID NO: 49297 - DNA, 744 bp, Arabidopsis thaliana landsberg
aaactcaaattctacaacttgataggaaatagtatccggaattgcctgaaaacaacttattgagaaactaacaaaagagataatccagcgtaggtccacctcctggtctaaccgccaaagacgtgacatggttaaggcggaaagcaggaggtttcaaggtcagcgataaaaccacattctagtagtatttcttcttcaatcactgttgttgagcttgcctaccacttccataacctccaccataaccagcttgcccgttgttcccttggtgattcccatagcctccagagccatctaaagcatccgcatagccaccgccaccatggttgttaggcatattcccagatcgcccccctactgcaccataggcagatggagtcccgtaagaggaatcatttccaccatagccataaccttgactgccataacctgcagatgcaccagcttgacccattactgctgaaccaggaccaccagaaccaccccacggagctgcatttccatatcccacattcccataacccgatggtgcttgagcgccccatgaacttcttggaccacttccaaacccagctccagggacactaggattcccataaggcgcaccagctggattgccatacccaccaaaacccccataacctacaccattgcttccataaccataaccagtaccatacccagaaccaccataaggaggataaccccttccagtgttttgcggctgcatgtatctattagaat

SEQ ID NO: 49298 - DNA, 814 bp, Arabidopsis thaliana landsberg
ttccggggttatgaactcacacctttgtagagagactagatagtttatgaacttcacatatgatactttaccaaccattaaggaaactgaagtaaacagtttcctacttgacatattatctcaaatctcaatcgtcatatgttgtgaatgactatatactttgctaactatggtagttgttcgtgagatttggagttgaatagtaccattcatttttaatgaaacattgtatctatcaaaactaacacttgaaagaaaaaaacacattatagaatcaggaagaactcagtgaacattcatgaataccctaagcatatcgcaatttccatgttcttaaataactaggacacaatccatgaacatcgatagaaccggacagtgattactgattagtctttagttttccaccatgatgattacaaaagggtcaagtatgaaacattattttctcactgaaaaaaggatgtaaaaaaataagatacattgagttcaggtgaaaccagtaaaatagtcaggatgataaaagagcaaaatatgtctatctctacttcatccctaacaaagatataggccatcaaaagaaaacaaaagaccgaccttttcaaatgctacttctctcaaaagactgtaaaattgctgacctgaacagttttgattgatcattcactgctctctgttggagccggtttctttccatactgctgcaaggaaaaaacaaaccgaggatgaagttagaaaacttactcaacttgttcagacgttagagtcagttctgtgaaacacacacctttttctcaaaagagaaagggacata

SEQ ID NO: 49299 - DNA, 1046 bp, Arabidopsis thaliana landsberg
tttggatcttttgaccatctattttttctttgagtttttttttctgtgttcatcctctgttctattttttttttcttctcattcttgggttgatttttgacttctgtttgggttgatttagtctgcagggtttaagcagaggttggtttgtggattcttcgatttcttcttcagatttagtctacaatgaagtgagaatttctaaagataaacaaagaaaaacttgagactttagcaaggtacgacctttgactttattagtttgtttgaaaacttgctcctaaaatttgaaatctcatagttttagtagttatgttcacatcatcaggtctcattatcactctttaacattcattttcttgttaagctctcttaggtttaattaagccatggagctctgttctagggtttgtagatgagaaatgtcttaagggtctgtttggttagctgcatagcgtttagaacgctgttgctagtgcgttctagagtctaaaaccacaatgagacattgtgggtcttgtgtctgattgtactaaatgtatttggtgggtttgtcaggctttgaagttgtcctgttctttcaaagggttaataatcaattttttacccatacatctggtttttaaggtttgtactgttttcacgttagggtttttaacatactaatagagatttgttctgtttctttaatggtcgttcttagagaggtgaaaataaacattctttttcttctgaatcattctgcataagtggtgtgttttttgcagagattatatgggtgcaatcttttaattgtttgtttgattctgtagcagcacattttgacttatagcctcccagaaagagcaaacatattcacataaatgatatgaaagaaaaaaaaaagtacattggtttcattcatatacagaaatggtatagacacaagttgcttattcttttattccttctcttataaaaatagcattttccaagcataaaccatgaactcttcacaactcttgatgaatattttaacggagtattcattgtatgcatgcatcctg

SEQ ID NO: 49300 - DNA, 1167 bp, Arabidopsis thaliana landsberg
  unsure (1)..(1167): unsure at all n locations
tggcatgatggcaactttagatctaaagttagatctagacttcaaaaaaatcactttccattatattcaagttcgatatcggcttgcgtccttttttttaactcgactctcaaaatggtatgggtaaggtaacattacctttccccaattgagtggttagttctatatacgctttcgacagcatatacgattgagtgtgttgtttgttccttctggaatcatgttttgaggtaggcaaccaaatgtgtgaggtaggcttttacgtctaaatttcttcccttgctttaatttttgaaagattcaacgggcctgttttctcctaagctcgaagctagtcaatccaaaccaatatcaggaaaattgtggaccatatatatgtaaccttaatcaagaaaagaatggtaataagcagctagctagtttaatagtctagtttagtggaagaattttagccgttaatatatttgaaagagttagatcatctatatgtttacagaattggattactcatacaaaaagtaaatgtctttgttcaattaatatttgtaagacaacctaatttttaagattagaaagatatcgaagtttgtggtcctatatcaaatcatgaacgataaacggaggacgtacgtactatgaagtattttatataaacatgattttctgaatcattatacatacaaaatttaacatgaaaattggataatgacaataagaagtcgacatcatcatataactaattctgaaaattaatcgcactagagaaattaattgttagaaaataggtaatataaccaacctcaatgccacaagtcgtattcggtgcaggtaggcaaccaaatgtgttaagttaatgctaaataacatttgatgttggtatgaagagaaaagttaaatcactaatttttggtttggtgactcgctctcaatagcaatctttgtgcttaacaaatcatcactactgatgtcaataaaaaaaagagcatcattactattttatatagaaacaataaaaaacaaaaccttaattagtttcattccttcaaatgacaaatttaagatatttactagtattagatgataaattattcattcacatataaaactgcataaacataatctatngttttaatgactgatatagggctgaaaagaaaaaaagagact

SEQ ID NO: 49301 - DNA, 377 bp, Arabidopsis thaliana landsberg
ttttttttattttttttttttttttttttttttttttttttttttttttttttttttattttgttttttttttttttttttttttttttttttttttttttttattttttttttttttttttttttgtttttattctttgtgttgtttttttgggtgccttctaatgctattttattgtcttttgttagctttctctttgtttgttttttttttttgtggttttttattatttttttttttctttttttttattttatttttttattttttattctttttttttttatttttctttttttttttttttttttttttttgtttttttttattttttttttttttttgttttttgttttttcttttgtttttctttttt

SEQ ID NO: 49302 - DNA, 410 bp, Arabidopsis thaliana landsberg
aatcaaatcaaacctgcttaagaagtgcgctcataagatcttcttgattactatactgctcgtgaaacgccattgttgctgtatccgtagccactctctctgatttcaccctcactgaaccaccgtttccgtctgcataaacctgatggtgctgtaccattcccgatggtggctgctggtggtttcggccatgctcggtggctgcaactgtcgtgttgtgtcttgacatggacgaagaagagtaggcttctgaagcggaaaacgcagcggattctgagtcctgatgtgagtcaaaggctattccaatattcctcagatcccaatcattctgtctggtggtgaacatgtcgtagctcggcgtagtgaaaccgcttcggagctgttaacctcttcctggtaagaagtggggt

SEQ ID NO: 49303 - DNA, 775 bp, Arabidopsis thaliana landsberg
gaatctccaaatctgtaaatcgagatttcccaaaatatacactaagaactatacgaagtcgttttgcttatggacgaactcaatgcaaaacgacgtagttttatcaaacactatgccacatagtgtttatgaaatgctgttgtgtcgtccgactaagctattttaacggtttgactaacgtccgtttaagttaatgttggttttggaacttaataactagtatatgtagtaaatttgaattttgttaactgttaaaataaacactcattgtatgaataggaaaaatcaccgtccacatagtcatagttaaaataggcccttttacccgtgtacacattgtattcttgatgggctgttgagaatcttgagatcggcccaatccatcaaactttgattttgtttaatacaagtctaatataagataacaagcttaataatggacatgtattggacttggttgagtaaggcccattataaatccataagggtgttcaaggtagtacatcatctcatatcaaaacaactgtaaggaagaaattcaagtaaacgagtttgtctactatagctaaccatgaattaaccctagtttattagcggattagggttgagttttacaacacatttgtttaattaaagcaatgaaaacaatgcgattatgggttagttataatgtgtggttaatgggtaaacccattaggatttaatacaagattttttttaatttttttgagtatcacaaaaaagacatacaatctttttttggattgattttaaa

SEQ ID NO: 49304 - DNA, 1184 bp, Arabidopsis thaliana landsberg
gcatcagtccttttaacatcatcatcatcatcaacatcaacagtagctaaacctccatcattcgggttcttatcagaaacgcctaagtccgtattggcatcctcatcaactagggtttcagttttagaagataaacctgatcccttaccagcttcctccatgggctcactgcaatcacgaacagcctcactttcctctctcggttcctccatgtgaattatctgattccagctcaaaattactcaagacgtccgtaattattataaaaaaaaaagtcgaaaactttaaacaagaaacagaaatcagagcaaagggtattcacaaaaagcatgaaagattccagatttcagtgatacagtaagtgaaattaacaacgagaataatgaaattggcgaaattacctcaagagatcttgcaagatttggagaaaagaaaccaaaggctagggctttaatgggtgtcagtaacagagacgactcagacgagtgtgggtttccaagaaagaagaagaaaagtgaacactacgccgaattcgtcagtcgagctcgagcgtatcagtcatatttgttttaagttcttcggaaaacttttagattcggagaggagagctaccgaataactcttttgcctgttcacgattttcggggagggttggttttatgatatattgcatccctatgatccatttaatcgaccgtcttgatttatccacgtggctcttttttgaggtaaacttccgattttttctaaattaaaataattcaatacatatatggacatttttttgttcttcttttccttttggatattttttgtttttccaaatatttttgttcatgccaaaaatccaaacatgatgcatctaaaattagcttaagatcagtttactaatataaaccatgatacgtagattcgtggtttatgttagtgtcgttgctagattaacgtgatgaaaaagactcatctatgtctttgtgactttttctggtttgggatagaaggtatgcttcaatttctacaacagaaaccatttcaccatgacaccatccactgaactttaccgggacttttcagtttgaacattttggttagcatcaaaatcaccaccgttatcttcaacttcacaggtttccttctcatcagtcacctgattcccaccagatactacactctcctattctcct

SEQ ID NO: 49305 - DNA, 587 bp, Arabidopsis thaliana landsberg
  unsure (1)..(587): unsure at all n locations
ctaaaaaggaaaaaagaaaaaaagcagtatagtctttccatagtcagagtcagagttcaccaaaaaggaaccatggtcctttgaggtggcagagaatatggaaatgaactcattacatattttgtacaacaaacccattttggaattaaacaggccctctatgttaatcagagcataaggatctttttctctacaaactttccagttatctttttctaagagttacaaagtatatttgttttctatattaatttgggataatatatctacatttctacaaaattcagctaaccgttagtgagtcactcatacatatcttccttctatatataaaaagaatattattagttttgagtggactgatatattctcttcaacaaaagaaaacaatcttctcaaacccaaacgttcaagaaaaagaaaaaaaaacgatacttacgatgagtgcggtaaaatcggcgttaggtgatatggtgataacgtttttgtgggttatctctnnnnnnnnnnnnnnnnnnnnnnnnggcgattgtatcgccgtaggtttcatggtgtccttgggctgtcttgtgatccacgtttgttgt

SEQ ID NO: 49306 - DNA, 808 bp, Arabidopsis thaliana landsberg
  unsure (1)..(808): unsure at all n locations
ttttcttctcactataccaaaaactatttttttttttcttcttctcattatatttcatcttcatattcttccaaaatctcataagtaacaatgttgtatcaacttggcggcacaaatataccctcctaggtggggattcaataaaacccgaggcggtggcaactctttgcacccatcgaaaggccgatctagtgttttttgaataccttgtcgaacaacatacgtcaaagcttttacgatgttgagcctataacaaaaatgtgccttatttttttgaagctttcctttctccggaaacacaaaatctacaagctcttgatacgagtactcagtcccattttcacgttgtttgatccaccgtatcgcagtgactaattcagccgtcacgatcgcccaacatatatctacattatatcaaagtatttttaaggaaaaacaagaaccagttcataagtaaaaacagcctagaatttgaaactctaccatgttctccctgatctttcaccggaccataaaaaggtctccagtccgccttctttgtttcatcaggcactacctttattggtcgatatgtgaaaagcagaaaataatagtcataagcaccttgctttgctcatataataacgaagttaacatcattcaaacaccaaaaattaacaaacagaaaaatcatttgaaaaataaagagattcaatcaagttaacatcattaattacccggtgttttctaagcaagtgtagacaacatcaatagtttcaccctttactntaggtttcactactttgttcttactctgagtatcttaaat

SEQ ID NO: 49307 - DNA, 1054 bp, Arabidopsis thaliana landsberg
ctcatggctcatatgacatcatctctagtggacttgtccaatagtagtgaccttaaaaatttggctcaacaacctgatattatcatgctggtgaggaagaaaacacgtgaaaacttagatttagttattggtaaatccttataaacagaatggttctttcgtatttgtgttaggtgagttgtgtgttagagcggcttcgaggagcggcaagtgccactgaaccccgaacacagagagcaatatatgagatgggattgtctgtcatgaatcctgtactccgtcttctcgaggtttacaaacatgaggtactgttcaaggcgcaaatatagtgatcacatgttattcggatcatgatgaagtctatatacttgatatttcagtttcgatggtgtactatactctacctgtcttcaaaatccttgcggttggttttttagccattatggtcagaaaaaccactaatttattgttattgcttagtctgcagtgatatatcttcttcttaaatttgttgtggattgggtggatgggcaattatcttacctagaggctcatgaaacagccgttgtcattaatttgtgcatgagtcttctacaaatatattcgtcacacaatattgggaaggtaaatctgttcccctatctcctccttacttctctcttcagactgagcgtcattgtttgagcagacaagagaagtttttgtgtaccctcacatacacttgctttttttttacctcagatatcattgtctctctctagtaccttgcttaatgaagcaaaaaccgaaaagtataaggatttacgcgctctgcttcagctactttcccatttgtgctcgaaagatatggtaaacgttcttgctttcacgtactgtagaaaatatataacacattcaccagtattccttatcttctaacaactggtattacctttttgcaggttgatttttcatctgatagtatcgagacacaaagtacaaaattttcccaggttaaccaagttaattatgatgaattctacaagaatggtttgtgtaatttttttaacttaca

SEQ ID NO: 49308 - DNA, 688 bp, Arabidopsis thaliana landsberg
  unsure (1)..(688): unsure at all n locations
tttcgaatcctcattctccggctgtgaatacatcttccatgtcgcaactccgatcaactttaaatccgaagatcccgaggtctatcttgaacagaatgtgcaggcttttatatactcataagagaaacattatcaagcttatcttgtttttgtttcaatatacagaaagacatgatcaagccggccatacaaggagtgatcaatgtgttgaaatcttgcttaaaatcgaaatcagtcaagcgtgtgatctacacatcttcagctgctgctgtttccatcaacaatctntctggaacaggactcgtgatgaacgaagaaaactggactgacattgattttctcacagaggagaagccttttaactgggtaattacgtttcttgttacacaagctagggctttttcttacataatccaggttaacttacttctctgttcttttctagggttaccctatctcgaaggtgttagcagaaaagaaagcttgggaatttgcagaagagaataatatcaatctcgtgaccgtgattccggcacttatagctggaaactctctcctctccgatcctacgagcaggttatctctctcgatgtctgtcatcactgggtaacacgaatttaccattttatcccattctgtttcacgataaataatcaagatgatttggtgttgttgtcacggacagaca

SEQ ID NO: 49309 - DNA, 1096 bp, Arabidopsis thaliana landsberg
cacaaacactctctcttaaccctctgttttgctttcttttcttcctggaacaccatgaccttacttagcaaagagtccaagctaggctgcatctttacctgatgattggttgccgtataatatgtaacattcttcgcttctcaaatataatggagggcttaataactctctttatgcaaactagttaatttttattcgcatgaacttattttgtgaaccatcattctctagaattaactccgaccgcctgatctaactcttccatcacataacataccatggactttttttttaataccgatatactccaatcactacttgaaacattacattacacaactcttaaaaaagggttacaccattggcattcttatagccctgtcttcagatataataatattgccaaacctttcaaaaccagctgaatcgggacttacgtaccaccgtccgatgcttccgccaagtatccacgaaagcttcaagcaagagatagagagcaaaaacaaggaagagagcaaaggtagcagagagaaacactagagggtgtggtgagattactgccattgctagtgcataagaaatgcacagacatgtccctatataaaaaaaccatatcgtaaacaactgaccgagtggtatgagacaaaaggtgtagaatacagcgcagcagaaaccaacggtgttggaaatccaaagaaggatgaagaatgtctgtttcatcaccacagaacccgcattcgcattcgcattctcagattggtgtacacctccgggaggctggagggccatctgataagtggctgttattatcaaagtgcatacaatcagaaatgctccgcgaccttgatctgaagtggaagacttcatgcgtttcatggacgtggaatagtatgtcataaaattgattggcgatttcaacaaatcagactctttcttgaatttcggcatagaagccgcctctacacacccagtttttataacagcttgttccaaatctaggttcccaccacctgcgttctctccctgggtccttaagatatcaacgaatgttaaatcatcaatattaactaggttcggctccaccaaccggcatttt

SEQ ID NO: 49310 - DNA, 368 bp, Arabidopsis thaliana landsberg
  unsure (1)..(368): unsure at all n locations
aagacaccaccaccccaaaaganngagnagcagaaacctggcgactctttnagaggcanacaagcnagggcccggagcaaaagaagagccgaacacacccanccccccgcagaacaaaaaaacaacagangacnncgacgaanaacaacgaaacagaaagaccacgaacngcgacacaaaaaggaagcnagaccacgaaccacggacaacgggcacaccgcccacacaggcangagnccaccgacnacgaccagagacaggacagagagaaacaaccaacaagncgcnnccnaacaaagacgaacaagggccgcgggcacaggaacaaaaacgaaaaagaggacacccaagcacacgaaccaacacca

SEQ ID NO: 49311 - DNA, 916 bp, Arabidopsis thaliana landsberg
gaaatatataaattaacggatataaaataaggaaacgaggccaaaaaatgtggtaaaacgtcttattgggaagatcacgacctgtaggtgtaaccgaatcatcctaattttgattaaactaatcaccgaccgatccagagagatcgaaaaagacgtaatcctcttttaaacctgatcgagtcacactcacaaaaccataactgttattccctcaaaatcctctcattttttctcttaattctctgctcaccaaacttggatctcgcaccagtttctttgtttcaggtaacattcattgcaatattgcatcatcactcacatattcctccgattttcatttatacatcctcgttgttagcttcatcaatctcatcatttcattagaaaccgatcaacagagtcgtttttgtgtgtattataattaagtaatagtaagacacaaagacgtgctcatatgctgttaatgcccccatgtgtcgtggtaagcggccaaaaaaaaaatattgtttgcaagttgatttaattatattttaataagtagtatatgaatgaatagtgggatctgatgaatgaatgaaatgtttgtttgtctgtgaggaaacatccgttgctgtcacgagttatgaccaagctaataatgtccgtaaagtgtgagcaaacttgtgctcatgttctcttgcttgcttctcaagattataatcatcatgaatctctcagccttacttatcttatctgacttttttttcttctctttgattgactaagacaataaagcttcttgcattcttctgcagaatgtgattttgaggatcttgagaatttcaacttcattgtctgttagtctctcttgcgaatttctttggagatgaaaagattcgagaggccaagaacttcgatttactttcagcctaggacc

SEQ ID NO: 49312 - DNA, 654 bp, Arabidopsis thaliana landsberg
atagaacttaatcttctccatcttccattgtgtaggccatcgtcagtttcataacaatgcaatttcagctatgtactgtcttcttcacattttcccttggtacaagaacccattattttggacggacaattctccatggtggtgcaagggtatattctcattctcggttcttaaatctctgtaaattttttggaatgtgataaccattgtttgttaacagtaccaagccactggaagaggcttcgtcgtgaagcatatcaaattttctgaaaactaccgtctttattccagaagtcattttgtcaaagcgtaatctcctcttctttagttcttatgtatatacatttctgatgtatacctgtttagccatagtaaaggattgaaaattcattgatatgctacttctttttcgtttctctagaatggaagttattcttttattggttgtgtaccttgcgtatggcaatgatgaagctggtgcggtttcctacatcctgctgacagttagcagctggtttttggctgtttcttggctgtttgctccgtacctattcaaccctgccggatttgagtggcagaagtaagtggtgctatcttatttatatcatgttgagtgttgagtaacgtgtttttcattgaacaacaataaaatta

SEQ ID NO: 49313 - DNA, 1077 bp, Arabidopsis thaliana landsberg
cgccaagttagggaatccgaataccgcgtttgatgaattcgtcgtattctcggtttcttctgattcttcttcagagaagcgtttcgggcgtttgattcttcgcagagactcgatttccagagaggcgatgtctacgaacggtgataatttctccatcattgattgacactcgagcatcgttttgatcgatgattacggagagatttaggtaaatttcaaaaccctaattgtttcatagttagagtggatttttgtggaatttatgagcttctcgtttatttatagagacgagacgatagagaggagctataaaggtttgtttccttttccttgaaaatagaaaaatagatttattagtattattgtttttgtgttagtagaattgatttttggagatattctgcggatttttttttgtttctattttccttttttttttttgtgtaattacagattttgtttttgataattgtaagtttgtaatacaaatttaattatgagaaatctatattgattatgaattgagattttatttgatttctctaaagaacctagtgactttcttgagcaatatcttcttgttttggcaagttttttttttctgtccacatttttgcacgatttttaagcaacaatataaataatatatggatcaatttcttatacaataaatttatcgtataattttgtcaattactagttttcttttttttaggtttttgtgtgtggacaaactctcttaaatcattttcatgtaatgattttgactcttataaattactctcatttgacccaaaaaaaaaaaaaaattactcaaggtctgaagtctcaacaatcaataattttgcgttttgactatcaaattcatcaagaagaagaagaattgattatttctgtatatatgtacaatatcttttttacttctttagtcgaagaagacattgatttcaatcaaagtttgttttggtaactttttttgcttaccacaagaagatgatgagaagggtaacgtatcgtcaacatataaaaatcataaaacaatgattaacaaaaggtatcacagaatctcagaaaatg

SEQ ID NO: 49314 - DNA, 759 bp, Arabidopsis thaliana landsberg
ataacttgataccatagaactgattttgtgaatttagatctatttgtttattataatgaaacatttttaaccgtgaatacgtaaatgagtttttggtttctttatcgtaaagttaatttcttatttactttctaaaaatagtcgtaaactcgtgatatgaaactataaaaggtaaacaaaggttacgtcatttcaaaaaatcatgcaaagcccacaacacgtgtgggcccagagtaaaacatattggcaatattcaaaggtcaacaccaactttcctcctcgcttcctcaccacaaaatataagttaacgacgtcgctctaacgctgtgtagtcttataaataccccttcaacgactaaatcttctcccctcataaactctctcacaacttgcattatcgtttcaaaaatttctctcaacgacgaaaaactgagtcctctagaaatttccacgacgacttgatgatgacgagaaaagcaatgataaacatttgttgcgtggccacaacgccgtccaagtatccacctcctcctcctcttacgttaacccctcgccagagtttggaatcggcggctatctatggagtcattgaatccgcggcggatataatcgagagatggaacactgagaccaacactttcgctaaagtaacttgtatgttctacgagaacaaacctgaagccatgatgttcatcgaacgtgtgaaggatcttcagaagacgatggacgtactcgtgagtgaggatccaaactctgaga

SEQ ID NO: 49315 - DNA, 644 bp, Arabidopsis thaliana landsberg
  unsure (1)..(644): unsure at all n locations
ccaaagtattttagtatgttcaaataaatatttatttatttttatatattttttactccaaattattacttgcgaaaatcatttcatttttctttgtggaaaatctaaagaagataagctattttgttctttgctgcagttagctatatattgtttgtacaagacaacattggccctttctatttttgttccttcttttgtcccaaacaaaaacactcctctttatgtctccccctttcacaattatgatttcaatcaatcaacannnnnnnnnnnnnnnnnnnnnnnnatacaaaaaagtaatnnnnnnnnnnnnnnnnnnnnatatctactgttgtgtatataactttcttaaaatttgatttgaagatattaagacttttaagacttcttttttagtatgacaataattgaagaaaaatgttggatatacttaattccaatgactgaggaaataaccaaatcaacataaacaaaacaaataattagactacaatnttttttgtctctttctttcttttgaatacttattgtccctttatatacgcattaatcactntcttaaatttatagattatattgtaatggatagataccgtttaacttctacatatgaacacatataccatattactacctcaact

SEQ ID NO: 49316 - DNA, 609 bp, Arabidopsis thaliana landsberg
  unsure (1)..(609): unsure at all n locations
tggccgaaaaggagagcaacggagtgcgcgntgtgcgtcaccggacgagccgggttcatcggctacctggctcgtcaggaagctcctcgagaaaggctacaccgtccacgccaccctgcggaacaccggtgcgtctgatggcggctcctcagctcgatccgcgcgtcgcgaaaggcgaaacacgccaaaggcgaaaggagtgggtcgggtctcgtgtgtggctgcctgatgattcgggaatcttagccggattcgtgtgctggtgggtgtgcaggggacgaggcgaaggcggggctgctgcgtcggctggtccccggcgcggcggacggcatnnnnnnnnnnnnnnnnnnacctcttcgacgccgccaccttcgcgccggcgatcgctgggtgccagttcgtcttcctcgtcgccacgccattcgggctcgatagcgccggctcncaggtgaagcttgccgtcgcgttcgtcccttcactgttttactagtaacgagtatgtaggctgcgaccggcgatgctgtctcttcttaattttaagttgtggaaaattactgtccttgcaaagtgaaaatttgatcagactgagtatgagtaaagaccagtaag

SEQ ID NO: 49317 - DNA, 898 bp, Arabidopsis thaliana landsberg
tccaaatgttaatatcttccccaatggaaaatgttttgatgggctcactaaatctagggtttttgaactcatgagaattagggttttgttatatcttctctttactaaaaaccaaaaaaaccacacaacaacaaaataaaataaaacatttaaaataaaaaaagagataacattttgagatttgggttttataaagaagaaagaaatcttttttgtatctttgttgatcctccctacccgaaattgcttggccacaaacgattttctcaccattatctacgaattatcttggatttttgtataacacggattccatatattaggccgtgattttagttttcagatgggcttttataaggcctccccctaataatagcccgtatacatgattttattatcaattaaagacattcagatttcagatacaacaacccatactgcaaaagaatctgaccacatgccaaattttgtttttcgaattaaactcctaaactacacaaaacttgtgaatatgatctcagaactatactaactcaatgtgattttttcacattttgcatactaaaagtaaataattagttgaatgtgaaatcaggttaaaaaaaagttcttgaattaacacagattattgatccatgaagctacaaaatctcaagttctaatggattacaaagaacaaaaaggaagaaaaacatgttttgatttcgtaatagaactctagacgtatagacaaagttaaaccaaagaattaactgatgtctctgcacaatactttatcatccatcttagtacaacaacaagcaaagacacaagacatatatcgagaaacataacacaaatcctaaacgcaaaaccgattcaaacttgattggtttgtaccttaaccgccttaaacacc

SEQ ID NO: 49318 - DNA, 536 bp, Arabidopsis thaliana landsberg
ggcaacagaacgtgcatagtgatcgttgtaaacgtatcacggcaatcagagaacacaagtagtgggtagacaagcacaaaattcattttatcttcaacacaacatgaataaatagctgttaatcttgagtgtatctgtcaggttaactctcaaacctcctcttaacctagtgttgacgaagttacatggagacatgaaaggaaccagcatccttagtctacagttacagcttacacattgaccagacggtactgtcctttgcatgtgtttaactagatagtggtggaggcagtggtggcatagacatcagaggcagaggcattccaccaccttgatgtagtagaggtaggagtggcatccacataggtggtgctgagataccagtgggaggaggtagcggccttaccatgccaaccggagtaggcatcatatttggtgatgatgcctcattgggacctgtactggaattgccatgcatagcaccggcatagaatgttgacgggcaagaaggttcccgtgcatagcattggacgggg

SEQ ID NO: 49319 - DNA, 544 bp, Arabidopsis thaliana landsberg
tgtgaaaaagggcagaaacaagcttggaaatagtttatttgccaaggatcttgatcttgtgcttcacttccttgttattactgcatcaaaaatcttattttaaaacaaaacggtagaaagttaagaaggtctctccatacattttttttgattgagacaggactcaggaggttgagatttgagaaacaaaagaaacacatgaattccattaatttgggagctgaacctctctcatgctttggagtattaaatgaggatgggctttatgatttatatgggccttcacaattggatatgatggaattctatggcccaaaatatcctcctccaaccggtaagattaatgttggccataggaaggtattgagatcattgaaaaattaaagaactctggtttctagatagctctttctgtcttagattttgttaggttgatatgatggtttcgaaataaagagaagcttaattttgaaatgatatttgtcaaaaaagaattggttttgccaactctatgcctgaattggttaacaaattccacataaac

SEQ ID NO: 49320 - DNA, 554 bp, Arabidopsis thaliana landsberg
gctagttcggggacccgctgcgatactcaggtaaatgatattttgttcctttgtatggtgctagatatccagatcgattaggatatcctgagtcaacaagataatatttacctaaaaatacaccgacatatgagagtagaccataataatttataaattgaaattatataataaacaatatgatacctggtggaggatgtggaaaaatagtggcatattttgttagagcgttattgaacaccctcatatcagatatgaacattacaaatgtctacaaattagcaatggccatgtgttagaaaattactcaccgaattatttgcagtaatttcagcttcaacttcaattggttcatcatcttcccgaccttgagcatttaaatcgatgtcaataccaacacttcggccaccacgaatgatccttccggcactcctactaccgcgtatcacaccacgtttcacagaactagctgcacgaccggcactacgctctgccagtgtaaatcctgcgccacgacgacctgccgtcatagaacacgtaccatggttggtctg

SEQ ID NO: 49321 - DNA, 258 bp, Arabidopsis thaliana landsberg
tgagagacgaaatgtatattgaccacaacctcgataatcacagacccaacttatcatgaacgattcgtgtgtgtgggcttctattatcatccataagtggcggaaagctattggagacatctattattggccgaacaacatacaatggacataactggcattctgactcagatatataaaggcgaccacaagcttaattaagcggcgggtgagagcatgagatggtgatagaactggcttgaatcggttaccatcctc

SEQ ID NO: 49322 - DNA, 555 bp, Arabidopsis thaliana landsberg
ctgcggcatgcggtggttatagtgaggctcgctacacggggcatccatcaatcttaggctatagcgcctgagagattttgaggcttttctgattttcaagtgtttcgaattataacgttaaagatgtcaaaataaaagaaatgtttagtatgtaaatacgtacgtagcaataaggtcgtctaactttttttttatcgattgttatctttttaataaaactttgttaaatattgttgttaccatttacatctaaaatctttagtgatcagctaagtgtgtcagcatcagaattattagtgctacaatctcgctctcaatttcgcagttatgttttctgtaaaatgtattgatacgaaccatttgtaacaattttatttcgtaagagtacataaatctacagattatcagactatcactattgtctttaagtagcagataatgatggttccacattctacaaataccctaaatttattcgctcgtttcttttctttttttgtcttataattactgccatcattgatccgaagaagacatacaaaccaatgcaatcat

SEQ ID NO: 49323 - DNA, 568 bp, Arabidopsis thaliana landsberg
cgggcttctgctggcgtgccttgtcaatacagttgggctgatgctggccaagttcatgcgcaggcaaggcgagttgagcgtgcgtcgcgccatgggcgcatcgcgccgcgcgctgtttgcgcagttgcttatggagtccggcatggtcggtctggcgggtggcatcggtgggttgctgctggcgctgcttggcctgtgggtcgtgcgtcaccgccctgccgaatacgcctcgttggcgcacctggatccggcgatgctgttgatcaccttcgtgctggcggttagcgcgagcctgctggccggcctgctgccggcatggcgcgcctgccgcatcgcccccgcttccgccctgaagagccagtgacatggatatcctgccgatcttcgctgcactgcgccgccacaaattggtgatgtggctgctgatcctggaaatcgcgctgacttgcgcgattgtctgcaactcgatgttcctgattgcgcagaacctgcaacgaatgcacatgcccagcggcatcgccgagcacgagctggtacagattcagatggcttacattggtactcgacc

SEQ ID NO: 49324 - DNA, 525 bp, Arabidopsis thaliana landsberg
  unsure (1)..(525): unsure at all n locations
acgcggtgtcgagaccgacacgtgccgttggttcgcggccgccgccaggaggacagatgcccctgtcagatgaccgagctgaaggactacatcgaccagcgggaccaggcgtacgcgttctggctggacatgatggccgcgcgccgcgactacgagcaggcgaaggccggcggcaacgcggcggtcatcagcgtcgcgcagaaggcctacaacgcggcatacgcggcgtggcaggccgaccagaaggccggcaccaagtgagcagggtcgcgccgtactggaaagccgtggtcggtttcgtcgcgccgggtgctgcgctgatcatcgcgaacggcggcgccatgtccggccgggattggatcgtggccgcggcgacctgtgtcgtgaccggcgcgacggtgtacgccgtaccgaaccggacggagtaggctcggcgcagctgctgatgacccagcaacgaacgacanccccggcgtaatggccggtgggtgtcgtcatgttcagcggcggtgcaccgcacagtcg

SEQ ID NO: 49325 - DNA, 460 bp, Arabidopsis thaliana landsberg
atcttagtttttcactttctgtggtaaagtaagttgctgtgatgttttatcaaagttgttggctaatgattgtatcagtgagtttcttgaccacaaactaattcgctttaacagaaatcttggagagttccaagcttaagaaatgagaatccaaatatgtagagaattgtgtcatattttgtgaagtgttgaacggagagtggcacttgaagtcacatgcttatgaatcttgaggataaatttctactttttgttgggttctaagataaagtaatatttttgtgtttgaaaacagagagaggcacttgaagagtcgtggtcaagccaggtggttctagctactcttttaatttaatgatgattgttaaagtatatcaaatcacgatgagccaaggctggtcgtatttgccgcacggcatttagagatgcttgcatgctcttcatttattttatatattta

SEQ ID NO: 49326 - DNA, 517 bp, Arabidopsis thaliana landsberg
  unsure (1)..(517): unsure at all n locations
atacctgtaaaccgtggtcaagccattgaccggaacaatcgagcacgttcccgtgagtttttttagtcttcacatcgggtcgcaagcaccgtccaacagcttggacgtagtatgacaacgattttgacctgcgagcgagaattatagctttaatatccggaacatcaaaaccttctgagatgatgtcgtagttgcacaaaacttttaagcggccggccttaaaatcagctacaatatttttacgttcaactttgtcaattgaaccatcgagatgagctgagggtattccatgtgaattaaattttttcacaagcgttttgctgtgttcaacatcgcaagcgaagacaacagctttccgatttggagaatagcattgatacgaatttacaacatctgctatcttcttttccttccgcatgtttttggaaagttccacaatatcataatctccattccgcanagatgtttcctcggataaatttgcgcagatgtagtgctttgggttaactaaaaaccc

SEQ ID NO: 49327 - DNA, 2108 bp, Arabidopsis thaliana landsberg
acattgtttgcatcggtttcatcaaagatgtatcgtcgagtggttaagacagcaaaattctttcccactatgcagtcgaattgtgctcgaggagtaatgaaacaaattctgaatagtctatgttttttttttaatgtattgcactttaaactgtttttgttgccaggcatttaatgaaaatattcagattcattagagctcctctttttagttataaaacacaacgaaaactcgcactgtaggttcttctagcttctatgttacccataaactagaataaaacattcagttcatatttaagcatattacattacattactaaaatacaaaaagtttgaatcttacaccttaccgataatcatcgatagcctgaagaagctgtgacggtgttgctgccgggtcaagctgtctgcaacctctgggtgcaccgggtgcttcttgacctgtcagcaagtaagacggtatcttgtgagagaatctcgaaatttcatccctaaggaaccttttgatttctttggaatccaaatgatggtgaaacacggctttgaaaccagcaactttaaccagaggagccagctacccaacaatattcctctgtgtatccttcaactacttcaactatatcgtactcaactgtttcgactcctgtaagatagttccagtcaggggaccatttccgatacagagcccagacatcgcctgttctaggatatataaggaattccccatgattgcctttgaccaggtttactttgtgtgagaaactgtaaggtgacctgtagattagtgttttcctaactctgaaacctccacaactttttggtataccaaaaccaagccaattcgttgagctaggctcaccgtttgttactggagtaagccaactcatacgcaccttgaatggatctacggagataacattatgtatcaaggcatatgatcgaggcagaccttcatgagaatcgtaaaaagcccatatctggttatccttaactgacttttcagttcgatccttgtcaaagtcacaaaaatccggcgcagtaacatctaatgtcaaggctcccagtgaattcaattccttgtcagtattcatgcagcatgattcaatggcatttttgtttactgaagaacctgcattgaaaccattgagatcctcagtttccattccccttccgttagtttcagtttcagcaacgatggtgcataactctggcaggtttctgctgattactgatttagctttcttcttcaataaattcttcagctcgtcctcagaaacttcttttacaccagtggacttgggagcaagacaacttgcaatgttgccaccagcaactgcattttccataacctttcttctttttggaggaattgttgatgaaggaccagccgtccttttggtatactctctacgcacaacctcatcttttcgtgacccggtcggtgtagcatgagcagaagttttagttccagtgaacacaccccactcaaaggaatcatattcaccatacaccccattgttgtctcttccaggtacatttttctttcttccgtctgttgtatggcggagagagtcgaattggtgctcgtgaaaggtcttgcgaatcgaacctgaacctggaggatctgtttccacagctataaacggcttacgacagttgggacacaggaggttctgatttagataaacactatgatattcatactgtgttctgcaagtacggcatacagtccaaaaggtcccatcagcagttgttttctgggccgaggtagaagtagtagcggcagcagaggcatcacttgcccgttttatacctctctttgaactctttactttggttgtgtagccgctagctttagtaactttctgaaacccattggttgcaggctttgacgatgatgctcctcctcccttatacaatcccacattcctcttcaggtcatagtcagctctctttgcctggcagaaagacacccaagcttgtaaagaaacttaaaggcttcctctgctccgactgacgtgttccgttggataagcatacagctccttctgacgcttcctccattaaaaaaagctcagggttagacagtacccatagtgtctcatc

SEQ ID NO: 49328 - DNA, 700 bp, Arabidopsis thaliana landsberg
atatgagattctactttcaacatatactaatcctaaatctctagcaattttttatataagctataaatatcatgaaaatgtattttaatcgtttcataatttatgcagtcacactaatggaaaaaaggccaattattattattttcttcagactataaatgaaaacataaattaaaatgcagattagtttaaaattttaataagtaagtaaaatgcttatagccttatacaaaatcatatttggaagtttctaacattgttgcaatttgttatcacaaatcacagtaatatttgtatactaattagtaattacaactatacacaaatttaaatgggtaatcatatatttgtgtccagtggattgaacaaatatgctcggcccatgcggaagtaatgccaattttgggtgagtaaagcccatgcgaaattttcacataagaaatgcatgctttttgttttcaacgacatgagttgcatgctttttatcattgcttatatagatgcaagtttgcaactgcttgatattttttttatgtagacactactaccaccaaaaacttttggtctgcttattcttgtttactatgtaaaaaaaataaatgaattgtttatttacttcgatttgatggagtctggcttatgaagatctataacctttacagaaaatagataggtacaaaaaaattttttagaaataaaa

SEQ ID NO: 49329 - DNA, 492 bp, Arabidopsis thaliana landsberg
tatgagacattttaagaatgctaagtggttatttgattttcttgttttagttgtatgatattttattgtattgacatcgattactactgtgtctctttgtctagtttttgttttgttttttgattgtgtaaccaactacccagttttgcagttaagattatatggattaatttaaggctcactcaaatccggtcaactattctaatcttctttgtagatcaatgattaataatggaatcaattatgattaagtaaaacacaatgaaaccattgaatcaaacgttcttacagaaaaaaatacttcttgtttttcctcagcaaatagtttcctcaaaaaccattaccttccatgggcgcctccttctccgctctttacgacgttggaccgatccgcctcagtataaggtgttcatcaacttccgaggcgataaacttcgtgatgggtcctagggtttcttgtggatgctttttaaaagagaatgtcacggtttt

SEQ ID NO: 49330 - DNA, 185 bp, Arabidopsis thaliana landsberg
tattgcacgatcgatattgagtgtattttttttttgtcataaggagattctattaggtagtgaaactcacggaacaaaggtggatacaaatgtacaaaggacatgtttagctagcaaatcagcctcatagttggctgatctaggaataaaagaaaaacctacaaagtggaaacaagcacaaagag

SEQ ID NO: 49331 - DNA, 706 bp, Arabidopsis thaliana landsberg
acaggtgaaccaatattatgtgacaactgtagacctttggaacaattgctattgggagatgaggacaccgacctcaactctaaatcaacatagaatttggtttctgatctttataattgtgttggtaaaatatttttatcgaggactgatatctaacgatgatgagattacttattattgtgaatggtttacaacgaggatcgaggattatagagtttagtttgacaagcttcaattttcactctaatcgttttggtctgtttttttttttaataaactttaaaccaaaaaaaaagagttgaaaaagttaaaataggggcccaacttttaatgtaggctccaatttgacaaattgctttctccttatgggataccatttgtctctacaattcttttttttgatgggcctacttttcttatcacaagtttgatttatgaattctactcaacctgtttttaattttattggctatgtagttctattaaaatttctgaaaatgaactttttaattagtttcccttcataaaacacaatttcaagaataccgtgcatatatttttattggatttttaaaatgactgtaactaattctctctgtgtgtggttattccggaaccgcaattaactacaaacatgttaaaaaaaagaaagtaaaaatagtattacaaaaaaaaatgagagggagagagagatagaggagagtct

SEQ ID NO: 49332 - DNA, 576 bp, Arabidopsis thaliana landsberg
aaatacacagcatagcttcatagatatatgtatgtctaagaaatgaccttgtacagggctagcaagccatgagacatgcggcatgctaacgatggactccctttaacttaatgacttggggaaacagaacactcaagcggaccacattgtcgcgacactcgcgagacttaattattaaccgcctatctctttttgtacctgacttaaaggtggagtgacgctactttctctttgtgacctaggagagggaccacgtccaacgccacgaacacgaccccactgttctatcccacatacctaatctaaggcgtcatctaactatgacatccttttatcatcattcatgcatccaccctctcgaatcaaggtcttagctatcctctacgaacatataaaacactataattttatatacaaccgcatatgtggaaagagttaacgaagataacaaatcttaacttctggttaccgatcaagaaccaataccctatactaatacactattaaacaattaaagttcgcctctccatcatgcgcaagaacagattcataagaatacagtgagtatggatattc

SEQ ID NO: 49333 - DNA, 1128 bp, Arabidopsis thaliana landsberg
aacgcgtataattcgcctcctgatattatcttccacctctctttatttctctcgaaataagccgaaattccaaagaactgtatcactgcgaaaaagcaagaataggagacgaaggagaagcgagctgggtactttttaagcaatggtgattgtaacacaatccaacttgaccaacataaacagtgtcccatcaaacagagacatcccaacgtccagttcttgttttgttcctctgtttcttcagctttgataggttggttcactaaacgcagactcggttcgtaaatagttggtcctttatagagtgttataaccaaagagcctgcgacagatacaattgtccccaccactttggctataccatctttcctcttccattccaccttctctattctacaattgttggtgtgtcataataaaaatgagatatgagtggtatcagagcccactttgagggtccacaataattggtccgcaagctacacatcttgtttcccaagttatctccaataaagaatcaagaacatacccgagcaacgctgccatgaggaatgaaacagcaggaacaacattttcagttgctgatgcgaatgttggtgaggtattgtccaatccaaagatgtaaaatccttggtttaacgttattctataaccaaaaatgagtattgtaatcaaaagtgttttgtcaatgatcttgactccaagatataaagacaagatcatacccaacgagtccaagaaggaagaattgaatcagaaaactgattttcatcgccggtctttcttttctgttagaaatatacaaataatatcaagaattaaagaattgaagatataagatttagtttggtttaaagaagtgtaattatacttttcaaggaagtaagcagagggagcaagaacagagaaagcgacgatggtgcggtaaagtgggaagacgagcttgcttactcctaagtttagagcatatctcacgatcacgtgattaccagcgtagcctgtctgaaacaccaccatagctatgtgaagctttgccctttccggtatcggagacatctttctccggcggaagtaaccaaagacggcaggagagatctgttttgcctttttttttagtcgaatgatctc

SEQ ID NO: 49334 - DNA, 494 bp, Arabidopsis thaliana landsberg
cggcagcgagtcaagccacagtcatccagagaaggttgggcggataggagaaagatgaagtttgatctaatcatgttgccttgatgcttaatacgttcaggggattataatcaggctcccgtgacatggccataagtgttagaaaaaacaaaaactggatgtgttgatttctgaaatacacgtggccccaaaccagccctaccacccaaacgtagcaaccaccacatgatccctgcagcgccagcagcagtccaactcgagttcgctcgacaacagcagctgaaagccacaaaaactgccgtgcatcagcaccccactacctcaggctcccccccaggacttgcctcattctccttgtcccggaacgcggcccaggacaaaagcttacacgcctcactaatctattgcacgcgcaggcaggagcaaagggcttcacaagtcactgacctagatcttaacccttgtttagtcggaaaaaaaagtgggcgcaagga

SEQ ID NO: 49335 - DNA, 1846 bp, Arabidopsis thaliana landsberg
gatttgccgtacctccttctacacgttggtgacattctgctcaccacatcttcaatggaaaggagatccgcccctgagttcaaccatcctcttccaacgaattattactagtctcagctcggagtttgaaatggcggatcaaggtcgtcttcatcattttctcgggattactgtcaacaaagacgcttcgggtttgtttcttcaccaacaactatgttgccgatatgaccaattgcaactcgtgtcttactccagttgacatgtaacaaaaacttgccacaaataatggtccctcggtctccgatgatcggagtccgatcccagagtctatcgaagtcttgcaggagctctacagtatttaactttcacttgcctgaatatctcatttgtcgttcaacaggtttgtttaaccttatatgatccccgagaatctcatttcactgctttgaagcgcattctccgatacataaacggaaccattacacatggtgttcacatgactcgctctaagaatctctgtcttgctgcctattcggatgctgattgggttgggtgccctaatgcttgacgctccacatatacaaaaagagtttggtaatcaaaaagagtgattagatcggcaagaaaatgtcttgaattcagtcgcagataaatcaagccgtgacattacatgttgaatagtaatcaagccgtgacaatacaaataataagaagaaggacgtagaagaaacaataaaagaatgaattaagtaagaatcattttgaactttcaccaaaaatttgtgacccctttatctgtctttagctctcagaagaaacatgaacaattagctccgagagattcagtcttcaagggtcgttaatcttttttctatgttgcaatatccacttcattgaacctgcaaattagaaaaaatttcagacataagaaaatgctgatgctgttttctaaaggggaagattagcaagatcttacttgttgtctaaagagaaagaagagcaagatctcattccagatatcaggtactccaggtagacaccaatgactacaatcaggtaccaaaggattatcgctccacaaaccgacatgaccatcgcttctaaatgctgacatcgaagttacatccaatattgataccggtatcgtcatgttcttaactacttctttgatcatttcagagaatatgcttttgtctcttccttcagtgtctggggctggaaactttgtcacattgcatgatctatgatcactaaacaacaacaacaacgaaaacaacaagaacttagattaaggctgatctaagcaaacatagaagacgaaatggtaaagctaaagtttgtacctccaatgcgatggctcaaatgtacgaaacaaaacccgagttttgtttggatcaactgtactctctatccatgatgcccatgtctctaatgctactctatacgctgcaggaattgacattccgagcctcagtgaatttccaacctgaaagtaacatcccctgacgttccaaacacataatcagaaacaagcgaaaaatataagaatttcgatcacaaaacattctataatccataaagctttgaagacagcttacgtttcgaaaagcttcccaggcacccaccattgaccagtattgaatatgagaaaatcagctgagctccattcgtggttaataacatctaaaacatctaactttaacgttgacttaacacgtttaggtgcgtgccaacgcagcctcccaggctgaactaagaaaaccgatcggtaaaactcaactgtaaaattgtaggagctaaacctcacacccaaaaaccgtatcgcttttcgttagtataattccca

SEQ ID NO: 49336 - DNA, 701 bp, Arabidopsis thaliana landsberg
agaatgtcctgacagtttctcatccatttctttttattgctcaaaaagtgaatgttataaaacaaaaagacacaccagtggaaatacagatatcacctagtgataatctctaagagaagggcaataacacaatttagccaagaaggaggaagaaacagaaaccaaaccttcaaattacgaaacagaggaacaaaaaaaaccgaacagagtcttaccaccatctctgtgcaatgcgcatgatcaagaacctaaactcattagtaaactaaatataagcattcacaaggagttcatgggaagataaaaactgtgtgatagctttggcaattattcaattacaactacaactcaaatttttaaaccaagtcgcattacttctttgatcaaaatgtatgagaaacaaagataaattgcttcataaatccaaggtaagtagtaatcacccgaattctagaaacatatccctaacatgctcaattacagagagacaaagagagagaggttcaccggaaccctaccttccggcttcacatttcaatcaggcaagcgcttgctcttttcccaatatagcaatcctacccgggtgattcagttcaagcgtgtgtgaatatcgattcgggctctttgggcttttaactaaaaggcccattataatctaaaagggctccaccacgtcattttcaattggtaattgaaaaaca

SEQ ID NO: 49337 - DNA, 612 bp, Arabidopsis thaliana landsberg
tgacggcggaggaggaggagaaggcgaaattgatgacggagatgccaacggaatcggaaattgaagatttttttgtggaagctgagaaacaactcaaagaaaaattcaagaagaagtaagtttttattttattttgtgagtttgatttttatagataataaattttttattcataatttaaaattgattttgaggtaaaattaagagtgggtttattttttttttaattaggtacaatttcgatttcgagaaggagaagccattagaaggacgttacgaatgggtaaagttagagtgaagaagaagaagaagtttatgttttttttttaactttttagattttaatatttcagggaataagttaattttattttgttgatttcgaaatataagatttgtaggaggaatgtttttagaagtacgaaattgcacagaaaaagaagaaagctttttaacagattttagagcccagaaaagtcgtgtcttttagctctacttttacctcttcttcgaatcttgtgtatcttttagcatattctttagtacatttttatgtttttggtgactgataaaattctatccccacacaggtacagccacactcattttttt

SEQ ID NO: 49338 - DNA, 1113 bp, Arabidopsis thaliana landsberg
cattctagccaatgttatcccaacctgcatttaaacaatcacttgaaactgtcatcaaaatgaaatctgattatgaaatgaagcagaagtactggcatatagcacacaaacccatatatttagagcctcttcgctgataaaaagtccgcatccggctgccattagcaaccaaaagtaaacccatctacaaaaagaatacattggagttcttcataaacatacaaatctggttcataaggaaggtaactagagatagtttaacggctaaccccggtgcatttcctggaatcatgaatctgtttccaaatgcattaaacgtaaagccttctgaagatgatgaaactttggccaaactcttaacctcctcaaaaggtgaaccaccaccaccagagcctttcaaggctacactaataactgtaataatcatagctaatcctaaccctaaacctaactttactatgaatggaactccctttccagatactctttcattctcatcttcatctttgctatctcgagacttctcggaatcattgtctccaacaattcctatttgagagcttcttaccttgatcctgacacattaacaacatcaaattgtcaaccaacagatcaatgaagctaaaggaaacaaacccacaagccaatatcttggcgagccatacttctaagcaaattgataatcaaattccactaagaagagtggcctaaattccgtactcatatctaatcgattctatcaaaactaaattatcaagaagtaaaacctgtaacaaggaagcgagaaggatccatagaaaactctggagccattgaagacaacaaggctaggttttgaaaggtttaaggaaaacccattcaccggaaccaccatggaagacaacattcttgggatttgtgtctccaacgagaccttgttttgactcttgtctgtttattctctctgtgattcaagacaccgtcgttttattggaaaaaatcccgaaataataaaaataaaatggtttttggaaattaacgattatccatctataattttatttttattagaagaaagttttactaataaaaaatatttaaaaatttattaaaaattaaaagaaaaattttaaa

SEQ ID NO: 49339 - DNA, 183 bp, Arabidopsis thaliana landsberg
ttttttttttttttttttattttgttctttttttttttttttttttttttattttttttttttttttttttttttttttttttttttttttttttttttttttttttttttttttttttttttttttttttttttttttttttttttttttttttttttttttttttgtttttttttttgttt

SEQ ID NO: 49340 - DNA, 222 bp, Arabidopsis thaliana landsberg
atgttcaaaatcctttaatatttataacaatgaattactactcctaaaagcaacaaaccttttcccctataaaattgataaagccacaaagtctacgcatgtatcttcgttcaagctatacaaaagtcagttcatttgaaagatagatatgattcgattcaagactatagtttttcaagtcaagagagtactcgataaaaagatatcgcgtttaagacacat

SEQ ID NO: 49341 - DNA, 397 bp, Arabidopsis thaliana landsberg
ggagagaaaattctccgtcacctgggttcgagtattattgacttttagggtgcgaatcctaacataggggtttggggtgccaatattactctttggacttaaaaagaaaaaaagtcttagaccatgactattgactacccacatatatatggatacttaagttgttaccctagccaaaaatattataagtatgcgcaaatgtaggatgaaaacgatgttcatgagacttctcatgctgaggataaactaggcacgctgcatgcatgttctcgggattagttctcgcgtaaaaaatattatcaagatgatatatgtagttttggtggaatcctattggagaaagatttcttgacctaacgaagaatattattcgtcatacctatgcaatatgcgcagt

SEQ ID NO: 49342 - DNA, 522 bp, Arabidopsis thaliana landsberg
  unsure (1)..(522): unsure at all n locations
ggacggacagggcaaatttcaagttcggcgttggtgaacatacannnnnnnnnnnnnnnnnnnaaaccttcctgaggcgctataacgtgtattatgatatgttcattataccgataaaaaacctgaccatccataccttcgcagaaggcgcttcggccaccagggacagaaaccgnnnnnnnnnnnnnnnnnnnnnnnnnnnnnnnnnnnnnnnnnnccaggaatatcccctgcctcccaataaggcttatctgaaacaatattattcttacatagatgacggcattgataagaacctggtcaactccatccagggactgatccacgtgcaatataatgtggcgaatgcattatctgttaacactaaattctccgttgattataatgataataaccgacagtattttgttccggggtcattgaatgacgggaacagtgttgcctcctatttctcgggagtcaatcgcaggatattatggaacaactatgcctgcttgcacaagtgtttttccaacaacaaca

SEQ ID NO: 49343 - DNA, 1018 bp, Arabidopsis thaliana landsberg
tatgctagcaggtaaagttagtttctttcccactggctctttgtcatatccattttagtagatgaaagtttgccaatagaaaagaacaataaactggaacaacatcattattaagttcattttcagatacttttgagtagctaaacaaaagtttgaaagtggctaagaaagtagactgatgttattaagaatattaactgtgtacgtagcatttatctgagagctatttgtgcatttgcatcaatggtgatatgtatcagatgaaagaattgtgatttcgtatctgtattgagttgatctaactggagtaacattacttgtgcaggagtaatttgttgaatgtgttagaatttctgaagaaaccaaatgctaaagaacttgtctccgggacaactgacagagagaatttgcatgacaaattcaagaaagccattgaagaagcttacccggggactatccaagagttagaaaagaaagcagaagaagcaaaaagagccgaagaacaaagagtttctttctgggactctgccaaaactgatactttcaagttttctttctaaagacaatcaatacatcatcttaaattttcaattttgtaagatcttccagatcctttgacaaatgcagatgcagaaaattgttacccttatttttatgctctttgttacaaaagtcaaacttaaaaaacagaggaaatagaccgttatatgtcagattcttataaatttgagaacttttgggtactttttgcagagaatgagtaacattgtgctcaacacacttcgattcaaaaacccgaagcttgccttgctccaatcctgctcttccttttccgacctcaagatcatacatggctttctcttacgaacccatctcatctccgacgtcttcgttgccagtcgtctcctcgctctctgcgttgacgactccaccttcaacaaaccaaccaatctcttgggatatgcatacggaatcttctctcagattcaaaaccctaatcttttcgtcttcaatctac

SEQ ID NO: 49344 - DNA, 808 bp, Arabidopsis thaliana landsberg
acataacaagatgaatgtataatttgacattctactcaagtcagagctaaattgtacctgttactagtcatagccgcataaatattgatctcgtgatatgcaaatggaaaaattctgatgagatcaattttgttaacgatcagttgatctagaaaaatataggtgagatggatttagttggctagattatgtaatatatgatacaaatatcttgcgtcttgttttttttttatcaaatgcactttttaagttatggatatgcatgtttccacattttcaaatgttttgctttttgcatatgctgtataataacaaacataataccgccgtacagcatctaagtcgtggaggatacaaattgcatcggcacgacggcacaaaagcattttatttggctagtatatatggttgttaagcaggaaactcaagactaatgaaacgaggaatacaatatgatcctatttgtattatgtgtgttgagaaggaagagacagtaaaactttatgtcttgcaaagttggactatatgatcatgatcaatatcactccacaaggtttctttccaatgacatcaattaattcaactttggtttctttttggaatcaacattaaaatgatgattcagatcgatgaatatagttttcatgagtttggaggtttttttttttttttgataatttgcaaagatcatgagccaaattagggggtgggcataatatcttaaccccgaacattactgccccggaaaacccattccccaaacggttccccacaattttaaaataccatagggaattttttttattaa

SEQ ID NO: 49345 - DNA, 771 bp, Arabidopsis thaliana landsberg
acattaattatcatttccttatcaaaaggttacaattaaattacttacatcgttcttaacttaaatggattagtttaataattttcttgttaaagatgaatagatgatgggttagtttaatattacttgcatacaagaaaatagttaggcgtgtgtacttagtttgaacgagagacaaaatttcaaattctaaacctcaatataagggaatggtttactcaatattaaaattagtgttccacttatttcatgtttcgatttgtatgtacatcgagtttatctagttggccaaatcaaagatatgccaccactactcacccttaattcgttttcttgagctgtattagcaaactcaactaatatcattgtctaatattttttttcctcacatgtgcgtagttccgatataaacaatatacaaataataacaatgtattatgtataatttcaaacaaatgatgaattatgggggaaagtaattagtattactaatttattagcttacaaagggagtgatagaaagacatcgagacacaaaagcggcggctaagggaaagacaaagttgaacactacctaatatgcaagtaaatggaagcaaacgcaaaagacgtaactctcattttcttttcttgtgggtctatgcattgctcttaaacccactcttttaactcttagcgcctataactacaatcagtagctaccaatcaatgactaaaacaaacattttattcattcacttcatatgaacttgttttcccacccgatcctat

SEQ ID NO: 49346 - DNA, 695 bp, Arabidopsis thaliana landsberg
atttctctcgttccctctcactcctagttaaaatcgcatgcttcgattgatgtctagaccagttttttgcttggaacattcgctgtggaattttgtgaaggggaaaacaacaaattgtgatacctaagacttatcactgcatgtttataggatttttattagcccttagccatcagaacaagatcagaaaactataaaagtttcagactttaataaaagtgacatttttttagtcaccaacgaacagtaacctgctgtgattgttgtccaaggacgaagaaattgaggacacttcatgtcttctttgttcctagctctacctctgaaaccgtcagactccataggttcttcatgaattgcttagaatgaaaagtccattgaaatgatacttttttgttcacattgttttttttgggtctgtgtggcatgttagatccctccagtggtgtgtgtattgattatcattgtgccttaagttcgggtttggtttaggtagaaatttcctgatgttgtgtgtggatgttccaaaggagtgaatatacgttaccaggtctgataagtaactctagatgcaccgtgctctcatttggtattaagccattgagctctgttttgcaaaataggacagtgaagttcccattgcttgatctagttcccaggtataccgtctccccctcctcccttgaccacccgaa

SEQ ID NO: 49347 - DNA, 893 bp, Arabidopsis thaliana landsberg
cagttttgcttaaagatacgtgagtccacgactccactaaccttgataaactttgagtctctaactctaacctttgtttatccctcccaaatcgttcaaactatacaatatgcatatatgtttttgttactcgaaccatatgcaaagtttaattacgtaccaaacactattggattcatctacgtctagatatatgatcttgttcgttttacttatgagaaattaaaaaaacaaaatatgcattcccaccaaggggacgaaaccagctctctttactgcgcaatgaattaaaatcacagactaaggtgggattaagtagtgtcgccggtaagatacaagatgaataaagcgactatattaattagaggataataatattcaaaccgatatctctaaaaattaacgacttttctactactggaccacaatcagctccatattgggccagtgacatttcatatatcttgggccgtcttgttttgttaacatactaatcaatgaaaggaacttcattaacaaggtcgtctcatctgataaactatattataataatttgtctctctccaaataatattggtctataatttttgatatatttaaaaagttgttgcgtgtgtgttgttcccttgttgggtgcattttttgaaattgacccataaaaaatcccaaaaatacagatattctccaactaattttcaattattgaataataccaccaaattttaaaataacatgacaatctttcttggaaacgaaactacacaacacagtctctgttttgtaacataatgatccttctgtgttcccacttcccgccgtaactaattgtctccaaaatctctcatttcgactgtttaaaagttgtaatgggaacatggaagaacaaaaacagt

SEQ ID NO: 49348 - DNA, 818 bp, Arabidopsis thaliana landsberg
  unsure (1)..(818): unsure at all n locations
gagagtacctgacgcgatagagtagtggtgctgctaaattccttctcaccatctccttcaatgggtatataagcaagaataaccagagaatcaccaaagggagcaatccctgaaatgtaatagctggtttggaaagatgccacaatatctacttgggttagactagacatctgaatctgcctaaaagttccagtttgttgctggtctgatttaatcgacgcaattttaactgatgttccccaaccaatcacaaggagagtgtcatcctggaaacaataaaaaataacccttcaaatcaacgctgttacatatgaattcacaatcaaagaagtaatctgacaaaatgagttatttatacgaacctgccaaaccaagtggggtagtaaagcctcaggcctggggcttcctcgcggtttttcaataaatgtaacacgctgatctttggctgtatcataaactttaacaccaacatcattagcccaggcgatgagacttcctctccacttcacagaatgaattggaccttccccagaatgcagcacctacaaaactagcctcttatcaaattcacggtgagtagattctattccaaaacgtaatctacccacattctcacaaacctgatctttattaccgaaccacttcttggagttcatatacaagtgaccagccaagccaccagctacaaatctcttagattgctttttcgtataatctggatccaaggaaatggccttcatggngcgatgataatcaaatttcatcttctcatcatcagtgaaaaagctgtttataacaacagacccatcgtctgaaca

SEQ ID NO: 49349 - DNA, 1520 bp, Arabidopsis thaliana landsberg
ggctgcctctgttgcaaactggtccaggaccgagcttccttaacatttaagagattacttgattttttaatattctagttcatgtaaagccaagtgccttttacctggataattgtcactttgctcatagctggttcgatcactacagcttccaaattgttgcggatggttccgtttacgaggtcaagtcccatgctgcatttacgttttcccaacatgaagccaatgagcatataacattttcaaacagaacctcaaagggaaaagacacaaacagattgcttatcaccttgaatagtgcttcttatcagccttggtttgtgcagtgtggtggtacgctcttagtttagctaccaattcggttgcatccttagcagcgtttactgcaagcacctgataacaggatgataaacgttggattataagataagaacaaaagacagatttttattgatgaaataggtttgtaggtcgcacctttggtataatcaatagcgcatcagcaaattcagcgatggccaattgttcgcgagagcccaaggttgtagcaaggtgctccagatacacagacaatgctgattcaactgcacctccacccgcaaccacctgtttgacaaggaaacaagaaatgtaatgtttgttctttgctaaatgcaaggagtatgtctaacagaaagtaaaggaatgttaccgtgttggactcaagggtcctcttgacaatacataaagcgtcatgcagtgctctctccatctcatcaagcatgtagtcatttgcacctcttaagatcaacgagacctaacaggaaaaaaacacttataaacatgaaaaacctagacaaaactctgtgtgatatgttaaacaactttaaaagaaatatacttaagattgattttgtgtgatatagtactgtcagcaatcaagtaagattcattgctgagagaatggcataccgcactacttgttttggttccctttatcaatataacatcatcatctgcgattctctcttcaacaacctcatcagcagatccaaggtgagctggatcaaatgtttcttcgccctccatgtcagcaaaagtggtgacctaaaataaaggataaatatattagttgaaattttagtttgacaacatgggtattgaaaaagcctagcgcaggaagtaccagagtcgctcctgtcgccttggcaacatgacgcatgtcttctttgcgcacacgcctaacagcaatagctcctgcctctacaaagtactgaaataaaaacaagagaaatgagaatccattacggtgaaccaaacataaacgcaactaaacttgaatacttcaaaaactaagttatgtgtaaacgatagagaaaatcattggttttcattctcactttaagtgccatgtcgtcaatcccctttgtggtcagaattacattggccccagctttgagaagtttctctatccgctcttttgtcatgtcagcttctctgtggaaacaaatattcagcaacatattaaaaaactctgtata

SEQ ID NO: 49350 - DNA, 571 bp, Arabidopsis thaliana landsberg
ctcagtatgatagttaaacacggttctttgataaatttcaaaagttaaagcggtgttctttcttcaagccattactcttttggttctttgacttgatgatgaataatcctccggctctattctttgtccaggtatcccagaaatcactctctcgacgacaagcttcaaccacaggttctcaggacacagtatcctattcgcttctagacgcaacaaaacaatctgcgttcttgagctcccttgacaaatcagagttcaaaacttcttctgataagctcctaatagcttacaagcctcgacgaggtaagtttgctacattcaaaggcgatatgactattgaggaagttgagaaattcgtagcagctgttcttaacggagacatacagttcacaaagacaagacagaaaccccagatcaaatgaaagttttttttcatcagacattagtttcagagatgtacatcgttttggaggagaaaagggtgatttttcacgtttccttgtgttgcaatctgcttttgacagaaagtttgtgtattgtcaagagacgtgaaacagttctataggactag

SEQ ID NO: 49351 - DNA, 803 bp, Arabidopsis thaliana landsberg
ttggattactttggtttgcaatttttttttcttctgatttgttttaaattaggttttttatttatttatttaagaaacaattgcaaaccaaaaaaaaaaaatgtgaactacatgcatatgtaaagcattttatttatataatcaattagaacatcatgatttttataaaatatggtagtgtgaaaatcaaaagtttaacgtgtacattgttagccattttggtcacttgtaacagctagaatagtcggggcgtcagaagttacaaatgaagttatttaaattcgccttttgatcattttgctggtgtcttttgactaaaaagattgcaatcgccattaccaaaatcttcctgactttatttaaagagtcaattttgttgtttggaacaaaaattattgaaactttagaatatatatagttctgagaatgttgaagatatagatatttgattccaactaacgagaacttttaaccatttggacaagctgcaattcatttaaagagagggatgcatgaaaacaatttgaattgcatacaaagaatacgtattattatactataaattattagtacaaaaataattttgtatctcagagcattggtccccgacggccagaccagtctcctaagaggaaaggtgaggcaaactcatgaacacgacgacacatgtatttattaactacatgtattatttaataattacatagtcctagtgttgtatttaaaactcgaggtgtcaagattagaaaaatcatgacatgattaaatcatattttttcaacaaagacccaatatctaaaaat

SEQ ID NO: 49352 - DNA, 521 bp, Arabidopsis thaliana landsberg
gcaattgatcacaaagaaactggaactacctgttaaaattgtgtttcctcggaacctattgggcggtgtggtgcccggtgtgagtgcctcagatttcatgatgcttggtcttggtgacatggtacagactaatcccttctttgattttaagattggtatgtcgttatatgtgtactaactgtaagaaatgttctctctcagactatagtgacgaggagataaaaaaaacatgttgtattgattaactgttttgttgttccaggctatccctgcaatgcttttggctttggtcctctgctttgaccatcgaaaaactagagatgtggtgaatatttttgatctaaaatcttccaagggacacaaatacatttggtatgcacttcccggatatgccattggcttggtggcggctctagctgcaggtgtcttgaccactcacctcagccagctctactttatctggtaatattctctcatgtgacttctttgtcctcttggtctacatcaaaagtatatattct

SEQ ID NO: 49353 - DNA, 464 bp, Arabidopsis thaliana landsberg
  unsure (1)..(464): unsure at all n locations
aggaaaaaacaggaacacaaaaagacacaaagccaggatgccgaacagcatggaaggctcggccttttgtangccgggaacanccacgcctgnngtgaacaaataaggccgaacgggtacaatggcatggcggtacaactgatcctcgtgaacattttgtaccgggtgcgaagttgattgggcaagcaaagcgcttttgctggctttttgttcgggagcagacctggattgaaaaatcggatcttcgagctccaacagtgaaggggccaaaggatcagtatctgccaaaaacattttttcttctgccgttgttcctggctcttcattttctgccgctgcggctgtctcatcattgtctcctactctttcaggcaaggcatgatgccattgtacatgataacctttgcggtaatgccttttggtgaccgtacacgacacggtcagcaggcaaaaaacgatccata

SEQ ID NO: 49354 - DNA, 279 bp, Arabidopsis thaliana landsberg
  unsure (1)..(279): unsure at all n locations
agcacacacacccccaaagnggacaacgcggacaaccccctcaacgccaaagctgacaggtcagaaaacangaacaacanncggggcccggggagaggccaaagcccgacgcgcgcgcagcgaccaggaaancagaggacgggacagagcagcgggggaacccccagacgaanacagcagggaagggcagacaaccagaaaccccccncgaccaggcgggaaaaccgccaaaacgaacccgaccaaccggaacccgaacccagacgnnccagcgcccag

SEQ ID NO: 49355 - DNA, 501 bp, Arabidopsis thaliana landsberg
gtgctggtggtggacgacaacgcccacctcctcgacgaggcgtcgctcgccttactccaccttctggtgtgtaccagcgccgaccggctgctgctgacggccagcaccggcgccgaggcgccgccgctgctgacccaactctggaaggacgggacgctcgaccgcatcgagctcggacccctcggtgcgccggcggtgaccgacctcgcggccgacgccctgcccggcccggacgacccggagctggagcggtggctcgtgaccagcgcggccggcacgccggtcctgctccgggagctactcgacgatgccctcgagcggggctcggacaccttcgaggacgggggctggcaccgccgccggacgagcgcgccaacggccagccgactgcgcgagctccgcggcggccgggacggtgtcctcgacgacgacgagcgccgggccgccggtctactaggcctgggcggaccgttcacctggcggtgctggagcggcttgcct

SEQ ID NO: 49356 - DNA, 460 bp, Arabidopsis thaliana landsberg
agactacatcacaacgagatcgatttcgagccgcccgctcaccgatcgatggcctggatttcatctggccaaaccagtacgcagacgcaatcctgagcgttgatctattattcaacggcccccaacactgccgccttccctcgccggcccgagcggcgccaggaccaccccgcggcggagtcccaccagcgagcagctgattcgacgcctaggcacctaatcctcccaccggaagcgagcaacacgcagagcagaggacagggaacatcctgggggcgactactcaccgagaaggagctgcgacgtagcagggcacggttgtgtgcggcactacggccgaggaagatggccgacgacgaattccgcgtatacgatccacccgacgaggtcccaagctggtgcgtcgtgatccgaacgaagctccaagcccagcaaacacccaacagccatagctagatcc

SEQ ID NO: 49357 - DNA, 186 bp, Arabidopsis thaliana landsberg
cagtgagggaacgcggtcccaggttatgctgtccgcatcggggccgaagaagtctttgtcttgtaccgacatccacagacccccctcgtcgcccagcgccgcgctcgcgcatccagcgcgtcgatgtccgtctcgcgcgctttcttcaggccctcttcgcctctctcctcgatcccgagttttccc

SEQ ID NO: 49358 - DNA, 385 bp, Arabidopsis thaliana landsberg
  unsure (1)..(385): unsure at all n locations
gacaagaaaacgacagaacaaacagacaaacaggccagaagctccgacccctccangaaccgaaacaaaggagaacggacaagagcgacgaacggcaggccacgcccacgacaggcaacancagagggaacaaagacggggaaccgccccggacagacagcanggagggaacacccccgccgacgccgagaaaaaacaccaagaagcgcacggggagcgacaccgcccgacaacgcaagagaaaccncgacagcaccngacagagaccggggaaaaacaacgggaccgccacccgnggcacacaccgncagaggaagaaaanaaaaagaancaacggagagccaaagcaccaaccaggcancaancacganaagaaaacagcaaa

SEQ ID NO: 49359 - DNA, 849 bp, Arabidopsis thaliana landsberg
aaaggcacgccaaattatcaaacattcaatattaactgtccctacttctatcagttatattgatttggtttgcaataatcttgtaaagaagctcctccttcgtgatgactgtccgatttgttgagtgaaacactctatgaatcaaattaacaagctgtggcaaattgtgcttctcgggttcagtctttggtctctctatcatctgcaagacacaaacacacacacaatggtaagtaaggatggctgtttgcagctgaaaacgaatatatccggaaacaatgtgaaagcaaatggttgctttaatcacttactgactgaaggaggctatcatcatcagaagcattatcaccttcatagttgcttttttcatcaccagattcgttactaatgtcatctttcacaattgtttcttcctcaagagtgtcaaaattcaaactgcgagatggaccttttactgactggagaaggccatcttcttcatagttgattcctttatcatccgattcattaccaatatcatctttctcaattgcatcttcctcaaaagtatcaaaattcagactgcgagatggaccccttgccagactatttgttgatctaacagagttatcatcaccaccctctggagtcaactcaatacatcttttagatagctgcaacgtcggtgtagcactcatgagccggattggcgtggacaagtctttggagggagtagataaatctttgactgggggttcaactattcttgattctatgtgtgacaaagtagaatcaagaatgactttgttaacatcttgttcttcttgctctatctcctccatatgaacattaaaccctcaacttcaagtt

SEQ ID NO: 49360 - DNA, 519 bp, Arabidopsis thaliana landsberg
  unsure (1)..(519): unsure at all n locations
tacgcacgccacataaccttcacgagcaaagcggcgcttgatgtctccaccggnggcgtctcccgcgcgcacggggaaagcaactttagtcatcaccttctccacctggtcagctgattcacttggttattcaatagttccaaaaaagaactttatgattaattcttttttagaacttgtcaatgtggctatactgaccgggtcattttcatggagacttttgtgcgctggcaggatctggatcaacaaccgtgctctctggcccgtaccctggcgatcattggtgatcgctggacgctgctgatcctgcgcgactgttttctcggcgtgcgccgtttcgagcaattccagtcacgcctcggcatcacccgtcacgtgctcgccgaccggctcagcaaactggtcgagtcccgcgtgctgcacaagcagccgtaccagcgacgcccgctgcgcgaggagtaccggctgacggagaaggggatggatttgcacccggtgatcattcacctggtgcaatgg

SEQ ID NO: 49361 - DNA, 848 bp, Arabidopsis thaliana landsberg
atcccaaataaagacatattataaaattagattgttacgctcgcaaacaatgaaacatcttattctttatttttctcgcaaacaatgttttttatatgtttttacatattgtgttaaaaatcagataagatcttaagatatataatcatatacaatgatacatctataaattatcatacaaacaaaaacaacataaaaaaatatatcatcctatgaaaaacaacatcagcacaaatgatatattttttctaaaaaaataaaaaccaacggaatgttttctacagtttgacaatttgtaatgaaaactaggacttaccacacatcgttgtggttgttcctgggaagattggtttgagggattagacatatcacaaactaattagtttttcttccttcaatttggtctgagattcaatatgaggcttgtgaaatgaaatgataatgtatatatagagagagggacatgatatatattaaatcaatgaaaataaaataaaagagaaattttgaaatcttacatttcgaacatattcctattccgactttggattttcttctaaatttggagaaaataataattaagaaagataaatgtcaaaatacacagtttggaagtttctcatctccttttggtaatatattttaaaattgaaaaagaaagaaggcaaatgtccaactacacaaaactcataataagttttaattaatgatcttataaatgataattgtaataagaaaaaagtcaataataattgtaaaatatgtttggtagcaaatagtaaatatccaaatatattttgtaataaccaaaaaaatctcaatcatcattagatttgttatgaaaaaat

SEQ ID NO: 49362 - DNA, 170 bp, Arabidopsis thaliana landsberg
ttaattattatatattattataaaaaagaattgtttctgtttgaaaacgagaggaaagaaaaaaaaaccggacaacacaggaacgcaagaagaaaccgaagaaaatttcaatttaacaacacaaaaaaccgaaagcgagagaaaaaaaggagaaaaaaaaaagggaaaaa

SEQ ID NO: 49363 - DNA, 403 bp, Arabidopsis thaliana landsberg
aaataactcaaaatttaatctttaagttgatttttttttgaaatattgttgtagtaacttactaaccttgaaatatattagatttaggagaacatccgatcaacataaagacattatctgcggtaggattgaaatatggagttctccaatcctcagcttcaaagccattgcctttgccaccgagcacgatggtttcgcagttcgacatgtgaggatcatgcaccggtctggactgatatgctatcccgatggtgaaaactcctctggaccactgaacttatgtgaatacatctacacatcagctcatacaagaaccatggatttctataccctggatgcctacatcctatgcggatcccaaacggacaatcaacggatatgtctccacagtctgaccgacatg

SEQ ID NO: 49364 - DNA, 581 bp, Arabidopsis thaliana landsberg
gctggtaagtccttagctcatatcttgggcaggcatttatccatctgagataaacgagctgctcaaggtttttacatcgatctccttgaagctgctcgacatgctgggttaactctacattctcactcctcaatcggttacaatcttcgcgtaatgtctcaatctgtaacaaacaaacgttttgaaatcagcattcaatattttgtaggaagtccaaaaatttgaggttatacctcctctggttcctccagtgttgaatttgcaatgatttgaacagactccagcttctcagaaagttcgaaattctcaaactgtaatctcgtgttagtatccgtaagcgcgttgatctcactttccaaatcccttaacctctgcatcatcttatcagcttcaagatcaggtaacacagccttgatttcttcttcttgcagcctcgccactcgttgtttaagcgacaagatctgcgctacgtgttgttgtgtattgatgttcagtttcttcttaagcacctgaacctgagacttagccatatccagctccaacaaaactttagaatgctcagaacattcagccttaagttt

SEQ ID NO: 49365 - DNA, 1177 bp, Arabidopsis thaliana landsberg
taattgttttgggctgaaatggaattcggatcccacatgtttattgagtaacttgaaaattcgatcttaggtgacttttaacagaaaggatagcaaatcctgtgaagtgtgtgaacagtgaaagccaaagaaagagtcacgttataatacatgtgaaaccaattaaaaccaattacgtaccaaccgtcaaatatatcttttgacacatgaaacaattaatcaagaatacaagaggtaattaataaatcaaaaaacaacgtaaaacaaatcattattacggttttgtttagagaaaaatatatgaaattgaatggctaatgcaaccggaagccattaggtgattatttcacatgataattttttaggtgattatttcataaaaacgcagtactaaaaaccaatattcttaacataacataccaaatgaagttaatcataaaaataacgtaagatacaagactcaatctcacaacataaatggaaggcgtgaagggaagagatgcatgcttgacccctcttgtgccattatagattagagatcgatcgatgttgtgttccaaggcaggtgtgttattattacactcactcacataactctgtttgtaatatattaaagaaaatatatattgttgctgatccttcaagggaagaagaacttgaatttaattatagattgccaaagtgtaatgattgttcctacttcctacttgtgattctactacttcctaataatgccttaattaaaaaagtataggatgctaacaactaaaggtatgtgattaagtatcttatggaaccagatctagctactcaaattttctaattcgtaattaggcaaagtataaactcacactacaaaaaaatctaagtctagcatcaattttttaaaatagttagtgttgcttttaaagtgacactagaattatatagtcattttgaaaagcgatgctaaattcagtgaagctaaaaatatttagcatcattttttaaatgacgttataattcatgattaacatcgttattttttggattttgaaactaagcacaaaatataaactaattttatttctgtttgattttgcataaaacatcttattaaaacaatcaattaatattatatatgctcaaatacttcaatatatttttgatatttaaaatcatttattggatttactta

SEQ ID NO: 49366 - DNA, 176 bp, Arabidopsis thaliana landsberg
caagtaggttctagttattgctcgtgcaaataaagagtgaataaccttcaacaatattcttttttgcaggaaaaacaaacagatcatatacataaactgaaggagaaagtgaaaacaccagaggatgtaccacgcctctttgatctggtcagagttaaggatgaaaggatgaaact

SEQ ID NO: 49367 - DNA, 251 bp, Arabidopsis thaliana landsberg
cattccttgttaaaacgtttgtggatgactggatccaccactacatgagagcatgtgtgaaatgttaagcttatgtgttgacaaagaacatcatgctactgatccgcccgcatcgtctacttggatattttaacgcgacgcatatttgaacattactgaacaaggcttaaggtataacgatcaaccgtcaatttgccatgtggaagggacggacatggcgacaagtacagatttctttgatcttttgttga

SEQ ID NO: 49368 - DNA, 646 bp, Arabidopsis thaliana landsberg
acaagagagggggagcccgcgagaaacccaccacgggcagatggataccttgcgcgtgcggctgacgacggcattctcctcccgtgtgccgcagttgcccatctcctcctcctccctgtggctcggttgctcgggttcttcctcctacttgtgccgggggttgcccagcctctcattcttggtaggtcgcttcatgccatcccgcctcttacttccttcgactccgatacgagacgagattgacggcggctagagctgcgggctgggcgtttcctccatgatggacggacaggacagctggacaggggagccaagagccatagcaaagatgtgtgcagctctcccttcccttcccttcctgtgtgcaccagcaacgcctcaaccgttagcgggacagcagccgagcttgtgactgcggatgaattgcgagtgtagtgtgtgtgtgacagggagcgagtgagggtcagagagtgtttcaatggtggagagaaggaacggtaggggagacgggtggtggatccttaaaaagtgcagtgctcctatgtcactacacggcagctgcattcaagaagaaacactcgataattggatatgaattcttttttttgaaagggacagcagaagaattggcttctaatagggtccg

SEQ ID NO: 49369 - DNA, 511 bp, Arabidopsis thaliana landsberg
  unsure (1)..(511): unsure at all n locations
tgagcaagagccgtcgtgtgaatcgtnnnnnnnnnnnnnnnnnnnnnngtgtcttaattctggttttgatctcttagtgttcttctgagattgttcaatnnnnnnnnnnnnnnnnnnnnnnnnnnnnnnnnnnnnnnnnnnnnnnnnnnnnnnnnnnnnnnnnnnnnnnnnnnnnnnnnnnnnnnnnnnnnnnnnnnnnnnnnnnnnnnnnnnnnnnnnnnnnnnnnnnnnnnnnnnnnnnnnnnnnnnnnnnnnnnnnnnnnnnnnnnnnnnnnnnnnnnnnnnnnnnnnnnnnnnnnnnnnnnnnnnnnnnnnnnnnnnnnnnnnnnnnnnnnnnnnnnnnnnnnnnnnnnnnnnnnnnnnnnnnnnnnnnnnnnnnnnnnnnnnnnnnnnnnnnnnnnnnnnnnnnnnnnnnnnnnnnnnnnnnnnnnnnnnnnnnnnnnnnnnnnnnnnnnnnnnnnnnnnnnnnnnnnnnataaggagttcctttgttagggaaaatttttggaaa

SEQ ID NO: 49370 - DNA, 795 bp, Arabidopsis thaliana landsberg
gtagtatagacctacagtcaaatttaaatatgaattagattgatttttccatcttttattaatgatctaacgatattatatatttatttctagcatgtatgatatattactatggatggtctatgttggacaactcttccgccaacacacaaatcattacgtaccttgcaccacagtgaaattcattacacatgacataagtacataacatacatagccacaatggatgaattacctacaacaagcttaacctccaataaattttgcatctatcatctaaaaattgcattctctcaataaacccttgagaccaatgggcttcttctgtacttgccgtttagcttgacgttaactttttcgttaactttggaagtccctttgccattaagctaaagctttaaaatttctacactagatcttaggtttgagtttttgataatgcaccttatcgaaagaactatccgtcgtggtatcatgtgctaaagtaaagatgtccatcgtcgatataatgtagataagaatcattagttggagatccaatagctgagaggagagttgcacgttgtggaagttgttcatagaatcgttcatcacaatcgtatgtgtaacgtttacatgtagttagattcgatcagttgagcaaatatctctgatgattatgtaacaaatggtaaaaacataaaagaagcatcattgaactatacagacagattaaaagtaaatataatatctaaatacaggaataccatatattaaaaaaaaacgttgcatctaaattgttttgaattttacatg

SEQ ID NO: 49371 - DNA, 576 bp, Arabidopsis thaliana landsberg
  unsure (1)..(576): unsure at all n locations
agacctcctcttcaactttctggaagaagttggctagactgatgttcaattactctctgcttgctttctgttctggcttatgacagccgccatgctagcagttcagcacaacatcagattcactcaactgatcatctgtagggtttctcacaccctggcagaacgcacagcccaaatggaccctgtatttcctagtgaggattttttgtttcagttagaacagacacacagataaaactaagctctatttccattcatattcagaaaccctcttgaagagctattcatttttgccaagagagttttgtttgcagaatgaagtcctaggaggcaggtctcccatgaacacaaaaactaggaacactcaaaacaaagaacattaggacttcttggcttctgaaattatgaaactggaaactcgagacttttcagtgatgacacactcttcagagagcagattatactatgataccaagatatggatatggccaaagnnnnnnnnnnnnnnnnnnnnnnnnnnnnnnnnnnnnnnnnnnnnnnnnnnnnnnnnacatcacagcttcagcttcccaaatc

SEQ ID NO: 49372 - DNA, 705 bp, Arabidopsis thaliana landsberg
ttagtataattgggagatcttggtataagaattattttgaatagatttgaaaaacctagacctaattttataaatgtgttttactatgaatctgaaaagcaaattttgggctatactactcagttcaaagtgatatgactttatattttagttggtacgagtttaaatcatttatttgattgagtcgttttatatttagaattttttcgtaactatgcaatttttttaaaaaaacttacatatattataaattataagttattttttcttttaaaagaaaatccaaaaatatcaacaaaaaccctgtaaaagattggtcggactataaaatataggttcggaattttaacgggacgaaccaaactagattcaaatagttgattttgcgggtttggggcgagccgggcctcacatgcctagggttatggttttaatatgatgtaacaccgtttatggtttttgaatataaattcgtcgatttgcaccaaaacttttttaatcggtttgaatcgatttttatctatagtgggctaagttcttaaaagcccagacttgtgtttttttttttcgtaactatagatcgatcacttaaactaaattaaaccgaacatggttattatttattatacacgtagttcgaaacagcacttagagacttttcaccttttccacttctggacctgaaaaagttgaaaccctaaaact

SEQ ID NO: 49373 - DNA, 464 bp, Arabidopsis thaliana landsberg
cgcctcgtatgttttggatgagaatcagacatcagagggaacttggaggacacagagaagcgcaaattatcagacagagtgagaacgaagaagaagaaagcacaggtaagttgaacaatatgtgtttcgattctctagaaaacttacacaattgtaaattgaattcactagatatctctagtggctgaaaaggagaaagctttaagatttctgggttcttcttcttcttcttctctgaattgatttttttcaggatgctaagcttgagatattcattaccttatcttcttcttcaaacaagggaatcattaactaagctcttcaccaaaaagcctaacaatgttgtggttcgtatttatgtttcttataccttctttaactaaacatttcgacagtctcttgggttcaaaatttcaccatgttgtcttcgaattcaataacctttcaggtttgtgccgcgagag

SEQ ID NO: 49374 - DNA, 667 bp, Arabidopsis thaliana landsberg
agttgtttgaccgcaatgacttgcctgaatccgtcttcttcacggagaccgacaatgactcaagtcgtaatggatctgaaagaatgtctgaacatggagatggcaagaaacatgggaagccgtatgacggattcaactaatgattcttcaattgagctgtccatgaatttcacaacagagcttaatccaggagctagatgaatcaaatcttatgtataatttgtttgatgctagaagtttcttcgtacacacgtttcttttgttctgtttgtgatgaacagagtgagtgttacttgtattctattccggttctttgttatataaaattttattttttatagttctttgttatttaaaattttattttttatataatctgaatgaaatttagtgttggtagatgtatgtggtgaaaatgacgacaaatgtttcttatagtagcaccatacttttcttcatgaaacgttagccaaagaagtttatatgaggttactaggtttctctttcaatgaaaagaacaaggtatgtaaattttgaaagtatatatatgagttagcccaaccccacagtgttggttcttcaaatttatatgaggtaacttctaggtttttctttcttaatgaacatattttcgtcggtaaatcattagaatttttgccaaattgat

SEQ ID NO: 49375 - DNA, 608 bp, Arabidopsis thaliana landsberg
ggaaccactctaaaaatagagctaaacaatcctgctttgcttgctgggaattggacacagctctgtgcaacatgcaaggtacctgctcaaattccgttttatgtctttcttcaatcttaacaccatacttaatcatcgatgctacatatttacttgttttggtccactgtgttttattttattcagattatcagacctcttcgagctaagcactgttccacctgtgatcgttgtgtagagcaatttgatcaccattgtccttgggtatcaaattgtgttggaaaagtaagtacagttcctttcctattttagtttttgacatagaagttggcaaaataggagtagacggatcaggcttttgtttgatactaacatttcatataaactaaatctgccttgctcttcattgtctcttttggtgtgacctaacttacagttcttttcgaaaatgcttagtggtatatttgtgttgcatatttgggtatacagatcaacagatatgcttcttggtgtcatatcacctcttctatttattttggctgctagcggtttgatttgttagtcttgcagctcgagcatgatactagtctgtgatactaatctgtgga

SEQ ID NO: 49376 - DNA, 1006 bp, Arabidopsis thaliana landsberg
ttaaatacttaaaaaatctggttccttaaatgaaaagttccaaatggcaaggggacccttctcgtaatatccggtttaaggtagttggttatttaaaaaaaaagtgaaaaaggccctttcgaaatttgataccaaaagattcgatttataaaggccccaaatatactattccctccaaatcgcgtttaattcttgtttgaatttgaaaaacctcaaaagatccatccagaaaccaaaattaacccccaaaaaaaacaaacatatttgttgtttgtcagaaaattattaaaacaacgcagacatcgcgcgctcttctcacctctttcttcttcttcttcttccctcttctccaattctagggtctcagaatcgaacattccaatatttactaattgaccatcagatctttaaaccctagacttcatcacccgaaccctcggtctcctttttgagtattttccctcgaggattcagagaatctgtaatcaccattttctggggtttatctccaatttctcgaaatttcgcggcttttgttttgtgtcaaatcttcgtgggtaaatttctaggtttgctttcgaggtttttaattgagccgccatggaagaacacgacgctgtttctggagggtgttctccgattcccagatccgacttaaaggtaacttctttacttcttcttcttctctggggttcgttgaatttatgtgatatattttttctttcaatttctcgatctaattatacattgctttactttttcaatttctgggattttagatcggcggcaatgaattggatgaaagacaggagttgagtaaaattgaacctgttacaccaactctaaattcaggtaattttactgttactactcgaaccaatttcactcagtttgaattgagtttgaagtttagaacaaggcatagaatatgtaacctaaactctgaatcacttttacctctaatagcccttgaaatgtattgtgaagtacaggtaacactgctcat

SEQ ID NO: 49377 - DNA, 572 bp, Arabidopsis thaliana landsberg
gaggaagtttcaaataaaaggcttggctcttaaaaatgcacccaattcaaaactcatgatcagattcatctcttccaaaacaggtaccattttgttagacacgtaatcttttgacaagtttaaagtgcaaatagttagtcttattagtatgaataaaatatggttgaaatattccctactttttgatgaaatggcctaattttactatttacacaatctacatcatggaaaatacatttcacttggcggatcatggatgacaatattataaatccgtcacttatcttaactatatttcacctatattcaatttatttttattctatctattcatctagctagtgctttaccattcaaagcctaaccttcactttttggaaaagttattgtcgtcttacacaattttaaagtttgctgaaaaaaagttataaactagctagctaattaataatatttatttttatatactactaaaagaaagaataacttttatccagttcaatcatatatacatcaattagtccatatatatacaattaatcaaaactaagtagttaaaaaaaaaaaaaaac

SEQ ID NO: 49378 - DNA, 652 bp, Arabidopsis thaliana landsberg
tactaaaattgaaggaagaatttgaatctaaccttgacagtgatcttaggtttcataggtttagcagcaccatagagaatcaaagagaagaaaccaaagagaataaagaatccaacgataaaagccaaaacatagcaacgacgaggaacaccaccgtctctatcaccatcatctaacaaaccttcttcttcaataaccgcacattctttccactgtttctcaccgccgtgacctttccgtttagaaccatcgttagggttgacttttctagatccaggctttaaagagccagagaatcgactagaagatgattcacgtgagtgacgacccatagatgagtgagaatgcggtggagatcccatcggacttagtactggagttgagtgaaacgatgttgctgttttttctccgtcgtgagagtcgcgtgatggtgattggacgtagtagactggtctacgtggagatctggctggtgatgatgctgcgaggcttgttacctcggaatcggttttggcgtgcattgtttccgatttgggaaggtgaaggacacgaagctttttttcttctttcttttctctgagctctaaaatggtggggaagaggaagtgaatgtttgttaacgatgagtttgtcaatttgtggttgggttttg

SEQ ID NO: 49379 - DNA, 555 bp, Arabidopsis thaliana landsberg
ttgtggttaattatgagtaactagtgagtatttgtaaaagaaatgatgcctagattttagatataaatccacatgaaaaaacttaccatttaattaagtttaccataatacaagtatttgttgatatagtagtcaaatgattttgaaaaactaatcattgtatgaagttaaataccttagtctaaaattcgaaataattgtgagaaatacgtggtttacattaatattgttttgatatcatcatttcgaaaacgcggttgaaatggcgtttacatatttcatgcatagtttacccaaccataaaaactttcggttgctctcaaattgacttatacaaacatactgtaatcattgtcaacaagcagtcccattcagaactaaacttctcaatctattactcttcatttgtgtttctaactagtttaaagactttttcaaatttatcaaacgttggaaaaaatgaagaagaagataattacatcgatattacgacgatatctcatgcatataataagtcactccgaccgtaaccgaaaccacgtcattgtttgattg

SEQ ID NO: 49380 - DNA, 921 bp, Arabidopsis thaliana landsberg
acatgacgggacaaaaatacaacactttggttatgaaaaacagaaactatagtgaattattttgcatgagatttgagtttctcttgggtggggttaacagataccatagatgattttagaatcgtgaggtgccggtcatgggaaaatggggcccaatacaaaacaaattttatttgatgagttccacctatatttgtaataacaaagagatagaatttaaaatatgaaaataaatctgaaactttcataaaaatggggcctattgttgaaataaaaaaatgttttaaggcctaatttttcttaataaaagtcataaaaattttagaggcccaatacatatgtatcttgagtatctatcacaggcagggtctgggtagcccattgattatcatttccaaatttttgtttagattttcatataaattcgttgcttcaatgaaatttttcaggttcatcactcatcatgattcaactaatgtatgaaatacatgttaagaaaagggtgtaatgaaataaacttgcccataaaaatgaaagtgagacatatctaattgaacaaaggcaaaattacaaagtttgagaagaagaattggagaacaaaagtaaaaaactagaagagaagtcaagaaaataaaactgcataaaaaacattgtattacatattgcgacgcctaatatttaacttatttcgctcgtattctctaaaaagtgacgatggtagaacaaaattggtgcgtagatcttgaacactccggccaacgcataggtagtcatctcctgttagtggtctatgaaaaacatcatgattttcagcaggaacatttggttggctctaaaacatgggtattggctgttgttgggttgggttggggggggggaatgatcacttctttataaaagcatttgctttcaaccaaaatt

SEQ ID NO: 49381 - DNA, 964 bp, Arabidopsis thaliana landsberg
tgatgatttgataaagttacaagtactttcaagactcccaaaatcagataggttctttctttttgcttgaatgtttataactgaaaattgtatccatcttgcattctagacctactcgcaatgatcgggataaaaaaaaaaaaaaaacagccaaatgatttattagaaggtgttcttttatttaataacatcttcatttaactaataatggagaaataattcctaggatcaaaagcacctaaatcctttggaaactaaaataggagcacctaatctgaaaataaaaaagcaagaaaaccttcctaaagctagaaaagcgttaagtctcataaaaccaaactagcaaatagcttcgacggcgagtctcttagccaaagcaccacactccgctgctccaaacttatcctcggaaacatcaatgggacacttttcttttccaacacattcttgggtgaggatagccgcagcattgttgcttgcttcacaagttcctttctcaaaagatccgcaatcgcctcctgggttaccaaaggaagcaaatttgatggcagaaatcggttttccattgcatgaaagctcaagaacgttcttctcatagacatttgcacaaacacttccaactccaattgtttgaaaattgacaagtgatgggtttcctccaatctcttcaaacaaaaccaaggtgttgtctccttccgagttcaagaaagaccgaggaacatggtacctaatataagtgagtaaaaagagatttcaattttattttattttattaaaaacagtttataaattttaattttcagacaaaacaaattgtataaggtttgattctgaaacataagcaattgaaaaaatattaccatcgttgtgtaggttctccacaatttgtctgacatttttcagcatagtaagctcctctatagttacactcagcggaacaaccatctatgtctgagagaaaagc

SEQ ID NO: 49382 - DNA, 849 bp, Arabidopsis thaliana landsberg
atctatcttccaccgtcccctttatctctctcaaaaggcaaaaaacacacaaaaagatcgaattcaccatcctcggtaagtttcctctctccatttcttaaagtatttcgtatttgtactcttacttctctttttctccattgatgacgtatatcttctactgttacatttattcctctgtttcttcattgcctagaaaaatgtcagatttcgaaaaccctaataaacgaatctgaccaattttgttatgttttaactcttacattggttcctagacttcgattttgttaaaaagacataaacccatttacaaagttgtgttctttcgaggattgattcagaatttggaatgttactagaacagagatggttgattagattgtacatatatataaaggaatgatctttatgaccaaaaatgtgtgtttttgtttgtttctttacagtgtagtttgattatgatggaagaagatggattgaataatcgaaattggggttattacgagccgtcacaattcagaccaaatctagggtttcaactaattccaagtatcttagaccgaaacgagaagccatttctctcccctcatagtcagaatctaaacttcataacaccttccaatgtctatggtggcggtacagcagtgttgtgtcgtatccgcgtgattacactgtctctgatgcaccattcatgagttatagttggttaaaccagcacaaagatagcaagttcttcagcaatgttcctgaagtttctaggatgactcagtcgatgcagcttttgcagcctgaggtggtgactgaggttgatgagtctgtcaagagtaggcattgtagtggtgggcagag

SEQ ID NO: 49383 - DNA, 559 bp, Arabidopsis thaliana landsberg
aggttttaaaaatatttaattaatcaaattaaataaagaagatttgatatctaatttaacatatttttttttatttaatcattgtacttcaccgctcatcttcgtttaattctacttttctgaaaaaacaaatcatcacatcatcttttcgcgtatgctatgatttgaatttttttgtaggatgctgtttgtacatcagatgccttggtctgatggggagtgatcaatgggctcctctccaaaatgtttcttcacctttcatgaatcataatacatgattttgctctttctacgatcaaaacttcctctttaagctcattcttcatgatacatgctccaaaccctaggaagaacctaagtaatgcaaaatacacaactgagttgatataaaccacaaagatatcaacaggtaaaagagaaagctctgattcaaatgtacatatgagtcttctgtgttgttccatcgacaaaatatgactaatgaaaaaacttccgactctcgtcagtttacaaatcagatgataaacactcgagtaacatgaaggttatgttacaaata

SEQ ID NO: 49384 - DNA, 562 bp, Arabidopsis thaliana landsberg
  unsure (1)..(562): unsure at all n locations
agtgtccaaaggacctgcgccgcgcgcgcagcgccacgcacagcctgattccgacctagaccggcgccgccgcggccgtcggcctggtgctgccggaactcaacggcaagctggacggcttctcgatnnnnnnnnnnnnnnnnnnnnnnnnggtggtcgatctcacgttcgtggccaagcgtgccaccagcaaggaagaaatcgacagcgtcatcaaggccgccgtggacggcccgatgaagggcatcctcggcatcaacgaaaagccgctggtgtcgatcgacttcaaccacaacccggcttccagcacctacgacgccacgcagacgcgcgtcatggacggcacgctggtcaaggtgctcagctggtacgacaacgagtggggcttctccaaccgcatgctcgacatgacggtggcgctgatgaaggccgcctgagccttagcccaactttggcaagacccgaagcccgctgcctcgcgcagcgggctttttgctgcgcaagacaaaaattgagcacacctgtgggagcgcgcctgcgcgcgatagcctgatgccagttc

SEQ ID NO: 49385 - DNA, 463 bp, Arabidopsis thaliana landsberg
gaaacgtgcgtaaaggactggataagagtttagggtttagggtttacggttgcggattagtgatttagggttcaggagatacaatttagggggtatattttaagcttgacgaagtaattattaaactatattatttaactaatgatggaaaataaaacagggaagttgctggaagtagcatgtagtatgcttggagctattgggaaggactcatatctaagcagatgctgatgaattcacaaacctgaagagattattgaaggaaaatctctcaagtgttatctgtaaacacacacaaaaggttaggatttgtggtattagtttcacgatctttagttactttgaatgattgttaaccataagtgtattcatagttttcatgatgttgcttgcaggttctttggagcagaatgaaagatttagaagaagagcaaaaaaaaaaaaaaaacaagagagtaataca

SEQ ID NO: 49386 - DNA, 671 bp, Arabidopsis thaliana landsberg
aaactcaaggaatacacggggttgatgaaacaatttaggtcccggcatatacaaggagatgaactcataaagtctcttcaaaatctgtttcaaggagacgtggttctttctcaaatgttcaacgcacttatgaaaacagagatccaagaactgcaaggtaacgaaaatccggaaacagtcgcaagaaaaagaacaaggagtgaagcagagaatgatgatgggattgaagaaggtgaaattcgagaggggcattgcgattgtcctcgttgcaagattggtcgggaagaagcagaaaggcgtagtatacccattaagaaaagaatttgtcgtgggttttagaagattttgttttgttcttaatatcacatgttattcagtttgtgcttttcaaatattttcccaaattctatgttactactcaatttatgttaaatcataaaataacttgggttttttttaatcaaattatattatgataaattttgttgttcttctctatttatcatcaattataaatatatttctaattaatcctgttatgatgatattcaatttcttgcagaatatatgattgtagtaaacaattttgatctttttttgctattaaatcaaaaatttataccaactttatcaaaatcattgcctattcacacttgatgattattattcgg

SEQ ID NO: 49387 - DNA, 485 bp, Arabidopsis thaliana landsberg
caattaagtggctgacgaaaaagctaacaaatccgcgtccttcaagcaaaacctcaaactaaacgtcatgtagaataatattaatattattcagtctcaaaataaaacaagaataacacaaacgtaaaaagctcaatacctcgaacgataaaaggttgaatgccaaaatgcaacgacgaacaaacattcccaagttgctgttgggatccaaaataatctgatcatcttgcacgactcctgaatcaaggctcccaagtattcctacatacaaagaaatgataactaatttgagtcaaacatgatggaaaagaagaaaaaacagaccttaagcaagcaagtagctaacctcgcatgtcattaaagaaatttaatagatcatctggtgaagccaaagaggaaaatctattagttaaatggttcagttagccaccgcgtccattctcttcaccaacttccctcaactggttgatgagcttttccagctt

SEQ ID NO: 49388 - DNA, 171 bp, Arabidopsis thaliana landsberg
tttttttttttttctttttttttgttttttttttttttttttttttttttttttttttttttttttttttttttttttttttttgtttttttttttttttctttttttcttttttttttttttttttttttttttttttttttttttttttctttttttttttttgttttt

SEQ ID NO: 49389 - DNA, 2072 bp, Arabidopsis thaliana landsberg
cagatttcctatcttaactgttttcaactcttgcagctacatattggagcaaagcttgtttgtggacaacttgtttgtttttgttcttgttttcaagtatttcaaagtgccactcatgtatcaggtaccaaaactatcttcacagagccacagagatttagctcttgactacagagtattctgattctgtgtccctttctatagaataaggtacttacctacggtatagctggtgcaattgttttccgtttcacgctcattttactaggaacagctactcttcaggtgatttctatgtttacatcaaaatatttgttagtgattatttgtttcatttttctgcctcatttacttttgaattctctctactttctttcagaaatttgaagcaggcaacctactgcttgctgctgtactcttatattcgtcattcaaggtgcatactacctcatcttagcatttatacctataatcacacacaattattgatatggtattagtttttctgtcctcaatgtgttaatacagttatttgcaagtgaagaagatgatacagatctatcggacaacttcattgtaaagacatgccagagatttattcctgtcacatgtaatatacccggtctttttctcctttttactgtttggtatgcttccatagctgatttattcctcttttcttttgtttataactgcttgcagcaagttacgatggaaatcgatttttcacaaagcatgatggcattttgaaagtaagtatatgacaaaattcctcctatatattcaaggtttatgtataagtcactgttaagttttattgcatgtggactccatgatcaaaacattcatgatagtacctttgattacttctaattatttcaacaatattttgggcaggccacaccattgctacttacagtagcagtgatcgagctcagtgacatagcatttgcggtaacttccgtcaccactttgtgaatctgtttttgtctctttagaaatgaagcaaatcactgatactggttgcccattttcttaggttgactcaataccagctgtttttggcgtcacaagggatccttttattgtcttgacttctaatctctttgcaatcctaggtattttttccctaaacacaatttttgttaacttcttgcctgtctcttttgaatactcttggaactttgaattgaagagtttatttatttcatctggtgtttgaatttgccgcaggactaaggtctctctatacactgatttctgaaggaatggacgagctggaatacttgcaggtacctttaccacttctttaaatcttcattcatattctgtttcattacttcatactcgagctaagcatcagatacatacttaagagtgccagtaatgctcattatgtacccatggactagtatgatttgtatctaatcttgtctttgcctttcccagccatcaatagcagttgttcttggcttcataggagtcaagatgatccttgatttctttggtatagatattctctcttcatcggcaatttctgcttgaactaaaccatatatctacaagaaaaactaagctctctcaacatttcttcctctttctaggcttccacatatcaacagaggcatcacttggtgtcgttgcactttctctcagtaccggagtactgttgagcctaacaaacaaatccagcgacagctaactaagaactgagagctgactactgagaaacagaatccagatgtatccaaccacacagttcataagaataatatcgcattgttcatcaaagcatttcgctgatgtgttactgtagataaaacacacagaaagggcattctttccaagactcgtattctactttttgttttgtcgttaaaaaagcagcaaagaacaagacactttaaatctatttgtctggaagacatgtgggtgagccccatgattgctttgagacgagtagaactgtctttgatcgtcaagtcattccatgtgccgcttggtgctcatcttattagattattcctttggactattagtcttcccatttgtctaaaagcacaactcttctt

SEQ ID NO: 49390 - DNA, 1485 bp, Arabidopsis thaliana landsberg
cttgcagcagttataccttgctccattgctgagtaaaaaaaaaatgagattagactcgtagatcaaagaggttgagggaggaagaagccaatacaatggctggagtgtgggtgatgcgaggaatgttacttggtttacctatttttgcagtttcagtggttgcatccgtaactatgtttattatctcttctttggccaagatttccaccaggcaccatggccgagccactaatgctgttaacgttcgataaccctgcaaacaacattgtaaacaatatactataagcaaaaaacatagttacctctaggcaatgcgtgaaggtcttatgtgagatcaaatgagtgacatgtatccgagttttgtgtagaaggacaaaagagatttcttaattttgaatgaaatgtagtgtgtcattttgaaatttccaactagagaaacaaagggggagaagatatgatagatcagatgctgagttaaaggtttaccgcaagacgaatctctgagctttgttgaagaactgagaggaataaaccctgcaatttgtgcgacatgcttaaattagctcatgctacggatcaaacaaaaatatgtaatctgcacacttctgagagaagaataagtaaaagaggaaacgaacttacggatggggttagttttgtgctctgtgctgcagcgtcgtatatcaaacatctaaggctttcttcagcttttccatcaactattctgttgctcttaggtcgtgtttcacctgcgatgtttgccagtgcatgcagtgcagcctgcacatgccatttacgaaacaatcatataatttcatgaatgtctctactaatgaagcaaaatttcaaccctcaatagttagaattagaaatcctaaaactggaaaaattggatcttcaaaaatgtagtaagagcatataatcggcagaatttcaattgatgagaagcaaaaacacactaaccaactgttttccatgtgcattacgatcaaaggcagaagctacaacatgtcttgcagctggaggtgaagttgaaaggacaagatccgctcccttcgttgctaagattattgtaaaaatatccatataagttacaagatcattgcatgggaaacgaatatcttgtcggatgctcttataattcataattctaaatgtatggcctctctagctatctcttttagaagacgactgcaacaaacaaagtttcaaagaaaagtgacccacttacttgatcccatctgaccaagtgcatcaatggcagcttcctgtgcatcagtatcattcatctcaactgactccagactcccatcaatagctgaaattaacgccttcacacctgtattcaagacaagctgaaagttgtttattgccagctacagtacagcctacaaatttaagtctattattattaaagctattttctcttccttatgatacattcagaaacatagcaattcgtagttaacttttcaacttcgtcac

SEQ ID NO: 49391 - DNA, 953 bp, Arabidopsis thaliana landsberg
gcttttatatactgatcgaagcctcttcctctttttttttgaacttattgtaaaatctattttagcatgatctatgctgatttaaagtttgatcttgtcggatttttaatatcatgatttgaataaataatacatgttcgtactaactactaagtatacaactcttatattaatcttatttaattgtatcccaatattggtttggaattttatgttccaaaaaaaagtcataaactatacgtgcttagtgcctttttttgttaagaactaagtacttaattaggcttagctatatgtattttttatttatttatttttttgtaaactaggcttagctatatgtatgtcgatagcaattcacaagcaaaatgtcaataggaccttatctacatacagtatattcatatttatagaaatatatgcatgtaggatacagtatccgccaataaaacagtagtcacgtatttgttttttttataataatgattaaatgtaaagtaaatagtatttacatatttattttttcataacgctttgaatcaaaggaatattagaccatacgtttaattatttttttccaaaattatccccaatttcgtccttttcctacttaacttcttcttttgtaatatctcacagagcacaagcaaattaggttaaatatatattcaaggatagattatgataacgtttttgtattagttcattttggccatattgtttttgtattattttgtctatatctttagtaggtaaagaaaatggcagaatagtgatgacccaacttcccatgagattgattggagcatggaagttagaaagctagtcaaaaagcagtttactagattggcaaatccataaaagcgcttaaaaggtttgttagaatattaacttttgacactctgaatcatgaatttctatttatatatctatcacaacttatgcctattgaa

SEQ ID NO: 49392 - DNA, 465 bp, Arabidopsis thaliana landsberg
actgcgagcgtccaggattagacttaggtgtaaatgaaccagcattctatgtagaccgcacgatctcacttccacggcctagattagatctacattagttgaaccggtacgcgataagggcttttggatctagatcccacgacaccgatttaactagaccaaaacaggatgcgcgtcacgatctacgccgtttctctcaagatcaacggaccaaacctatttgctcaaccgcggaacgaatgccgacgcggcgcgagagttccccccacggtggcgccattccccatcctcgccggagttgtccggttttgctaaccccgcccccattttctaattgaacatgtgcgacagtcataattggccatggcgagactggaggaggtgttccaccggcgatcgatgcggtgaaaaggtcggtccgtggcgaaggaagttttcgtggcggcgacgcagtggacggaggat

SEQ ID NO: 49393 - DNA, 424 bp, Arabidopsis thaliana landsberg
ccaaaaagagccatactcttaacacaagtcactagaaatagtaatgaagaggatatttaaaatgtctatgagaggtttgcttaggcacaaaactatgatccataaggagaataccctgcgttctggctgcagcagctacgtcggctacccaaagagaaaagacatttcccagggagatggatgcatatggacacagttgtgccatcgaagcatggcaatggtccaatggctggagggccaaagtccgggggtggctacagagggagtcacagagggagacgttctaaacacaatggtccttagagagaaactatccttaacacgaactcggatcttatgaccaatggctgggaatcctgctcacatgaatctctgaacgtcaggcgaaataacgttgactacaaaaaaatacatactccaaaat

SEQ ID NO: 49394 - DNA, 380 bp, Arabidopsis thaliana landsberg
ttttttttttttttttttttttttttttttttttttttttttttttttttttttttttttttttttttttttttttttttttttttttttttttttttttttttttttttttttttttttttttttttattttttttttttttttttttttttatttttttttattttttattttttttttttttactattattttatctattttattttttttattgtttttttttccttttatatttatttttttcattttttttttttttttcattttatttttttttttttagttttttttttttattgatttttttttttatttatttattgtttcttttactttttttttttttttttattttttttttcttttcttttttttt

SEQ ID NO: 49395 - DNA, 211 bp, Arabidopsis thaliana landsberg
  unsure (1)..(211): unsure at all n locations
gtgggcttgaacatccgtatagccacgctgggcgtaagtctgtaagggaaaggtccaacgagggttaagtgaggatcaaatgctggacnnnnnnnnnnnnnnnnnagcccttccattaacctcggaagccgatcgtccacggcatcctccggtgctgcgcagagggcagacattgccgttgccggttcatgatcgtcctgagggtgtggag

SEQ ID NO: 49396 - DNA, 1139 bp, Arabidopsis thaliana landsberg
  unsure (1)..(1139): unsure at all n locations
cacatcttcttcgtagcaccaacaaaaatggtgtccctctctaattaaaccagattctctttccacccaaacgatcgtgtcgtttccgagaaacggcgcctgggaatctcaggagtcaattttcccaggaagatcaagttgaaaatcacttgcttcgccgccgagagaccacgccaggagaaacagaaaaagaagagtcagagccagagcactagcgacgctgaggctggagttgaccctgttgggtttctcaccagactcggaattgctgacagaatctttgctcaatttctccgggaaaggtataaaaatgtatcaactttgattttgagcaacaaaaaaggatcaattttgattacagctgtgtataataagcctgttcgtttttctgtaggcataaagctttgaaagaccttaaagatgagattttcaaacgccatttcgatttcagagattttgcttcagggtatgtatcctcttggtcccaggttctttcaagagaagattttgatcctggattagtgactgatgtgtatccaaaatgcttcgtctaatgaatagccttcttttcattgtagatttgagttattggggatgcatcgacatatggaacaccgggttgactttatggactggggtccaggttctgtctcttgctctaatcttaaaatttcattagtcagttcattacttacatttggttcagaaacagaatgaatgatgttctgaaacttgatttagtaatttgcgtctgttgggaagtttgataatactaacgaatcctaaattcaggttctcgttatggtgctataatcggagatttcaacggatggtcacctacagaaaatgcagctagagagggcctatttggccatgatgattatgggtattggttcattattcttgaagataagttaagagagggcgaagaaccagatgaactatactttcagcagtataactatgtcgatgactatgataaaggtgatagtggtgtctcagccgaagaaatcttccagaaagctaatgatgagtattgggaacctggtgaagaccggtttattaagaatcgctttgaagttcctgccanactatacgagcagatgtttggcccgacagtccacaaacgttagaagagc

SEQ ID NO: 49397 - DNA, 636 bp, Arabidopsis thaliana landsberg
tcaaacaccacatggtcgagatcatatatacattaaacaatcacaaaattagtagtaacgagactcaactgggaccaccgaaaggtatggtgccgggactcacgccggcggctacagaaggcgacggctggacgtggagcacgacgaatgatgaatcggaagaagacgaagagagcttgaggttgtctagagcccacctcagagcttccatactcacctcgcttccatctaccgccacaacaacgcaattcaagcttcctgaaacatccatgacttcttcaatctctcttctctgtgctaaggctttctgtgattttcttcaactcttggaaagttcaagaggacgatggctttcacgtctcccatttttaaattcgcggcttacaaaagggtatacctgtcattccatagccgaattatgtaatgaaaatattaaattatttacgtactattataaatagagtaaacttacgtccgcgcgtgagtttcagacgcgctggcattcgttgttgacttatttggtttagacgtttctctctctccttctctctcactcgaccccctcgatttctgatcgccgatcttcggcttggattctcgttttcggtgggcttttcctcaaatttcctaacgatg

SEQ ID NO: 49398 - DNA, 699 bp, Arabidopsis thaliana landsberg
gaataggtgcagacaagatgaaaaactgaaccattttctgtccacatgggctatgcataaagggtccacatatttgtatgtatttgagtaatcgacctaattttgaaacatggattatattagtaactaatacccggtttggttgtttcctactattcttgtatactaacatgacccatgcaagttgtcaataagttcatcaaaagataatttgacgtgagaggaaaccaacgccactagaagaaaaataataataatgttttgagaatatgttaggtgctagttaaaattccgaggagcgttacatctataatctgatgaatctatgcgtaggcgcatgtctcttttgcagatcatttgtatcttttttgttttgttttgttttgttgtttatttcttctttctcctcaagcatcttttggtttctatttttaaaattaaatgggatatttgcctaactatttaaacgaccgttagcctaataatcaattggtttatatcacagaatgcgtctaaaataccagtttttttggtgtgacaaacaaatatttgaatatctaaaccaaaatactcattgtatcaaattatacacaatacatatataaatacaaaatttcgagtgcctcttaatcagataaaagatactcgcgggactcttgaggtcgtgagtgatcttgtaacccaagccggtccagggga

SEQ ID NO: 49399 - DNA, 671 bp, Arabidopsis thaliana landsberg
tggtcttggatttcagattctgggtacaggagaactaagcatgaagctcaccttcaaagctcgtgccttctcaacacaagcaaaagagaagcttgaagcttcaggttgtacactcactgtgttgccgggaagaaagaaatgggttaagccatctgttgcaaagaaccaagcacgagcagatgaatactttgccaagaagagagctgcagcagcagaagcagcaacttcagagccagcagcctctgcttaaattacttcagtttcaagctctttttagtgttgtaaagctgcagagaagataattgtctatgacaaatgttaattacaattcctttgtctttttgtatggtgaagagatttacattttgttgtttgaagagtcattatcaaaaagatatttaaacggtaatgaaatattgaacattttgtttcccaatagtagaaacttttttcaatctccaaagaaattttacataatagggtttcataagtggggttattactacaaggtttcccccattttatcataaactccaaagaccaaatttccaaactgcagagcatcacggttcttcttcttcatcatcatcatcaatgacagttcttcttctagaacgacgtctccgagttccagacacttgttcatcagaagaatgattattctcctcatc

SEQ ID NO: 49400 - DNA, 935 bp, Arabidopsis thaliana landsberg
tttgaccaaagtttaaaaaaaaaaacctagtgcttataacaaaggttttttgcaacaaggtattgctattcgcgtttgagggattaaaagagagagacacaaaaaactaggatagatagatatatagatggattcatcaccttagattggataacaattgtgaccaatctgatcgaaaatgttgaatcctgcaggtgggaaacactcgtcgataccgaaaggtagatttgaattatagatcatgagcggctcggaattttccatggctgatgatggcacgtgtctagattcttgcttggttagcatggcagatatactatttagagtagactggtactgttgatgttgctgctgctgctgcagctggtgctggaattggtcaatataagtggaagggttggtcatgaagcagttgttgttgttcactggcaggcaactggttgatggatacgggatattgttcatgaaatatgatcctctaggcgcagcttgattgtttatcaaatacgatggtgtagcatgggagcttaggagcgtattagaggctgcaagagtgacatctggcccagcattaccccagacaaaatcttcttgaggctcctgaggagtgcaggtctttttggaactttgacggtacttctgccatcggaatcgttttaaattgttatagcccttattactggtttcttgtccactaagaaacaagaaaaccctaaaatagaataaagatccaaaattacctggagatgactggctacgttgtttctagtgagcccctggacattcaattcttcttgcatatatttgagaatcgtctttggaaaagcctctgcaaaatgcaattaaaaggtcagataataatcaagtaacttgcttattcacgcaagattaattagtgtaattaattactctcaaggctgcccattttttcgacg

SEQ ID NO: 49401 - DNA, 696 bp, Arabidopsis thaliana landsberg
gacattaaccatggaaacaagaaaagtttcaacgattattttcagtaaccatggaaagtgtaccacgtaacagctcaagaaaacagaaagcgtagcaacataaaatgtaaacacagattgacaaaaacgataccgtgacatagacatcgtcgtttaggttgatgagaactccatcaaccaaagctttgtcaaagtggcatttagcttgctttattatctcttcatcttcttttttgccactgtaaaacaaaatcagcaaacagaagctaagcaacaaaatcataaaagagacaaaccccgtaaagttataccccttatttgcaggttttttggtcggagcttggagctttgttttcttggattggtagcgatgaggccatcgaatcgtcgactccacaacagacattggtttgccagcgaagcacagatctgactctggctcagcgcgtttcttttgtttgtttctcgctgccattttcgcagagaagacgagcaagtaaaagatgaagcgttgcagagacgaggtctatatgtactagtcgtgactagtggagcaaatatattaatgttaaattttaggaaataaaatcaattccaaattatggagaaaataaaaaaagcgttgtggagtgtaacaaacaattaatgagaaaacttaggaaataaaatcaatttttcgaatatggagaattaaga

SEQ ID NO: 49402 - DNA, 785 bp, Arabidopsis thaliana landsberg
tgacaaccaaatgaatttcgaaagtaatattttttggagaattttcataatagctaaccaaaataattaaatattggttttggtttggttccgattttttttaaaacttaatccatgtttttattaaaaactattgctgcctaagtaaaagcaaacgtaaatagaaacaataagttaaacattattcaaggatcaaaatctaagtttagatttgtaaatccaaaaatattcaaagaatagaatccaattaattctaatttcaataaagaaaaatcttaaggatattaataacaaaatataaactgaacaattataattatatataattattcaaaattttcatcataaataaaaaccattcaatttgagggtcttaacccaaaccaaacctaaacagaaaatctaacaaaactgacaaccaaacaaaatcatttatttctgcttggttcggttcgatcggcttttcagattacagattttttgcccacccctacaactcaatgaataccaaacttgttgaagatgaaaatagagtaaacaagaatcaataaaatcaaacttaaccaaactttacaatatctcctctaagatagagcatggaggttcttaatgttcttctcaaagaaggatgtcaatttctcgtttgcttagtgatttggttagaatgttgttgttaagatgaggcttgttgttctgcaatatattgtggtcattttgcccaaatgaagtggtaatcaatccatatgcttggcattaaattcatggatattaattgttgacattga

SEQ ID NO: 49403 - DNA, 881 bp, Arabidopsis thaliana landsberg
aaaacccttatataatctttttactgttacaaaagaaaaaaatctgatttgtttgttagttaataggaaaagatttggaaagcatagactatacaggaaactttggttaatcatcgtttttgactcatttggcaaaaaaatataaagactgaattattcagcagccaaggaactttcgaccctcatgtgatctgggactgaaagagactacccataaaaaggaaaaaaaaaaaatcaatagagagaaagagaaagttccaaatgaaaaaatgaaaattagtgaaaagattcaaatgaggttttactaagaagagtaaaattttgtatcttattaaggtacaataacaacagtttaacatctgaatgaaaaatagcaaaatcaaatgcatacgaaaaaaagtatacggccatttacagagagacacgtaatggaagtaacatgtcaaaaagttacagacaagttctttcttttatattttaattttaccttccaaaaaaactaaaacaatccaacaaaagttatgaaagttctcaaatatggtttccccaatatagtagtgctatgattatgaaaacgattgtttgtttttctctctaatagtagtctccatttcacataatttaaagcaaaggagtcgtgtgtcacacagaggcatggatggtcaaaacctatgtcgggtaattcttagacccgatttaaacaacatgataacaacagcccactaattttgaaatctatatcccatctaccagaaagaaaaataaaaatgattattggcactaatcaaggaatcaacataagatgagtttccatgcaaattaatgtttagacaagaatggtcataaattgaggaaattgtcatgtatcaagaaaccacgac

SEQ ID NO: 49404 - DNA, 550 bp, Arabidopsis thaliana landsberg
aaccgacgaatcatcctctatcttgtacacatcatctgcaaattgatcactttctgtagaaatctcagagacttccttaatctgttgcagatccttattctcttcaagaaacgtggaaccatctacgatttcagcgaacaatattatcttctcagcctccacaatcctctgaccatcagaatcttgtcccttcttctccgagttcaaactttctttcatatcagagatagatacgacgaacccatcagtctcaacaacatcctttatcttgagcacatcatctccaagtcgatcgccttctgtagtagaaatctcagagctttccttaatctcttcaccaaccttattctcttcaagaatcgtggaaccattttcaggtacagagactactactactccaggacactccacattcatcgccacggtttcttcaagagtcgtttcggagaaagaaatgtcaatagaatccgatggatgatttctccatccttctcaaaacagaagtaaaaggcgaagactttacttgcttctttgggcttatcatctcttc

SEQ ID NO: 49405 - DNA, 547 bp, Arabidopsis thaliana landsberg
cgacatcgacaagacaacctaaatgataatcaacgacctaaccctttgattttattccacatttttttctcctcttggtaatgccttttcaggttttgattttttaaacatgatcgtacgtactatccctatgtgttgtttatcttagtatgtgtctacaaattagttagatcgaaataatattcgggcaaagaaaaaaagattttattttaagatactgatttaacaactcaaacaacaccttttgcaaacacttattacttctgatcttaaaagtgaatttgctggtcgagataaggagttggatatccaatggatcattgttttgagcattgtggattcttaaatgggtagtaatagactcacgacttacggattttggtgcagttgttcgattcttcaaaaagtggtagcaaatttcaaccatagataatgaatgatcttgttccacttgttaggttctaaagttacattgagactaacacttgcatttatttcatcttactattcatttgccaaaagctttctcacttttattcacattaac

SEQ ID NO: 49406 - DNA, 556 bp, Arabidopsis thaliana landsberg
tcaacatttgtagactcgagggagggagagagagataaaaagtactgacgagagggaagatgtgatgaagcaagaagagagcccatcgggtgttgtagccgccgtagcctcgaaccacaacatcagccttgcgagagtaagcgtcggcaagatcaggtcccccgcctgcgggtcctagaagagtgtgccgtgatcgagtcgccgaacagaactatctccggcctcatctcgctgtctccctccggttcactgagtaaaccgttaactgtattaggaaacttaaagtctcttctgggccaagtcatatgggccgggcctttagtattaatttgttatatttttggtgaatgaaaaggtggtaatctaaagaggttttactaattgtagattaaggatgcgtgtaatgtgttagtattagtttatgatttcttgatttcacatttttctgtcttgagcttaagtcaaaacctcaaagtgaacttctacggtaggatgaagtattgaagtgtagaagttaaatgcgtgaacttccacaattcaactacagcgccacttt

SEQ ID NO: 49407 - DNA, 197 bp, Arabidopsis thaliana landsberg
gcggcggaaaaaaaaccgcaagggaagagagaaatgagaagaacaatgaagaatttggaatgtaagaagcgtagttatagatacaggaagagatttagggtttaaaggtggagacgaaagattcaattttggggaaaaaaacttttagatgtgttcaatgttttgtcgtaaggagagaatatatttttggcatatgt

SEQ ID NO: 49408 - DNA, 746 bp, Arabidopsis thaliana landsberg
tcttacttaattgtttggtctagtcaatcattagtttggtacaccaacattcatattttagtacattgatctcattaaaacgttgattaatatcttttaatgttttatgcttcacattaccgattttgaaagttaaatttataaaattaatatttttctctggtttgttttgtcagaatttgctacagcaacatgatttaatatataggacaggcgaaccattattagccgaagaggtctcggtctctaattttggataatgtcgccatcgagataagtattatcttttctagttttattgattagcatactaataagtattgtatactttcgtgaaaagattatgtcttatgaaaaaaaaaaaatatatatgtatttatctgattgatagaaatttcatgatcactaatttggcacataatgtcttctatttgagaatcgaatgattaattaaaaatatagatcaatgccatgataataaccaagaaaagaaaagcataatacaaagtagtatgaaacttattgaatgctccataagagcacataaaaatcattatctgacagaatattattgaaatatatatgtattatatactcgtaactcctaaatatataatatatgactcaagtaagatatgttattgagtgtaaatgggattcaattcgaaattgataaacttactgttatcatctcgagggagagagttaaggaatcccatataccataataagagaagcatccagat

SEQ ID NO: 49409 - DNA, 661 bp, Arabidopsis thaliana landsberg
caaccgctacaaaaattgcattctaattatcaaacaacaaagtttcgttataaacaatttatgtatacgaatgaatgagtgtatgtacttactcattgtagcggtgtccgggacagaagttcctccggtggcactatcatcgccaacaatcaccgtcaggtctttgccttctccgatcaaagtaatctcatgtttatggattattactttctctttgtaaacccctcttttcacgtaaattatgaacctaccatttccatgggcagccgtgacagcctccatcacggtgcggtaatctccggaaccgtctttggcgactaccacgtgtgctcttgctctacctactagaagtctccgttctccggcagtgacccaccggggaagagcggttgactttgtctttggttttggattcttcatgattgtgtcgacaagagtcagggagttgctgaccagtcgagataggtgatccattttctgtgatatgtggctgatggcagaggcggaggaggagccaccggagtcaaggatggagtctttgcaagcttgttggaaagtcatggcagcggagagccatgtttggacatcgtgtttggtgtgacgctttctcgatgagccattgagagctttcatggcttgcctaagtcgtcttgtggacatt

SEQ ID NO: 49410 - DNA, 1385 bp, Arabidopsis thaliana landsberg
  unsure (1)..(1385): unsure at all n locations
aagccatttcgtctcttttttcttcactttcacaaaaactattcatattagactacacaaaaactaacaaaaatttaaagactactctattatctaattacaaagttaaaattactgtactttttttaaaaagacctcttatgtttatcaaattcatcatgtatactaatatactaggtagtttatccatactatgtacggaatgaaatgtttttcatctgatactacaagttcaactgtaatttatctagagtagccattctcatgggattggagaaagttctcaaaacatgagaatcaatcaggccgtctatgatccatgacagcataaacatttgtgtaaggtccaaaattaaaaagacctataattatttttttttgctgtaagatttgaaaaaaatcagaaaagttataaaaagggtcaatatcaaaaaaatgtttaagataaaataccaacaaatttataaatataaaaccacaatttagttttgtgtattttattggcatggtctaaataaaatgcctattttttgttttgcctaaggttgtcaaaatgtttgagacgggactcagattaatcgtgaaacattgaaatcatgagggagaattggagcattttcttagttgcatatcacatggattcttagacaaactctcctcaatttgattgtgatttctacaaacaaaaacaattagaactcaatttatgagttattttgactcttttcaaaataataaaaaaaaaaactcacattcttcatttcgttagattaaaatgacttttcacacttgattcagaggattttctctttctttaagaggattttttgcatttgatcgacacttagaaaaactttgatttttaaacaacaaattttttttagagagaagcttattagattttcacaaaaaaaaatagttttcatgttgggcagggacaagcctaaaaccatgaatgattttaagaaaatactaatgtagagcaaaaaatggattctcgtagaaatgataattaaaaaactaaaaaacttaaatgggaacaaaaagtttttcttaaaaaacatttctaggaaaactaaagccttcaatattagtttgtaagtagattcagtttttccaaaaatctatactatagccattcaggattttacaaatttggtttttctaaatacaaaattagagaatccagtttttgagagattttatccattttcaaagaaaaaacttgagagattttaattcatttccgaagaaaaactcanaactctcttctttgttttcttttcttcttttttcatatttcaatttttatgattaagtaaatgcattgtagtctttgttacaaaaaatcttatattattgattaatatatgagatttatatgt

SEQ ID NO: 49411 - DNA, 343 bp, Arabidopsis thaliana landsberg
ccgatctgcacggaagtttgcgcccagaggttttataaacccacgcgaaggtagggcggagggctgagtccgcgcgtcatcgtgacattagcggtactgcttacagctatggcggccgcggcgatgaagactaatagggcgaccccactatccaaggacacaaggcacgcgagtctcccccagcgcgggtggctgaagaccggggcccacatgtcagcgaaactgcatagcatggtggtgaagtgagtagggaggcccgcatggcagtggcggtccgcccaaggcacgcacgaatggtgtggccggccagcgggcccgccggtcagtgaaatgaacgcgggct

SEQ ID NO: 49412 - DNA, 548 bp, Arabidopsis thaliana landsberg
tacaatttatgccttgtacacaaacaacgaatccaatgcctctattttaacgttaatcatattggtaatcgcgtgagatacaacgataatagtacatccaactcagatttgttgtctttcataaacggaaagattcatgtgctgatagccttgatgatgattctagttgataggggtaggttatctaagtggccaggaggaaaaaagaaatggtattatgttttgttagtgatttcatctagtagggagaaatgagttgtgcgattataccgacaacatcctcatatgttacaatctatactacaaccaaagcaaaagaagatccaatctactaggcatatcgcctatatgcaaataccatccatatcaaaagttgtgcatgacttagctctgatacaactaaaagaaaacgtgtacactatacactagcatatctaccatgttcaagttagcatatgagtagaggaccctggattgttctactagacacgcagcacagcgaacaagaaggcacgatgtataaagtagttaatgtctcgtgtacagta

SEQ ID NO: 49413 - DNA, 670 bp, Arabidopsis thaliana landsberg
tcatgtttttttaaatttcttctttgtttcatgtcggactttttatttttccatcgcctcactgtctctcacgggaatgtagggttgtccaggaagaactcttctgcgtttgtttgatttgagctaatcagaaaggtgatgatgctactctctctgacatatttccgtgatttttttagtttctgtcgtttcattttctcagttcttgttctacttttattctgttcttgactcgtgttaatctctttgtttggttttgtctctgtgatgttaaagttttaaaacctctgtattgtttgattcaacaacccattcgtaatctgtgaaaccatagtttgatattagaaaaagattggagtccaattaaattgagtctgaatttgaattttctgacgatttggttatggaattggcaggtgaaattgagaaaatggagggtgaagttgctactaacggagtgattctcaagcataatggtgtaaaggatatttctttagaaacttgttggccagagaagaagaaaccggttgaggcaacgagtcttagcagtggttcatcagacatagaagaagagatttgtgtggaatgttcttagcgagtggcttatcaaagaccgaaaacggttaaagctgttgagattaaacgaaatttttaagaagaggaaatgtga

SEQ ID NO: 49414 - DNA, 149 bp, Arabidopsis thaliana landsberg
gtgtgtgtgagggtgtgtgtgcgagagtgagagtgagagtgagagtgcgagcgagcgtgtgagtgtgagagagagtgtgagagggcgtgagcgagagtgtgtgagagcgagcgcgatagggtgtgtgtgagtgcgtgcgacgaggtgtg

SEQ ID NO: 49415 - DNA, 710 bp, Arabidopsis thaliana landsberg
aagaagaaggaaagccatgggaggtgaaaagttgggagttttacgagtgaaacagaggaggagatgggaagacgtgaaacaggggagctagaaaggaaagtgaaagagcaaaaaagaaagaaagtaaaattcgcaaaaaaataaaaatctgttcgtttgtctcctgaaagtgaaaggaggaaagctgcattaaatagaggcgaaagagttaatatatggttttaaatactaattcaaaataaatagacgttttagtagtatcgttttttatataataaaaaaatatttgtatttaattttataattattaatattctttagagttttttgtttttgtttttctgtcatcattctttagagtttttattataagatcaaaatactttttatagttgttttgcaaaaaaaatttagttagtgtgtatatatttattaaatactttttatgcaagagtatgtagtttaatacaaaaaagttataaatatatagttttgattgtcattatatcaaaaaattaaaataatttaacggttttctgtcaccattcatcacggtaacaaaatgcaaaagataagaattacaatcttaaaaagtggcaaaaagtgacaaaatttgaccgttcaaaatggtttttagcggtttattgtgtcttttgcatctttaaactaaattttttaatttcttatgttttcacttatttaagatttgt

SEQ ID NO: 49416 - DNA, 603 bp, Arabidopsis thaliana landsberg
  unsure (1)..(603): unsure at all n locations
accgtgcatcattacggcaaacaagaatatttttctcatgcaaagctttctttagtagagtgtgtacttttggtagggcgcattatgcatatttaataattttcgaagtaataactgtagtcggtatacccgttatgatccactaccaattgatgttttttcgggccgtcaatatcgtagacaacgtcaacgccgggaaacnnnnnnnnnnnnnnnnnnaggaagaagtcattcggcaattgtccgcctgtgccgttgagtatgttgtgtaaggtaggtggcgtgtaccaacttgcaaaaagaccgccgtctttgcatttcaggaagtagtggatgttattgttaggcccattgtgatttctgatgaagtgtaatttttcagaccagtcttcaccggaaatgtggtttgacgtatatgcgtaccctttacgggcaaggactttcgagcctgcctgtgatttctattttacacttagaaagaagccaactacgcctgccttgtagtttcttgaccgttcttttgtaaatacgggaaatttgttcgttgccagagatggatggttccgatttgctgaattcgaagggctagtttttgtgaaggaa

SEQ ID NO: 49417 - DNA, 650 bp, Arabidopsis thaliana landsberg
attgctattttatgtttcttcggctagtaaaagtattgatttaaaattaaagagtgcataagttgagttacgtcgtctcgtagacctaacgttttctctttgacatgcatgaatcatgaatataatttcaaaaggtcggaaaaatgaatgatggtccaagacaagaatcatggaaagattttgtcaagatagctcaaaatgtaccatgtacgtgacatcgagctaacccattgccgactcttttgctgcatcttgcctaatttttgtcactggcctaactctgcttgttttcaaggttatttttttacaaaaaaatcgaacatatacgattcggagcacaatggagaagtgtttcgatactaaacttttagaggtaatatttggagtattgtttcatttaaccaatataattcgttagacgtaactgagatacgaaactaaaacgtgtgggaagtgaattttggatgataaaaaagattctacaacaaaaaaaaggagagagattagttaaggaaaacaaagagtacaatatattgtttagcacttaagaaggtatacagacaagaaaatcattttcatttagctatgtatttaattgtatttgtagagctttaataaaagtgaaactatgtattaggtagagaaggtgc

SEQ ID NO: 49418 - DNA, 1104 bp, Arabidopsis thaliana landsberg
aaaatgatatgtgtctgcaactttctctggctttgtatgtttagagtgatggtaagaagtgtatctatgtttctttggtttggggctggcaatagttctcatgtgttcattgcttataataaaatttgtttcaaattgagtggttcttgcacaaatagaatattcattacaagagtttgttctctgttcgttatgtcatcttttcgacctatataaggacatgtagatgcaagcccttctaaaatttaatttcgtcattgtaccattatttttcctaaacaggtcgagagaggaccaaccgtctatttaagtggtctaagggagaagcattttggtgaactgtttctaaatgcatataatgtaagtgagagttcttctgcaacgcaagcgtcaagttctcaagcagcgtcatcagaattgggtctctctgaagagggtttgaaacatatagctagatacatagagtattttgaatctcgatataatgacatatggcttgtgtttcaccacgagggtgtatctttatcaaagctgatgtacactgtggaagaagcagagattagctctgaaaaggctgaagaggcaagtcacgggcagatacttcgtccgtcaaagtggtggacctggctgaagacgacagaatcaggaaaagaagaaatgcggagaataatatggcaattggtatgtgcttaggaatctgagaattttatgatttccttcctttgtttgacagatgcatcgtaggaatctaattctatttgtacttactatattccctaatgctttattcttcttttcagttgctaggtttaaaggcatgccatgatcgcaatattactcacagagatataaaacccggtaagaaactttttgatatttatgatagttcatatagtgtacagtctgtgacagatgattattctcacggaaattaatttacaatgttcctaagaagaatatggtgatatgccttgaagacatcaagtcaggcagatgcttaaagggtgtaccaaatggcgatcaaaacttcaaaactaatatgtacttaaattacatttcagttgtctaggttatgcattttgctccatgtcttcctaaacttct

SEQ ID NO: 49419 - DNA, 517 bp, Arabidopsis thaliana landsberg
tgtttccatttatgtttttgttctgattcttttacttgctagttgctacttgcgaatgtcttgcaatgagtaatgggatttaaaaaaaaatccgttctcagagaaccaagcgatgtactgatgtgctgctgaatgccaagaagtggctgaattctgtttatcagcggtgctatcctgtggacagatatttttgttaaatttatggtcttcctacagcgatcgtgaggaggacatatttctctagatggatatacaggttgggcaatgctgaccaaaatggtcatgaaatatgctggtacttagctcatgaaatatgctgaccaaaatggtcatgaaatatgtttggttgatccaagaacttgaaccggtgtgtagccgcatgatcctttgccgactaacgactacgatgaaacttgtaagatgcgcgacagactttttccaggcccgtcattttcaagactcgaagtggcatcgaagcagggacagggtgatcagaagtgtcagttctttgccaccc

SEQ ID NO: 49420 - DNA, 403 bp, Arabidopsis thaliana landsberg
acgctgataattttttactctttgttgattcgaggaacctatgatctcatacatacagcattaaacaaaccataccatcaaagagagtgtttgtaccctcgtaagagcaatatatcatgacacgagacaagacttggggccaaatgctaattaggctgagggtctctaataaaatgggccgctaattcccttaatgaagcgaaacagactgaccgattagtattaagacattgacgctggggttttaaaaagaatatcatgtccacgttaacactgagtcgcgttaattaaaaagaaaccaagacatcagttaagagacatgttctagtatccgaatagacactgataacccgtgtgtacttaaatattaaagcgttgtgattaaagttcatcttggcatctg

SEQ ID NO: 49421 - DNA, 501 bp, Arabidopsis thaliana landsberg
  unsure (1)..(501): unsure at all n locations
agcacattcgtatcaaaaattggctctgttttaagaggagactgtccagcattttgttcttatttaacccctctttcatttcgttatccttcttctttatctcccacatagattgggaaacaaagagagccttttcttcgtcttcagtagttgttggcttgcttatagtcttttttcgtctttgcaggtaaacaccaataggacgatgcattgcttcgtcaattccatgagaaagaggctgggggtttgaacattctacagcctcgtcacacttgcttctttttgacattccccttactatagtagagggagctgaacacaatttctaatcatggcgaannnnnnnnnnnnnnnnnnnnaaggtgaacttaaccccatcaatcgtgtcgtagatgttgtgtgctagtgtcatgataggaacatcatcatacatatttggttcttcagtggagctatcttgttgactagttaagagttccacagagcttgatgcattactat

SEQ ID NO: 49422 - DNA, 656 bp, Arabidopsis thaliana landsberg
tgaaatcccttatagatatgtatattgaagtacccaaaggtaattaatatcgttttttcatatattttttttcatattccacttattgtaagttatagtgataaacttatttaacctttataacatttttactaataattaattacccaatcgatttaactaaatttctttgttttatgaaacgagaatcttagccacaaatatttggtagaataaatattatcacaatctatacttatatattacatgttgtgtcacataaactaagtatcattacacacatacaaaaaaacaatacacattttatgcacatatgaatctgcccgatacttgaagttttttttcttcattaaaattccgactattatatcaatcaaagactattttacaaaaatgaaacgaaattctaataactctttccggtggaattaaattcttgttagccgacaaaaaaaaaaaaatcttgttacgattacaattatcttgatcatgttaatcataattttgcatttgtcaaattaaaatagatattttcatggatttcatttgtaatgggccttaggccagattaaatcaaaaagggtttattcaaaatctcagagagcctctattctaattttgcaagtgaaaaactttaactcttttttttttccgtt

SEQ ID NO: 49423 - DNA, 589 bp, Arabidopsis thaliana landsberg
ttacaaataatatcatatgatcgatcatacaagtatagtttgaactactgataaaggctgtgattgttaccagaccaaccacacctattggcagctaaccgcgttagtgatcaccaattgatgaaaccttaatcctagacggttaataaaaattggttcagatggacggtaaaaataaacagtttgacattattttgtgttcttgttcagttgactttttattattattgttttaccgctataatgttaccgacagagaaaagctaaaccgttaatgtaataatttgtttttcaaaagtcctacatacttttacttactttgtaatctcggtttgatattagtgaattcaggtggggaattttatgactaaaccggtttaaccatatcggtttaatcttacctactggacccaacacctcttacgtgaccccataaaacgcagagagccagcataatcgcgaccgacctcactgaacgagcgaccaaaacgcagagttttgacagcaattgagtggataccgaatcacaataatacagaaagacattaaaagcaacaaggaatcgcgcgattgggggcagttagagaga

SEQ ID NO: 49424 - DNA, 1127 bp, Arabidopsis thaliana landsberg
aaaagtttatggggtaaatacatcggtaaccgttgggaaagaaaataaaacacattgggcgtaaatgacattcattattcagtgaaaatctctagttaaatacaccatccagtgccattctctaattagttttataatttcttttaaaagtatatgttctagtggttttgataataatctttaacaaaaaaaaaaaaagtggttttgataataataatcgtctcaactaagatgtttatatagaaagggagtgttctgaaattacattaatctccttaattattttacctaaccccactcatttaaccttttcaccatattgaatagtatttctaaacttaaacaaatatttcagcaattattttttttgcgtcacccatttaattatctaatgtgatacacaggagagtaaataacttatgtaggccaaattgatataatctacctaatgtattaattcactccaactaagctagcgaagtatattacctcgtgaaacatagcagttaattagggtttaatcaagaaatataaattgatcgaaatgtgatgaatttaaaatgattttaactaatgatcattatgaaataaaattaatatagttactcaacttaattacacaaactgagcaatctataattgcaattatttttagcaacccgaaatattgatctgacgacgatttttgttttgtttttagtataacacagctagcgattaattggattagagaaaatcatacaaccaaaaaaattaattaataattatttaagaaataagaatccttattccttaacttgaccgaagcatggcatgttacgtaactgattctctttatatcctttttgagaaaaaggtataatgaaataaataaaaaggttttgaattcgtaacttggtgcggtgaatcgttcatgatccaacatctgtctatttcccctttatgagtcaaacttgaaattttattcaagctgagtctgttaaattaaagtcatgaagaccgaagacctattatttttcacctgcttaatctagcacgaaactcgaagcacacgcaaatgattcatatttagtattttttcaagaagaaaaatgtgtttatgtggaccaagagtttttgatcaaaag

SEQ ID NO: 49425 - DNA, 747 bp, Arabidopsis thaliana landsberg
tattaaaattttagttatacccgaaaaggaatattttatgttttcaatatctttaagcagccccaagattctgatcttaggcggctatgatgactaaaaaaaccaatcaaaggaaatgtgatttggataatttttagttaaatgtcaatatcagtcccaaccgatacgttgatgagactattactatatcattcctcgatatgcatgcatacatttacaagttacagcaaattgtctcgttactaaaatattcattatttactctttaagttatgaaatgattgaaaaatattcatttttatatctaaataagtagtatatatataaaagtagtaaattaataatgttttttttaaatcaaaattcaagtaggccacctagtacaacaaaaactatactcctgtatatttgtaacaacaattcatacagtcaaattttcatttgttaaaaacatgagatataattaataaaatacaatttcttgatttctagctatggaaactaatattctcccttgagttggattaaccgcatgacacatttatagatccaatacggtagtatgcgttgtcaatctaactattgatagtttacgctcttgctcattaaaaccaaatagactatcgtagattttgtctaagagttgcacaaaatgttttctatccttttttttcacaaggattgcatatgtttgactttttttctcgtaacatcaacgcctactccgtaaatttttattttattttg

SEQ ID NO: 49426 - DNA, 451 bp, Arabidopsis thaliana landsberg
aatttggcgggaaaattgatttctgagaaattggtatttagggaagaagaactggttatggagtttttgtggttgatggtaagaaggttgttgtgggaaggaatagccgccattgttgagaagcttcaaaagcttgatttcgtaattggttgacgaagaagcctttataacacataaaaatagcttaacgtgtacttcaagacacaaatggtaataaggtaataaataaattgtcatcgatttcatacacacttgatagtatttattttatttgataagttataaattatatttatttagttttgagtgtgtttggtagtgattgcacaatgcttaaaggcaataagcaggctctagggattgaggttaaggatctaatgatctatcatggtgataaaaaaaaagtagtagtatacactaatttaagatttgcttttcaacattaatggta

SEQ ID NO: 49427 - DNA, 1251 bp, Arabidopsis thaliana landsberg
cggggttaattttcaattgtaggttggactggtaaccagggttcttcaaaatttattctgctattcctagtaatttttttttttgtaagatgctattcctagtaattttatttcttgatcaaatgcaatattgcaatgtatcacaagattagttttcaacataacaaatacttaaaagtccaaaaaccatagagataaaaaaaattgtaaataagttggataatttattaggtgtgcttttattcatttttattaaataatataatatttttatcgaactattttaagatattctcacgctatttgtacaaatcaccaccagcagaattaattatactagatagataaataggaagatggaatgttggttttacaataataatatttactgtataaaaaacaatattcaatatccttttttgtcacccaatatctttcttattactagtatgataacaattttgaattgtttccaaaaactatattagaatacaatgttcttttgttaataatatattaaaatacaatgtatcaaaatgattatgtttttttcctctttatgtctatatgcattatatttgtcaacaaaaattaattgtttcttctttcagattcagaattaaagaaagaagcaaactagccgttagttaaacgaaattcaaaagcttccaagcggcgcttgtttgctctccaacgttcactaacaaatccgctttaaattttcccttttcttttttattccatttaaagtcaaagcgacgtcgtttctctcactcatacgccggtttataaccaacctcagagacctcatcgatcgatctctctgtctctcgcatcggaagtacgaagaaggatctttgttttcttcctcttctccttcttctactttcgatcactcgtgaatctgattctactctagtctaattgggtgctttcgatttctgaataaaaattcgattttggtctgacgattaagaaagcgaaagtgatggccgccgtaaatggatatcagggaaatactccggcagatcctccggcgtctaatggatcaaaacaacctgcggctccgaccaagactgttgacagccaatctgttctaaaaggtacttttcttttcctcgatcttgtcccaacatttcgataccaattcaaatgtaatcgccttagtcttttgcctcgtttttggatatatcgtcgctccaatgtatcttctttaaatccatttcatggtttggtattatttggctatta

SEQ ID NO: 49428 - DNA, 778 bp, Arabidopsis thaliana landsberg
  unsure (1)..(778): unsure at all n locations
ttgaatgggatggatgcttttcgcctgaagctcttgttccctaagcctcgtgtacctcaaataccttctcaagttcaaacccaacaagagtatgagacctttcctaggcctcgtgtaccttaaggccatgaacgaagatgtgtgtttcttcaatgtattctaaatcctgaacatgctaagactatgttctctttcgtatgaagaaatattatgtgttggtacaattctagtcccatgtttatgaagtattctcgactggagtaagcgattaatctggacgtttcaacggtcttgtgtgtctacagaaacaatttagcatattcatatcactttgtggtgtgcgtatatacgtttttaaggtctctcaaacttggttgatgattggaaacaaagatctaaatgttgttacaaattcatataaccacttaacttaacctaatcgtctcaggctattcctgacttcgagttaagtggatgatatagaaatcgagatgtgaagtgattttcagccatcaaaattttcaaacagctctatatacctcaaaagaaatccaagatgacaaaaaattgatttaaggccaaaggagagaaagatgccagtcaaatgttatgaaaagacatgcttgaataattggtatgagatattttatgaaatacttttattgcataccgtattttactataaaacaatnttcttttcacaaacacaaccatcttagattttccatgttagccgagatttttttggattcagatagccactttcaaaaaaaaaaag

SEQ ID NO: 49429 - DNA, 502 bp, Arabidopsis thaliana landsberg
tttttacaattgtggaacatgttacagagcatggtatttcaatttttatcgtactactactactacggtattgtttccatttttttaataataacacaaaaggggttaaatcatgataaataacaaaaatgaaggaccaacactttgaagagaagattattgcctaatgtgtattttcttgaattttcaaattttcattttgaaactttttgattgaaaataattggttctgttcgtatgagttcctgagattatttattaattaatatatatactaaaaaattaggagcaagatggcaaaagaaagaagcatatggtggggggtgttaatggggaggggaccacgtggcggttactgggaacgctgcaaactaaacgatcggtgtgagcgggaaagccgctttgtggggtccatcatccatctagtagggacccacactcaatgggttccagcgttcagacacacacaatatctgattttccctttaactttttttgttca

SEQ ID NO: 49430 - DNA, 756 bp, Arabidopsis thaliana landsberg
cctattttacataaaataagtctgcgtcactctatgggtgaccttatgacattcatgtatgtttcaatggttggttaatattataatataagagtatataatatacttcttccatggaacaacaacttcttcttttgattcgcaatatccaaaatcaggaactcaacgacactaatcactaatgatgtgttgcactttcaaactcgatgacttaataagagaagaagggaaaggatggttgtattttctttgtgaattcgatgtttagaatgagagacaatggccatggctttatagccccaatgcccaaacttcataacctttaaagaggagaatatcaccttaatgacacaattatgagacttaattctcacgtagacgtcaaaaacgactccaatattaattgcatgtcgtcaattgattttattgttacaatactcagaaattatcgaaattttttattttaataatttttgaaaaacaagactaattatatgggttataagttcatatcccactcaaatcctaaatttaattcatgtgctcacagcaacgattttctcatacctatttattccgataaatgtttttgtcgaaaaatttattagaaaagtggtcaaaaccactttgttagaaaaacaagtcccgacattagttactagtaaaatacttcatgtataaatatttaataaaaaaaaactttggtacgctaacacgatagtaagaaaaatgatgttgtaatatatatttgactgg

SEQ ID NO: 49431 - DNA, 715 bp, Arabidopsis thaliana landsberg
agattacattcaagtatacagtaaaattaattttgagtaagtggatctagaaatgggcctatcaaggttgttttgacttagttggacccacgtaatcctattatttcctaaacagtcaaagtcaaagcgatttcacaccgccgacacttttttgagtttttcttccttttggccttattgctttgtcagctaacgaatattgccacaacatccagttacagtagatactgcggttaacatacatctcaccgtaggaaattctatctacgagcgcacaccagaacacaaatggtacgcgaagcacagtatcataacctacgaagattggggtaattttttcttatttaaaaaggcgaaatcgagtgagacacgaaatatggggaagtggtccccaccattatttccattttttttatttcttcttcttcttcttctctgtttctctttctgtgtcgaaatgaagatgctttaaatctaacttcttttttttgtttgggcactataaaaccatatccttaccgttaccaaacgcttctcctttaatcatcatcatcatcattttatctccgtcccttcatgttccgttacccgttaacggctgtttttttttaatctccggtgaccgttcttttctgattccaggtgttgccagctgttttttttttgggagatattttttttaaattccttttaaagttagttataagtcagtttt

SEQ ID NO: 49432 - DNA, 598 bp, Arabidopsis thaliana landsberg
tgtgttaagatgtgagtttctcctagtcccatccaaaaccaacaagcccttaccacccaaattcaagagaccagcccataaaatcccaaaatgtacaaaagtgactatcactataaggaatctcaaatcaaaggaataagttcaatggtatatctatagggctaggcaaaaaaatatatgaaagaaacaaataaaccaaatcaaacgataagaatcaatccaataaatgtgttttttgtttatgtttatacaataagaattttcagtccacgccctcccaagccaccacatctttttctccctatatatattatatatctcatactctttttttttttttttgcatgaatcttttttaaataatctgtaatgaatttttgatgaggaaaaagaaaaacaaaaatttaaaataaagaagaagaaaaacgaaagccacagggtcgctcacccgagagagaccagggcaggccttgaccagaccaccaccatttgcagccactacgtggagaaaccagatatacacatgtgcgtctgtgtaatgcatgcagacatgtacttttggttgaagtaccattataaggcttgaaggagcgttttg

SEQ ID NO: 49433 - DNA, 154 bp, Arabidopsis thaliana landsberg
cctctagtaactgccgccagtgtgctctaaaggttgctgaagcaaaggaagaggacagcgaactaatagccgttgtgtagttcatcaaagatcattaacgaatcgcacaacgtggagcccgtagtcctgccggtgtactattggaaggacctcc

SEQ ID NO: 49434 - DNA, 739 bp, Arabidopsis thaliana landsberg
tatttgagaaaaaccaacaatccaaaagcttgtggtgtcataccaataacttaacaataacaaaaccataactgatccaacatgccttaaagactttgttggcgcaaatttgtttgggcagtggcgggagaatatgttttcatgtttcaagttttgcctcctataatgtttttcataatgattaatgtattattattatcacatttagtttatgtaaaataaaaatttagatataaagatataaaatatataaatgcgtactggtcattacagtgcacgatagcaagaagtagtactattagcaaattagcatcgtatttttatttatcgttaattttctcctaaattttcgatttccgatctccgggcaaaatctcgagtttttcgccggcaaattcattcgtgatgtgtgcatcacagagtgttgaatcagctttcacttcatcagaaaccctaattttagtgtagtatacttgctagatccataaatttctcgagtgttttagcttgatctgatcttagctccggaagatgaatttgcagcattgttaccatttctacgcaaaaccccagtaagatcgcttcttgtatctctatgtttttaagatgaatttgactgtttttgatttgtgggttatttttaggtttagaaattagcgaatcttaaagttaagagcttttaattcttatgttgaagttattagcttatatttgaggatgtacctgtaacaactgaaaa

SEQ ID NO: 49435 - DNA, 468 bp, Arabidopsis thaliana landsberg
  unsure (1)..(468): unsure at all n locations
nnnnnnnnnnnnnnnnnnnnnnnnnnnnnnnnnnnnnnnnnnnnnnnnnnnnnnnnnnnnnnnnnnnnnnnnnnnnnnnnnnnnnnnnnnnnnnnnnnnnnnnnnnnnnnnnnnnnnnnnnnnnnnnnnnnnnnnnnnnnnnnnnnnnnnnnnnnnnnnnnnnnnnnnnnnnnnnnnnnnnnnnnnnnnnnnnnnnnnnnnnnnnnnnnnnnnnnnnnnnnnnnnnnnnnnnnnnnnnnnnnnnnnnnnnnnnnnnnnnnnnnnnnnnnnnnnnnnnnnnnnnnnnnnnnnnnnnnnnntccaaattatgagctttaagtaagttgtagggcattatcgtgaattgggccacattacggaccaaaaatgagttggacaagcacttgaaccagcattttgacatgcatcaaaactcgtgaagactatgtggggtattctacatagctgctgcgaccacggcgattgact

SEQ ID NO: 49436 - DNA, 526 bp, Arabidopsis thaliana landsberg
ttgaaagtgaaatgcgaaaagatttgattttcaaacgtaactaatctcatttttaaaaaacatatacgtttttcacgttatacctaattttggcatcaatttcaatttgacgaaatatattcactaaaaagtaggaaaagttcgtttaacattttatatgaatgaacaaaagtcagatgtttttgaacaaactcgtatttcatagaaaaacgtgagtattagtgtacacatatatatatgtacacacatgcacacataactgggtataacatatataatacaattctgcaactatcttcactatcttctgcaacttttatggttttcgaacgaaagtaacttctcccataagttattcttgaagaatagaaatgtcaaatgtgatatgaatattctaccaacccaagttacaaaaaccaatcatttttctatttgtgtatatatagatttgaagtttactgtaagaaactatttagaatatagaacattgtttcataaatctaaagaaagttaacccactggttga

SEQ ID NO: 49437 - DNA, 1025 bp, Arabidopsis thaliana landsberg
  unsure (1)..(1025): unsure at all n locations
gcacacacatatatttttgggtcataactaatttaatgtgttttctcgtgagatgtatttgcagtttcgattaaaagtatatttttccccctttactaaggtattatttcttcattagttcattgattatatgtaaaatacagttttagaaaaaaagaaaaaaaaaataacactttgagacacgaaagtttctctaatgtatattaaaaacaattatatatatgaagttatcactacatgcattataaaaaaaccttaccttggtgttctaaaaatagcttatataattatattaatgttatagtattaataatagaactttaaaacattgctatacagtatatacaatataaagataagaaaatttgaaaattatacttattccactggcattattaaaataagaaatatgtatatacgtaccttttgtgtgctatataatagttacttatttcatgataatggattaatcccacaagaagggtcgtcatacatatctcattgaggatttttgagttctcaattgtcacaagaaaagatgaaaagattcaactatggctttttccacttggtgcttttcctcatatctcttcttcttcttggttcaggaatttgcatggatcctttctcctacgaccagtctctaaaatcagaggtataacaaaaagaacaaatctataaatacatttcactgacgaatattaatggaatacaatgttttgaatctctatgtaatgtcatgagaaagtgcctcatggagcctccacaaacaactgccaataccggaggtgaaggagtcaaagaattgaagatcaacgaaaatggtggaatcagaaatgtagtagagggagttgatcttcgggaaggaaacatatacatcacttctggtaagaaaatgttggttttgttgttgcttgtgtagtaagttatgatgtttttgaattgtgtgtgaatcagctngcggaagttagaaatagagtcaaaaaaaaaagaatacttttagtagaagaatgggagaaacgttg

SEQ ID NO: 49438 - DNA, 835 bp, Arabidopsis thaliana landsberg
tatgtacacatctaatcccggttgttttttccctttctatttctcattctgttatgaacaatcttcttgtactccttaagcttatgcagctatcgagtctcttattcatacttttgcgcaaatcaaatcgtttattagaaaaaacgtagtactgcattaattttgtgttagcacaatcaaatttactttttaactgtttttaaggataaaaagcggaaaaaggataaatcttcttcagcctatacatggctgtaaaagaaggatttgtcttcagagaagctagggaatatctttatggtcccatgtatctatacacagaaaagacaatcatacacgttaccaccaccacaataatgtctccattactgatacaaatctatttttcttttagatgtaaagattcctcttatcatataatctgaagattaataaaatgaagcatagtgtagcaacaaaaattaagttacacaaaataggagattagctttcaacaactactacaagaggagcatgtcaaagtaaacgataatgcgacaacaacccaagtcaaaaagattacatcgtaaaaagaaaagttagaatactctcataatgggtttggtgatcagaaacaaacaaaaaattattacatttataaggagattatatatgagaaaagtcgcaagcaatagtttagttttttcaacagctccttaggtcagttttaaagtgagtcaacgtcaatgccacaaaagaggaagcactgattcatcatgagtcgtggtcttagtttgactgttaaacgtcatttgcgttgattctttgattcctatattacacgacaccaatatatgtc

SEQ ID NO: 49439 - DNA, 677 bp, Arabidopsis thaliana landsberg
aacagcatctgaggatacatgggtatgtccgaggtaggtttcgttggcgtattgactacctatgattgcttaatccatggtttgatcaacttcagcaccgttgtttcattatattgtttctttaattattagcctattaggcaaaaatatttttgtattagagtttccataaaattattttaatctttatctagtaaagacactttgtaccaattctaagtgaaatctaatgcctatacatattattcttcctttctctatcttatttagccatcttgtcatagtttccctccttggttttgtgtccacagatgtctctctaatgaaaaaccacatgaacccgatacctcgccaatggagacacaacctgatacctcactaatggagacaagaaagtccctggatatttctgagaagacaaatagcggatgctcagtagaggctgtttactctggaaacttttcagttacagttgctgatgacggcgagacagctcttgttgtatcaatagtcaaaggagacgagtctcatatgggaccaagtgataccaacccattgccagttcaagctaaaatggatggagacccagatagttcgcatcttataattctttgtagggaggaaaatacagagcaggtcgcagtcaaatctgagctcaaccagtccttaccacatga

SEQ ID NO: 49440 - DNA, 896 bp, Arabidopsis thaliana landsberg
gctcctttccaaaaccctaaaatcagccaaattcaaattccgctaaccaatttccatggcagaggaaattccagcaacagcatcattcactccatacgtccattcacaaactctaacatctcacaatcgcgccgtctcctccgtgaaattctcctccgatggacgtctcctcgcatccgcatccgccgacaaaacaatccgcacttacacaatcaacaccattaacgatccaatcgccgagcccgtacaagaattcaccggccatgaaaacggtatctccgatgttgcattctcttcagacgcgaggtttatagtctcagcttccgatgacaaaaccttaaagctatgggacgttgaaactggttcattgatcaagacgcttattggacacactaattacgccttctgtgtcaatttcaatcctcaatcaaatatgattgtatctggttcgtttgatgaaactgttcggatctgggatgtcactactggaaagtgtttgaaagttcttcccgcgcattctgatcctgttactgctgttgattttaatagagatgggtctctcattgtttcgagtagctatgatgggttgtgtcgtatatgggattctgggactggtcattgtgtgaaaactctgattgatgatgagaatcctcctgtttcgtttgttagattctctcctaatggcaagtttatcctcgttggtacacttgataacacgctggtgagttcacttgttgaattcctttcaaagatttgatgtttttagtgtgattactagttttgctctatagtgatctcgaaaaaaagcatgaagattttgggtacagcgtgttagtagaagtttgatgtaagagaagcccattcaaaactaagtttacagagaagttgttagcttt

SEQ ID NO: 49441 - DNA, 578 bp, Arabidopsis thaliana landsberg
ttacgaccattttcattttttgtaataacttatgaataacataacaattttggagaaaaaaaactaaattaaatcatttaaggacaaattagggaggaagactatgcataagtttagtggagcatattaagggtgtgattggaaagacctcttagcgcaaaagtaagagagagtaaaagattatttttctgagctttcaccaataaaaaaaaaaaagaggagaaaacaaatattcatctactttacaccaaaattaagaaaaagtagagtaaatctttccaccaaaaatactagagtaaaattgtttacgcccaaatacactttttctttcctctacttttttcattctatttactctattcccccactaaaaatcctaagtgttttgatgattttggtgtcattttcgagagagtagaaaagaaaaattcttatcgaattgacaactataaagagactcacttaagccaggtttacaagcattttatttctcttcaaggtgaagacgatgttgtggaagtgttggaaactatgatgcaatggctttgaatgatactcttaaggcccaatactcatat

SEQ ID NO: 49442 - DNA, 560 bp, Arabidopsis thaliana landsberg
ccatgttggcaaggttccggcgaccgaccgggaactgacacgaattttttacttgctaaagaggtccgcgctgtatttgtggacattgtcagggcaatacttccccacttaattccccggtaccctgatattatccagctgaaaagtggtggttctcctgtcaaagatcttagagggatcggctccctcataacggaaagcgatacatacagtgcccttatagctatcaaggctgatattacccgaagccacccagcttgttgccaggctgttcagtgaacctttggcgatcagggctttcagcggtatccatttggctctccagggagtattgctgccatcgtaacctgtggaaaccaatacctgtaaggttgccccgttatcaaaaccatcttttgtataaaactgagttgttcattggccgaccccgaaagatccaccgggtggtgataccagccaggtgatcaccgcattctgcccggatgcaaacgcgctgatctttgcataccggtttgcctgcgttgttttattccggaaacaattcaccctgttttgaaagc

SEQ ID NO: 49443 - DNA, 635 bp, Arabidopsis thaliana landsberg
gacttgccattgttgatatcgtcaaagagattaccttgtgagtgacatacttggttgctgcttctaatgctgttttatccgtacgtctgtgaactgagttttgtttctacatcaggtttatttttaaaatcaagatgccttccgctgtcagagttcaactgataaacgatttggcagacattgagttagtatcttttgcatcttaaacttaaaattaggattgcctggagtagaatatttaagcttgtgttatccacaatctttttttttttgtaatttcgagtcgttttactgtttataggtacagattaagttttggttgcaacgacaaactgcagcttggagctatcatttctactttcacacatgcccggtctatcattgttggtgcagcaaagtaaaccatgtttttaccattttggaacccgcagtagctcgccaccttaacaaaccgctagaatgttttatctccgtgatgttttcctgatagtctctgtacattttgtggcgtttgtgaccaaaaggcttgctttttatttcttatgaagagtttcaatgccaccttgttatcctcttctcatctcctcgaagttgtaactttcaatttcttgatcagattatgttttaatgatctt

SEQ ID NO: 49444 - DNA, 1147 bp, Arabidopsis thaliana landsberg
  unsure (1)..(1147): unsure at all n locations
atataattaagaaattaaaaataacacatcacgtatgatgtagcaaagctcggcaggtgagtcttggagatcatcaacaagaaggtcatgaatataggaaaacttttctaccatgcagtttcaaagacgtcaacaattcattgcttcttcaatcttttttattttatatgattataggtttacaactttttatcaattgacaataagtggaaatgtccatattttgtatatagtagtgttgaatgatctccactttcaatgtggaacattcttccacgcccatttaggatgatgtatagttcatttggctcattccatctcaaactaaatcccactttttttggataggttatacttgtttgggggaaactgaaagttttattagatagatggtcacaatttcttagtgtagatagatggtcacaatttcttagtgtttgatgaattcttcaaattttgtaattcctattatgatttccactataaattactttttaatcttgtttttacatataaagtgactcatgtttcaaagtcaaaccatcaagaacagcctttcccaatctgaaacagccaaaagaatatgaaagttttcaaatgtttagtgtttgacacagattgcaaaaaacaggttaaaggttatgaaaagtcaggagagtcaccaaacttacaaaccatatataattaacgttctacgacaacaaaaggacgactttcgtgagagaatattggtgacatttattcttatggttttcaaccccaaaataatttacctaacataacccaaccaacaaaaaataataattgaagaagatgcactgttttaaaatgggagaatcatgtggcgcatcacgcatgtaaccagctttaaacggtatagattattaatatggtacactttcaattaaacaaaggtagaaattaaatgaaaatcatttacatatacaccgtgttacagttttgatagtccttttagtaacgtgatgcacgtggggcaaacgaaggaggaggcaacgtatatatacgtcatacattgttttaacacaaaccgtagatacatttacaaaatgtttaactttggggagacttgnggaacatataacacttcctcagcttaaaaaataaattgttttacattttgatttct

SEQ ID NO: 49445 - DNA, 870 bp, Arabidopsis thaliana landsberg
caatctctctttttcctttcaattggcttcttatcactaaaagacttaaacttgccttgatccatccacgtttccctatactgacaggtgattccatcacagtgtcggctaagcttcacggaactcataccaagaaatacatcatcatctctcaataatcacaaaccggatccggatcaatttggatccatcagattttcttcgttccctaactcctaaaaaggagagattcttcaaatccttatcacaacttcagtttttgcattcaccgtcgtgagtgttctacttttggtaatgattcactagtcaagtttctttctttatgctataacttgcaactagatcttgtactaatggaattgatgtttctccaatcatcttctttgattttgctccatctttcttttcctaatttggaaaaatgagtctttacctatagaatctgataaatatgtctcttacataattgattaaggtcaagtaatggaggtgaatgatggtgaaagagtggtaatagcaaaaccagttgcctcaagaccttcttcaagttctggcttcaggacattcactgagcttcttactgattcagttaccgtatctccgcaaacgacttgccacgagattgtagacgctgctataagaccaaagactttgagattcaatcagccagtagcagcttcggtctcatgtccacgggtatcgagttgtctatttaattcttggcattgttatcttctttccgcatcctctagtcttgactcaactatttctgataatgataggctgaagtaaaaggtattggaaatggaatgtcttgtgatgatgattcagatagcagaaactacgtcgtttataaaccgaaagcaaagc

SEQ ID NO: 49446 - DNA, 597 bp, Arabidopsis thaliana landsberg
  unsure (1)..(597): unsure at all n locations
tctaccattatttgaccttcatttcatgcacatatcaattaatatttagtataacttgcgaacaaatactacaaattcattatcacaaaacaatactacattctataaaaaaattgatgacttgtcttctaaacaagtctataagaatcactaaatttaataaagtttgcagaatttttctgtcaatctcacatttaaattagtgaatcactagtttgattaagaaaagtaggtgttagttaatttccattatcattgttgctttgacttctctagacatttgtttgactcttgctagaaactgtcttccagatttcagccagcatataaatgtttgtctatgtatagctttcacaacatatgttctggaatattaaaagagaaataccaaaacgatttacaagtatgcaacttaaaaatagagaaatttttgagaaaggcgataattcccttcgtaaaattaccggcaaaagaaatagtggatagagacgcgacactctgcgcaaaagtttatggtgaacattgagcaataacatttanggtaacaagacaagctcatatttagaaactgtgactaaaaccgggcacatacatgtg

SEQ ID NO: 49447 - DNA, 437 bp, Arabidopsis thaliana landsberg
gtcttgcgcattccatttcattttcatgttggcaatgctgcacaagcatccaacttccatattcatcaaatgatgagcaatgatcatctatggttgtagctaaccacactaccttttgtaattgcacatagcatgaagttctaccattatctgttgagctacttgatcatcaatacaaaacaaaacttggcttgacctttcttgaatgatatgatccacttcatgttgccatgtgaccaggggcggatccagaatttttttatgccatcaggtcaaatctactaaatttttttctcttcattttatattaactattttatacagtataaatatatagagttacatggattaagtcacgggtcacggaccgggtggcccagggtgtagatccgcacctgcatgtgaccttgttggttcaacgatcacgactttgcttg

SEQ ID NO: 49448 - DNA, 1302 bp, Arabidopsis thaliana landsberg
gattaaatccaatataacacatattacttcatatgtaatcataactacatatattttttcctaattcattcatacgttcacagaattttctctggattggtacaccaaaatatagacctgctatgaattttcaagcaattcaaagaaatgcctagtcactaaatctttaacttcgattgataagcatcaatcaatgattttgaaaggctaaagtcacagaaagaatcaggtaaaaagggagaatttacctttttaggtgaaaatgtgatgttgatgtttgcttaaattccatagtcaaaacttggagggtgttgcagatgtgtctttgagccatcatttgtgccagtaaaagagctttctttgtgccagcaaaagagctttcacgcaccataaattgttggggataagcaaagtgaaaggttggtagaggccaaagacacgtcactacagaacaataagtatatgaaaagctgatctctagaacctgtaaagaacctatgatacctttatcatgagtcgagcaaacataagccagtcgatatgagttatgtacgttttctatgtggacccaattttcgtaaaattgataaactcatttttagatgtaagttataaccaaacgagatacaacttttgatcaggagatcagacaataactcaatggtgtacagttgtatatcagccttaaaacaaattgtactttgattctattaagcttttcaatctacaccaatataattccgtactcacctctttgatgaaacagagtccatttagtggcttttactggtatcagattctgatggtgcttttgttgaggacagcgcatctgcggcttattatcagaacatgttctctgccatgctcagtctctggagaatgaaaagtattactgcaaagagaagagaaagaagtcatgtctgttctagagaggtttcctgaattaatagcatgacgaaagctgagacataaaaagaacaaaaatttacagtcaattaaaggcgtagtgctatatcccacacacttttctgaacataaatgtatatatcgatgcatgttcagtgacatgtagattattgctacttactaaaagtaacagttaaaaaaatgtgaaccagtcccacagaatgctagaagaaactactgcagctctgtcgtatatgtatgaggttaaaatattctggattagctgaatactttcagccagaagtgaaaatatactgcattttgctagtcacgatctccaatgataactgtagaaacataccaaaaaaagggaatagaaagcatgcgcacaacaag

SEQ ID NO: 49449 - DNA, 981 bp, Arabidopsis thaliana landsberg
cctgagaaatttacagagttaagatcccacatttaccattttaccttaaaacctcaacttccagagagaagcgcgcgaatggaaccagccgttccacgctttctagcctgcacattacgatattagtgtaaagagaatcgcaggatgatctttatattttgatattggataataataaagtttgacaccttttcagttttaaacaagtcctctgcaatggcttccatctgcttccttttcttctcttctttcataaaatctgtcacgtccccgctatcgtattctctggcatcaccgaagtaaacggtcaagaaaacatagaggagaaaacattatgagccaataagcaagagataagaccggggattacttgtatggatccttcgcaaaaggtattttgttactgaagctgtttccgcatgtaacatgtccctaacaaaacaagcaaaatcatcatctcgcaaacacaacatttgtccagaatccaaaggttctgttttacctttctgaatcgcttgaagtccacaactccttcccctactgtcgattgaacttttctagtcgatcgcaagtccctaacaataagatcttgagtgtatataatctccgatttcccagtttcagcctcatcgttccgatcccttcggattgtcacactatcacttgagttcttttcatccatgtggcctttactttctgtatccgctaataagttcacgcttttaaactcattcaaattcgaagtttcttccaatatcgtaacagggctatcctctattacaatagcagcaggcttctctggcgtttctgccttttcagtagcatcaatcatatgaacagacgatgttgtttcttcctcttcggcttcagaatccgctaccactgtctcatccgtagagcacgatgatgaaattacaactacaaacaggaaatgtttcaagatcagtgtcatagtcccgagaaaagcaaatataaaaagct

SEQ ID NO: 49450 - DNA, 561 bp, Arabidopsis thaliana landsberg
tgtggaggtggcagtgcgggcgagcttggatgtatatatcagcatatgaaccaagtaacagtagcagcagagtttcaatgattataattccatgcttagatcatagaattgttcagtatctttctcatcgctcgctagtgctgattgggtataatgtatatggaaatggagatatgaaacagtgttaactgatactatcttcagagctggtgaaagaaacttttcccccctgagtgtaattaattggcgagagaaactaatgcaacgtcctattttgtttcaccttcttgtagttgtagggcttggcagggaacactggggcactttgaacagatcctcgttgtcgtccttctctgccggcgacacaacgatgaagaagtccctgcttgcaagtattgggtgacaggcatgtcgtcccgcaggttccagtcgccgaacgtctggaatccggcgccacttgctgtcatcttgcgcctgtcagaaaaaaacgaaacagaatagagcttactcctctggtgaaagcttggaagccaagctttggaagcaagacagacaagtatg

SEQ ID NO: 49451 - DNA, 1091 bp, Arabidopsis thaliana landsberg
  unsure (1)..(1091): unsure at all n locations
ctggcctctccgtccatataatactcctgagagtactccaagaacagcaccagaatactctgacaagatagctctgcaaataatatacaaagaatcataagcaaggataatcgaatatcactgaagataatatttatgatcaaatgacagaaactgnagctttttttttttttttttttatacagaaactgtagcttaaaaacgacagattgcagaaataaatgacaaggtgaggattgtaagtctagtattgaaccaaactgctaaaatgggaccaaattgctcctagctttcaaaagcaactatttacgggaactccaaatacagataagaccagaggagaattttacggtagtatgaatgcttaacaactaatcaaatacctaagaggtccacaagacttgagaccttttccccataagatgaagtacaaagccgtgatgactccattgataagagaaggtacaatctgaaacagtcaagatataatttatgtgcataactctccaatttacacataaatatacatgcaagaaactgaataagactaaagtaaacctgttgactagaaagagcccttcctttccatggcttttgaagtatcaagaagatgatcgatgaaggcaccatacagcagaatagaaagagaacaacaggcgctcccgtctgattcaagtatcggtacatagaataaactgaccatatcctaaaaaagttcccaataaggtggattatctggaatggtgtatgcctgcaaataaagagagtcaacaatacaaaaaattaggtagcgaattactcaattctaagccaatggctaaacaacggctaacaaaaaaaacctacaaatgtgcttgaagctaaggactcaaatcactgcttcaacatagtattgaatcaaaacacaatgaactaaaagcttaagctagggtaaataaggactcgaatcagtgattcaaccctaattatgttactgcattatcttcaggaaatgctatttccaattcatagagcccataaaacgccccaacagtacacatttctaaatcaattcaaaaaaactccatccaagcaagaagccgcctttgggt

SEQ ID NO: 49452 - DNA, 1212 bp, Arabidopsis thaliana landsberg
gtactgctttggcgcgtttaaattaaatggtgtatttacttcttataaaattgtatgtaaccatatagtttatatgattggtttcagatacaagtaacggcaagtgccccccaacaagtgcccacaacgccacattttgtggctaaaccaatcgaaacctaaatacccctaaaaataaacttctcaaactatattgagattcaaaatgactagaccttagtaaaattacatacaagaacgaacgtattctttacaaataattttgtacattaattatcatttttattatcattatccatacaaacatttatacgaacaaaacattcacattataaacgatatgtaagctcgactcaagaaatgagccacatatgtaatattaaccaattacaacaacaaaagaactatataatcatctctccagaaatataacacaaacaccatttccagaattaatcatctctacaatatcctgaaggtaaaaagagtaaagagttataaaaaaaccgactcgacaagaaaaagcaaaaaatggagtaaaaacccggaccccgaccaaacagctttaatcatgaccctccatttgtcttcaagatcccatgcatgcacgagaagtggcacactcgggtacgctgccattttttccttttgccctctttcttatttggtacataataatatttatattgtttctttttgtctctgtttttcatttaacagtttgagaagttggtgaagcgaccaccacattcgccgacggagagttattgtttatgttcctttgcgacttgttttgtctcttcgtagctgctgacgacggtggagcctccggcttttgtccgctcggttgtcttactttaacccctcgtatcaactgtcataatattattctcaattaattatgacaagataaataccaacaaaagtaatgatgagagttaaatactaatgaaaagtatagaaaaatattgtgatgcttctcttacatatttgccacatttgacgtcggagtatatgactatgaaatcaccttcttggagcccattggttttcacaaaatcgcctgtaaacgtaatttcaaggaaaattagatatgtatgcgtccacaacaataattacaagagaacaaacaaaccaaaagaaaggaaaattattaacgggtacattttcaaaaacgtaccggtgttctcgaggagatacatcctgcttttg

SEQ ID NO: 49453 - DNA, 762 bp, Arabidopsis thaliana landsberg
caacgattttatgaatgttgtattttttttgtatacactgtaaagacgattttatgtcatggctattaatatattaatatacattttaaaaataggattttaaactgatgtctcttaccaatctcaagacgagtacttgtgattcttcggagacaatgagaagagtttgtaaattctgaatactccttaaacgaacagaataagtgaatttagtggtggatataactagcttgactttagatcttattctttcaaatagatttggtgtaagattgattcgacatttcccattaaatctccaaacaaatatgtgcatcaattcgtaactgtacagctttaaaaatacatataataaatggagtcggcaggtttatatatttaattaatttgcgtgattggaatgataagcttaagatccatcatccagtgttggaggtccctttaatttttgtctacacatgtcacttccgacaccaacggaactccatttgcttatgtgtgtattggatgcttatcccatttaattaaaaaaaaaatgtttttaaaaggtattattcctttattgtccaattcgtatgtttcctaattttggtaaatatgtttttgttaagtttgaaacatcgttccttgcattacgtatgagtaaatcatacacgagcgtatgacccgattggaatttacgtaatgaccagataaatttgtaccatttacgaacatattaaaaaatttgaaaattcaaccctaccttattctctttttttt

SEQ ID NO: 49454 - DNA, 333 bp, Arabidopsis thaliana landsberg
gccgatcgagggacgacggaggtctcccccaacctcgatcggacaccatgagcgaaaagcagcgcccgagccctctggcccgggagcccgagcagtcggtcaccgagttcctggacgtcttcggcacgtggctggccacggacgccagacccgccatctcggcccggacggagcgcctgcgcgagctggcgccgcggatcgacggcgaccacgagatcgagcccgtcctcgccaacctcgacgacctgctggtgcggctcgacgccgtcgcctcctcgatcgccgaccgtcctctggctcctcgcgccgaggaggtcgagtccctggccgagg

SEQ ID NO: 49455 - DNA, 889 bp, Arabidopsis thaliana landsberg
gttaaacactgcaattcaactttaaccaatatgattcgtcatttcaatttatttcctctaattagtctctaagattttttccattattaaaattcggtatcttagcgctatctagtatctctagccacatggaccaccatttaatttgccagccactttttattttgacttttttttttaattaacttgtttacatgcaaataatttattttcaaaacttgattttcatggtatgggtagagctatctatatccattattacatatatgcactagactaatatttgaaatagaattggacttttctcatttgacatatacttttctatttatttattaagagaattaataactttatatttaattaattgagtatttgatattagtcggatgtgaattggtttgattaatcagcgcctaaaatttttaaaaccttagagtttgattggacatggtccgcaaaacatgccttggtgcattttgatctcttagagtttgattggacattgcatgcaaatcacgcctttggtgcattccactcacaatttaagaaaaacccaaaattgtgaaccaaattttatctccaaaacaaggcaagggaaatgaaaataaatacaccaaaaagggatgcaacttgttgttctttgtctccccggtgcaatacaagtatctcaaattggaagatctaaattttgttcattaccacattggatctctcgtatatctctatctttccatttccaaaacaatattatcgaaccactaaacccaaaatctttatggtatatatgttgaggtaaacaaacttattttgtaggaatagataagatgctgtacataaagatcaaaccgatatgagaggaaaaaaaatagctagtatatacatatat

SEQ ID NO: 49456 - DNA, 572 bp, Arabidopsis thaliana landsberg
  unsure (1)..(572): unsure at all n locations
agtttggatccaatggtcaggtatttaagtggcatttaacttgattctttagatgaacctccttagttaacatactaacatgtgtctaatttcataccaaacaaaattcataatttcttttatatagattgaaggaatagtaatagacgttaaaaaaatcgaaggaagagtaatgctgcgactgaaaattgaagataatgaaatatattatatgattccaagttttggcatttttaaatgttttaaactggatgactagtaaaagggtgattaaccttaattcactctgccgacatcattaacaaaactaataaattattagattaatgcttaatagtctcgccaccgcattattctaatagataataaatggaatattctttcagacttgaaagaaaaacaaaattctaaattattagagataaaactaacagcggattcttttgagtactaattatatacactagtatagtaaatatttagtaaacaagacttaataatgacaccacanattataaaaattcgcctgtcatgttagaatgcgaccctaacccgnagattggttatatgat

SEQ ID NO: 49457 - DNA, 806 bp, Arabidopsis thaliana landsberg
cgcctcgagaagagttaatggaacaatgagtcattaaaggcagttgagagagagagatggctatgggaaatgaaggaggcctagcgaagaaacaaagccctaataaaagcagagaaatgaagcggaaatgcgatcacatccatgattcatttatttttaaatttatttatgttattaaaaataaattataattaaaaacatatacaaaatatttttagttattgtacataaacccgtaccagtcccgcttaagtttttcaggtaacagaataaatttaggtgtgtttggttactggttaaatagaataatgaatttctattatgtttggcaattgaaatagtgtaattcagaagaaaaaaaagaaaatttgacaacattgtgagtttgtttgttcagaaaaaacctttttctactatagatgaatactttctgagctaaaagaaatgcttatttttagtttgatatctaacttctcacttgtcaaattactcttttcattactcataaaaatgcattaaactttttttattggttaccgtgaattaaaaatatataatcacaaggatatgtagttgaaaagacttcgttggcccttttcgaatgattttaaaactatctcatacgtgtgctaaaagttttgtctaccaactgtttgtcgaaatgcttccaaaacgttttttgtttgttgataaactaataataattctgaattttctggtattttttatttgttgtgccgactattttgcagacacgagagattaaaggtatcccaaaaatttctgggaatatagttgttattccc

SEQ ID NO: 49458 - DNA, 368 bp, Arabidopsis thaliana landsberg
taacgagaacatcttaaagcgctgtaaaaaaaagaacctcttaaaacatatttgtggaacagaatttagtacaagcttatactattaaatgaattatgaatctattatattgatcggataatacttagaatacacacataatcctgaaaattctaaaaatctagaaaacaaaaagcaaaagtttgtaaaaaagtaggtaatatctttgagttaagaatagaaaaacaatcagaagatcaacttgaatgaaaaagcttttcaagattttgttttttagcaatagaagccataaaacatgaaggagcaaaaatatcgaaaacgcatgagaaaaggataatataatctccacaatactttctattttaaaa

SEQ ID NO: 49459 - DNA, 844 bp, Arabidopsis thaliana landsberg
atttttccttatgaggactattgtggcagattaattgtttcaacagtagcgtgaccggcctctcgtggtaacatctccaaagacctataaggagcatgggatcctcataccaaatatgtagattagagatattaacattgtgaatcactttagaagtgataagcgagaaggcttttcttcttgatatgtaatgccaaaaaaaaaaagacctatggaatttggtgatcatcaaaggttttctcatttaatttcaagagccactaatgcttcgaacgtaaattaaataatgaaaaagcagaaaaactcttatagcatatcaaataatatccctatctggccaaagatcttaatctccactctctaaccgacaatttttctatcgaccaaaaaactttacaaaacttgcattcaaaactacataaataagatataaagcttcacacatggatatttggagaattaggtataataaactagtaggccgcttcatgttttcttaaaactagaaacaattaggttgcagaatttagtataagcaatgctttcaattccatgactaagtcagttcaatcggcaactcattaagaatgttgaatccttcacatttgacaataactgttttgacgttctatatcttattcttacatatcgtactttgaagacatagatcattagtgtctgtatatcatttagaaacttagctttgtttataaaaaatgcatttccaaatatgaatgtctaaggcaaaacattctcaacactcacatttcttacagttttatctatgagaatattttcagtcttatttatatttgaatgaaaaacatattgtgatcgactgatc

SEQ ID NO: 49460 - DNA, 614 bp, Arabidopsis thaliana landsberg
tgaatggttttcgacttttgttttcctcgctatgtatagagaaaaaggaaatgatttttttgctcaattttaccgctgcaaccaggcacaactgacatagtcttcaggtatctcattgtctgttctcagttagttatattaatgatgttcactataggtttcatttgttgtttttatattactgtagaccatgatctagcctctataaaatttattttagtgattcattgcatcaagaaaactattacttgtggacagcctcgggacatatgagtccttttaagtagattttgttatctgctcataccatgcagtacttttcctcaacaagtggtgttgttttaaatactagagtagaactacatccatgaaaactattactgctcatatcctcgacaaagcgccagtgaacgtgtgtgcgacgaggagggacgcctgctgttctgagtccaaccaactagacctacaactgaaaggtatgctatatataatatggtgctattttgacgtgatccagattgttattgtaggcccacacaaaacagggactgatagaatataccacaattacttctgattctgaattgaaagcattacatagcctcgaaggtata

SEQ ID NO: 49461 - DNA, 448 bp, Arabidopsis thaliana landsberg
ttttttattttcttttttttttttttttttttttttttcttttatttttttttttttttttttttttttgtttttttttttttttttttttttttttttttttttttttttttttttttttttttttttttttgttttttttttttttttttttttttttttttttttttttttcttttttttttttctttttttttttagtaattttctgctttatatctttttttttttttttttttttttgattttattttctttattgttttttattttatttattttttttttgttattttctattgttttgtttttttgtttttttttattttttgttatctattttatttttgcctttgtttttattcttatattctttctttttttttttcttattttttttattttgtttcgatattttttttttttatctctttttttatattttttt

SEQ ID NO: 49462 - DNA, 612 bp, Arabidopsis thaliana landsberg
gaatccgggcttaactccacggctgacaaaaccgtcaaatatcctacaagtctcaacaagatcatgcccttttaggagacaactcatcgcagcattgaatgttgagctatccggaatataacctctctcacctatcttcctcaagaattgaccagtctctttagccattgagttgtttgaaagacaatacaacacagcatcgtaaccaactctttgcaagtttgagtctttctccataaacccaaccaaaacctcaaacgctttacacggcggcaagcaacggaaaatcccgtgtacgaaagttctgattgtagcttcattaggattcaactttctcacccgcatcatctccaattgcttcaacgcctcatcaaccctccctgctatcaaaaacccgtcgatcaaaatcgtgtatgtgaacacattgggtctattcccttcctgttccatctgtttaaccaatcgaatagcttcatcaaccacacccttcttgcaaacaccatgtataagtatattataggtaaaccgatccggtttacagccatcactacgcatctgctgaaacttgaggtaagccaaatcaagtgaattagacttcaccaacgcatcaat

SEQ ID NO: 49463 - DNA, 1012 bp, Arabidopsis thaliana landsberg
agaatgaaccaaaacttgataaaaagttaagaactatagaaatttgtgatgagatacatgtgaattaccaacgagagactcgattacatgagtttctcttaactagtttaacaaaacatggttcatcttatactacaaaaaataagccaatctagacatgattaaaaacaaattagtgttatattacaaaagtttccctccaaaaaaaaaacattttgaggaagctaatcatgtctaaacaaagtaaattcattacatcacaaaattgtggaaaagagcaagatgtagtatatctgtaatcaaatatgttcaaacgagcatcaaaattcacctaaacaaccttctgaacactatgataatatcttcaatctgtttagtatatcttttacaatcgtgattattctttctttggttccccgctcgctccattgaacaggactaatttatattgttcacattgcggattcacctactggaagtgtaagagttaatgcagccaacctcattttttccagagagattacataaagacctaaataaaaattggggaaacatatattcttttctttcttcttttttctttttgttaatatgttggcggaaagatttcaaaaggggatttccctaaatgatagctttacatttagaaaacgaactatgagcatgacaattcggtttaggtaaaagaccaacttgctctcattgcacttgtaaaaccctaagcaagagagttgaaaacagtaaacgtctaagcacctacttggttggtgacacgtcggaaaggccaaaattttggtccactagaatgtaccagaatggtacttgcaagatttttaaggttttagtgctcataagttgctgagctggatagatacccacccacattttaggttttagggttttgattattccccacacattttatgagataagatttaggttaatttcgcatgccgacatcaatgtgcgcacaacatcattcattcgtttcatttgatgaacaaaaaaaaaa

SEQ ID NO: 49464 - DNA, 706 bp, Arabidopsis thaliana landsberg
tgaatcctaatcactctatatatacattaagctgcagaaacttaatcggaagggaaattgataagaaacatcacaaaacccaaagcaatcagaagaaatttctcgatttaacagagaggattcgtagaaatgactaccggaagcgataaaatccaccagaagattttagttggaaaaaatatagcagaaacctagaaaatcaaatcaaaggtggaaatcaaagagaagcttacatcagaagatttgatctcttcgagtaacttcatcgcattcttctccatcactcactctttctctctctctctacagggaaattttgttttggcagtgtgagaatctctctctaggctttagcttcccgctctttacatttcgcctatattggaaattttctctgcctttcgcttttcaatttttgatttattaaacaaaaacaaattaaaaaaaatggaatataaaagatattttgaggcccgttggatctaattgggctttgtaagtagctcaattttcactcgatgattttcaattcggtccaccattaaaattgaaacccatatcaaatccttaacaaaattattaaaaaaaataccacaaacaccaaccagttcagacatcttttctattttttttgggttttgctttttttactacaatatttttaatgattacaaaattgtaaattgcgattaattttactagctaa

SEQ ID NO: 49465 - DNA, 622 bp, Arabidopsis thaliana landsberg
actatacaaaactacaaactaaaggtacaattacattttcttgggttccaaaaagagaatgttaaactcgcgcgcttttattttttcatttcctggtttttgttgatcaactgggaattttataagtgactctttgttggatctcaaaaatcatagaaaaaaggtagagatcgtggaattgaggaaactgccttttctattaaaagttttatgtagaagttgtccattacatataaaacgtatatgtaacaatcacctatgtagaagtcgatcgttagatcattgtagttctaatagtatgttaagtttccaactcaaactaatatgtggattgtctcttatatattgtttaagtcgcttccatttttccaacatgagatctttctttacagtcatcccttgagttttatgttctcgagaaaaaaaactacaactcggctagaacctactcaaacaattgtattacagtttcaaatgaatctcgctccaattttcaaagatacctctctccctctttaatacgacaaagacaacaaggtgtaatctatagtgggatctcaaatttgtcagttacttgttggaagttcgaaatttataataatcacgtggtaatctaactact

SEQ ID NO: 49466 - DNA, 654 bp, Arabidopsis thaliana landsberg
atccgaaacctacagtgaaccgactttttcttcccccaacatctccatatccaatgaaaaccccttgattgacccgctaagttcatcagacggcagtgttttgatccctgcagaccagtcccgacacagcacgaatatcggtggagccaggacacgacgtggggaccatggtcttcggtttcttgtagaacgttcttgagtttttcaagacacaggtgtgaagccaaccattcagagcttccacataagaagccatactgtgaaccaaatctacaaagcttagaccaaaacactctgtttcttctagaagctccgccaaaatccgcctcttaaggacactttcgtgtgctgttttggaggaatgtcgacaatggtaagccaatgaaatggtaatgtactgtgtatgatgacattcaagcatcgctttccacattcttatcaacctaaagagaaaagtaaggatcaaccaacgagtctatatccaaaagttaataagacatttggttactatatacccttgaagaaactctaagagctgtgggtggagctcatcgtctctgattctctcaatccgctttgaaatcgattcaacagattgaatcgcgactctgattcttgaatgaagatctttagcagctgctcttgttttaatcc

SEQ ID NO: 49467 - DNA, 661 bp, Arabidopsis thaliana landsberg
taagaaaacgcaacagtcatgcgtgagcgaatcacttataaaataaactacatatttttctaattgatgcgctcaaacacggtatcatgtaacttatatacacctatgacctataccttccaacatctttaaaagaaaaagaaaaaaaaaactcccaacacatatatatgtttttcaagtaaatgagaaaaaaacttctgtaatttcaattttcgcttaggtgtatattcagcttcactagttcaatagtcctggcccaaaaaaaaaaaaaaaaaaaaggaaattgaaagaaaatgtcataattaagttatttaacaaaatgggctgagaagcccatcacgcttgtttaaccaggtccatctatatagtgaaccccacgctacattaaaaagggaacaaaacctttgaaaatattaaaaacattttttaattcaaaacaagaaacagaacagaacccaccaataagcacaaagctcttcacaagttataacgaacacaaattaattttgtttaggattataaaatagatttatttgaatgctacaaataaacaatacatcagttcataagtttgtatttatgtcacgacgatccacaaaactgatcagaagacccctgttttctctttattggtttcaagttactattgttattcgtcgtt

SEQ ID NO: 49468 - DNA, 561 bp, Arabidopsis thaliana landsberg
gatatcatatgtttcctaagaatatattctgattacagtttgcggatacatagttaacattgacattgccggtaaaaaaaaaaaaaaaaaagtagttgcagtgaatcgcaataatttacagactaatgaaatgattgtcaaactaaatatttctgatttaatttggttatgacaatgtgtcttttttatttctgtatgataatgtgtcttatactctaattaatatatatagttacagatcaacacgataaagataattgttttaccgataaatataattcaggagtactcgatcagatacgttgatatatccatcaacataatcatgtgctcttcaacaaaatcttcaatagcatagaagacttgagaaattaaacccacaattacacatgctaaaatttagctcgaaaatagaaacacacacacatctataccttatgtttaatagtaaatttaattaaacaaataaagtccatttttatcactatatttttttataaaaaattattattaaacacgtttctatttgccagatgtgcatacgacatggtttctggtaat

SEQ ID NO: 49469 - DNA, 763 bp, Arabidopsis thaliana landsberg
  unsure (1)..(763): unsure at all n locations
gtgacaagagtaaaaagaaaactcttaggtcgttttgtttagcttgtactaatctaaactaaatttctttgattttaattatgtaatcaatctaaaaattttcggtttggatcacattaatatattattatttgaaaaacaaaataaagaaacagagaaagtggtggttcacatgtcatcaacgataagcacatgatacatccatgaaatcatgtcatcaacaatacgcacatccatgaaatcatgtcatccctcacaaacatcttatccacacgacacgagagaagggaagcagttccaaaacagtatctttgtcagttatattcgacacgtgtcagatttagacagatccaaacatttaggtcccaccaatgatttgctataatggagtctctctggttatgattctaccatagatgtaataaatcatgataatgacgactttgatgacaattaagccactcattttcagactttaatatgttagtttcatctgatcaaaataaaataaaatatgttagtttcacactatcgtccgcgtgaccgttttgcgacaacaaatttgcgactacttaaaatagtttcaaattagtatcaaaggtcgagtttgcaactattctatgactatttcggtagtcacaaaattcttgtaatctatcctcgaanactttaagggaatttctcttggagaattcaaggaaaaggagcttgggttaatggtacaatttcatgtgaatcaacccattgctccgtaaaaaaaagt

SEQ ID NO: 49470 - DNA, 529 bp, Arabidopsis thaliana landsberg
  unsure (1)..(529): unsure at all n locations
gtgcttttgtttacacacctgcgtttctagccgctgcgtcttctttcttcgtcttaccttttgattatctcaggtttcttcttctcaaatccgcacgtgccctccatttcttcaagagggtattcgaggtaaacaaaacccttcactcactctctcggtgacgcatttcgtcgaacacattatgttcattcataagtaaataaacatagttgactcattattaatcatcatttaaggtagtgaggtaccaatttcatgggttttgattagaagctgtgataannnnnnnnnnnnnnnnnnntaatagctatagcagtatcttcatctctctgacgcatttcatcgaacaggttctgttcatacataaatacagtggagggatggctatagactcagctttcaccataagtagcagctattactcatccacagcattgatgttatacagtcaaaatctcaccttgggacttaccgagccgagattcgatatgaaacttcccggagatgtgatgtttgggtgggaaatgtc

SEQ ID NO: 49471 - DNA, 832 bp, Arabidopsis thaliana landsberg
cctcacttctcttttgaaatagaaattctaatgtaggtaaaatgtttttgtttacataattacattacatcaacaaacgtaaaaaaatgtttgtgtcattaaatgtttatccacgtactcttcacaacgatcataagtcataattcagaaaattcctttaataaatgtgaactgaataagcttttgtatagtcatcaaataaaaagtcaactgtacaattaaaagtccgcaaacatctcgatcgtctaagagacgacttttctcgtaactttatgaagaatatacaatagtagtggcttgatcgcgtccacacatttacattgcgacttttcttgcatgccgtctcacgcactatatttaggcaaaacacaattgtcttcatttcaagactagttcttgttttctccatattcctcaacaacatcaaaatgttgactcccaccatttctaaatccatctctttagtaaccattctattagttctacaagctttctctaacacaacaaaggctcaaaattgcggttgttcgtcagagctatgttgtagtcagtttggcttttgcggtaacacttcagactattgtggtgtaggttgccaacaaggaccttgttttgctcctccccctgcaaatggtgtctctgtggctgagattgtaacgcaagaattcttcaatggaatcatcagtcaagccgcgtctagttgcgccggcaatagattttacagtcggggagcttttcttgaggccttagactcatattctcgtttcggtagagttggatcgaccgacgactctaggcgtgagattgcagcgttctttgctcatgtcacaca

SEQ ID NO: 49472 - DNA, 637 bp, Arabidopsis thaliana landsberg
tagttgttgtttatcttaaagcaatgccctaaaatttggccgcgtttaaaataccagtaagagaattgaccaacgaaaacgattttgcgacatcgccaacgttattgttattttacatgaaaaatatagtagttatatgtatcaataaaatttacaaaccattttgtttcttagtttgtgaaccgtaagtccctaaccttcaaaccttttttccattaggatcatcaaaattggaaattctttagaaacaaatgtaagtagcctctaaatctattgttgtctaaaagttttttaaatgatcaaagaggttgtaaacctaatttcgtacactccctgatgctagagagaccaaaagatgtaatgtgaccatctcccaaacgaaaattggactcttgacctctaggtccagagactctttagtcaactaagtttgttggtggatgcttggtttatatagggtcaatgttaacccgatctagatagcgaaccggactaccttataggtcatcagatcatcgcattcacccgcgggtcaaattattataatttattctatagagattatatacgtttataaagagaaattgccttaaatatcacataatcaagtttttgggacacaattagcaccaacttt

SEQ ID NO: 49473 - DNA, 703 bp, Arabidopsis thaliana landsberg
agtagaggaggatatcttttatatttttagccaaggatggttgtatacgtttaacaactataatgaatttctcctttttagatggattatgaaggaatgacactaactaaaaataaaagaaattaaagttgatgagttgataaacaaattggtaaatcagagccaatgtaatttttgttgggggattcgttggaaaattagcattgcatttttgtgagtgctacaagtataggtatatgtgtatatgttttctcatctttaacaaaaaatgtctttcacttacattattattattattattatttttcagtctttaagaaattattttcagtcttttcttttcaattgagttcatttttatctagctaaattccatatttggtaattttgtattccaaatgtattctaaattttcacatattttcttcttctttcagggataatttttgctaaggattttagtttcattaaatataatttttaaaaatgttttatcataaaaaaaaaagtttaatacagtgtttagttcacatatataggttttggtttattatctaatcccacgtatttttagattattttctactaaataacttatattctcataaagcccattatagatggttgtcagttttcatttctgtttaaatattattggttttattttaatgtttaccccatatatcgacattgttctccccta

SEQ ID NO: 49474 - DNA, 589 bp, Arabidopsis thaliana landsberg
gttagaccgtgaacatgcggagagtcaaaattttagttccaagaaaaaagatataactatcatgttcgttttagatacgtacgtacgttaggataacaagttgaaacctaaaagcaaaatataaaaaacatatagagatcaatgtctcgtgtgaaattgcaccttgaatcaatatcgattgtggacttgatacatggaccagctgaagccccatgaagaacaccaaagagaagcagaagtgaaaaccttattttctgaatcgaaagaattagcgtcaaagaaacaaaacaataacttaaggcaaaagtgactaaattaaacccacacgtacatgtttatatggaggacaagaaaccacatgctccaataaacttaaaacccatccaagcttagtaatggttccaccgatattcaagcgcatgtgaaggtaagctccaaacgcatgattgcagcaagaatacagaataagctgaaataaacctacaaaattccaccaagatcgaaaagagaaagcagattaatgaatacacatcactactagtacttttacgtgtctcgtttttaattcgtatgcatttacttgaataat

SEQ ID NO: 49475 - DNA, 617 bp, Arabidopsis thaliana landsberg
  unsure (1)..(617): unsure at all n locations
ttttttttttataaaggctaactatttgttttttgttttcaaatactactagcatatataagatcttaattttttgtgtgttaaatattatattttgagtttcaactgttattagatcaacagtatctatctctttttttaacacagtatctatccttacgcagaatatatcctcaaaatttggaaccagagatgtgaataatgagtaatataagaaaatcgtgcatgggcttgaatatagtgtgccttatcacaggggacaatgtcgataaattttgcatgcatgtctcatctggttctaaaaatttcattataaatatcacgactgtaacaatgatcatattatgaaaaatttctaagtttatatgaggaatgatgattgacgacaatgatgataactacatgggattttatctgcgttacaagaaatcaaggacgcatgcaactttttcatcattctgtcctttcttcaactacgattcgggattttcatttattagaaggtatgttctctaaattatacacgttcctttgtcctgaaattaattanaatcgggactggatatgtaattcgacttcttaatttcatatgttatttttaaaatggccgaaaatgt

SEQ ID NO: 49476 - DNA, 620 bp, Arabidopsis thaliana landsberg
  unsure (1)..(620): unsure at all n locations
caaattgatgataatttagttttctactnctatattaatatatataaatatatattattaccaaacagagttataaaaaaaaaccaacggttataagttataacatacaacaaggtcacatgaaaatggtgaataaccccaaaacaaatatattttggcacattagcaacaaatgcacgagattattaccttttcaaatcactttaatcaacaatttagaaaggaataagatgaatagagtttcctaaagcaaagtaatgaataaaattggacgatgatatgattatggaaagctgattcgtaattactttgattagtaaaaggtgagacattataagcgttactaatcaaaagttgtaattaaggaatcaaagaagttgtgggtcacattatttgacagcaggcctactaattggttccacgctggaatctgccaaagaagaagaagaaatctctcaactctgtatcatctttccactgtgatcctgtccgtagattcctccttattttgcgattcagattgcatccgacggctcttcacgtactactactactggtattatttaactatatttattagttacaaaaggaattatacctttcatggcttttaaattaag

SEQ ID NO: 49477 - DNA, 266 bp, Arabidopsis thaliana landsberg
tttttttttttttttttttttttttattttttttttttttttttttttttttttttttttttttttttttttttttttttttttttttttttttttctttttttttttttttttttttgttttttttttttgtttttttttttttttttttttttcttctttttttttttttttttttttttttttatttttttttttttttttattttttttttgttatgtgtgtttcttttgttttttttttttgttttttttatttgtttttt

SEQ ID NO: 49478 - DNA, 483 bp, Arabidopsis thaliana landsberg
tgtgttatattcgtcgtcaaaataatcttgtaatagacatgtattaagactttaagaggtataattttccatttttgattcaaaactcaaaattgattagttagaaatagatatatttaaacaaattttgattttactggaacatcaagtttttaatgtacacggtaaaatcggacccaaaactacaacaaaataccattgtacgtccgtggcattagagttgagatcacctaaccgtgccactagcttgggtttcataattgacataattgtgtacattaaaatataagtattatttaatcacattaagagatatgcacagaaactttttatcataattatatgtatgtgcatgcattagtgcatatatacgtacacgaatgagtgtatacaagcttgaacccatcgaacaagcttcatcacaaaacccgaaacgtttgatatttgtctaattttaccaagatgggtttcaaactcatctct

SEQ ID NO: 49479 - DNA, 941 bp, Arabidopsis thaliana landsberg
tgtgaccgggagtgtcacctctcttgtcttctggagtggattgaaagaagcgatagatgcccaatatgtgataaggtgtgtttcccgcttgagctttctttggcagatcgattgtcttgatgatcaaagaattgcactttactgttgggaattcgtatttagatcagggggggatggttgcgtaattagggtaaataaatgcacaatttggcaactaactaacattctgtcttctttaacacaggaagttgtgtttgatgatcgcttgaactagcatcattactatcccctggcttgaaagtttgaaggtgtggcgctttgtttggttagtctactacataattagcatacatctattttgtttcttcctcacacactttaagtgttgggtctccacatttccacttagttttgtcgtattggttatgttcgttttgcccttgtgcgatcatatagatatacataacaattgtaaatattacctagcttcttgttcgttcgtttgtgatctccggggtgtgatagagaagaaaggaccaccatttcagtattttgattgtttgcatcttcaaaatcatgtccactcttgtcttgatccatgattctatcttagcaatattggttaatgccctgatctgggaatcataataagcatgattttgtttgtttgtttggttaaagaaagagagagattctattagatatggatatagtataattccatagtctaaagagaaactgaatattccaaatagtaaattgatccacatgcgactagtcttgtcgtgtgtaagatattaaaaagaaaatgattctttgattaacaccttttgtctgctgcataaagtaattaattagaaataattaagagaaaaggttaggaatcatttaagaagaagagaaaaaagatgtcatgggctttgacttctagccacttatgt

SEQ ID NO: 49480 - DNA, 547 bp, Arabidopsis thaliana landsberg
taaatcagtggcttgtagcctatttgctcaatttatttataagctctactttattggaaacctctgctttcgcaaagatgttttgtatatgctttgtcacagtcttttctgaaataaacagctcttttgcgatatccttatatgtttttcctttaagtatcagccgggctatttctatttctctggccgtaaggttcaataacttgcaattttgttcatacttcaacagcgaagactgagccatattgtcagcctccttgcctttacttgttttcagagctgcaatggatgtgctgagtatagccttctgttgccttacaatattatcaagtatggtttcgattttctgacctaattcttcaaatgaaaatggctttgaaatgaagtctattgctccaagccgaaggcctttcagacgatcagtaggtgtggatttggctgttaaaaatataatgggtatatgattgtacttatcctgttctgaaagggtttttgcgaaagcgtaaccatccattttgtccatcataacatcggatagtatcaaatc

SEQ ID NO: 49481 - DNA, 504 bp, Arabidopsis thaliana landsberg
atagctgctgctaataacctgccatgaatgcaccaacgaacttgatgacttaaagaaagagataacgtttctccaatttcaatagacaactaaataaagacaagtcgtttaacaaaaaacttacccttgatgaagagttttgctgaaacacaatagatgaaactggtgctgagtgaggagtgaatagatatatcccatcattatcttcatcattctcacaacccaaattccaaaacccaacattcccaagtttgtcccctgcagcaaccatcttaacattctcgcaaggtaagaactggacaacaaaaatcctcccaggcacaacacgagctacattctgcggttctaaagtcaacaaatccagatcaaactcaattttctcaggcttaaccggaatactgaattccttgttcacacaaccactgaagaaatcataaacaggctcttccttttgaacagaaactttagatacacgagaacgactcctagtcctcaacatagaag

SEQ ID NO: 49482 - DNA, 596 bp, Arabidopsis thaliana landsberg
  unsure (1)..(596): unsure at all n locations
ggtgccatcctgaccagccaacggagagtcattgacaccaaacgtcatagaaattgttggtggatctaactcaacagtagggagtgcagttgtgacctgaaagacaataaaaatgaagcatttattcaagcgtcttaatattcaaatagggatcaatggaagaagttatgttaaaagcagaattcaattatatatctaagaataaaacagggaagtagtccattcggatattacctctgcactagccaccgtgtgacctattgatggagctgtcaaaccagccatacagataatatcaccagccccagcagcgtcaattgaaactatggttgtacctttctttttcattagcttcacaacctatatgaaagatgtttatgtctgcttagatgagaacatcacacttcgtaaacacggctgaccaagtacaaagcaatatgcacacaaacctttgcttcttctattttctcagagccagaatcagttttgcgtagtccattgactctgtcaccaacacggacaacttcagaagttactcttncagttaatattcgtccgagatagaagtccttctccatcattgaaacctggaaatc

SEQ ID NO: 49483 - DNA, 1078 bp, Arabidopsis thaliana landsberg
tcccatttcaaagaaaactaaagaatgccctaatacagtaaaaaaatattttcaatgaataaatcagtaatgactcaactgttgtattcaatggacggcgcataatatagatcacttattctaaggtaaaagatttcacgtgatcaccgagtccaacctttcttctattcaaatctctcgttatggcaatttaataaccactagaaaaaacaaattatagagaaaggtaatttgggcaccgacgtgaatttgactaaattacgagagagaaagaaagagagacttggtcacgaaggtgttaattagcatgaaagagagagaaataatcgtcgttgaccattgaccataacttagtcagtcatatatataaaaatccaaccgcccactattgttcccctattcacaaggtccttgctttctcagacgtaaacaacaagaaattatattaacacaacaacaacatcaaaaagaccaaccctatttattcatcttttctcttatatgcaactctcaaagaatccgatcaaacaaacgagaaatcgagagaagaattacaccgacgatttcaccatgaagagatctggaatcatggctcctgaatctccggtttttttcccacctccgcttgttttctctccgacgtcggtcaaaacgccgttgtcttctcctcgttcggcgccaccgaagctgacgatggttgcttgtcctccaagaaagccaaaggagacgaagactacgggttctgattctgaaacggtgttgaaaaggaaacgaccaccgatgcttgacttaacggcggctccgacggttgcatcgtggtgcagtacgacgagagagacggcggagaaaggagcggaggttgttgaagcagaagaagatggatactactctgtttattgcaagagaggaagacgcggaccaatggaagataggtatttcgcggccgttgatcgtaacgacgacggaggttacaaaaatgctttctttggggtatttgatggtcacggcggatccaaggcggcggaattcgctgcgatgaatctagggaacaatatcgaggcggcaatggcagcggcga

SEQ ID NO: 49484 - DNA, 1452 bp, Arabidopsis thaliana landsberg
atttcacgattgtcttctctcttgttatagatgaattgacttaattaaatagggaaattatcgtgttccattatgccacaataacaaaattaaaatgccagccaatagacaaacaaaaaaaagttcacactataatccgattggtaatgtataaagaataaaaaaaattaacggataaaactaaatgttaataatatatataattaaaaacaatgcaatgtagcgaatagaaaaagcggcaaaaaaatcttaattttttttttatctcgtttttgatattgttatgtggttagttatatcaaaaacggtacgaatataccactacggtgtgaagctaacaatcacaccctatatctgtaaaccttttagccaattttcattgaattctctaaaaattaaattgtttgttaataagaaaacaaaatcttaaaagaatacaaaacttaggtattttaattgcattctcaaattttacaacttctaattcacatcatgtatacgaataattcgcattcatagggaccacacgcttttaagattacttttagagaaacaaaatattgaaaagcttgtgagtgatgataatcgatcggagatggggcaaaaatatgagagcgacaaggaacgtgagtcacatggaaagatcgatcatattatacagcaaacagaagtccccacaccaacatgaattggtgtcatatgtatgaatgtgaagggccaaaatcatcaaaaagaaagtgttgtgtcattgtggaccttgattaggggtaagctcgtaattatttgttttctacttatattttctttggtaccaattgaattaattttttccgaaatcggctatgaaattattggcctcttttttgccccaccataacaatccaactactttaattccttcttagtacaacaacggctacttcactttaacattgtctagcctttttctattttaagtcaaaatcttgacaatgcacatgaccccttaggaatccacattaacgatattattatcgtacatattttaggttattaatcatcccagctaattcattcggataatatctaagaacaagatggtttgaaatattggcatcgtttctagccacttattttgaaaaccattgattacttatttacttataagtcattttaacccaatatacaaataacgtgttcgtcgatattaaaacatttcatttgacaagcatcaagagtataattggcggtaaatcgttggttacaaacgaaggaaattcacaacagttcgactttgtcttagatgtgaaatagaagaagaatctattaatcatgcgatttttaaatgcccttatgttcgtcatactcggagattagcacatacatattaatcggaaattgatgtatattcctccaaaacaaattttgtgaatctgaattattattttattttatttttgtagaaaccatgat

SEQ ID NO: 49485 - DNA, 507 bp, Arabidopsis thaliana landsberg
  unsure (1)..(507): unsure at all n locations
atataaacacagcacatttcactcattctatcacaactctcattttcttctctctcgattcttgatttatcaggaaccaaaaacacagagaattaaaacatggcttacttctccacagcgacatctcttctcctcctcgtcctctctgtttcctctccttatgttcatggagcctccgactgcgacacccttgtgattaccctgttcccatgtttaccttttatatcgatcgggggtacggccgatacacccacagcttcatgctgctccagtctcaaaaatattctcgatacgaaaccgatatgtctatgcgaagggttgaagaaggcacctttnnnnnnnnnnnnnnnnnnnnntaaatctgctactcttcccgttgcttgtaaacttaatgctcctccggtgtcagcttgtgaatcatgtgagatttctcctttatctctctgttgctcgcctttcttcttgattgttttatggattatttatgatccttaagataaatcagat

SEQ ID NO: 49486 - DNA, 966 bp, Arabidopsis thaliana landsberg
  unsure (1)..(966): unsure at all n locations
acccgttcttaaagatctgtcgcacatatatgtgtcaagtgcactagatcacgtgcaatcgggaaacacggcacttcaaagagcaaagagcttgctgaagaactcaagaaaatggatgtgtattgcaattgtcatcctcctcattgaggttgcagcgatcgctgctggtgttctcaagccttggaaaaacaagagtgcttgaggaaagaaagaatgtacaaaagaatatcaaatccttattcacggctttgagtgagagtgttttgtttatgatgtgtgtgttttttttttaccaagaaacgaaaaaaaaagaaacaaaattctacattcttttaattggatcaaacaaaccaatttccccttatgattgtgcaatttcacgtggattaaaggaggtacttctaattatttcaatttctatgttttgtgtttgcgttatttacaagacatgaaaatataaaaatgttttgtactgggtaattttgtcaattgcaaatatcaaacgtaagagaagaatgttttcgtttgcgtttaggaaaaaaactaactattatcaaaagcttagaacatgcatgtaaatgatgataagaaaaagtcataatatattctatatcttgtaagttgtaacagactacaaaacaagtgtttatcctcaacctaattaacttttatttcgccttttttattattgaaacaattaggttaaaaacctaaaacctcagccgccgaaaatgaatacataatttatatatatatactgagctagggataaaagaatgaaagaaaactagagacaaaagttaaccatgagcggtaaagctttcgaaagaagacaaccaaacacttgaaatcttgaggctcgcgttnggggtggaccaagagtgaaatctacgtgttaacgatgcactggctcattgtcggcgtcgagatgtacttgttctggcctttatatccaaattttccaca

SEQ ID NO: 49487 - DNA, 1850 bp, Arabidopsis thaliana landsberg
ctaggaccttctcattgcttctttcattaagctatcgttaggaagacgattacgcctgataaccaagtccatggatggaccgacttcaacaagctccattctcggaacaatggatcctgactttttaagcttcaatgcgcaatgagtaaggaaaacctttgttggggatatagctgaacatacgtaagcgcggtctaaaccagtaagatttagattatccacaacctgcagacatatacaaattctgttataagccaaatccatatagaatcagaataaaattgaaactggttatggaattagctgcaaaagtaggtcataagaatcaaacacttcacctcgccacgaaaaagatcagtgaggacttctttgagatgcttaagctctgatacattctcaaaaccttcaccaataaagcaaatgaaaggctttgttccttcatgaggtgcgaatttcttgtcatacgaaaacgcccgcaaggatttaaagttctcaatcccaacttctataagatcatagacttggtgatcatacattctcccaagtacaagattgtcaggtcgtttcttcgtgtgagaaccatactgcaatataaaaacaatcaccaatgttagaactcgcatcaaagttaatttgccaatacacctttccaaatgacttcttaaggcctgtgataacatcagccaatcataccaatttccaccataaataaatacacatagactaacaagacagaagcagagatgccttagaatgaatctagatcacaggatagatcatcttaataacattttgttctatctagcagttcatagctaagttaagaggagaatcaaagttgcaacaccataaaaccaagatgcaacagctgccaaagcttatgaacttaccacaaaaatgctacaatctgttttctgagagaagaactctaatgaagtttcacctccactctcgaaaggcctaatattctcattcctccttgaatatctgatggcacctcccttcttcaaacggtagagttccgtcattacagagctaagtgtagcactcgtctttgttccatgaagtatcaacgtcttcttcccagtttcaacctacaaattccaaaaacaaccaattcagatacaaagtttgcaactttcaatcgattctttgataaatttatcgacaaatagaaaacccatgagtctcatagatgtcaacacaacattgaagacagctctcaacatgattcacttctcggttttaagaaggacgaaggagaaaaagaagagaactttaccaacttaggagctcggctttcgagaacacgcttggctttgccagtcttcggagttcgtatttccatcatgactctgttaaatcgccggaaagtttcacaagcgacggctccgaaagaagagagaaaggtttttcgattgattgatatggagtctagggttttagtgcctcctcacaattggaagcaactttaagagaattctaatatgacccctaaccttataagtctttcctaaatcaccccacagttttttattgactataaaacccaatgtttcacaaggtccatgaactgtttaaactatacgggctcaaattaaacaatgacagcccatgaacttttacacacaaaaaagacatttcattgcggtacaaaaaatttacaaatttttatttatgttcacttttatatccatgatgatgaaactatacaaaacgaatagagaacatgaacatattccaaattcgtttccatgttattattcgagttgttaaggagaagaaacaacaaaacattttgattgatacttcgtgtgagatttacaagtttctcccaatggtacgatcaa

SEQ ID NO: 49488 - DNA, 1053 bp, Arabidopsis thaliana landsberg
  unsure (1)..(1053): unsure at all n locations
gaccagatatagtaatagcaattgtaagccacgggattttcttgcaacaaacactttgtgcgttgcatggaaaagttggcataccacttgaagatagtctccttacaaggtgatcatgctagtccccgatctaaccactctaatcgtagattccaagatattatagtacatagatacataacaactatatgcataataaattgactttaatttatcttctttttttgattcgtttaggtttgccaattgtgaactccggtcgattcggatagagaagaggtaactaaaattagcttaggaaattgaaggaactttacaagtagtggttgtttttaacaatgttcacacgtttaagtgcagtgacatggaagcggacacattaatgactagtaactgtagaaattacgttactccaccttcaacttccttccattcacacgcttgaataggaggcatgcatattatttatatgaactgtgttttcttttaaagccacactcatggaaaatcgaagttcagaaccaaggaaaatcgaagctaatattcccattacctagctaccagcaccaatacattgtaatcaatcactagtaacaaaaaaatctataatttcaaagatacgtttacatcgaaaaaaagaaagataacgtttgcaaatgatataaaagcttttccttttttttttttttttattattatgaaaaaatgatgattgaatcacgtagatattgccgaaaacaatgcctaatgaataaaagtcataaatatcaattttcatttaagtaaaaaccagcgaacatcgggttaaaattctgttactgtaataataaccgttaaaaaaaaacattagtaagtaccaataagattatttcccgcttaaagaggcggggaataacgtgtttgtttgcaacaaatttcgataattactcttccttatttaatttttatgtctatcagataaatcaaaatctcagatctctgaaaatataattactaanaagattctcatttaacagattcacgaatctctttttataaagattccttcatatt

SEQ ID NO: 49489 - DNA, 650 bp, Arabidopsis thaliana landsberg
atacaacatatttgaaatttgaatcacacacacatgatcccacccaatcgaatcataacgatagaaactaaagtaaagagggggcattttggacattgtatacctataaggttggggttaacagtaatagcgcttctcttctcgttttataaacatcgcatcactcttcttctcctccgtcgtctctcatcgcttttcgctgaaatcaaaatttctccagttttccgatcagtcgcaagaaaaccctaaaaatggtaaatatccgcctcctcatatcagtgcgctttttcgattttgcgttttcgttcacgaaacctaggctcgtttattcggatttgtcgattgcatttaaggatatatcttcggattagttttttttttacggtttagtgggaatctcgcatgatattcttatggttgttctgttattgtagatcaattatcgaaatgttgagtctatagcgaaatctggacgatctacagcatcttttgttgggttacaataagattctggatttgctcgattgtctgttatcatctgcgcattttgaactcgggaattccgcttttcaagaactctagtatcgagaacatctgatggcagactcagaataagttaactttttcgcctttttcttacttacaaatgc

SEQ ID NO: 49490 - DNA, 876 bp, Arabidopsis thaliana landsberg
  unsure (1)..(876): unsure at all n locations
caaaaattcattaaaactaatcaataatgtaaaatttgtccatacgaaattgatgtgtaatattcatacatttggtaatgtcgacttagttaggtaattgatcgaaatacacttattatctagatagttgtcgacctatcgtatagaataatgtgtttgtataagttgtaatgccaacaaaatagtgagtggtcccgtggcacgaaaaaaaatgtaggtggtccacaatatatttttagttgactatattagtctagtaaacatatacaaaactaatgtatgtaagtaaaagcataaataaaggagaataagtatgcatcatatttgattaaacaaatactgaaagtgttgctgttgataaaaataaaaataaaatactgaaagtgataaacaaccattttggttttaaacagtattttgctctaattataaagtaaaaacatatatttatttccatttgactcctatataacaataaacatgtgaatgccagattagactaaagaagctgtgaggatcattatacatcctagctagcctcataggcctactacacttattattgagggtcaactttgggttgtttgattaacaaaatgtatggcatctttttaaacaaatatatatttacattcacttatcttcttacaatgtgatttgtcccttttaaggaatcttgtcccccataaatcatttgggacaaaagaataaatgaaaaatttctcacatttaaacaaaaatgttaacactaacatatatttaaaatcatattcttattacattatttatttttaaaatcatactatttaaaaatgttnttcaatataaatatattcttattacattatgtattaataaaaccatactacttttttt

SEQ ID NO: 49491 - DNA, 687 bp, Arabidopsis thaliana landsberg
agtacggacacaaatttacattgtttaagaaaatactgataacaaaccatttaaatatctttaaacaactatttcgtatggataaaaaaacgtagaacaattacacatatttgaccatcttcgcattaccacataagaagagcgtatcaatcatcatgtgatatagaccaactttataaagcttataacctctttgtttgttttttggacagtaaaagaaacctcatttgtcagtcttgaaaatttgaaagcaagccaatcaataaagacatggcatgacttattaaacggctagtgaaaccaaagacatatgacatacgtatgatttgctgaaaacttagatgaatataagtagaaactatcggcattaaagtacaccaatagcaaatctgaaaattaattgaaatccattatagttaattttcgtccgtgtgtatatagttattgacttattgtattctccataatttcaagtgagaagatggacgaactcttctatgtaatgttgttaaccatgtggaatgctgattagcatctatatttcagattaaaacaacaacatcgtttacctctaagcctctaacattaaacataatttgtaactttaatgaaaacgatcgtctttggtctttggtagactttagctaaaatggtttagctactaactcaagacattttttctacccg

SEQ ID NO: 49492 - DNA, 747 bp, Arabidopsis thaliana landsberg
gcagcgttttctgtttggtacaaggtctcgtagctagagagaatttttgtagacctttcagggaaattttcatgtaattgacaaaaacaaatttttgcttattacagtatatcattcttttgatacattcagatggattgtcatgtgttgtagattgcacacaatatacagacttctaagagataatgtactgaaaacaaatccatgattaaattgaacaactagcatttgttggtggaacacaaaagaataaatatcctcacttgtctaacgagttgtgggagttattacaatttaaaaacaattgggattatttttggatttaacaaaagtttggggatcttgtggttatttatagaaatataaattagggcaacaagaccactttaaatgggcaaaaaccctagccatctgtttcattctccccagagcaaaaaagacgccgctcgtctcttcagagaatttcaccttctagggtttgttcaaggtacacgctgctactatctccctttaatggaacgggcttcagtttctgatatagtagattcgatagacttgtctctcgagatgtgatgatggaatgagaagaaacgagtttttagtttcatttcctcttggattagcttcatttttcatctacttagagtgtcattgactatgttagattgaaagtcgaatctgcgatacagatctcacttcccaattttcaagttttgagttagtccatactcgctagaaaaatggctt

SEQ ID NO: 49493 - DNA, 764 bp, Arabidopsis thaliana landsberg
gatgctcccagttatcttctgtgcagacctgattttgtgaaatagctgtcaatactgaatgcctttgcttgaaagcagggagtcttgtacgagaatccaacattttttggccttctacggatgcctaatcaatggaacacatcaaaactaaatggacgatgaaaaagcatagatgaagaatatattaaggacctaatataaacagaacctgccaatattgttgtcgatcacgcagctgcaaactcctttgccaaagaattttggtggcagagatgggcagtggttgctcagaaaaccattcatcagtactgctaatgctactagttcttgagacggaattggcagggactctatctatcctattagagcttttactgaggtattctgtgaggtaagcttcaactctttgaagaaggtcagtatgcaaattcacctgtaaatatttttgtatatatctgctctttaaagaaaaacaagccgtcttgcgttaagtgtaagagaagagagtgaggagcagcggataatacctccctctgtggcttcttgtcatctaaatcaaacctatagttggggagtgggatcttactgaagacaacaaccttagcatatgcatgactgcaaaaaagaaacagaaatggttatactagtgagaaagaagaaagaaaggagcagcatgattgatgtacctatacaatcccagggttgtagccagagcagcaagtttatcaaaatcccgtctatcttttttctccctacaaataact

SEQ ID NO: 49494 - DNA, 763 bp, Arabidopsis thaliana landsberg
ggatctaaggtggaaatagcctttaagaaaattgaaaagtaaataattttagctgtagcttacctgtaatgagccatactatgcaacaaaagttattgctgccggatgaaacagaaccaaaattatggctgcaaagaagaatttgaaactggccattgttactgacttgatgctttgaccaagagataatgaattttcttagtcaaacgttatagacttgtagtgaaaatttgaaaaagaactgattcggttttggagtctttgtaaaaaaagtttagaagactttccttaaggtttattaaattcttctttctttgggtaacctcttaaatagtaattaatgtttttacagctggaaaaaaagaagaggaaatgatcacacttagaaggaaataaaccatatttgactagaataaaacttttcaaattcaataatatgtgatgcaaatcttatacatgtggtagatggaaaatataatatgaattaactaatctatgggtttttgttctaaataaaaacagatttaatttttaactacaaatttttcaagatgttgatatattttttcacaaaataatggtttattaaatacactaatgtaatatatattcttatagatgagggtggttttattaaggataatattcccggcatgattatttaagataaatatgttgaccatatgttgactatatatttgccaaaaatactggtgaaagaaatcaatataaagtgaaataattattgcatgtttataataaa

SEQ ID NO: 49495 - DNA, 785 bp, Arabidopsis thaliana landsberg
tactattcccattatctaaaaatagattgtccaaatgtttcttctatgtattaattaggattgaagatttctttaaccaattgacaaagtacatggcggcttgcacataggtcagtcacattatggtcacatgtgttgcgtatgaccaaataacatgagattccatatttggtgcaacacagtcaccaaccactatcaaacgcaatttcataattgttcaaccaaaatctcacccaactctccctctcgtacatatatatatacatatatatgtaagagaggctatacacactacatcactcttcttacgttgctttatattcatgatgccggaacaaacgtacatgtacgcctatgtaacgctgccgcaccatgaccagagagaacgctacactcagaaatgttatcgggacggaagacggattgtgttggcaagctacgacttgatgggatcagagagattcagtttcaaagagaagcttcgaaagtcaatgaaaggaatgaacgagtcggccgaacgatgggtttcggaagtgcgtcaaggtacgaccaagagacgatttgcgattagagtcttaaggacaaaacttggcttctattcttgcttcattcgtagtgttggatgttttacttcttgtgtggggcacaaagataatttcatgaagtaattaatctaaacctaaagtattcactgatgttgcttttcttacacatacatgtaaatattttatttcatatatacacgcacacacacgtgacacgtgcgtgttttctttggagagttt

SEQ ID NO: 49496 - DNA, 583 bp, Arabidopsis thaliana landsberg
acgagaaatggggcgtaacagatttaataacgcccgcgactgcgtgaaacaacgtaaacgacgagcgcgaacgacacgcggatcagcacgtaaccacgtgcaaaaccacgcgtgcggtaccgcagaatcactaactacatgccgtgcttatactaaataccaaatagatattaaaaacaacattacattaatttgggttgacatctatttgtaaaaaactcgagttgataactataactataatttagttttaaccagtgcgacaaccagataagcattgaataaataagtaaataactaattaaaataggtgatatatgaagcaatactatattttctaagttgattttagttagcataaattatttgcgtaacgtattatcaattattcaattaattaccaagcacgaacaattatagcgaaacaactcactaatgtgcgtggatcgcgtgcgcgacaaagccggaatggacggtgacggcgcgcaccgaccgcgcacgcaaacggcaacaacgacacgtgcgaacggcgcgaaccgctagcgtgcaggggtgtagacgaggtagacggggggtaacgggt

SEQ ID NO: 49497 - DNA, 1008 bp, Arabidopsis thaliana landsberg
attataataagatttatatttatacttgaaccaaaacctataatctcaaattctcaatggcatctataataacgaataaaattaatctttagttaaggatcctgactacatttactctaccatgtgtagtaaatttagtttatagatcatacttgtttaacctaataaagtattagcagacggacctcctttaattacctgccaaatgtcatgtaaaaaaaccattttcattggttagttattataatatgtttgtcataaaatgtgtaagagttgaagagaaaacaacaaaatggggggtgtggtgcttgattctggacgtgtctctctcgaagttgggagttttaatattggcggtttgcatattaatttttgctctcaacgatttcttaatttttgtggcaaacctttatacatcaaataaattgaaagaaaggcagtatataaagtggatgaacccgacttttatttaaagaaagtaaaagctatatatatttatatattgatccaaatcgcatatatataattatataccccactaatcatatatttatttcgattagcaggaaaagcaaatccatatatataccaattgtttgaaaaattaactagtaactttaaccagattaatattggtgtattgtatatgtttactgataatatagaaaactcgaaagtatggtcttcactcttcactattcaggtggtttgaagtactttgttgaacccaaggaactctgatgctattacgaggatctggtctctggattatttttttgaagtattattatttataaaataattgtccactatctattcgataaaggttacttggtttagggtaaagatagtttttgaaaacccttggaaaaaggattaccgcaattattattagactactaacactaaactataatatcatgggaatatttttatcattaccaatacgcacttgccaagttacgtcactgtgtttaaactagattttagaaaagaaaaataacagaa

SEQ ID NO: 49498 - DNA, 1310 bp, Arabidopsis thaliana landsberg
tatattgtaccttatgtatttttcagtgtgtctattttaatatgtacaaaacaatgtgactggtgaggatataaatgtacgtgatccaaatctgttgtgatccggaatttgatacacgataagtgatggagaactgattagaaaaatgaggaagaaatcaagagcgattgattttgttctagcagctgtaaaaccgctacgaatgatagagaaacggaaacaatcacaatctgtttcagatttttgttttcgtaacttaattatgacaatggttaaggttaaggataatgtatttaaacccaatcggatatggttggtccgaccacaatcttgaaaatatattatagttcatattactttgtcttaccggtttagagtttaagtaaaataaattagattgttttagaaaattttaagtacttaccaagttataataatataaaccaaataaaattcaactgtaacgttaaaaaaatagtttgacagatttttacatattattgctcagtaggtttgatcgaatgcttttatgttctaagagatcatccagttttcaaaatcttggttaaaaatatgaaagttagagattaaattaagagaatcgaaccaaacaaacctactcaagtggagaaaccgaagataagattgccggttccatgttcccctaaacccaatctcaatgctttgtcttctttcaacatctctcctctatttaagcccacctttctcccttttctactttatcttcttttctttgagttaaatattgtgttgaagcctattaaacaatgttaaccatttcttgtgagggttaaaaaaacaaataatatgaataaacagctgtgtttaccgcgtttcttacatttaaataaaagtacacaaagtaagatcttatcagtttcaagactaatttatctatttataagatgaaattaacttttggcagcctacaatatataataggttagacaatgatagaataaaatatttatgtacaaagttatgatttcatgaaagtatagatctttgggaaacccaaaaccagccatgcatatatcccaatgtcaatgcacctaaaaaatcaagaccatgttcatctcctcttattttacttccttattatttacgacacctctttcttctttttcttctatatatatactcttcaaatcctcttctccttcatcacaaacctttcatttgcactctcttccttcacccattagagggtttttttttttggtgccacccaacttttgatcactaaaacataatataaaccctaattcaatcccatggcaggattaaag

SEQ ID NO: 49499 - DNA, 541 bp, Arabidopsis thaliana landsberg
agccacgtattaccatttgtcgatttacttcaattttttgctctcagttaaataaacaaacatacgatatttgaaccacaagctctaaattaatcaacacatttgttgatgtcaacttacaggaaaaaaagaaggcttatcttctttatcaaagaaaaacaatttacatgttacgtacgtatactgatttgtacgtaatcttgatttgatatcaatcaatttagctataaaaacaaaaacaaagagacggttatattaacaaatatctatgtactagagaaactcagcaatacaagagtaaattctggagtttggtaaaaagggattatatatgcagttgcaatgatattttttgtgagtagctccatagatttactggatggataagttgactttaagcataatcttacttgatctcgatttcctaacaagactatacagtatatttgacgacaacaacagccagagtatatattatttacttttatattacggtttacaataattaattagatggcgtatggttaatgtatgatgctgc

SEQ ID NO: 49500 - DNA, 1210 bp, Arabidopsis thaliana landsberg
ggggggacataatattagccacaatgaatatgactcacataacttcccctatttattaattgtttcaatttgttggtcaattcgtagcggctggtcaagtcaaaggataattcaaccagagtcatcaatggttgaccccaagttgttcttgttggacatcttcctctcaatctattataaacttttttcggcactaaaaaaactcttattaatttgcatggaggtgaaaatattatcggggaaaagtaaaccataacacctatatttattttatgcatgtatagaaacatatttaaccacactttaagattttggtatactctcatgtatgctccaaacgcaagagagagaaaaattcatgtaacgattccatatttaaacacgttatttatatagaattattcgaatttgtggtgagttaacgagttttaattgggcgtgagtggaaaactttagactttattaaaattaaaacaggaaaactaaagaaggatgcaatggcacgagttttgaaaatccgtataaatcttacgtcacactttttttttttttttcccactacgtcatactgtttgaagtacacgattcatgtcaattgtaataaagtccctaccgcttatgtccgcttatgtgacatggactttcttcaaagttgaaccatatgtttagttaaccggtgccgtttcaaaataatttttgtttcttgcttcttatagtcaacggaaaattatgtacgacctagaaatatagtatgccatgaatccaataagtctaaatcgtaaatatagtatgccatgaaaacgatcgagatgaataatgtaactcaaattaactttcaaaatgtggggaaaagtccccatatataaattgaaattccgtggagaaattggcaaaaagataaaccattgcagtaaaaaaccattaagtgagtcaaactctgggactttgaaattttggtaaaagaactcgaccattcaacctcatatgcataaaatttcataaagatccatcaagtttaagaatgcacacgaagaaggcaacttttattaatttgtaaattgtacaaaaataaaaacatggatcgaagaaggataaaaagttacatcaaaaagaaaagaaaacaaaaatggaaaacaatacaactccttgtaacgtgggaactgggatagaaaaagaacaaggataaaaaggaaactgtgtcgcgtagttg

SEQ ID NO: 49501 - DNA, 810 bp, Arabidopsis thaliana landsberg
ctatatagtcatacactacattctccgatggatcaaacatcaacctgaaaaaccaacatatgaatgttaacggatgctgcatatggatttctattcacaaatataagagaaatacagatagagaggtactgtttacccgttgactgtaaaatcacgctgtaagcaattcttccaacgaatataatcccgctcatcgcatcccgcaggccgtctaaagcttttattgggcgctttaccagtccttgctgaagtactaaaacttgacacctattaaaaagaaaaactccatcatcccttaggatacaattttacgaacttgagagaaagatggagaaagggagagagggaaaaagtgtaaaataagtgaaatgttgaacaaacctctatgataatatcatcaacataaacatgacatattggaaatcgtcttccaacaatttgacagccgggaaatactttccgtacctatacacacaagcgatgattcaaaacgtaaatttgtgaggcaagattgagttcatcataaaaaaggataaaaaaatacaagtctgtagtaagaacataagctgatttaaacctccttgagttcagcagtagtgataacatcaaaatccttggggattctatctagaataagatcccgaacacaacctccaactaggtaaacttgaaatcctggaaaatcatagcaaaaataaagcctttagctattcttcacattgttctaaactaaacaatctcaaaagcttgagagggttcacattacaactaaagccactaaaacacagattttaaggcagagttcaaaac

SEQ ID NO: 49502 - DNA, 690 bp, Arabidopsis thaliana landsberg
gtcggctcgcttgtgcttaacctcgtacaactgccgtgctagcttgtcccgttcggacttgagctttactacgcgatcctcaagtgaggcatcatcgtccagctcgtgccagtcgccgtcttcgttcgttacgcgctcagtcatgaccgatctcccttacatccgcaccggtttgaacggtgcctctgaatagagtagctggacgggagatccatgaactcagtcattcgcagaccaagggccttgcggatgctggtggttgtcagccgatgattggccatcgtccggataaccgcgtcatgcgcttccgtgccgaactcctcggcgatgtcctcaagcaggacagccaccccacaacgcggaccgcggttcgcagagagcgaccgcgcttccttctcaagatcgtcccactcactcatcatcagcctttcccgatgttgactacctgtcggcgacagtgatagcagtagcgcggactagtcctggctcccgctagtgtgttctcccagtgcggcccctcaaatgagtgtcccgccaactcggttgcccagtagcgcgccggacagtccaagcacaccaaattcttatagaagtggccgagcaatttgcaccctggcttcattgggcgcggccctccttaaggtgggattgtatggccattcccccccaatgggggtcaaaccccccttt

SEQ ID NO: 49503 - DNA, 653 bp, Arabidopsis thaliana landsberg
ggactaatatttcagcaaaatcaatacaattttggtgattattttggttcatgaaaatgttcaatttttttggtctgacttgcggaattcacgatttatttagcctttttgcggtctatataaaattaagatatttttatgtaacactttgttttataaaggataagcttgtatagattatatataacggctagtcatgctcaactaagcctttatcatctgtgggcttcacaatcttatttcttcgacccatttgcttcaagcctcaaaccaaaacttggctgagttcttcgaaagctcattatttcttatatagtaattcttttacatagtgttggaaaatgaagtaaaagaatatcgaaacttgaacgcttagatgacgaatctgtgacattatgatttcaagtatcgacgtgttttatcaaagtgaaaagttgttaatgttggtgttgggtccgtgaaagctcgaagccatggagattaatttcaaacacttttgacctttgagccttgcaagtttggtttatttgttcaacgccagacacgtttgcacagatatgagttggtgagtgcaaatcccatcataccaactaatataaagttataccatctatgatattctatcgtgaaaaaatatgtaaagtctaatatca

SEQ ID NO: 49504 - DNA, 1138 bp, Arabidopsis thaliana landsberg
ttggctagtgccaataaaagtctagagcttatgtattgagatactagaaaggagtgtttacctcaaagaaagaaaccggaacacctcctgcataagagaaaacatagagatctaaaacaacagaattttgttaaacagaggaatgaaacaggggagaaaaaaacagaacataccttgagaagattgagtgtctaatgagtaatttagaagtggaatcacataagactttatcctggaagtacaatactttgtccgaaccgccattctagaagtgttctacatattatcctcaattatcagacacgaaccataccatacatttggaaacaaaaagatgaaagataagttaatgagaaaagagcaagaacctgaataaggagatagctcttgccatcaatggcgtttttgatgactttaaaggtctgtccataatagatatggaaattcgtagcatcttccacctttgaaatgattccaacctttacattgttggaagctccgtttgataatctagctaccatgcaccacaatactaacaatagtatcagaggccaagaactataaggcaatggagacattatcactgttaatggtgatgaagaaagaagacaaaatcacaattaaccctttttgaatttagattggctcttcttgaattcacaagacaaatatctgtgggttttccatagagggagagagatagagtggagagtgatagggagaaatattttattattgttgttggcaaaaataaataaactttttctatatgctagaattctgttggaatgtactttctgtttttagtttgatttaagaataattgtggaattcagatggaatatttgcctcactggacatcctcactcaagtgtaaatgtatatgcaaccactattttacattcttcatacatgtgaatacccttttgtattcattttagtatagtgtttatacggacaattgattcattatccctatgtctctccaattcctatagatggaagttcaaacagattgaaacttgtgtcaaggttgcaaaagcatgtgaaaaacaaataaatgtataaatttctggttaattccgtttaagaaatttaaaaatcgatctcaatgctgtttataacacaatgaaataat

SEQ ID NO: 49505 - DNA, 1553 bp, Arabidopsis thaliana landsberg
  unsure (1)..(1553): unsure at all n locations
ttactctttggaagaggtttctaatcaaaagaacatctgatcttgtccaaagacactttgatttttgggttgattagaaaacgatgtgttttttctaacattttgagaaacgcatgatacgtggtaacttttgatgactaatactctcattttatattatgcgatcagatcactaataagtaataatgattacgtgatgaatatattatgtataaaccataatataagcttacacattagttgtcaaccgatctataaaagttgactcaaaatgttttaccagaattagttatattttatccgaacttctcttttgtataaatcgggcaaactcttatccatggagataaaaagttttaacaaatttgctcatcttatcttcatgtgcatgtcatctagtcctttgtcttctacaattttaaaagtaaaggtttttcgaatcttgcagccgatactgcttttatggccgcacttttttttttcgttagtgaaaccaaattacagtttacttattataatgaaatcctaacgaattcatatatatttttcttagatatttaattcaacaaagtagctaattttttttaactacttaagcaattttatattgttgctttcataaagatagccaaattacattagcgagaaactcatcgtcaatatatttgtacattagaaatgcaacagttatataatctagtaaatctacttagagatatgcttccctaattcacgatactaacttgatataatattacattaagctagcaatntatatgtatagactcatccattccgcttcatcgatgtaactattttccggcaccggataaaacaagtgatcatagtcatcgccatcatctccgactttatagtctccaaaaaatggcgtttcattagcttcgacggaaacggaagacgaaattggactgttgcttgagcctccttctactctttctgctaatctttggatttccctctctgcatcatagagttgttctttgagctgaataacctgttcaggaaaattattgtaaaattaatcattacgtagcttaaatcaccgatgcaagcatctgattacacttaaatggtgtttttagtcagtgggcctactgttgaactgagcccattgacaatgacaagccactattaagaaaataagaacattgtacggaacatataaaggtgtatatgttgtgtaataaggtggcattatactgttcgatatcaatattttttttgttatcaacttcactttctgtctcatttattgaattttctaatttcttcgagccttgagctcacgttcatttatgccaaacaataattatctaaagaatttgtttaccttttactatgcaattgagtgtaggaacaaggtgaaaaaaaaaaaaaaaggtcggacgaaaattctaattactattatgaaaaagcttgaaaaaatagccgattcatgcatattcattaagtaaccgtatagcattttccttaattatctatggtagattaaaattcggattggaaaaagttttttatatatcccttaagta

SEQ ID NO: 49506 - DNA, 376 bp, Arabidopsis thaliana landsberg
  unsure (1)..(376): unsure at all n locations
gatttgcaatcaatcctcgttttcgatccgattcctttgtcaattcccagaaacctgccttttctctccgtccaaatgcgggtcacagcggaggaatctctctagaatcggatcggagaacggcgacggcgtcgtattcgatgctgtagcttatgaggctgatcggttgcgtctcgacgcggcggcgactggcggagatggcggagattgnnnnnnnnnnnnnnnnnnnnnnnnnnnnnnnnnnnnnnnnnnnnnnnnnnnnnnnnnnnnnnnnnnnnnnnnnnnnnnnnnnnnnnnnnnnnnnnnnnnnnnnnnnnnnnnnnnnnnnnnnnnnnnnnnnnnnnnnnnnnnnnnnnnnnnnnnnnnnnnnnnnnnn

SEQ ID NO: 49507 - DNA, 610 bp, Arabidopsis thaliana landsberg
gtaaggtccctatataaaggtttgttttctttttcggtgtgaaaacatttcagatttggaataaacactgtggtaatttttcgggtttaaatccactctaaacacttacgtgtatttttacctgggctaaccgatcggcttatgaaaaataaattttcaaatgcatgttaaaattagttctgggccaattgttagaaatgtgctcgttttagttattgatgttgaatgtacttatatggcaatgaatcagcgtggatctaggcttttggaacttaaatcttgtttatttcgtgttggaagaaaaaataaataattacctttgcccaggaaaacgaaaaaggaactagattatctttaccaaaaaaataaagatatttttgaatactcgctatattcaaaaccttaacaacgttgactgcatgggtacatgcaccacaataagttgtgatgatcctcgcatttacatagacaattatgaaaccattctacgatctctgaatttgcagtgaacaatttattatatatatctatctctagaaattaatcgttgtacgtgaaaagtatctaaaggaatagcagaatccgtttttgccaaactaaaggtgacaca

SEQ ID NO: 49508 - DNA, 831 bp, Arabidopsis thaliana landsberg
gcggctatttgtatacagtatatacttgcctccatgtatatttatattctcgtgaaaaattggagacatgctttatgaattttatgagactttgcaacaacgaacgagatgctttctctctagaaatttaaatttagatttgtgaaggttttgggaatggcccggagaagacgattttatatatacatgcatgcaagagtttgatatgtatattgtttcatcatggctgagtcaaagttttatccaaatatttccatggtgtggtattagttaaacaaatctctcgtatgtgtcattgaatatacccgtgcatgtaccaggaatgtttttgattctaaaaacgtttttttctttgttgtaacggttgagtttttttcttcgtttcaaaacgagattctcgtttgtctcttcccttgtctaaaacatctacggttcatgtgattcaaaaacactaaaaaaatataaactcattttttttaatacttaacatttaaactatatatatatatatatatatcttatactagtcccaagttttagtgtgaggtttttttattcaaaatctatcagtacattttttggaaaagaactaagtgaaattttctccaaattttccttttactattgattttttaattactggatgtcattaactttaatcttttgattctttcaacgtttaccattgggaaccttcacatgaaataaatgtctactttattgagtcataccttcgtcaacataaattaattgatgttcttctccaaattttgagttttgggttttctaataatcttaacgaaagcttttggttacatgtaaaacgtaacg

SEQ ID NO: 49509 - DNA, 679 bp, Arabidopsis thaliana landsberg
  unsure (1)..(679): unsure at all n locations
catccttatcaacaaatacactgcgtcccttaaatattccactaaattacaaccaaatactttaaacatgcacgatagtgagctgtatcttggaaattcataaaaatgacataaacttttgactcatatatatacgttgaaaaagtatttgaaagtagactgaccaacaagtaaccatcaagaagcataaaatctaaaatatctattgtatttaaccatcccttatgcccatcattttcacaaacccacacatatacatacttatatactttataacattccaaatttcaaccgatctatcataattaggcatcaaattaaaaaatggaatatttgtggtgggagagagatccacatcttttgtagaaagtgcgtgtggggctaaacttagaaaaaaaagcaggaatagtgagagaggagacacacggcgttttcgtttctgcctagaatctacacttagtgttatacgtaaggccaaagagtcaacgactttggctccctctcttcacctcttctctattataaattgaagggccaataacccaactctatttgtcctcaaagatagtaaagaagccaaataataaccaatctttcttctatcttctctccctcaatatcgntctctcactctctgatctccctggcacaactaangtagagatatagagagagagga

SEQ ID NO: 49510 - DNA, 678 bp, Arabidopsis thaliana landsberg
tgaataatcatttgaaaaagttgcagaacttttcgtgtgaaagaggtatccagaaaagctaacctaatgagtttgtttcggtttagatagtgctaaaatatagatgcaattttaattgggaacagtcacgtctagaaacacatgtgaaacaggatccaaactggtagttgtgggcatgtgtctagggttcctgcatatgcttttggctacacgagactttttcagtgtgtatcgcctgattcatttgacaatatgccttctcgcctatgattgctcttatcatacttgttacctcaattactcaaatccattttccgataacaaattaagaaactcaaaataccgactcatatccgttattaccaaaccctttatccgaaatgtacgtagagagatagttttagactatcacctaacgcaacaaagagtatagagtaaaaaagaaagtcacacgcaagatcccattccatgcaacaatctaaaccttctctaacttaacctttgacatcatttaccaaattatccatcttgccttttttttctgttagctctgccctacttttactgtatgttgattcatactacggtccaaaaacaccatgttacctttttttttttttcaaaaaatctcataattttttagggtttttaaacgtaaaatttattataccaattttt

SEQ ID NO: 49511 - DNA, 474 bp, Arabidopsis thaliana landsberg
aaaagtagtaataccatttatttatctctttattttttacttattttaattatttgttattactttggctcgggccaatgtatcaccaataaaatacaaggtgtgcaaaacattacttttaaatagtaggagtccaaacaacaatatgtaattgtttaatttttagtgcatcgaattttttttaatgttactttctgttaaaccgctctacttcatacacaattttgttaatgataacgggatttttttttgaccatgggcagatgaatctgcatcattcgttatatatcatcattaaaaatctagtattaattatatgtaagcaaaaaaaaagaattagccatggactctatactcaataattttttctgtcaaatcaggattctaaaatattctataacctttaataattgcgaaatgattattattttttttttttgtaaaaaaccgcggtcagattatgccattttaaaa

SEQ ID NO: 49512 - DNA, 2269 bp, Arabidopsis thaliana landsberg
ggaagctttttgatagtatcacacaccatgtaaacttttagcgcttttcataattctggcctttgatttaatccgggcaatgtactgggattagtattctctttttggggttggaaatgaagtgcttttaactttgatatcttctgatgaaaatactgcagcgatctatccaataacagtctaactggaaccattccaacaaatttctcaggccttccacggcttcaaaagctgtaagtctgtttgattggtgtagcgagttttgtttggtttctgaaatgctgttgttcgttctatcttggatatgaagatggctgattgtttgttttgctgcctacctaatgtgacaggtcgcttgcaaacaatgctctgagtggttccattccctctagaatatggcaggaaagagagctgaattcaaccgagagtattatcgtgtatgactgttacaaaaacaatcatatctcctatcctgttacctagaagcatgttccaactttctttatattgtctcttgacaaacgtcagttcctttatgttttcagggatctgcggaacaatgggttttcaaatatctctggcagatccgatctccgtccaaatgtgaccgtctggtttgcttctgctctttcctatttctatttattatctgcccatacgtacttatttttgctttgcatatcattctagctactcaatgatgtatataactgctttttggatcttgtttgctcattctgaaatgtattaaactcttttcctcagattagtgtccacttttcgggtatcatttaacaacgtttgttttttcaggcttcaggggaatccgttgtgctcagatggaaatctgcttcgattgtgtggacctataactgaggaagacattaatcagggttcaaccaattctaatactacaatttgttctgactgcccaccccattatgaattttcaccagaacctcttagacggtgcttttgtgctgctcctctgcttgttggatatcggttgaaaagtcctggtttctcggactttgttccttacagatccgaatttgagcaatatatcacctctggtcttagtttgaatctgtatcagctacgccttgactcattccagtggcagaaaggacctagacttcgaatgtatttgaagttctttcctgtttttggttcaaatgccaacaattctttcatattcaatcgtagcgaggttcggcgaataaggggcatgttcactggatggaatatccgagacgaagatctctttggtccttatgagcttatgaatttcacattgttagatgtctacagagatggttagtggcagaatattcgtcctctcatatttattcaaaacagaacgtggttaaaatacaagtaaacgagctgatgtctttctgctacattaaacataaaagtgtcatttgtttatcagcgtccctgataacaatagatcctgtcttacctttttgttcttacgaagctataaaacttttgcatacatggacattgttttgactgtcatgctttttatgttcagtgtttccttcagcttcgccatctggtctaagtaatggtgcagttgcgggaatagttcttggttctgttgcagctgcagtaacgctaactgctatcattgcccttatcattatgagaaaacgtatgagaggatacagtgcagttgctagaagaaagcgatgtaagcattttcttgtggatgccgatttgtgctcgagtaaatgatttatcggaattgtacgttttttttggtttttggtgttacaagtttgattcattcatgtgcagcttccaaagcttctttgaaaatcgaaggtgtgaagagcttcacttatgctgagttggctctggctacagacaattttaatagttccactcaaattgggcaagggggttatggaaaggtatacaaaggtacacttgggagtggaacggttgtggcaattaaaagagcacaagagggatcattgcagggtgagaaggagttcctaactgaaattgaattgttatcgagattgcatcacagaaaccttgtttcgttgcttggattctgtgatgaagaaggcgaacaggtactttgtccaaattcctcttctggttgatgtccaaaacgtttatatgtatctcttattgcttgtattgttaagcgtgcagatgctggtttatgagtacatggaaaatggtaaaatgcgagacaacatttctggtatgttttacttcttcactgagtcatctatgagtggtgcttgtt

SEQ ID NO: 49513 - DNA, 727 bp, Arabidopsis thaliana landsberg
attttctctttccgctgctttggtttctactttcctccttgttcatttaaaatcaaagcaatcttgacaagatcttagtctgatcttaacagctgatctttacaatgcaaagcatccattgattctatgcactgatgattttggagtattctccactagcctctccaacgagtacgccctcgctgttcgttctcttggtgagcttccagaacctgagctcaaatccaacagttacagagcttttctgatttttgagaattgtgattaagtttagattcacaaagaaactacatttccaaataatctaattttgtttcttctgtgaaggtcttagtaaaagtgaaacctttgcattggctagagcagccatagacgcaacatttgcacaagatgaagttaagcaacaacttaggttcatttttgatttagcctctccagagcacgtttagtgagactggtgagtgcttcagattttaccgggttacttcattttgttggtttataccaaaccgaacaaaaggtgttttggttcatcggttggttcgaaaaaataaccttcatctcgaatattgattgtaataatataattatactttaaaattctcaaacttttgttctctgtttaaaaaaaaattgatttccacaaatgtaggcataggccctggccattcggatttcggatcggattcagatcgaatttttttgaattcccctaatttggatgaaa

SEQ ID NO: 49514 - DNA, 492 bp, Arabidopsis thaliana landsberg
atttggagttaaaatgaattaactatgaattttataagtttctagaatcaattttgtattaaaaatcacattctgtaattaattatccattttcattattctctggaccgagcactatttacagagaactctgggggcaaatccagaatttttctccagactcaaatgcaccccgcgtggatggcgggttcattcacctaatctctgggggttcttttgcaagagacgcggctgaaagggtatccgttgataccgaccgttggatcttcattaggcggccccgatttaaagtatccgcgattgacccgaatccctctgatcccagatcgacggctggggattcacgcagcgcgatccgcgaacggccctaggattaaatctcaacggcccacgccacaacaccctactaacctaatctcctccacacgatccaaatcggacggtgagcgtccttcattcactcttcacgcgtgccagcacactttatctctc

SEQ ID NO: 49515 - DNA, 483 bp, Arabidopsis thaliana landsberg
agataatttatttctaaaataataaaaaggagattgtcactggagaagccgcctcaaatgatgtctcatatcgcatcataacatttaacgtcacacgataaaacaaaacatttcgtattttgttttgcaatctatttagtaattgcattattagtagtggcctatctcttttgaagttgaaagtctctagttgacttggtcgtatttgtatcattgtcacatataagtgaaaattaagatggacatttccgatattattagctaaattaaatcattctaatttttttttaccagatattcaaaattccaactcatttaaagtttcacgttggcatccaagtcctggaattagctttcaactaaccaagaaatttaacgtttttgcatagattataaaattagttggaaaattgggttcaaatatttccgtgttaaaaagaatataacgaagcattttataatgatgaccatgattcataattt

SEQ ID NO: 49516 - DNA, 678 bp, Arabidopsis thaliana landsberg
gggagacaccagtcaacggttcaacaaaacggaccttcttcatcttcttccccaacaattactcaattctaaaaaggaacgatctttcgaaaacaggtaacgtttctctctatttcacctcttcaatttcttcgcaaagtgttctcttttccgctttagggattcaattccgtttctgggtttttgaatttcgacaaggatttatctgatttcgatgaaaattctccatctttaggtttcgttaattctgggatttcggaaagatataatctttggctgttgcagataatggtgaaagcagtggttggagaagatactagacttacttctgttgaagatcgtctctctcactcagctattcctgctgaagtaatgcttaattcattgttattgtaaatgcatgttgttggctctgtattgagatttttgatgtgattttcatttattttgagcataggtgggtcttgtgatagggaagcttagctctgttctggatcgtggatttgtctttgatttgattcctaccaccaagtacgatgatggtgaaccagcatgcgcggttttggagaccaaagatgataaaaggaagccttctaagtctaaatctcagtcatctgagtcgtcttctttatcgattgattcagattgggttgcaaaacatgctcgacaggtttgcta

SEQ ID NO: 49517 - DNA, 638 bp, Arabidopsis thaliana landsberg
ttttttttttttttttttttttttttttttttttttttttttttttttttttttttttttttttttttttttttttttttttttttttttttttttttttttttttttttttttttttttttttttttttttttttttttttttttttttttttttttttttttttgttttatgtgtcttttttttatctctttatttttttttgttttttttatttttttttttttatttttttttttttttttttattttgatcttttttttttttttttttggtttttttttttttttttttccttcatctttttttttttttttttttctttttttttttttttttttttttttttttttttttttttttttttttttttttttttttttttttttttttttttttttttttttttttctattttttttttttttttttttttttttttttttttttttttttttttttttttttttttttttttttttttttttttcttttttttttttttttttttttgttttttttttttttttttttttttttttttttttttttttttttttttttttttttttttttttttttttttttttttttttttttttttttttttttttttttttttttttttttttttttt

SEQ ID NO: 49518 - DNA, 516 bp, Arabidopsis thaliana landsberg
acacttgattgataatttttttacgtcaaagttataaaacagattatgttaaatatgtactgtattcaaacattcacccaccttcatagagtagtaaactattaaatttgaacaatcatatcaatacttggtttggcataatacaacaaaccacaagtgtatatatatctaattttacttgtaaacccaacacattaatatatacaaaccaatctatatctcagtaaaatcatacacacaataacaaagcaaagaaaaaaaaaactatgtaacttcaaagtgttgacaaaaaaacccccttcaagcttcacaaattaataaacagatttttctttctactgtaacttttttttttttgggactgctaactttttctttctttttaagttaaatccaccctgactaatcttttttataaaagagccaatataaagatattagccagaataagaaagtataatcagtgtactaaacccctcggctagttatctctttgtactgtctgagagactcctt

SEQ ID NO: 49519 - DNA, 837 bp, Arabidopsis thaliana landsberg
agtcaagaggaaagtaacaagtagcaaaatcattaagaacaacaacaacaaaaaggtaacaagttgtatcgtgtttgtgatctatgggttttgtgtttgtgatggcaacgaatatttgtgtacatgtttgtttcttaaggtcaaatttttgttaccgggaatatttgaatttttttgaaacgatacaaagaagattagcataatgctgacacacgtatttgttcaaattttaagaaaataataattaggtaacaatgtatgtgatcctttattgtaatttctagctagtctctccatttcgctatatttatctgtgagtaaagagtataataaacaagagaagcattattggcagagatgagctatttagtatattcatttttttcgaattttagattaaaagctgactctcctactacgtcaaattgtctatttttgattaacgcgttagtgtataaattatactataattagaagtgttaatctcattaaatatataaaaatgtactaaataccttcattttctaatatactcacacgtttctttggtttgtctgatacagtatcatttgaagatactttaacttttatatccagtataattgatcaacttaacattcatgatcctagcaattcatttatgcagctttttttcatggcgagccattctatatgcatcatacttgtattacacatttcttacccacaattctttggttgcgcaacgaaaacaaaattcgcagacaaaaaaaacataattcttaatttgaaattttaaaatactaatagattaacacaaattttgatatgtattgtcaacgatgactttaacaacac

SEQ ID NO: 49520 - DNA, 949 bp, Arabidopsis thaliana landsberg
actttaagttttatgtttttcctttttttcaacagaaaaaatgtggatttgtcttttcaattgattaaaagatatctgtgagcttcaaagtgtgttaaccctaataataaaaagtatttcgtaaagcagaggcaacaattggtatttgatgatttagagatttctatatgagttgtaataattagattcatctattgttataattgcagaaaatcattagaaaaacgcgcaattctgtgagattaaagctattaactataccaatccaagagcaagacaaattaatttaagtactagagagtagagatccaaatacaaaccataatatgttcgtctcacaaagtattacaagaaaataataaacaaaaaatagagaatttatacaataaggctggagagaataataataataattcacatcacattcacataaactcgtcataaatagaccatcccaattcccaaatggcttagaagcaaatgtccagggcacaacagcaacacatggccgcaagactacaagcaaagattccattaaaaaaaacaaatcagatatatcaaaattagaaaaagaaataacctatttgggctgaatatatcggcccattaagcataaattatgttgaattatgaagttgcataatttcatgataagatcgcatattttttaaaaataaaaaataagctttttgggctttaatatattggcccattaaggataattatgatgaagcataaagttgcataatttcatgataagtacttaccagcctttgaagaatccgtcacccttagacttggtttccactttaccctgagctaccgaaccatgactcggttggttagtcgggtaaccaatcggcggtggtggtgatgtacaggtagacatcggtggcggtgggttagctcctacgttacataatatacataaagagtttacaaatattct

SEQ ID NO: 49521 - DNA, 708 bp, Arabidopsis thaliana landsberg
aaatgatataatattgttctttgtttatgtatttgtaattttaggtaaactcttgttttatttgtttgatgattttttgtaattttattaaatatctttatcttgaaattattgaaacattaacacccgagattctttcaaactttgatatagctgattaatttagttgtaggaaagttacaatattaacagtttgattcatttatttgaaagttaaacttttggaaagttataatattaacatcttgatttactcgagattgttgcattgattcattcaaccaatttgattataggtgtgtgatattttgaaggatccgaaaaacagaaaatagatcaaatatccgaattaaaaaccgggtcaataaaaaaaacaatccgattaaattccttaaaatgtacttaaaaattgttaagtagatagaagggagctttcaatttcttctatccactttaacattgttcttctacacaaatgtctactcaagaacgtaataaaatcacaacaaaaaattaaataaacattttcatcaagatcatcaacacaaaccggattagagataaccttaaccgggtttattttagactcgcaaccaaacaatctctctacttattggggttttccttaagacaatgacaattataccctcttcatcaatcatcatcaattttcgtcttcccgtttcttctttgtttgaatttcccccg

SEQ ID NO: 49522 - DNA, 199 bp, Arabidopsis thaliana landsberg
acgattcgaccaaaatatccaataggtcaattttaaataatacagtaaatctcttattccttactttgtgcgcatttctattatttgtaggtcctattgctaaatccgcacaatttcctcttcatgtatggttacctgatgccatggagggccctactcccatttcggcctcttatacatgctgctactatggtagcgg

SEQ ID NO: 49523 - DNA, 464 bp, Arabidopsis thaliana landsberg
ggtgtacaagtaatgccggcgagccgctgggcatcagcatcaaaggtccgattttgcgggtcttatccaccgtgtttttgcgccgctcaccactttgtcctataggcgggaaagagcacgagttgccgattctgctgtcggaaatcaaagaaggcggcgccgtcgaccgctccaaggcctgctttgtgggcgacgaggtgctggaggtcaacggcgtcaacattgagcagctcgaacacaacgatgccggcaatgtgctgcgctctaccttggacgactcgcgcgtcagcctccgcgtccgatttttccctgccggtaacttctgtggggtttggtttgcaaaatcacttgcctagccggagttttactttgttttcctatctgtagcccgccaccgcttgatggcagagtatctgcgcacgggcgacccgttggcgctggatgaacgggcggcggagtggcac

SEQ ID NO: 49524 - DNA, 441 bp, Arabidopsis thaliana landsberg
ttttttttttttttttttttttattttttttttttttttttttttttttttttttttttttttttttttttttttttttttatttttttttttttttattttttttttttttttttttttttttttttttttttttttttttttttttttttttttttttttttttttttttttttttttttttattttttcttttttttgttttatatcgttatctttttgtttctttttttttttttttttttttttttttttttgttttttttttttttttttttttttttttttttttttttttgtttttttttttttttttttttttttttttttttttttttttttttttttttttttcttttttttttttttttttctttttgttcttctttttgttttttttatgcttttttttttcttcgtctgattctatcattttttttt

SEQ ID NO: 49525 - DNA, 584 bp, Arabidopsis thaliana landsberg
  unsure (1)..(584): unsure at all n locations
attggcatgataacgtccacgttcttttgtttatagaaaaaaatctgatccacgttggctttgcaaatgacattcttagaactgcattattcaaatgtctagtcaatctatcaaattaaatggtacatcactttatagtttaatcagttactatttctattttagttgttttaaggttagtaagttttcatttgaactgtctgaaatcgagatattgctacattattaaaaaaaaatgattacatgtattttttgtttagtaacgaaataaatttagaccaaaatctagaataacatctaaaatatgtagatatttgctatataatacattcatagagactgactaaaatcacagtaactgaaaacttttattctttaaattttaaagtgataataattcaaaacattggacttatatatatatatatatataaagattggttattagctgaacttgttttgtagtcttcatcagtaatttgttttaaactattttgttatttatgatttaacggtaaaatataaatgcgaatgtaagcacctcanaaataataatattgacgtataacgtcaaacatataaca

SEQ ID NO: 49526 - DNA, 510 bp, Arabidopsis thaliana landsberg
  unsure (1)..(510): unsure at all n locations
gccgctcgttcgttcccccgctgccacgcccgtccgctttcgtggacacaaggccgcgtcgacaggcagggacgcgaccgcctgatcggaaatcatggtctaggtcgatggaaatacatgacatccttccatgtatttcgagtgccaccagcagcagcgcggctgccgaaggcagaataagctgggctacgtattgaatacttatgaaatattgtatgcccggtgacaggcagacgcgccacttcgcccagctcggtattcagccttatcgcgggcgggaaatcaaggcgaaattgaccgtaagttgatatagcccggccgttagctgccaccataacagttggcaggcccaaaggcttgacggccgctccttcagccgttccacttcatcttcatatagacaccgcccgagccaagctcggcgagcatctgctggatgcgctngtggcgcgtggcagcaagcttcgctcgggtgatccagccgacatagtcgttctgctgataggcagg

SEQ ID NO: 49527 - DNA, 1305 bp, Arabidopsis thaliana landsberg
  unsure (1)..(1305): unsure at all n locations
gtagcaggatattaaacaagaacctcggagatggttgcctccattgtggatttatgagctttagccttctgagagttgcgtgggacatcttccctgcttttggtttcaattggctctccagtagaagcagagtcctcgtttgcatttcttgtactattttctggctctctccttattttctaccaatcaactagtgatttaagaaccgtgacccagcaccttaaatatttaccaaaaaagggtccttccatttcttagagaaaaatttcataaggctttagataaaatatatacacatagcaatttcagtagtttattttctggattgcaagtaaagcaaacatgatatgacgcctacctgaagggatgaacctttaaccgaagctgtctgcgaagccatggcaggatttggatcagcactctgagacccttgagcaattttagacaaagttgttacctaaagtaaaataaaaacatgtaatgtgagtcataactaccagtcacattgctgaagtacagtagttatataaaagaatggaaaatggagcacaccatgcgctcaaacaagtttggggcctctagatcacaatcatagtttacatacacatcaacaagcatctgaggatctttgcagactttctcaagcatcctgcgtagaaaaatatgagtatccatgaaattcacagcaaaaagataatagactcacttgcctaagagatgtattcaaaacaaaattacatctggacgagcagaaaaatattgtacctaagaacacccatcttttggtcattgggacactcggagttatctaatgatcttaagacgatgatggggaaaaatataccaatttcaccctgagagtgagatttaggatcagaaaaatatggtgaaaggtaacaatccctgtacaaaaaaaggaatttctaaactggagacagcacatgcttacttttaaactgtctctgaaccgcagcaaaagcacggagaagataccagatgcatactgcaagaacataaattctagtcagacacaacaatctgatagaactttcagatctatatgaaatggagaatcaaacctgaaatatgacagaagactgagaaaccgacgcccgcaacaatgcatatgagaggtaggctttcactgaatctataaagtgaaagttctttgtaaatgagtgactaactccttctaacataccctgcatattgcanacatatttattgcagaaaattggtcaaaatcagccaacagaaaggaccttcaatgaatgcaacataaataacaatctaaatgtcacaact

SEQ ID NO: 49528 - DNA, 806 bp, Arabidopsis thaliana landsberg
  unsure (1)..(806): unsure at all n locations
ccttcacaaggaacacaacacacaaaacatgttttgggccgttagcccacttcttgatggctcctgcggcccaaattttggtccagctaacccggttacacctgacccgtcgacaattagatccacaaaaacaccaaagtttcttccgcatcaagaaaagaaattcaaacataagatacaatggagttatgccaattaactctaccttacctactgttaaatgcaaaggtttgtaagagcagcaaaaaacaccaaaccattatggatttttccctatctaacaagtataaattgtaatgtttatgattaatacatttcaattatatatagagtcaaacactaaaaattacctaaaaaggaaagaaatccaaaatttccctcgtgacgacatttcgagcgtagttagccagtaataaccaatagcagattagtttagtgaagctaacttatccatttaacgataagttcgattatcctcctattcacctacctatcaagattccagaagaaacaaaacacaaaactgaaccttgagaaatggacaatggagaagaacttgttgatcctgtaagtcttgtatattccttgagttaatgattctcatttatttatctatttgatgaatgaagttatcaatttgctgaatgatattcatgtctcgtggaaagaaagcttgaacctttagtcctttagggcatttagggtttacattgaacattaacccctataacctttagctttgtattggctctnctatttattaatattaatcaatatggaaactggatctaacggtctgtcggggg

SEQ ID NO: 49529 - DNA, 823 bp, Arabidopsis thaliana landsberg
ggctgagaaacacaacacgttctccatctgctgctggttggtagattctagtgaatcgtcaaaaggtaactcagaaacagaccaaatcttcaagatctccccgcatatgtacttgatatttgctttatcctcttaaaacaggtctgaaagaagatctcgagactgttcttacagaacttgaatcccagcttttaaaacacgggtataactggcagcatgtattgtacattcatctatatatctctgacatgagtgaatttgctgtggcgaatgagacatatgtgaaatttatcacacaagagaagtgccctttcggtgttccttcccgtagtacaatagaacttcctttggtacaagcgggtcttggaaaagcttacatcgaggttttagtcgcgaatgacgaaagcaaaagagttctccatgtacaaagtatatcttgctgggcacctagctgcattggaccttacagtcaggtgaatgaaatctcatcattgatttctaaataatcttcaaattgactagcaaagtcagatacttacaatatcatctacttcaggccactttgcaccagagtgttcttcacatggctggacaattaggacttgaccctcccacgatgaatcttcaaaccgaaggcgcaattgctgagctaaatcaagcattgacgaacagtgaagcaatagcagagtcttttagctgctcaatctcctcatcagctatactctttgtggttttctgttcagcacgcacaaaacaaacagagaggaaccaacttcatgaaaagtttgttactttcttgggtgtggcaaagtcaaacggaggc

SEQ ID NO: 49530 - DNA, 334 bp, Arabidopsis thaliana landsberg
taaatcaattgaacaaaaaccatattaattcaatacaacagttatctatcgtaatacagtaatagaccttacagtcgtataaccttatacgaactagtccctcagctgactaatgcgcgcacgtggaaagattccgaaactagcgaattgattcgagaacccggaacgcacgcaaagatgcatactcagcataatacatgctcaaacagtcttgtgaaaaacgaccagtacgaaagtgcatagtgcgaagagtaagttcagagctaaacctgttcacgaagttacggatgcattatcttgaggtgacgctcataaatgtgcctagtgagcagag

SEQ ID NO: 49531 - DNA, 692 bp, Arabidopsis thaliana landsberg
gttggtgagcgaggccatgtggccggccttgagcttggcgaagccggtcaggcagtcggggctgccctcgaccaggaaggccgacgcctcggcggagttgcggtagccgccgccgtgctgctcgaccaggccgaggctgaccaggccgtcgagcagcgcctgcgcgccgcgctgcgagatcgcggcgcgctccgcgacctgctcggcgttggtggcgccgccttcgaggtgggtgaagacggagtggctggatgcggcaccgacgatgccggtggcccagtagccggtgatgagccgcatgatccgatcggaggtcggctgctggctgctggtcatgacgcaccttcctggttcgcgctgtcggtggaggtcgccggtacggcggacggccgccgtcccgagttgatgcgcagggcggtgcgcagggcctgcgagacccgctcggcctggtccacggtcagctccgcgtgcatggggatggcgagctgccgcgcgaagaggtcggcggagaccgggcaggtctgcttggcctcgtagaccggctgggtgtggctggcccaggtgccgtgcccgcagccgatgccctggccgcgcagttcggctgcgacgcccgcccggtccacgcccgggtcgagggccacgaggtaggactgccaggcgcgggcgcggacgacctgtacgtgcggaagagt

SEQ ID NO: 49532 - DNA, 433 bp, Arabidopsis thaliana landsberg
  unsure (1)..(433): unsure at all n locations
aacgcgattgcattagcaatgacggtgctagctgctttgtgtgtgaaattgccactcgctaagccttgcagcgaacataccagnagcaagtataaagtgtccagggtggcctggttaatgagtgagctcacttagattacttgactctgcgctgaccgcaagccttgcagttgggcaatctgtcgtgctagatggattaatcaatcggcgcacgtgtggggagaggtggcttgagtattgccagtgagggtggtctttacttcaatgagtgagacgggtaccagttgacctgcattgactgactcggagtgagagagttcaagcaagccgctcaagntggtctcggcaagcaggtgaccatgntgtttgatggtccttagcaataggacccatgattatcacataaaagaccagcntgagatagggttgagtg

SEQ ID NO: 49533 - DNA, 444 bp, Arabidopsis thaliana landsberg
  unsure (1)..(444): unsure at all n locations
cattttgtatgggaaaaacgaattgaacttatgtagtatttctatcttacatgtctgtgtaacctatgttcgtggcacgtcactgtttgtaacgtgtcgacttgattatgacatgagcgtgcttgtaatgtctctgttacgtgtgatatacgttatgtacgnagacataatgacntaatttagtcatggtcttctatagacgcatagggtaattctngtcgcgtcacttaattaccgtnggctatggttgaactgcngcgcattaagactcaattaccgtcggcattgcaaatacagtacacgaggtagcggcccacggggatctaattacataantnnagtncgttgtnatggccgangagaattagcgataactaccgtnggntagtaactagntgacagggactaattattgccatgagcggctgatgcgaacaactttat

SEQ ID NO: 49534 - DNA, 690 bp, Arabidopsis thaliana landsberg
tgcctttgtgggtgaattttaattgttgttttgttgcattgttgctgatctttgtaaattcaactaccaggtgttttctgcaacaagcaatatgcgacaaagaaatatgatgattggttcagacatggagcagaattctcaaagctttgttccccatcctgaacctcgcattggaactaactatctgtatccagatatcccaccagtgaacactgttcctcatttagaagctcattctctgcaagaaccttatgacaacaactcaatgttctacgggcctccacagtaccatcatcaacatgcttcaaatcttggttctggcatgtcaaccgcaccaaatttctatgtcccttatgtgaattatgaagctccaccgagttttctgttgtctcatggaagtaatgatgcagttgttggagttacttccactgaacatgagagaaatgcccattttatggatcacggattcaaaagaaagagttctgaagtaatacctggaaattctcagtatccagttgctccttgttctttccctcaattgaatacatcggagacagcacctttttcattcccacattttggtacttatccacaaccactagatcagagaagtgtgaggaacagagcaggagcagctacaatggatccacttctctctcatggtcataacaacttcagtcaaggaaacta

SEQ ID NO: 49535 - DNA, 832 bp, Arabidopsis thaliana landsberg
tgtggtcaaaaagcttggatctgtataaaatatttgaatgccttaaaaatatgtacatacaatagagatagtatatgtgtgtcagtgtgtatgttaaatacattctttctaaattagtgtgcctgaattttgaaatgctcaatctaagaaaaatcaaaacaagaatctgaaaaatactcttgttaagattactaaccagttgtgtaaaagtagagatatactgaattatatatatagttgtttcttgtgttttttatttttatattgtacaaaattagttgtgtaatctacacctaactcgtaacatatgaaattagttaattcatttctatatattttgaaaagattattggtatacacacgtaaaaaaaaaattacgtagatgtttctatgctaagccaaaaccaaccggttaagttaaccttatcacttaaattatactcgatgatatagtctccattaacccataatcattgccattaagaggaaaaaataaactcactaatcattgttaacctgaaaatcctgaacccaaatagcagaagcaccctattttagagtaataaatcaagcttggaatttgattgttttatcaaatctcaatagttacactatggtacgtaggggaaaatgtaggatcaattagctatacctaaccacgattctacatcatcaattccaatcatcaaagaaagtgttaaaatttcgatttttttttgaaatttctaatgtgactattgaaaagagaaaagaggtgaataaaatagggacacatgagcagtgatggtatatacgaggtgctggtgtgtatcccataaaaactatttcccat

SEQ ID NO: 49536 - DNA, 1116 bp, Arabidopsis thaliana landsberg
aataacataaatggtattaatatgttgcttttatctatgtcttaattttattttttatctaggtatgttccatcagcatggtatggggatcaataacatgatgcaatctcatagtcacaggatagtttaatattacactattaaacttaaatagttctacaaacaacatttgatacaaataaaagttgataaaaggttaaaaactaacaaatgaaagaagagatctgtgtcttaagaacgccttggattgataatagccataagaggataaagcttctgagaggtcaagccatatgtatccacattctcttcttcaccgtctctaagcttccactcgaattcttgcactaacctcccaatggcaatgcctgccatgagagatgcttgaagagcaccagcacaaaccctctttcccgctccaaacgccattgtcttgtgaagatccgacgtttcgtatttgccatcatcaagaaaccgctccggccaccagtcctctggtctctcccaacgcttcttatccatgttgcatccatagatgtttattgcaatctacacatcaagattttgaaactagactttgtaaatgaacttcaaaatgtgaattgactcggtgtacctcacttcctgcagggacatgatagcctccgatttgcgtatcttcgtgggcatagcgaatggggactagaggagcaggactgtatttcctaagcgtttcatggaatactccattgagataaggaacttgagacaattgctcttctttgaacttttctcctccgcagacattttggatttctttacacagacgatcttggacacttggatgcttagcgagctcatagatggcccattcagttgtaaccaaagtagtgtcagctgtctcgataatcgtctcccaaaccaagatagcaatttgctccttggttagtgttttcgcttccgacatcaagaagttgagatagcaatcatcatcctgtttataagtagagattagatcagcagtgtaatgcaatatatgaaagactattcaaacaaaactaaccgattctgaaccattctgcttcagtcgatcttgaatcagagcattcatcaccgcgagtctacgtttatgctttt

SEQ ID NO: 49537 - DNA, 1134 bp, Arabidopsis thaliana landsberg
ctaatgcttagcagctggcttcctcctttcttcttccatgaacaacctatgtatctcctcttcttttgacttcctcaactcttctgccctccttgtagcctctagtctctcctgctcgtttctgaaagcagcttctctggcctcttcttctaatcttctctgccgctcatcttgttcacgagccagccgtagtctctcttcttcttctgttcgagctagttctatcaccctttcctgttcctcaataatccgccggcgttcctcttcctgcatcttttgaactctctcaagttcagcctcaaatgactccctgacaggatcatgaaactctgtttgctttaaagcctctttcttcttcttagtaacaccaagtactgggaatggatcatgaacatcaaaaccagagtcaccaaagtctttcataaaaggatcttccacatgaggtttgtcactcttgaagaaggagcgtttatccctgcaagaagttcatatagagataattaattaaaagaaatttgtcaccagatgcagagccatactggaagagttagtcccatacctattctgatattcaattccatacccatcccgattataagttcccctgttgctggaactatccatattattattccatggctgtcttcctccatgctgatatggagcctctctagctccactattattccaaacattttcccttgatgatgacaagacgtagttacttttcttagcagcttctctgcccctactagagggccttgctccataattattatgatttgcaccttcattttggagtggtgaggagactctccaagcgttggcctcccttcctcctccactgacaggtcttacttgagtcaaagaggactttgcaatttcattttcacgctgtcctggtttgtcaaaaacattagaagcagcatgcttctggggcaggacatgaggcctcagatcaaaacccctatcccaaaatggttcattctttgaatagccatgatccctgtcccgatctcttaagccatgactagtatcacgttcatcatcagcccaatcagatcgtggggccaaacgaacatgaggcagtggccctgcaaaatactcctttttcctcacatgttcagatgaatg

SEQ ID NO: 49538 - DNA, 574 bp, Arabidopsis thaliana landsberg
gcccagctatgcggcttccccggcaaactcggcatggacggcagcaaggtgtgggatgctttcatttacggtcagatcgaagccatccgcaactattgcgaaaccgacgtcgccaatacctatctcgtttatctgcgtttccagcgcatgcgcggcatccttaatgaggaagcctacatgcgcgaaatcgagctggtgcgcgcgacgctcgccgcttacgaagcaacgcactggcaggaattcctgcaagcctggtcacagtaacggcaggccgcagggaacagcagcttcacctcaggtaggccatacgttccatgatcgagcaaaccaaaatcctgctgtggcgattgttcgcgatcatcgcgctgctgctgggcctgatcggcgccttcctgcccgtggtgccgaccgtacccttcatcctgcttgcggcctgggccggtagccagggctggccgcagctggagcactatctgctgacccatcgtcgcttcggcccacccatccgccactggcgcgaattcggtgccatctcccgtcgcgccaaggcgctggcgaccatcatgatgtgcgg

SEQ ID NO: 49539 - DNA, 989 bp, Arabidopsis thaliana landsberg
  unsure (1)..(989): unsure at all n locations
tattgagcttttaatagattttttttcttaaaaaatccaaatgctattnttcattgaaattataaatctatttgaatccctatggttccagaaaaagtccacatgaaaatgtatataattcactccaaaaataaaagacatgtattttaacaactcaacttacaacgttaattcataagacaaatttaaataaaatttaagatattttatcaacatatatgtatatatatacatattcttagtaaattaaataaacatttgttatcatttttgttataatcaaccttcacttctggaataataataattggtttaagaatctatttgccctttgaatgaatcaacactatgtacatcctactaaaacttttgtctcctcattgtatcattgtttacatggatcatgattagtttcgctgtaagagctatctacggccttaattttaagtatatccttaaaaatttagcaatcatgatgtactttaattttagaacttagagacaaaaaaaagttaaggaacgaccaacaataattcctaaagctctcgtttctttgtcgtgaggaatgaccaacaactgtaaaaaatattttgtgttttattatagcctttatttatcttttaggtacaattttggttaccaattaattttttcttcatttaatataatgtgtgtacatagaaatacgtgtatacacatacatacatacattaacaaacaacaataatatgacccaaaatactaaaacatcgtagcattaaattaggaaaaaaaaaatatatatatatatataatataaataattttacatatattgtttatatatacatataaatttcgtctttaacatacatattttcaaaactgtattaactattttttattagtttaatattgtacttattatttaaaatattttttttttattctcttttactagcacaaaaaatttgtatacattcaaaccaaaatcttcaaagaaagaagaa

SEQ ID NO: 49540 - DNA, 741 bp, Arabidopsis thaliana landsberg
atgctctgccatgtgctctaaggtatgtgcgggtcagttgacttgggtcttgatattgtgtttatgtgccatggagatcattaatgtcgttaaaatcaatggttattgtaaagcagatcgacgacgtgttcaccaaccaatggaatctgatatacgttcacaaacattgctatggaagattggatttcagttcacgatgaaagaaattaaccatgcgattaatgtcattccgattactttggcaatgaatgtccgtgtccaagaggcatagacgattcagtcttctattatggtgatgacttcaattctgcagaagcaaaaaacttggggtgttggggatggtgtaatggaatcaaatagccatcagtttcgttttccaacggaggtaatcattaacttgatcttgtgttgtggtcaacgatcttgtgtggattggataatcaagtttcatcattggcctatcaccctctatgtaaaatatggaaagagaacatcgtcagatttcatgatcgggtcaggcagttgcaattataggcgaatagaatatatcttatcgagttgtagaagatatgaatcagattcatttccaacaacagttaaattcttcttactagtcaaagtaatgctatgtggattttggagtttcatcagaaagatgatagccaacaacaagtatttggaggggggacataacagatattctctgttagcctgtaagactaaaaatagcttggttgcttc

SEQ ID NO: 49541 - DNA, 1095 bp, Arabidopsis thaliana landsberg
  unsure (1)..(1095): unsure at all n locations
tcccaaagctacagtgtcgttcacgggtcaacgtcgagaagaagaaaacagagatgaatattattaagacgacaagagattagttcacacaggtccaaatcctcttcacaactgaaacactaattagcaacacgtgtctggtctctctccaagaaactgccttgagattctgctttgaatcaatctttatgttttagtcataatgagatgtggatcattatccttagccttgtttaattttctgtgaggctaagagttaatgatcttgtttctcacttgttgtaactccttttgcttcaatggctatcatcaagatccaatgaattattattgattatatagttttgtatttatttacttaaatcagtatgttttgggaatttgtaatttttttatatactaatattgtaagcaagaaaaaaaaaatggttgaagattcgaatgcatggatttcttcgaagatcatgttctatgcagaaaaagaaggttgtctttttgtgttaaactgattaattattgttatttaaccatataacatataagttattaaaatcaatgttgaatgggtccaaaattgtgtattgttaaatgataaatttataaatacatgaacatggaaggtgttgactgctccttcgagcatgacaaagggagaagcagagacttgaaattgggtgaaactcatgcattttcgatttttcctacatattataaagctagctagaatatggtagactctaggtgaaaaatacttcttaggtcgtgcattaagcatccgatctttctttttaaaacggccatggatgtaaattcagcctaatcatcatatacatgctgagtaggtgccctaaaagttcctaacaatatataaaatcgatcaaaagttatggatccaaaaatatgtnggtggtctagtggttcttgaaagtattcaaggtcactacttcaactatatttgtagcttacacgtagtattgttaattgttgaatctggacattgaaaaagattatgaatcaaagattcggaacttccaagatttatatcattaagagcctacaaatgcatttattagaaaactaaatctaacatactca

SEQ ID NO: 49542 - DNA, 406 bp, Arabidopsis thaliana landsberg
  unsure (1)..(406): unsure at all n locations
tgttgacaaataacatccgtgcaggtacgagctatatgaatcatttgaaaaaatatttaagggtagcaggcagtagttctttggtgtttcagcgttcagtagattgcttgattgttggaagttgtacgttcgcgcctacaatttgggatagaatcagtttgagggcgtgagctgtgatatacggttttgagtgcgcgaggtgcactcacttggacggactgcgtgcggtgaggattgtacgccgatgagcattccgcaattcgcgatcacatcctgtggaggatgcgacggtgcgatgtaagtagtttgtcgagacgacgacagaatgaattgcagtgcaggtcgtaggttgagcatcgcattcgtgcacgggtagntctacttgatggagatattgcaggtaagg

SEQ ID NO: 49543 - DNA, 910 bp, Arabidopsis thaliana landsberg
agccgatcttcgttgcaacgccttaggggatctgacgtcgatatttctcgtgaagcaaacacaattagagtatgcaaaatttagtgttcattttaatatattctatctattatttactaatgttgggttttcaatatttattgttttttttgttgaaaaatcgatttctttttttttcaggataccattgacatgacagaaaacggtggtgaaactaagatgtctgaattgtttcagagacgatacgcatatccgttaattgtaagtattttgaactaatgcaaacaattatattgaatagcggttgtgttaaaacaaatatgattgttcaattgctttcgaattagtttttaaacatgaaaacattttaaataattcttacatatatatttgtattcagatcggagttggtttaatgtttttgcaacaattgtgtgggagctccggtgttacctattatgctagtagcctcttcaacaaaggaggtattttaattgataatatgaatatttcatctttcagttcaatccaataaatattttgagttcaatccatttaaaaaatttaacttataattttttattttcaggatttccaagtgctattggcacatccgtaatagccacaattatggtaaattttcaataataataagaaaaatatactttaaatcactaaagaaattccaatatgaaaattgaaaaaaattatttgactatgtttaggttccaaaagcaatgctggcaacagtcctagtcgataaaatggggaggagaacgctcctaatggttagattataatatttttattcaatcaattgtattattagttatgactttcttcatgagactaaagacaagctaattttatataaatttaaacaggcttcttgttctgaatgggtttgagt

SEQ ID NO: 49544 - DNA, 544 bp, Arabidopsis thaliana landsberg
tggcgctgatgttcaacgccagcgcgcagggcgcggaatccatcgtgctcaagggcgacgggtggctttgagcggctgcgcgactgggcgctgctccagcgggattacctcgaccagcacccgtggctgactcagatgccgctgcccgggccgccgctcgcgccgaattccgcgcacttcgtcgagcacgcgctgggggccatggacggaaccggcctgtcgctcgccgacaagatgcggatggtcggcctgatcacgtccttcaccctgtccgatgccaagatgtaccacgacgcgcggcgagcggcagcggcggcggcccgggcgggcgcggggcagatcgcgggcgcggaacagtcggcggacgcggaacagtcggcgggcgcggaacagtcggcgggcgcggaacagtcggcggtcgcagaacagtcggctgacgcggagcagggggaggatgcccggcgcccggcggagccgtggacgtactggggcctgctgcgggaactggtgaccaggcgaccttcccgtgcctgcatgagctcgc

SEQ ID NO: 49545 - DNA, 839 bp, Arabidopsis thaliana landsberg
tgctatgcaggtatttgtaaacaacttatatttttggaaatttggactctaaaatatagaaaaggctataaaataaacactgtgatgtggcatatgtgttgtacacctttgaatctgacaataaattactcgatctagtgtaacttttgcatatgagattttcttttgtcgtctatatattactttgtttcaaagtttaataatacaaaaaaaaaagtgtctttcatttgatttgttgacacagagcaaagccaatgaggattcgaaacgttgtaattagtactcatagttggctgactttgtctatcgacataatgtgttgcttctctcattatgagattccattagtacaattttttttttcggcgcatcaaaacatttctattaaatcgttttttttgttctcatcgaatttggtgatgggttaaaatccaaaatctttagacgaaaaagcaatgatttattccattagcattatacatttcaatttcacattgaattggaaaagtaaaagaaaatgaagaagaggggaccagacaggaactggggtgatagagtttggtccatggctctgtccttgagcccattggtcacgtggcaaggagtgtcttactggtgcacttttatgaaacaaccatgagtgtcacgtgacgtaccattggggctattggtccacctcaacctcattggagccatgtcattacatttatcctgtttacttttctcttaataaaaagtttataagattacaagtttttgttagaaaaaaaacacacaaaagaattagcctagaaactaacaaaaaacaatgacactggacatacatttgtggtatgctt

SEQ ID NO: 49546 - DNA, 530 bp, Arabidopsis thaliana landsberg
cataccccacattaatatcatcaattaactgataccttcgtcttatgagacaatctttatttttttaattatttgtttaaacgtaagcccacaaccttcatactagaatacatctgacgggttactttaagaattgtcacactaagtggcagatctacagtgttatgttggtgggacacatatcctaactcattgttaactgtaataagtagaactttgtcattgttatcgggtggatcatttggtaatatatacatcctcatattacggctggtcaagagttctgttttttgaaccgccacccacatggtgtccgtttttgacttgcaatatcttagtgatgatattgaataattttaggttcgggttatcttcgacttctgttaagactcctctttttaagagagagggtcagaggcactggcaatctttaaccctattgacactccatcactagcactaaacacacacgatcacgaacccgaacacgacacatgcatggcttgaccgcacttaacccgaaagcgatc

SEQ ID NO: 49547 - DNA, 739 bp, Arabidopsis thaliana landsberg
acctctgttttctaaactttcttaaaggaaaaaaagttaaatatatatgaccatgttgagaatatgtcactgaattttcatttgcctattgtttatttttttcttcgtcaacttgtttttgtttttcttaagtaattttgtcgtcaacttccatatttagcattttgtagattatatactcttattttttttggttgattatgtactagtctggtttgacataataaaaagaactacattttttaattgaattatataaaacttacatatatcattaatatatatatcatatagtttttctttatgtaaattaaaattttaaggtccatggttttttggtcctggcgggtaaaagattcttgggagaaatttgtccacatattaattatagggtccccaaaagataaagccagaaaaaccaactcttgctcttaatagagttactggtaatagtcatacgggttgtatcatataagtataagtttgaagtgaaagtgagtcaacaaaatgtcggaaaacctaaaattagatcaagatgaaatcttttcttgtgtatgaaactgtgcataaaaatagagatacaataataagtgatgggtccatatgaggccacatgagtttgcatgtagattccatagaatcctaatccttttagctttatgtaaaaagtgaagctaattacttaataattttgataactataaaataggtgttggaagtgggaataatagtacattca

SEQ ID NO: 49548 - DNA, 977 bp, Arabidopsis thaliana landsberg
ctatttccgtattaaatgtgatatatacacaagtacaattacttttcattgttaaatatgatcatcattagaaggcgtggcccattttgactagtcaagctatacagataacaaaatgaatatgatcagaactatattggtagcattacatgttgtgtagttcacgagcgaaatagttctttcatttgcccatcaatcaccacaaaaaatatccgaatttgcagaaaatttctcgtaattaccttgactgggccatatcatatgaattacgctggattagaaatatatattacggaaacaattactcaattgaaatatatgttgtacaaatttttaattagcgacgaattatgcgctaacacaaaaaggttaaaaggaaaattaaaaagtcaccgtcctaataaaaaataaatcaaacaattaggtttgtcgatgaccaataagaaactgccatttgtcaaccaaatacacttccctttcttgtccctctctcctctctgtctctcttctttctctctcctcgccactgactttgctctctctgatttacagaagaaatttcaaaactttcaaaagctcaaatcttttttccctttttcgattatattcatcgtcgtcgagaccggagatatctttatctgatcaaaagtttcttttttccgatcgtcttttctctcccagagaaaaattaaaaatcgctcctttagattatttcctttattttcttggcgcggtttcgatttcacgtttctgggttttcttcatcgacccagaaaaacaaaaaaaattcaaaccgcaacgatcaggtacgaatcgaattttttttgtcaccatcgcttgttttgaagatttcttcgtcggtggaagagacgcttcttttattctaagattagcctctttggtttgtaaaatctgtaacaaaattttggggattatgtttaatttaaaaagttaccaatctttggatcttggtttaa

SEQ ID NO: 49549 - DNA, 801 bp, Arabidopsis thaliana landsberg
tgagaagagctgataaagaggtgaaggatctcttatgaagtttctctagtgtgggttcttctatttgtttgtgaatgtgttgtgtatggtttattgtattcgactctaaattacaaaacgtttttgactcattaatattaaaattactactaatatagtaaacgatctctctctcttttttgtttgtctcaataacttgttagctagcttttcaatctacttctttaaaaacaccttcttcatattttgacccgaatgcataacttatgttggttaatatctatgttcacgtagcttcgtaattcgtatagtgaatttgtatcaatggcagtaatttagtacaacaagaacaacaagaattttgctaccaattctagaatataagaagattgcttaacaacaacaagaacaataaagaatcactctctttatttatgctttagagatctcaaaactaaaactctcaagttctctcaatcccataaactctcttaaggttatgtctaaactcgacatctattaggaatacaattatatttagataactgctaaatatataaatcataatcctactttgaatagcttatgattccagctaattcaagcttatccaacaatttattattcgagttgctaaaataaatattttaatatttttatattttgtgaaataccgcaagtttgagaaaattacaacgactatgaatgtaaatttgatttaggaattatgattacttattattttattgtgattaaaaaatcccttttctcttttgcattcgatttttttttctttatttt

SEQ ID NO: 49550 - DNA, 1068 bp, Arabidopsis thaliana landsberg
gaaaaaaccccgacatgaaattattttaatttcaacgtccatggtgaatcttaatctttattaggttaagaatgtttcaatggacgacatccaacaaaatatcgacatgtagaatttgattttatcgcctatggttaatctttatagcttattgggttaagaatatttcacacaaaaaaaaagtaataagaaagtcaaacagccaattaataatgagattaacaataatgatgataacgaaagcatcattaacgacgtattaacacaatataatatgaacgtcataatgatattttatataatttataatataacatttatacaatataacaggaacgtacctttatagatctaatcgaattaccctacacacaaaactttatagtttatcttatcaacttctttttggttagattttgttattcgaattaagaataactttatagcttggatcgacttgattgattttttaagattcacagtcttagatttacaggaatcgttacttggagaaatttatatcctctaatatctttcacgcaaaaaatgaaaattattaaagcacaacccaaaataaaaaaattaaagcaattaaggtggacacacacactttccagccatataacgcaataatagatttttttttcatcaagacaaaaaataagagtttttttttttatatatatatacactttaacatcaccatctcttccaataatttcatttggatacaacaaacaaaaaataagagaaccaaagaaattgcagaatgaacaaaacaaatttcaagattaattatcacaaaattaaagtttaatagtggcttttgctgaaatcaattacaagatcaacatgagctcataagaagttgttctaaatactcagcacctaaatcttcaaaaaccacaagtgtaccactttcttgcttcacaacactctgcttactactagttcttgatgttgaagaagtagacgaagaagaagagcaagaagaagaattagaagaagaagaagaagaagaagaagaggatcgctttttccctctaggccggtttcgaagagaatgtt

SEQ ID NO: 49551 - DNA, 1051 bp, Arabidopsis thaliana landsberg
actaactaattcattcatagactgttagtcccgatacatgaattttatctatatcgatctttgtgatcgaaatgtttgtttgacgaactaaggcaatctaagactactaagaatatgctatatatagagcctaatttctatcacactcatcttagcctttggtgaacaataatatagaataagtgttacttgtaatttgttggcatgttaagggtataaacaacaatttatctcatttataggagtaatagttttctccctccatggttgatattaatatgcatccacatattaaaatatacaactatttatatatagagctgtctatagtagaaaagggccgaaatcaattagctgtgaacagaaaagaaaactttttaacatatgcaacaagatttaggtgagggtttgtctacatgttccggggaagagagagagagagaatcagaagtgtatcttgatctagggttcacagacaaaatctccatgctttgaactaagcagaattcatctggtcttttatctctttcatatcaaaccaaaggattgatctatccatatcgtccaaaacctgtatctagctaagcctagaacttctctatcgtttaccacttcctttctatatttcttctgaatttgtaacataagaagtaataatgattccaagtatggagggaggcgggaagactaacagagaagaagaggaggaggaagaggaagaagaagaagaaggtgaagagagtaaggtttcaagcaatagtacagtggaagagagcgacaagaagactaaggttaggccttatgtgagatctaaagtccctcgactccggtggactcctgatcttcatcttcgctttgtccgcgccgttgagaggcttggaggtcaagaaagtacgtccatagctactaacttcatctttcatcacctcctccacatatatataaagcataagcaatttcttagttattcttaggttaactatttggtcaaaacctcatgtgatttttcctttttttaatgtgaatgtttggcttatgtatagggagcaac

SEQ ID NO: 49552 - DNA, 561 bp, Arabidopsis thaliana landsberg
cttctcacttaagttctcttttatactatagtagaatgctatatagtccggtaacaatttaaataaaatattcttaaccaactttcccaagatgcaaagaaaattgattttagaacctctacttttttggtatctactaatactatatatctaatcattatataaaattctcccaccaaattgatcaatgggtcatcttatctttatcgccttttgcctttgtgaccataaaagggtttgagaacttgcatgacagccgaaaaaggtgtgaatattcattgatattaacgtggcattcctatgaacacatagaaacgtataattaaacttgctaatattttcatttcactattattttcaacatcaagtgggatattaatttctgaactgaagataactaagatattaaccggttcagttaaccgattccttgcattctataaatctgacgcaccatatttcttctcataccacaattactaattaaccaactcaaatcttggaactcaagaaacaacaatgtctgatatggccggagattcttcaacatcagaagataaa

SEQ ID NO: 49553 - DNA, 565 bp, Arabidopsis thaliana landsberg
  unsure (1)..(565): unsure at all n locations
tcagagttctaaagatcagcccgatttaggcacgggactacaagtgtgcgtttccgaaacttttatgcctaaacgnnnnnnnnnnnnnnnnnnnnnnnnnnnnnaaaatcggtcagtctcgtaactgagggactttcttgctgtacacccaaagtaccgccacacaggttcatgccggcaagcattgcgtagattttctgcacttcgcagcttccacggccgtgtttcggggtgtgagctaaatgccacgggtattcaccttctaaaccgtcgaacgaaaacccacgccgtaccgcacgaccgcgaagacgctgttgtggtcggtcacgccggcgaaccggccgacgatgtcaaacgccagagccgcgttgacgcaatcccacgactgcaaccggggcacactaccgtcacacagccgctgctccccaaacaaatgaattatccggtgccggcgagagtatccggtgcggcacccaagcccatggaagcctgccagcagtagcacgccaaacggaacgtcagcgttcagtgacacaaacctcggagaaggcccgtgtagcgtgtg

SEQ ID NO: 49554 - DNA, 602 bp, Arabidopsis thaliana landsberg
aatcaatggcggataagagttttatgtgtcactgacggatagaaatcacgtctcttctgtccacgaagatgatcgtgcaagaccgaagcgataagtctcttgcagaaccaacttttaagatttaaggttgcttgtcccttttttggctccttaattcttggattgatagagaaaatggatattgggattagaaacggatggagaactccgaagacttcagaaagctctggatctaatttcctgggtttgcttagatcctaccctaacaccatccccaggtgtttatactttcttagtttatcttcttcttttggtttattggatttgataggtcaggagctctgtttcagggagagaattcatatgggtaatgttcatagtggcaaaagagcaatggtgatttctagtttaaagaaagcgaatatctctgcttcgaggaagcagagaattaagctagagattaatggagaaaaggagctgactttcagtgagtttttgaaacacccatctggcatggaggctgtgatcaacgcaaaggctttgcagagttaccatttagttgatgatagtgatgatacttacaggttctttctttaactctc

SEQ ID NO: 49555 - DNA, 925 bp, Arabidopsis thaliana landsberg
aggtggatgggtccgtgcatcaacattctacattaatattgtagatattccaaatagtaaataaatattttttttttttaaataaatcatttacataccctttttggttagaacttttattgtgtagttgcaatcaaacagagttgtttattttgtttttgttccacctgccaaaaaaaaattgtttgttttaattatatcatcaacaaagattcccaccctctacaaattttattctgataaaactttttatctgaatgacaaaaactgtggagagcttggagatttatgtaaaatagacagtacactatatattgaggaaagaaaagttataaacatgctcaatgctagctaggatcatcagtcaattgaataccatgaatgatccagctacctacgttttggtagttgaaaacctagaaaatagagtcttccatcaaattcttgaaaatccgtgatacatatatagcaaactttctcccaaaacaagagtcgaatcaacttaaacacgaaaatctttttccaatcgattaatcttctcatgcaaagacatccacattattttgaaaagcaataagaatctcaagtcattttgactccatgtgttgaagacgtgattcatttccataagaatgcataacaaatcttctccaactcttcaagatatatatgtttaggatcggagtaggaagcttatattgaaacaatgaaactccaaaactaaagtgtgttattatgaatcacggattggataaaacaaaatgaaatgcatattaatgaaaaacaatattttgtatatgcttattagctacataaccaaatttatatagcaaaattaatatgaaaacaattgtgacaaaaaccgtaaataaatgaatttttatacaagttaatttaaaatgaaatagtggtaaatatttatttt

SEQ ID NO: 49556 - DNA, 865 bp, Arabidopsis thaliana landsberg
tatgatatatgcaatctttctgttgcggtgaaaagtaatcagtattgtaatgatttgtaagctacggctgtatttatttgccctctaatttttgtatagtaaattaagccttgtgtgtgggataatacttttaggtctctacatcatttactaattatttccgtttcaactcgttttaattgttatagtttgtaacacgtcactcgcgcaaatcgctgcgggtccttggaagtgttggtgagcccatcaatcctagtgcctggaggtttgaactctaatatctctagatttattcctgcggtcagttgaatgggaactatatttaatggttaaccgaatctttgatgtagatggttcttcaatgtagtcggtgattcaaggtgtcccatttcagatacgtggtggcaaactgaaactggtggcttcatggtaaccctctactccctctttatctctcttgaaacctcttgcatgctctctttctctcatgtgcatcaaattgcatcgcagataaccccattgccaggtgcttggccccagaaacctggttcagccactttccctttctttggtgttcaggtatgtgatttgtagtgcaaattaataattagcatattgcttctttctagagatattcttctttggagagggcttcactctcatctctatctctctgtgtatgctgcagcctgtcatagttgatgaaaagggcaatgaaatcgaaggcgagtgtagtggttatctttgtgtcaaaggttcatggcccggggcgtttcgaactctgtttggggatcatgaaagatacgaaaccacatactttaaaccttttgccggatattatttcagtggtaatgagatgcagcag

SEQ ID NO: 49557 - DNA, 894 bp, Arabidopsis thaliana landsberg
aaaaagctcaagatgactcagtccaaaaaagtatctctaatccccacagagcaaaaaccttaggcttcttctgacaaagcagtcataaggacgtacgggtcccaactagtgtagaagctgacacgaattcagaagatatctaactaactaactaaagtaacaaaaccaactcttaatattgccaatagatgatttagtatcatttattgagctttaccagaaaaagtaaagttgttgttgttaccttgcctttggtaccagcgacatgaataacattcatctttaaaatgtcttcttccaggtcaagtagctgccaaattaattacaagaagcgtattcaatcagaaaataaaacaaaaggtgcaataaatattcaaaactcttctagaatggggtggaaaagagaaaccttgagataatcaaagactaactcaaagcgatcctctttattgctcttatcagcacgacttcgtttcgtgatcaaagacgacaaagcagccaacgcttcctcatatgaatcacctcctgtcaccaacaaaaacaaacaagtgaactcgattcgattactgttatcatcaagtgaggaagagctagagaagaataagagaatcaataacaaaccttgagctgccatgtcgatctgctttcttaacgaatgaatctgaaacacgaataagagagaatatcagagatgccgaaactccgagattctcggaatatgagagacagagagcgaaagagaaagggaaacctgaaaagagagaggagatggtaggtgaggctggtggtgttggtagtgatggtggagccgaagagtgagaggaatcgagagttgacagagaaaggcagagctcaaacggcacgatgtggttcgaggtactatcgaaactgcaa

SEQ ID NO: 49558 - DNA, 1031 bp, Arabidopsis thaliana landsberg
ggttctttaaaattttggtagaaaatagacgaaatggaaaaacaagcttgacgtactatccaaaggttgttaaaactgatttacaaagttttttcatcttaaccggtatgtatacattatttccacatacctctaatttaggtttcattaggttatagtttaggatataaagcaacaaaaatgaaactataagcctagtttgattaaaatgatttttgctttgggttatcaatttttgtaatatttatatttaatatctaaacaaatctaacaatttgaagtacattttttgtgttttcttttgcttctattttggttcacttttaatttggtatatataaaacaattatttaaattatatagtgtaagtgttatttatttcggattttcgatatggctaggatttaaaatgtttactctgggtccaaaaacacatgtgctcttaaacaacattcttacattcataggactttcctttccttcctttatgtgggtcggctctttctgcccacttcacatgcacagagatcggacgcttactctactctggctcgatcatatcatgctttgctatttaagtgaaaaactatgattgaccaaacagaaagaagtacttttgcaaaaaaatagacacaaatattttgaatgtatattacacatatggaactgtacaatgaccatattctattccttcacttttttttttatgtatatatatttctcatatacattatgtggcataaataaatggttttcattttattcaagtggtagtgtggaaaaagctcttttacccaccatttctctcagtagacactatactaaataattctttctctttttttatctctaaatttcaatttgtaaaaaaagttacttttaggcactacaaattgacaccctctcccctctccttatccctcaaattcacttccaaagcctctctcatcttctctcctacaaaactctctctgcttccttgtttacacataccaacaaaatctcttacaagaaatcttcatctttgaacc

SEQ ID NO: 49559 - DNA, 724 bp, Arabidopsis thaliana landsberg
cttagtcgttttcaagcgtgagttgtaccggaactaaattagtataattcctatccacttcctataaattacacatattgcaattaaaaatgttcgagttggtattatatattgagtattaaaactaataatttaaatttcaagacctataaattatttttatttcctgaatagctcagggaatcaaaaattaaaatgatgtcgacagaatgtattatttttcctagtaaagcatattctatcgtttaaaccaatcagataacaagaattcaacgaaccacttcgatttaatattccgtctgcgatattatatccagttgaaagaatctttgattttatataccatttgggatcattcgtttctaattctgtcttggaacaaactcatatttgtgaacaaatttgaagaatgcataatatttgttgctttttaaacggtatacaaaagcaaagtggacaagttcacaagccacaaataggatccaccgatcagaggaccacgaaagaaaatcactagaccatcatcgtttttttattttgggcaaataccaccatcatttaattagtggttttaacattaaaacttacaagtgacgttataaacattgttggacattttttttattacaagtgatcattaatttaaaattatatgacaaggaatatactattttcaattcaaaacttttaaaatgtgtatagacggagcattacaattttttta

SEQ ID NO: 49560 - DNA, 906 bp, Arabidopsis thaliana landsberg
tttgatcattttaaaaagtcaactatgcccgttacattttcatcatccctaacgttctgaccaaaactttgtaatctatattatcgccacgtaactcattgatctaatctatgaagcaatatttgaccctaataaaacatcactattgtggtaccaactggtatcggagattttactttttaagccaactgattaatattttgtcacgaataatttgcgtttatatttttcaaaatcacattttagtttttacaaaaaaaaaatcacattttagtgtttcttgaatagatttgatcacttttcttaatgtatccttcatttttttccaattaatcaactgcaattttggccgatttagctacatgtcgaaaaacactaatcgatttttcttccagagttttaagatgctttacgtgtataccattcaccttatattagttttcattttgttttcgaccaaaactattgatccaaattattatagctaggtacgatttgaacaaactttgattctcttaccaatcatctacaacttaaaaccaagatagcttcgctcaaaaagaaaaaaataatgacaacatgtataatacatatatgttcaatggaccgactcatctacactgttattcaaactaattattttataaatgattactaaatcagcttattaaattcccataatttctgcgtcgtgtgccgaagttgctcgttacaattgttattcccacaactttttttgcctatatatacaaaccctttaacatcaaactcaaaacacacaacaaacacaacttctacaagactcaaatagtttcttatttaattactaaaaagaaaaatgggtcgtggttacaatttgctattcgttctagtaacgttttagtattggttgcagctgtaaccgca

SEQ ID NO: 49561 - DNA, 559 bp, Arabidopsis thaliana landsberg
gagaacgtgaaaatattgctggccttattgatgcttatctaaactcatatattttctttgttttctttttttttcctttaattttacctcattacctcatatatttgaactatatattgtgttttccattttaaaaagtagaagacatgggaagagaagaagatagaagttagatagctggatcttcgagttttctttcacctgatttggtatctaggaaaatgttgttctcaagaagatggaagattgtaacagtttggtgagaagcctggaatttggatgatgtagatgattcacctctcgataatcacatattctacatgtagaatggccaaaagatgattatattaactattaagaaaacatattgaccttaacgtatgtagatatatctctaagaaattatgtaaatcatgagaagtaacacttactttgtcgaagtcgtcggagaaactaaaaccaatataatcttttttcttggatcttttcttttttctggaatagaccaagatgtggttcgtttaaggaaaaaaatttttaaggttcgcttaaggacgtt

SEQ ID NO: 49562 - DNA, 600 bp, Arabidopsis thaliana landsberg
ggaaagtaacagaggttgggtcgatgccacgactcttgctccttccagagtcggttctggtatgatcgttgccatcaagagattgaattctgagagtgttcaaggatttgcagagtggcgtgtaagattctttatctcttaatttccaaaactacttttttgcgattttgacttcttcttttgttggaaaacaaaaaaactagcccaattatttacgtaattcgatcaagatgaaagaagagttgactatttcaatcaagaaacgacttctacagaataatttaagaattataaagataatttgttttaataaacagatgatgttttctcctatgataataatttttacatcaaattataactttttgaaattgaagacctcgtttttttccatttgaagatacttttccattgtctgctattgaattcggtgtagctaggaactttccgttgttaccggacttttgagttggggacacgttggtacatgttattagctcataacattgtagtcaaagtataattcattataatgtaatataattaatttaaaattagtaaaaggttattagaaagtcaacattatttctctgttgcctc

SEQ ID NO: 49563 - DNA, 1194 bp, Arabidopsis thaliana landsberg
  unsure (1)..(1194): unsure at all n locations
gtttgatgcactacatgggtctaagtccaaaaaagtgtgtgatattttgtaagcttagcggagctatctcaagttttgtcgtaattcacattcctaccggtccaaactagtaaaccaattctgaaccaaataagagagtcaagtcaagtcaactaattgaggcatatttggccaaatcagagaagcctatattttcgaggtataactttgttgaccctagctcctccgtgctttagctttaagcctttaactgaagtgcctaatcatatgacctagttgcaaattgttttaaaaaaattcatcactacttatccaaaaaccccaacataaggatatatttctttcttttttgatcattgaggtagattttgaatcgagattcatgaaacatattactccatgaagcaagtgaggtatttttgctatttactaaagactaagagtgatcctagcaactttttgtaaatgactaaatggtgtggtactcttcccagtctaaattcacaagacaaaatttgttctacataaacagaccatttatcacacgtttcttggtttaacgaacttttatctttttaatttttaaaattgaatatacgggatacggccgccggcgttaataatagaaacaacgaacttatgtatgattcggatacagttgcttacggaacactctcgccgccgcctctcttatgcatgtatcatttacatttgtatatattttattggtatatatttatgaatactttacagtttaatatatgcatttggagaatttttaaagataaaaacaaacaaagattctccatttgctcatgtgtccgatgagtgatgacttagtcataacaaacttgatacacacgtgctttaattgaagatgcatgcactttgatgatcgctttctcttactttagtttcaacgggtaaacgccttgaattataaagaagtttctggatctttccaagaccaactaagaaaatttgatttttctaaaaaaacttattgtattaaagtaataatgtattacattgagtaaaaaaaatactattgttttgccattatgtaaaaattcaatggaagtatataacgtatcatattaacttctttttttttaaacntgtatgttattaacttattaagttagagtggtaaaaaatgcaacactctctgttagatatctgagtcttgtaata

SEQ ID NO: 49564 - DNA, 1003 bp, Arabidopsis thaliana landsberg
ttgcgctggagacacgcacattgctgttgtcgttaggccttgtttgatcggactagagatcgtagtaagttgttgtaacagagacgaatcttgtctatcaagtgttcttcaactcctggctcaagagcaatgctttaatattgttagttgcatctcaactagactacaccaaagattcatacacaccattgcttctgaggtaattatctataatctatcttcgatctgatttatgaagaaagagggagttaatctttatattttatgtgatgagagataaatattaatattttgggaaatttcttaaacttgtgtaggtcgaggagggaatagaggtttatttctcagagcttcaagaaaagataatcaaaattggaacctcaagagtcactactcgctagtcagagtttattaaacctaaaaattttatgaatttacgtcctaattaagatatatatcctcaaccattcccaccaccacaagcatgttgtgtttttagtttttagaagtttatattgttcaggatgtggatgctgtttgaattgttgactaatacaaaacaagtttatatgaattgtttttttcctataacaagttgtatgaataatttgattaatgcaaaattttgtgaaatgacattttctaacgatttttgtaataatgaaatcgtataataagatagctcatattcattgatatttttttttattacggtgtaaatattactgaattatcgatacaaaaacaaaagtatgttgataaaaaagttgttagatgtatcatgcatttatgcaatctatctggtgttaggttgtggcatcttttgcttgcataataaaacatttttaaaacaatatcttgaattattttaattatcgcgagacaattaagaaaaccgcaacatttaaatatgtcttttttgcctcaatataaatactaatgacagatattaatattcttagaaaaacataagtattgacagataaataattaattaagatgc

SEQ ID NO: 49565 - DNA, 973 bp, Arabidopsis thaliana landsberg
  unsure (1)..(973): unsure at all n locations
acaggagcagaaccagtggcaaatcgcttatcattgattataggttcggaatctggagtcaatggcgacgttggaggcacgcctccgcatcctacggaatttagggtccgtgtgcgccgnnnnnnnnnnnnnnnnnnnnatcatttcgtttccttcctctgcgactccactggatcctttagcttcttcaatgctctctcctttcctttgcttcttattctttgaacccatcgttagactgattcaggaacaacggagcttctagggttttaggactctggtagacgaagaagaatcggaaaattagggtttttatatgtctgctcaaaaaaaaaaaaaaaacatgacgtcatgtgtaaaaaagagttatctaaaaaagcctgcgtgtcactagacgaataaacttactactattcacattgattccgattggatttggaacctaaaacactaaagagattaaaattttgaattcttcatcatgacgacgacgacgacgattcagtctcctctctctacacgttgaatttcaatcggcttcacgaaccttcaacctcgtgcggatcgaaattcgatcagtttgtagtaaccgacaagttccgaagatttttcatctgctggatttcgtcgatcagattgaaaccgagcttttcaatcaggtgacttggatatttctctacgttttgctcgatctgaagaattgggattcaaatctagtctcatagatcgattctgattaaactcgtggagatccaatctctatcactagttcgattggattgttgtttgttatcttcaaggcctctctgtgtttgtgagtgagatggtatatttgcatagctcaatctcggtctgcaattccgtcgacccaatgatcatgtctcactcctcacctaaatccagaaacacccgtaataaatcttcatcgatcaccaacctggttccaaattccctgtctgcgacggatctcagt

SEQ ID NO: 49566 - DNA, 575 bp, Arabidopsis thaliana landsberg
tgaaattcatggcattgtttccatttcaacgataaatatacttttctaagtctaattattttaaatttaatacctaaaatttttcgaaatcaatatagtcacatagaacgctctcatcacgtaactttgacaaataagtataggacaacgtacttgttagggatttgtttaatagcaaaactatgaaaacaaaaacatagtacaataatcatttattgggataatcaagtcaccaattgcctcaaaaccaattattttggcggtttcttaatgatttattcgagaaaatatcctctctcttttttcctacattttggctttttctgcattcaatttttttaaaaaaaacattactcttcgttgggtatataaaacaacaattcaccaaactaattactactagtacttgttttgttttaaataatgctattttttttctgtgacttttattttcaaatctgactatttaataatttcatttactacaataattatatgaattatttattgtcgtaatattttttaacggttatcgtatctaaaatagttattcccagaatccatgtagcttatga

SEQ ID NO: 49567 - DNA, 1013 bp, Arabidopsis thaliana landsberg
  unsure (1)..(1013): unsure at all n locations
aattgaacacgattactcgagagatgggtgatgggaataatgcaatcattcgtcatactatgacgattttcagaatatgacaaaatcacaatgatgtatataaattacaaagtctactatttcaatcagctgatttaaaagtttcgtaatcgtagttttatggaaaaaatgtcccattttaaacatgtcactatactaaaatttatttcaacaagggtgtatacatatttgaggcgtgaataaacataaataaatcaaatctacaaatccaaaactagaataaatttgtccaaaacctttcctaaatagtaattcagattacattcattgaaaaagagataagatagtatatatatatataggaaaaagtatagtattcatgaagagattgtgtacataaatgacttatgaggctatctaataaggttaagagtaattacaaaagatatgattgagttacctaatatgagtaagggtaattatagaagagatattattattagacgagattgatttaaacttagctatagcaagagaatatatactttaacaaagaatatataaaaggagaaatggtgccagctaatttaagtcgaaggatcacaacttttctcttgggtcaaagctgtcattgctctctctctctctttctctcatatatactgctctgtatctctaaaaaacaacacttctctctctctctctctctctctctcttttctcaaatcttggaggagaagaagcaaagaattagactactctgcaacaatggctatttattctgtccataacggcgacaagaaacattggtggttcactcacaagaaggtaactaaaacccataaatcacttatctttcttatagttcctcgatgatctctataatgggttcagtcaaaagacattaactngttctctatatttgtcagattgttgataagtacattaaggacgcaagatctttaatggagagtgaggagcaaaacgacgttgctttagccattcatttacta

SEQ ID NO: 49568 - DNA, 708 bp, Arabidopsis thaliana landsberg
tgtggactaaactagatgaaaaaactattatattacatggttgagtccagtttatatactactgcatgtattacatttttgttttcagtttccacaacacacagattcgaggataaacctacaacgacccacctctgtttattttaagataatttatttttgtcgacgaagaagacttcttcaggatttatatacattatttattgttaccactatcgcagctctgattatcattgtttttttctttatataataataacaataaataatggtattatttataggcaataaaggctcgacatgaaatttgaaaggacccaacgttaggaaaatcgtaatgtaggaccacccacccactttgtttatattttcttctcttctttgggatcactctcgtgaataagaagcgccacaaggagcgttttgttcatttttctctttcagcttcataaaatactacacacttcctcacattattcatcctctcttttcccttttcttgtgttcatataactcaaaccaaaatataccgtctctatctatttaaatcccaacccatttcatataacgtcaaagaaagtttcttattcagaaaaacaaggcgatggattttgaatttgatgatcaagaacggttttgtgcgactcctaagcttcctttgttctcgattccatttaacagagcatgtgacactccagggctagcgac

SEQ ID NO: 49569 - DNA, 473 bp, Arabidopsis thaliana landsberg
  unsure (1)..(473): unsure at all n locations
gtgatatgcctaatgcaaggggggtgaaagttaatgttccaactattgacttcctcttgatangacaacntgtataatcgaacgtagaatatttcttgctgtctgcttcaacaagtttagtacctattctctctaaatagcataaaaattagtggggggtccatatcttacactctttgattggcacaacatatttggctcatccatgcatgtgttaatctatgtatgtgtgtaacctttcctgtctgttctgaatgcaacataacatgtcttcagtgcatatttgtatgtattgtttgtgtgtttatgtgtgcatacatgtacatatttacatgtatatatgtataagttcgtgaagcatatatgcatctaatgtttggctgggttcttacagtgtacttccttgaatctactttagaggtgagtacggctctaaattttatcatcattcatattaaggtgctggatgcgag

SEQ ID NO: 49570 - DNA, 526 bp, Arabidopsis thaliana landsberg
ttttttttttttttttttttttttttttttttttttttttttttttttttttttttttttttcttttttttttttttttttttttttttttttttttttttttttctttttttttttttttttttttttttttctttttttttttttttttttttttttttttttttttttttttttttttttctttttttttttattttttttctttttattattatttttattttttttttttttttttttttttgctttgttttttttttttttgtttttttttttttttttttttttctttttttttttttttttttttttttttttttattttttttttttttttgtttttttttttttttttttttttttttttttttttttttttttttttttttttttttctttttctgttcttttttttttttgtttttttttttttttttatcttttttctattctttccttttttttttttttttttttttttttgttttatcttttttgttttttatttatctttttttttatt

SEQ ID NO: 49571 - DNA, 1007 bp, Arabidopsis thaliana landsberg
  unsure (1)..(1007): unsure at all n locations
caaagccattccatttacgaggtatgcccaaaaaccaattgtttttttttttcatcctccataattagtttatggattcagtttttgaaacttcatatgtcgactagagcaagagcgtgatatttttatgtagtttttcaaaaattagcactgctgcaatgaataggtgatacgagagccaagatcacacgtttaacctttaacttataaatcatcataattaacaacacaaagataaaaagagaatgatataaattcaacagataataagagatcttttttaacatgccacacccaaatctgaatataatgcaacatctttaaaagaaattgtattacaaatcagttcatattggtccactaatgaaatgattcattggaagaccgatgtctagaataattttcaaggcatgtgcaaaaagttggattttctttccatctaaacctttcaaatgactaatcattattgaaatagaaatgaaagaatcccggttacaaaagaaaatcaaattacatattttaggcatcatataaactagtgtaacttggaaaagctataacaaataatttaaatttttaacaaatgtttcaatttgtgttaaaatattcaaatttgaaagtaaaatgtaactgatattttccttatgacacattgctcgaccataatcaattaaataatatattcagaataacgtctttctaagacatgaaaaacacgtgaaccagagcagtagaaaaagtgtgttttacagacaatgataatcagtgttctagactaaatctttttgtttcatatagattcatagttatcaatgtctggttatgatacattactcaaatgtgaaatcacaagtatgaattaatattatatttaaggtattttaaatttcttagatatgtgtaaaaaaatatttaaaacacagatcttgaaaaaaaaaagaacataggtaccttgtnatcatcggcattttgaccaattaattagtgcatgtatcaattaataacat

SEQ ID NO: 49572 - DNA, 446 bp, Arabidopsis thaliana landsberg
caaatcaacacttaacgattacatttaaataatctctaaaaataaacaatatagttaattttagaataaattcactcggcgtacgtgtctccaaatctcaaaacgtttatagacacacaagattcataacttatactctataaagaaaaacaaaatgcaaagtgaggggtttggttgaagtggttgtcttgtgaatattgaattgttgtattaaattcgtagaaaattagtaaccagtacaagcttttgtgggctgataaagataaacacgttgagttagtaatacgcaaaccggtaatctacttctaatcaattaatttaaatgagttttccaggcgtttattataacttcaaagtctcgttttccgacaattaatatattgtgtgattaagatgaaaataagacaactacgacgacgagctagccatactcttttggaagcgaa

SEQ ID NO: 49573 - DNA, 559 bp, Arabidopsis thaliana landsberg
tcctttgtttttttttcaatttagatatctttttcgaaattcctgatgatgagaacatcttttatgatcctgtagctagtaatccagtggtaagcgtgtcattttgatcaagtggaatgtcatgtatatgtccatagttgataacatttcttagcttggtataagcaccatgtccaacacctattaatcgaagtttcatcttatacttgtagaaagccttttttggaatggatgtcccgcgatacgaaaacacacggcaccatgaggaatataacatttcatacattggtaatcttgaccaaattatttttgatgaccattatttcgaggtaggttggagctgttgttgtagtctcttagttttcttgcaaagcatgccaagtctcttgtcttattaatgctctgattactttgaaatatgagtagattatggattctgaagctagagatattccgatagattggggaatgcctgacacctccaacggtgttcatcctatttactatgccaaacacctgtcgaaggttatatcctatgcaatagcatgatgagaaatct

SEQ ID NO: 49574 - DNA, 526 bp, Arabidopsis thaliana landsberg
  unsure (1)..(526): unsure at all n locations
taaaccagaagttacatgttctataggagaccatttcaacgcgtgaacacaactaaactttgtattacctgactacagatgcatgactgaacagtgaatggctactttgaagctgcttatgattggattggtattgctgcatagtgcataccctcaccaaagaatccagcgccacaagtccatgttatttgcaatttagaaacacatgcaaatctaaatactatctccatcccagaatgtaccacattcattaacttcacatcttgaccaaatatatcagttattgtgttatttcacacaaattaatacagacatcccaaagctccaaagcagttcacactaactgggaccagcaaaaatcacatcaaacttgaggaaagacactttgcaccttcaagaaaaatgtactcagatttattgttgttggaatcagaacatttgtaagggtcctttgtgcataatgcatatataaagtgtgtgtgtgtgctggagaagacacatagaaattaccccagnaaaacacatg

SEQ ID NO: 49575 - DNA, 710 bp, Arabidopsis thaliana landsberg
gatctttctcctcagatcccgctctgctttattgatgatggatatttgcaggatagcgatatatactcggattacatcggatttccacatctggaggaacggagaaaggtcttgtgtttatcggctatattgaattccatcgaaaatctagagacttatcgtgactcttgggacgatgatgatcttcttcaagaaactcttcaagacccttactttacccaactttcaattccttctgtttgataaaaacaagatttatcttttgtctaaatgaataaaaacgctaaaggtctaaactttctgtagtatatttgtatgtaaacttcttttttgaagtaccatctagcttacaaattcatcttctttttgatgaacttgtaaaaagcaaaaacccaaaagtttcactgttttagtatatatctcctatgtggtgtgattactgtaactagactttgattcttcaagaatctgaaagcaaaaaaggtatgtaagctttggtattagcaggcaggacttctgatgcctcttcttcgttttgttacggttccccaatcgattaccatattttccatcaagcttgagtgagcatcattcgtctcagtagcttcacttggcctttctatcttctgtagaaccttagaggctttgtttccgttaaaagtgcttaggctcgcgagaaactcgttgtgttgttgacgctttcctcgact

SEQ ID NO: 49576 - DNA, 306 bp, Arabidopsis thaliana landsberg
  unsure (1)..(306): unsure at all n locations
catcgnnnnnnnnnnnnnnnnnnnnnnnnnnnnnnnnnnnnnnntgggtgcgcaatcccctacattacttcgaattgatgctctcagccacaacaggttttcccactaccagagatgcagtgatgtcctccatatgatgactatgatggcattgcttactgcgttgaacaattatataggagtgtcatatacatgtcttcatagagtcaatacagtcgtcatctcatcattgacgatcttaggcgagttttagctaatgataggagaggggattccctgatatgctaggaagtctatcttggtatc

SEQ ID NO: 49577 - DNA, 782 bp, Arabidopsis thaliana landsberg
ctatactacttctattccacaatgagctctttacacaagatttgttgtctctaccaaatttccttggctcgggctactgaaatatatgcgctatttcgcattgccagtctgcagctgttacttctgcttctatgtctacgactgctgttgaggaaccctttcctgcacattcaaacacttaatctcaccatttgatatacaagagatatggttacttgatttgcgcagaagtaaaacaaaaatttgggtaagtaacctttcttaggtttagaagaaaacccatttaagtcttgtccaaaagcagtagtttggttggagaatttcactggttccttaacaaacttatcatccacgactgcattttccacgataagaaaacacaatgctaaatgctttgaaaagagatatacttagataaattggaaaaaatggaagaatcatcttattacctgagaatggttgagtacagaaagggcaaagctgaacttcatcatccatcgctgacctgcagacattttgatattcaatcaagctcgatttggcgaaacaacaaaaacaactgagagggatttgattcttgttatatccttacttgaatatctgaaactcatttccacaattaggacactgcacaagcgtaaacagagagatgaaaaaccgcaaaaactagctaagtggaacatactcttgacggatttactcaaaacacaagtgctagctagctaacttatagtcacgaaactgaaattcttgaaatgcttttttaagctaaagagacaagt

SEQ ID NO: 49578 - DNA, 495 bp, Arabidopsis thaliana landsberg
caagaaatagatctaacaaatagggattgtagttggccactatgaatgtttttaaatgacaagaacacatagcttttttaacatgttccaataattagttttagacatcgttttacagataacccggttcaacctagaaaaatcaataggcaaccgaatcacgaaacaaatattctttggctaattccaaaaataacatttttaaaactatctttgtatagcagattacataaatattttcttggtgtgtacatacaatgaatgtttagacggttatggtttatttcttcttttggaaaataatcgtagtttagaataaatatcggattcgctacataaatgcggtatcaaccaaatctgcactaaatataaatcgatcttatccatcaactaaatcgatgaaatcattaaactaaaaactattttggataaattttgatgtattatcataatttaattataacgagagaaataaagtttgtatgtacaatataa

SEQ ID NO: 49579 - DNA, 950 bp, Arabidopsis thaliana landsberg
tgtgcctgcacagcattttggagcacaacccttgagtaatcaatcattcactctggaaatagtgaacaaaaagtgaaacttcaagataatattcatatcatataaacagagcgagacagctttcttatacataactaaatgaagcacctttgcttttttgccgtaaagaatggtgtgaagtaagaagaggttgtcatcaggttttctcttggacagtttataagcaactgaaacagttaacaactctatcagactaaatttggctttcaaagagtaacaccaaatctaaatctaataagataaagaacccaaatcaccaaatgtgataaattaacataccatttggaatttccttaagccgtgttccacgaccctgaaacaaccaaacgaaactagaactattcaatgtccaaaactcaacccaaaaattgataaaggaagcaactttacatatttatacctgtgtaattgacagaggcttgttcccggaggatcgaggaggagtatctataacgtaacggccagtcctcttcctctcccttataggtctctcactgactggagtcaccggcgatttaactttttctccatcaatttcttctcctttctcctccatggcctcatctttctctacttcatccttcttcttcgtctctgtgtccttctcggtaacagcaacagtatctgctaattgtggtgttttcaattctagggtttcagtcgccatgtggagacgacgactaactgaaacagtggtgaataaaggagaaagctgatgggagtgataaaggagaatcgaatcaaagggtaaaccaaaaaaaaaaaaaaactaaatttcagagcttttgagagaaattcgaaaacctaaaatttggggatttcaaaaattttggtgccaaaagaggaaactcaaaggcggggctctcgctcactccccaatttcacagcta

SEQ ID NO: 49580 - DNA, 1127 bp, Arabidopsis thaliana landsberg
gaacgccacgatcctactttttttatatttcctagaaaggatgataattagccatgttcatcaacgctagttaataccgtctatagataggttgacaaaatcgtgaagaatatgacgcaagtatagttttcggaaacactaacatcaaaaaccaacataaaaaaactgtcgcccaaaagtaccagtaatagtaccaattcacttgccttagttaccattatcaaaaaccgtggtattgtcatctgtgattatgcaattggataatgttgatattctacaagagttagcgagtctagcaagttctcatattggagacgggtttttgtttccgtttgcatgcaacctagatttttttaatagtaaaatgtggtatttatatttatatttaaaaaaatattattttgtctaaagaaaatcaaatatggagctatatatgatatctgattcggaaaacttttttttttttgtatgaaagttacgtttataccgttttcatacagaattttaggaaaaatgatagaagaaaaagactgaaaactataagaaaggaaacaaagcaaagaaaaacggaaaatgctttaccaaaacatgtcattattgtttctaagagagagaatcttttaaaagaaacgactataaagagattccattacgcacacctgacaccaccaactccaaggcaggcaccaaccattgagaaaataacaaattgtaacttttgcctttcttaactcatttggtttagcatttggaaggaagtgataatcgcgaggtttgagatatttatatccaaaagacgcggtataatctctccttgggtttttgtatttgttccttagttttcaacatccaatattcatagagcacataatcaaatcaaacaggcttagactttttagcaaaagtaaagttaattattggttaagggttgacttcgattattgaacaaaccaactgaaatcttggttaacttgaactgaaccggaattggtggcattagagtttttagatgggttttggatagtatatggggctcgactgtagaagctgggccaagttggttataatttgcaacataattgggaaaaatatcaggtagactacatttcactattagtgataagtac

SEQ ID NO: 49581 - DNA, 642 bp, Arabidopsis thaliana landsberg
tcttttttaatgttattttaatctcataagttccaagataaaggaagctttcactatgtcaccatcaaagcaactttacaacaaccactgcctccacaaaaccaatccaagtgtaaagaaaattgcaataaaagccaatttgtaagttctaggtcagagagatcttcttcttcaatcccaatttcaaggaggaaaacaaaatcaaatctccaaaattcacggaacgagctatcaaatgagaagaaaattagataaggaaacgaacatgatacgaggaatcatgagaggaagaggcaaagacgtgtcgacgacgaacgaagaataagggatttgttcggcgtcgctagctgcatcttcggcgttggctaatgcccagatattcttcgctgctcccattttctttcaaactttttctcttcttcttctgcaaatacaaataaagattctcttttttttttttttgtaatcagatctcaattaattttgattctgttttttttccctaattcaacgcttccatttatattttatgtcggcattttgatattagggatcagtcgttttaagtttttaatttaacacataccgtacaagtttggaattagggatgtttgaatctatctctcacgatgtattatgaga

SEQ ID NO: 49582 - DNA, 796 bp, Arabidopsis thaliana landsberg
cctaaccagcctcccccatgtaccattcagtccatttatatttatttcctattaatgtttgatctatgtggtgatatcatggttccaataggtaatgattaaattagcaataaagataaaagacttttatgttgaaatcaagtaaaggtccatgtcaaatagtaccaatataaacaagcaaaatgtatattgtactttcgtatatatttgttaaattatgagcaaactaaagcaaattgagacatgatgaattgaggagaataaagaggatccatagtgcacctagttgactttgataattcatttgttgaaaaaactattatcttattttatgtgactaattataatattcctagaaatttacaattataattatccatagcttttcattgtgtttccaaaatgaataacaaaccttttatcacaatgtcatctccacctcttgcttctatataactcaactcatatgtctctataaaatcccactatattctatgcatgtcttgctaatcttaagttttttaaggaaaaacaaaaaacaaatatgagctataatacaaagttagtagttctcatttttcttcttttcactatcacctccactgatgtatcaaacgccacccctcgtcattttgtgaatctcaggtcggagaaggtaaaatttctttcctttccgttttataatatacaatatactcaacttttgtatcttatatgatatcatgattcgcgtaccacagttcataagttgctatttgatcatatgtatagaaacttagtttgagataaacattaa

SEQ ID NO: 49583 - DNA, 778 bp, Arabidopsis thaliana landsberg
atttgaacactcgctaaaattaagctctcttcttatcatttttttatatatgttgtgaattcatcattatttgacatcgttagttttcggaaaagaaacaaactcaactttctgaaaacaaagtcgataccatcataccaagggggacttatcagaaattgtaaaaacgtatgaaaatcatgtgatacattccaaccttatttgttttatttcgaattccgacgcatcttttaagttttcttgtacgacgcaattacaatactagaaaagaaataacaaaagcacacgtactgttataagcaatacatgcaagcattgtatgacatctttctatgagactagcaaaattgtaagagttgacgtaatccaaatatacaattttttttgtatttttaataaaatccatttgtttcaagaaaaaaaaaaaaaattaagaaggagatttgatgataatagaggttatgagagtaaacttaagtttaatgttccataatcacttatctttaaaaagaaaagtttaagaaactcttgtaagtgatttctcttctatctagtggcctgccttttaagaaaatcttttagactagttctgcaaacttcagagtaggtttaccaattttggagtaggtttagcaaggatgcaagagtggacccaaacaagtgatcacgaaatgcaatgtttaatcactacaccatcaaccactctataactgatgttttgcaaccacgataccataagcactattgaacgactcatttaacattgttcatatttgaa

SEQ ID NO: 49584 - DNA, 394 bp, Arabidopsis thaliana landsberg
aaacaattatatgttatcgcaaatttgctatgatcgtagcccaagccaaaactgaagtgtctcgttatgctgtctcaaagtgatggttctatttgccccaaaaacaaaacataaaaacaaccagacacacattatgatttctagaaaaagacttataattaaaaccatatttttttttttaattcagcagttgacattttgtaacaaagtttaatgtttcactgggacatcaagtatcacttggtcaggatactcctttgcatttcctttaggattatcttcaaaccgtcggagctaaactgtttcatctcaactcctccacctccgacctccacctccatcgccatatccgccagtatcctctccacgccggcgccatcttaaaaccatgacc

SEQ ID NO: 49585 - DNA, 600 bp, Arabidopsis thaliana landsberg
tgtcgaccaatatcaaatccctcttacactgaaacgtgtgattcgattctatttttctattttgaactctttttgatcagtcaaagtagtgtcaaacgataaaatagttgaaaacccaattcagtttctttgaagatctatatattttttatatgaaaagatacatttttcctaaaaccaaactttgataaaaaatagataaattaatactaccaaactgaagtgtggaaaattgtaagttataactttaggatacaagaaattaaattatttttcttttcttttataatgaatatgattttataaatcaaataaaaatagaaaagagaaagtattcttcaatggtccatccttctatgaagagatatttttagttttaaccaaattgtggatttgattttagtcaaaaaataggtttgaaactatttgatcaggtttgatagtttgacaccactggtttttatttaaaaccgaatgatcaaaatagttaaaacttactgaaaagttaaagaaagtatttcacgtggcttagctgtttgaaagaaattaggctgtctaaacaacaaaaaaaatatattaaattaagatgattacagatat

SEQ ID NO: 49586 - DNA, 647 bp, Arabidopsis thaliana landsberg
catttgctttggtaccgctgtgcgaaagctcaaactctttatcaaaaaccaaatcaaagctaatttgaggttatcttgcccagagaaagggttccaataacatgtttagccccaccaacagtcacactcaaaaccacagattctccagatttcactgtgcagtcaagtgaagcctacacataaagaaagagaaccaaaacataaagagactgtattaagctaaatcctaaaaactttatacagtttggaagtgtgaaaataacctgagaaatgtggacaaggctgtcttcttcaggagtcaccttagtagcgttttttggtgtcaccgcaactcctaaataacattatacaaagaaatcaaacatgagtcactcatcaacttgtaaaacatctacacataatcaaagctgagtaccgaaaccaagctctatgtgaaacctaaaccctaaataagctacaaaggcaacaaggtatgaacatatacacgaaatacagctaaatacgatcttatatgaacaatcgatcaaaattctcggaacggggaaaatagaaacagtagacggaagatataagaggaataaataaagaatgttaccccagaacttcattgttgttgaacgaggaagagagaagagaggttgttaggt

SEQ ID NO: 49587 - DNA, 971 bp, Arabidopsis thaliana landsberg
gttccactttacaggattttagtgggagagtgcctggattgaaggtggatgtagtggacacaacgggtgctggtgatgcatttgttgcggggatactatcgcaactagccaatgatctctccttgcttcaggtaacctttcatttgtcattttagactcgatgtaggcatgtagcagtttatagctatggtgagtttggtgagaaagcagttagtgagggctacgtttataaggctttcttggcagatcgtagtatagcagtttcgtagctttgttcttatcagatgctctcatgctcatgacaacaaaaacaaatagctgaaaaaactgagttgtttgactcaggacgaagaacgactgagagaggctcttatgtttgcgaatgcatgcggggcattaaccgttaaagtgagaggcgcaatcccggcccttccaaccaaagaagctgtacatgaggctctactcaaagccgtcgtttaacattcaataacaccaccaatatgagaaacagtttgtacctagcagatttttgtaagtctgcattttgttgttgtaaaattgttgtataatgtacttaccaatgtttgtattctagtagctgtagagctttaagcctttgaaaatattgtcgggccaagaactagaattcatcttttgatctttgtaactctcagtttgactttatgagagatcttgaaaaaatgaagaactataaaagatcgacataaagattaaactttgatataagtacaactcaaaaactggccaaaggggaatcgaagaagaggaaaggcaataatgaagaaaacacaattagcttctcttctaagtttgcttcttatttgattaacaccagagatcgacataaagattaaactttgatatgcaacaattagtagtaatttttaaacttttcttaggaaagtacttactggactcggcccactttgatattttaatttttttggaaa

SEQ ID NO: 49588 - DNA, 316 bp, Arabidopsis thaliana landsberg
taagaatttcttctcaaaacccaatttcctcacgttgcttgggtcttactctattgaatttgagactaaagtagtgatgatcggaaaaagatgatctcttaccattctgtgaagcaatggttgtgatgtttgctggggaatcgacagaggctgaagtttgagtgatggcagtgagacctgaaggatccggcgggagagattccggcgaggatcgaacggtgggaacggagagacggtggaattagtgatgcgacacggtcagcgagaccgatcaagtggaagattgcgacggatttgcggaagatttgattgcgtt

SEQ ID NO: 49589 - DNA, 783 bp, Arabidopsis thaliana landsberg
ttacatgcattgcaaattcttaaatcaaatttaacattcttgatctaatttgttcttctttttctgtgtgattacagctaacaagcgccatggctggtctgattccgacactcgaacccagtctcgacgccgagacaagacaagagttcgaacaacttgagatcataaaatcagatatcgacaaaagagccgatgatctggttcgaaaagaattatgggccggattaggcctaataatggcccaaacagttggattttttaggctgacgttttgggaactgtcgtgggacgtgatggaacccatatgcttctacgtaacttcgacatatttcatggctggttacgccttcttcctccgaacttcaaaggaaccttcctttgaaggtttttacaaaagccggttcgagacgaagcagaaacgtttgattaaaatgcttgatttcgatatcgatcgatttaccaagctacagaagatgcatcgtccaaatttgactaaatctggtcgttgttgatcgtaattcttttcttcttctttttcctaaatcggatgctaaattaaatgtatagacgactgaaattttcgtagagaataattagttttagagggataaaaaaaagtcttgtcatgcggcatgcgggggtaacactaaataactaaatcaattaattattactactaaactaacaatgaaagtaaataatatttccaatttttttattttttgttggatcagttgacttctaaaatgaatgaatcataaatgtatgaatatacacaattgt

SEQ ID NO: 49590 - DNA, 439 bp, Arabidopsis thaliana landsberg
  unsure (1)..(439): unsure at all n locations
nnnnnnnnnnnnnnnnnnnnnnnnnnnnnnnnnnnnnnnnnnnnnnnnnnnnnnnnnnnnnnnnnnnnnnnnnnnnnnnnnnnnnnnnnnnnnnnnnnnnnnnnnnctcgtggacatagagataggacgaggtgttgcctgtcgtgcgataggagtaagcatgcaattgcagtggagatactaaatcactcgcgaatcgtcgtcggcaattggcgcgcattgcgtgagccacctgcaattcattcccaaatgctgacctaccaccaaatacgcaggagaaaggtcgtgaagcattgatttttgtaccgaccaatgcgccgagagagacgtacctgcgtcctgcagtctagagaaattcagcatttcactcatgtgacgtgcgatacccaagcgccgttaaccagtcatggacagtgacagtagctgtgaacgaactgag

SEQ ID NO: 49591 - DNA, 761 bp, Arabidopsis thaliana landsberg
tgttttcgtttctctttaactggtacatatgatattaaagcgggatgtaatgcattagatgttttggtacctaattcattagccttgatggtggcctcttgttcagatcacggttcagagaacagcactaaacagtccacttgggcttgaagtccagttgcacattccagaagctgtttgtccagccttaagtgaaccaggtttttcagatatattctcttagttttcagatagcaggttgatgcagatggataactaagactactcgttattctttggaatagggttgcgtgctcttctccgctttctaactggaatgtacttatgcctaaaccgaggagatgtggatccaaaatctcagcaggtcttatatttctcactcacagttgatcttgttaaaggaacggtttacatgaatttttgttctcactctttcatggtatgcctataccagtctgctgaagcagctggacgttctcttgtctccgttcttgtggatcatgtatttctttgcattaaagatgctggttagttaatttgactcaccacatgttagctaaagagtgcagtcttgcatggaaccattactcttgtatcctgggtttaacatttacggcctttttacgtttcagaattccaactggaactgctgatgcaatcactccttttttctcgggtatgttctcactgattcttaaatttcgatatagaaacaattcttgcattcacatctgcaccatggaactttcttagttctggga

SEQ ID NO: 49592 - DNA, 498 bp, Arabidopsis thaliana landsberg
tgatagtaatatggcggacgtcagagtgcagaggactcacgatcaacatctccctgaacctatagaacacacttcttcttcgtatacacggacgagcctcgccgcacacagaccaagacttgcttctctcgacatattccgcgtgctcactgtcgccgtacgtatcgccatctactctctctctatacttgtgcgagttttcgagctcttaaagctctttaaattactcataatagtagatgattctcgtcgaagacgctggaggagactggccaatgattgctcatgctccgtgggacggttgctatttggcagagttcggaacgcctttattagtgttcgtcgtgggtgtctccactgctctatgcttggaggtcaattacgcactttacatctctcagaaatgccatgtgagtgagcatatacatcgatgaactgccattgaatacctcgaggatttcgacaaacttcgaagcttgtgagaaggttgcgtgtaag

SEQ ID NO: 49593 - DNA, 544 bp, Arabidopsis thaliana landsberg
ggagcttgatctcgaatcgtattcccaggcaatctctcaaatctaattacactgataaaattcattctcttgtataatgccactcacttcgagtgtagtcttgacccgtaaatagtgtctgaatatggttttggctctaaacagatgatagtatcacttggagctggtccgtgggatcaattgtttggaggaggaaacttaccggcgtttgttttggcgtctgttgctgctttcgctgctggagttattgcattgcaaaggcttcccacgctatcgagttctttcaagtccaccggtttccacatcggctaaaatctttataccacagacataaaattcacagttagatctacccgattctttttgaccacgttcttctctcggcgtatatgtaagtaggttttgtacatctagttttggtatatgtaatatacagcaatgtgactctaaatttacagtacctttcttcccacgtagaatatattgttctaatatatgactagcaaagtgattatcttcgttcttttgaaataatttatatttg

SEQ ID NO: 49594 - DNA, 256 bp, Arabidopsis thaliana landsberg
taattcaggcctctctaatgatgccacgaagactcgaatagcttcctcgccgagacagctagacaaatgtccttcagccagatagtacggttatagtgaatctcgaaggacatcaatttctgtgtgccatcggctcaccggaactgtaggatgagtctcgctgtatcatcatcaagaattgagattctcacccttatgccaatgcagttacgagcttcactgcagccttcacatcccgatcggtgaagtaattagc

SEQ ID NO: 49595 - DNA, 691 bp, Arabidopsis thaliana landsberg
  unsure (1)..(691): unsure at all n locations
cattttgaattctatcctcttagctcagctgaaattttcttcttctcagctcagattttttttgtttaattcttcgctagctgtgagtttctctgatcgttaagagactctgtttcgtttccgagaaaatctgcatagggaaaatttaacctcacattgggaaaattttggctctatactgacgaaatgccaagcattagagctccagctgcgaagaagaccactacactcacggttagcaatcctcgtagaaaatttccggtttaattcgtctgaaaatttcttgaccggtttaattctctgtgttttccggtaggttgctgtgaaatgtagaccgttaatggagaaagaacgtggtagagacattgttcgagtgaataactctaaggtctcttcagaatttgtttgatttttctgatttcaagcttttttcgattttaaattttcgccctaattttttgttttcgattttaggaagtggttgtgttagacccagacttatccaaggattatcttgaccgaattcagaatcggactaaagagaagaaatattgttttgatcatgcttttggacctgagagcaccaacaaggttcgttcctctctctgcaaatttgtgatctctagagatctttggttctcaatgcttagatttgttgngtgtatgtgactttctcagtaagtgagtggaa

SEQ ID NO: 49596 - DNA, 1032 bp, Arabidopsis thaliana landsberg
caaacgtttctcccgcagaggaatgggcgccgctggtacgccccggagacccctacacccttcacgcccgcgggctgctgctgttgcgcagcggccacccggaagtccgcaagctcaatctcaaacaggcggaagggtcatcctctctttacggtgaccgcatctgggactccagcattctgctgatgagcgagctgagtcgcggctggcacctcaagaccgattcccacatgatggatatcggctgcggcgcagggcctctggcggtattcgccgcccggcgtttcgattgccggatcaccgccgtggatgcggatcccggggtttttccgtatgtgcaattgcacgccggcgtcaatcaggtaacggtggaaacgctggaacgccgcttcgaggacctgagagacgaactcagcgatgtggatctcatggccggcgcggacatctgtctctgggaggagcaggtgccggtgctctacagcctgatttgccgggcgctgatccgaggcgtgcagtacattcacatcgccgatccgggacgcgcgcccttccagcatctggcgcagctttgccaggaccatttcggcgctcgcgcctgggtcaaggaacgccggacccgggtcccctatctcatgcacgcacaggttctgaccatcaaagggaattgaaaacggcccgctgggctgaaaacggtcaatcgggattgaaaatggtggcgtaaacaccattttcgagttttaccgcccactgtcaggatatcgagccgaagccatgagtcaggacgagaacgagaccgttaccgaacaagccacaccacaaggcgcgctggcactgcccgaccagagcctgccgcagcgagtctatctgatcccggtgcgccaccggccctttatgcccggcatcgtgcaacctttgctgctcgatccagagcaatggcaaacgactctggagcgcgtcggtcagaccccgcaccacgcccttggcctgggttatgtcggcgaccgggaccctgacgatgtcagcgccgatgac

SEQ ID NO: 49597 - DNA, 783 bp, Arabidopsis thaliana landsberg
  unsure (1)..(783): unsure at all n locations
atggttattttatcatcatcttaaaaacaaagatttagtcctccaaatcatataaatcagctttaattagtttatacaccaaatcttaaaccaatgaagggacatttaactcttcggactcacttaaactatatatacccatatcttaagctttcttttattttcttaaaaagtaacagaaatgttctcaaatagatcgatgtatagaatatgaataatttagggatattattcatatataatcaatcgatgagaggtgactctatattgcagattgggtacctacaaatttcataacaagttgtttgtgctgacaacgataaatgtttttattttagcatttttcctttttatggaaggggttggtcaaacatgagaaacaagaaggcaaattttgcagataacaaaaggaaggcagaagcatgcatgaaagccaaaaaagcatgtgaccaactttgtaaaattcaaccttttttctcagccttttggtaaaattatctacaaatccaaactatatatatatggaactatacatttttgtctaactgaattcacaacatttaataatcatatataaagaaaaagatggtagcaaaccaagaacacatgccaacttgtaatttccatacatcaagaacactgacattctgatggtaagcaactaaacactgttggcaactacaatctcttttaaaagttcattctcaagaatattgatgactcctttatttctttntatataacattaactagccaattttttatatccattaggggctaaga

SEQ ID NO: 49598 - DNA, 1072 bp, Arabidopsis thaliana landsberg
atcagataaaagagtttgtgtctcctttggatggcctttaaccctcaattattcgccacgtcggatatctttaatttttccctcttagattttgtctctaatctctatgtactgtatgttcgccggagctccctcatttatttatctaaatataaatgatacccacggttcgtaggctaagccaaaaagatatactacgttcgaagagaacacattaataatatcatatcctctaacaagagacatatccgacggtagatatttttgtctgagcaacggcggagattagaaggttagtagtacgcatatgcccacactcactttctctgcccatcctcctctagtcttcatcttttcatatgtttaatatctttttgtctttttaccattttcttttccttttttttttttttgctaatctagtggaatacagaactacgtcatgtacgaatattataatgcattttgttgttccatggtttgtgatagatctacatagtagagataaagaagcttcttcgcagatgggtatgatgagaagatcctataaattaaactagatcataaccacatgctatgtcgtacattactcgaccctttctactaaaataccaaatcaattcattattccacttggatctagtcgctttcactttcttgtaactccatttaaccttacttttgtagccatatccattccattacattactatatcatgtggattttggaagatattaactaatacactgaacaccatttatttagaaagacagtgacacattagctaatacacccaacataattttattgtatttacatataggactctaggcttgtaggtaagttccataatagcgattttgaaaacgatatatatttccatgtgatcctcatccctcgaagctcctaataattgatcatatcgggtatatgattatatgtattgaaaccaatgattgatcttaaggttagtcttttattaacccccaaagagaaaccaaggttttgtaaacctccatgtgaaaacctgacgaatgggatttgggagtatattaatcataaagttgaagg

SEQ ID NO: 49599 - DNA, 839 bp, Arabidopsis thaliana landsberg
  unsure (1)..(839): unsure at all n locations
tcagcttgcgttctatctctttgggagttctcaatgttcttaaaggcacgtgaatcctttattcacacacctatatcgttttctcttctgtttttttttctttttctgaattgtatgagaattggaatcctgtacttgtgttgtgttttgttcaaaagttatcagctatttcattgtccatgtctcttgtactgaaccgttttgtttaccaatcaaacttgatggctcttggatcaaaaagagatttctctgattcctctgattcacaatggcatgtcaaaagaggtgcatatgtacagtgactgatgaaaataaaggtttttgggccaatcatctctttgattcacaaagatggaaatgtgtatttacagtgactgatgaaaaatatcaaggtttctcatctcattcctctgtataagcgaccggattgaagctcgtccatattgtctatgttttgaaacgcgtcaaactctctcagacatgtccatcctcgtcgagccaagaaatctcggtaatcttcttcggtgtagaatatcttctcctcttgatggactggtagcggatcagattcatcatagtggcacactctaacggctatccctgaattcaaatggatattgagaaacctctaaccagagagtattcgatgaatagcatagaagaaagagtggatttaccttcatcaatgcggagtatatagttccctaaaggcatgtctcggtcaagagagcgaataacctgttcttcatcttctagccaaaaagctcgtcttgttctcaatctaaacgccgatctgatagcttccttaatngcttcagcagtaccatcaatcccaactc

SEQ ID NO: 49600 - DNA, 984 bp, Arabidopsis thaliana landsberg
tgaaggtgtgatcgcatactctggcacgggagtggtatcagtcagctgtcatatgttcgcggggaatctatgttctctgatcacagaccagtctacagtttgttctcagtagagattgaatcggtatatagaaaccgtatcaagaaaagctccagttacaccagctctaggatcgaagttgaggaacttcttcctcaacgctatggatattctgagcttaacccgtactaacgattcatcatcggtcctgaatccgtttgtagacagaccccaagggaggattcaatatttctaaagcctgaacaaaagaaaaatggtaactatatttttgatgatcaatgattatggaaatctcaggttggtgttgctcttgttttctgatatcatcaactggtcttttttgcgggatatatcaggggttggagatttgtgaatcatagaagagtcatggaaaggtcagatattggccaagatctctggtgcctaagccctgtttctcggtgacaaacaggagaagattcgagtgaaaacagaagagagtaaaaaagtatagcttcagcgctgaacaagtaatatctttaggattatagagaagtgaccagtttttttggtttaaaacccattagttatctctccataagattgtaggattcgtcaaacttgtgtatagttgtatgctttgtaaatataatggattctttgtaagggaccaatgggtttagattggaaagagcagagttaaaaaaaaacacttttttgcagtttcttgtcctatgagtttttgcccatacacttataatattgaacagaaacaaatctagtttgtgtcacacaatgtcaaggggtaaaacaaatagtatttaataagtaaattcgatcttcaaagtgagaattcaaaaaaagagagtcaaactcgaagaatgatattctttatttgtactttcgattctacaattggctttttttctttccctaaaacaaaag

SEQ ID NO: 49601 - DNA, 1208 bp, Arabidopsis thaliana landsberg
aagtaaaaaagaaagtaagtaatcagggacaagccttgaaattatgttgtttccaaagttcatgttccctcgtttttcaatccattagtaatttattttataaatacttgttatttagtaggaaaaaaaaaacagtaggaaatgaaaaagatgtggagccaaccacacgtgacattcgcgtgactgcatatgcttactgtttgggataatccaggcaaccttgtgtatcttgtctccttgataatattgatgtgattaactactacagtattttcttatttgatacaatattttgttgctcattgcttaaataactatcgattagagatgtaacagtgaacttgaacatcatttatgtatcattaggccctatctttgccttggattaatcaaagattgtgtccgtaattaaaaacagtactgtacggttcaacgaatcaagtactagttttggctttctaatactagcttggtaaactaatcattgattatagactttataatagggtgattagtttctgttttatgaagcatccgatatcttggtattagtgactttagtttggactcctcatatatagatattgatacatatttctctctaattattaattataggactttctatgtgaaatcattttacaaaaatattttacttacaatcatataaaaatactttatagaaaaaagaatttgttcgtaccgaaaaaagagaaaaacttttgtctaggatttcttcatcgagccggtgtgattagtttacgctttcatggacgatagttttcactgatacatcgctaatgttatatctctgaaggaccaataataaaaataaaataaaaaaataaactgtaaaattggccctttagaaaactattgtccattaatagctttcttcaccgttgcgattagtttcactaatactgaacaactaataaattcatatgcatacaatctaaaataaaaataaaaataaaaaaatcatatgcatacaatctaaaattctaaatactgtatgttgttgactgttgagctaaagtctaatctcacaatcaagcatttatatgggctattgaacatttacttattgggcttttatggactcaagacatcttgaacagcgttacaagtcactccaaattttcttttttttaatttggacattgggtgatgatgacacgtttacaaactatttaatgtaaaaagca

SEQ ID NO: 49602 - DNA, 701 bp, Arabidopsis thaliana landsberg
tggtaaattctgcattaattgtatgatcgggttattttgagtaataataatataatgtcagtaaaaattggggaaaacaatattagactgaccactaaaggacaaaagaaggaaaaggctgagatatttttttaaatagttgtaaaagaaaaagttaaagttatggcagtaataatctgaatgtagaaatgagaacaatatagaataataagctatttaaacaatttttataactttaaacccatgctgtaattatgagactttaagctttactttattaacccacattaaaatcacaaccattaatcaaaaagaaatttactaaaaatcatgcaaaagaaggggccccaaatatttgaccgtttggtctattcatataaagaaaagtaaaagtaaacaacaaaaataaaagtttaaatagagtaaaaaaagaaaaaggtggaatcgagaatttaaagaaatgtacggttttaaaaaacgaataaaaaagaagatgactcttcctttgtacgcatgtatgcaattatcctaactgctggtaaattagaggacaatgatacaaatacattatgagtttcaatagtgactactcgtacgtatttttatacctatcaatcatgtactattgtattctaatacttgcctcgattttcatgtccaaaattgtgccattgcatgtaaatcaatattttatattgatt

SEQ ID NO: 49603 - DNA, 388 bp, Arabidopsis thaliana landsberg
  unsure (1)..(388): unsure at all n locations
tgaagattactcatcattgtttcgctcgtgttctgcccatggtcgctccctgccgattaggtctctctcccgacctctctggtcagctacaatcatgtaatacccttagcggttttactaaaaatatcgctgccgtttgtttgaactaatctatcagatttgtacgtgcagttgatcaatttgagtcacacccactcacacgctgacgtcttgttgaggcacacgnacgtaactaatctaactgccaaaactttacagcattgcttgtactgatctgttttagaaacaagcttcaccgatgattatcaccttactacagaaaaccctcgatgatncttacgttactgagattttaaccgnccgnannnnnnnnnnnnnnnnnnnnnnt

SEQ ID NO: 49604 - DNA, 831 bp, Arabidopsis thaliana landsberg
aatgaaatatacgctgcatcaacaaaaacgaaatcaaaatggaataccaaattatttaaactagaaactgtaacggctaatctataattatcatattcaactgcaatttggcaatgttgatataaatactgggttggtatttaggtatttaagtagtactatttcacaatttaattccaggaaaaataacaatggtttttattggtaaccgggggatacgtcatctaggaaatttcgatatggtggttgggttaaggcatgacaaagtggttgattttgaaaccaaaggttgggtaaatactaatttaattgcctgaaaatcatgattaaggaattaaataaactataaagaaaaagccaaaaggaagaggataaaaaaaggtaatttgggagtggaaataattagtgttgtcaggtcccagaggtgtattactgttccctcttaattaatactactactatttgggaatctaagaaataattaaggtaagaaacaaaaaactaggggattgtttaaaaatatatttgcacataaatgctgggattttgttacccattgtttcaacaaatcattttttctcaaaaagtgaaaaactttcatgtatatagaaaacgttaatgcatataatgacttgcaacaagccaacaatgcgtaagagcttcttaagatttgaacatgataatttgcaacactgtcaataacccgcacttcaaaatcaaaccttattagaatatatagcgaatgaagtaatgaaccatggtactttaaatgtactactatcttttaaagttagggttgaaattgttaaaagatattcttaaacaatgttt

SEQ ID NO: 49605 - DNA, 375 bp, Arabidopsis thaliana landsberg
tatctagggtctcggaaccaaccacatcattgtgaacttctccacaacaaaaagaaaatgagatttatctatgcgaaaagttgacaaactattgacatattcatgtctaactagtactttttcttgatagatacattttaatatcaaatgctttatatttattatttcattctttgtttccattgacactgtctacccttgttttgaccatctcagagctggtaaaaataatccagcggttaattttaaaactacgagctaattggtcttgttttatatttttctctattcaaatgcatttgattgttaaacttaaagagtcacaaacggtggcttcatctgactgcattcttgactgtttggccggccctaacg

SEQ ID NO: 49606 - DNA, 510 bp, Arabidopsis thaliana landsberg
atacttcttttttatttaaacaatttttcaagaaaatataaaaatgatagatatttttaaaatctaatttttaaaatgaaattgattaaaatcctttaaaaatcattatatatatttttctattcatattttcatattatttagtatatattaattaatagataagaaaaactattaatattgataaaaatttaaatttatcatctaaatagcttttggaaagaaattgctcaaatttttgttctcaagattagttattgatctcaacctcactagttcaactccatttgcgaggggtgatttgcatcttaaacatggtagtatcaacgggttgtctcggatatcaagaacaatgatgggacaaaagttcaaacttcacacggttaattaagaaataaatagttattgatctagcaacaaaaattagaaaaagataaatgatatacgtatattaaaaagtcccaaattaatatcatgatatccctacgaattcacgtttaggtgcaacat

SEQ ID NO: 49607 - DNA, 1711 bp, Arabidopsis thaliana landsberg
aaagggctccatatatagtttcctattctccaccattggttaattaccattatttgatttattttggagataaccgttgccggttgtactacaaataactatgcaagccatttaaaaaataactgttgaactgagagttacctcacacctcttctgaacaacttgtcccctatgtttataaagctaccttattaatagctttatatctagatgatatacacacatttggaatttcttttttgtcgtcatttgaaaatctcctgtagtaagggcaaataaatttgtaagaattctagagcaagacaagtgaaaacgttgctttttagtttttttaataattcaatgaattataatgtaatgcattcaattttgtatcatatacgatacataaagatattgaaaacctttctatgatctttttagtaataacggaaacacaaatatcgaatgtttaattttccggtctaaagcaaatcctctcgagcaaagatggaaattgataagacccgccgtcgaatctaaaatcgtatgtttgaccgtaaatcgaacggctacgattttctacatgggaaagaacgaaacaaaagatccacgtgacgtggttgtctatcacatctgagtttgatggactttatgggctccactcatgagcgtgggattgatctgaaattctgaagtcatcagacatttttcttactttgatttgatgctctgtacaaatttgacactcccaacattcaaccttggatacgattttaatctcctacggacattgtttttatttttctggtgatccttttgaaaaaatgatttcgattgtatatgaatttgtcaagctccggttttggtttaatttgatatccaataataatcccaattagaatcctctaagcttaccacccggttaatctatatgtccccacacacttatcttctttcgtcaaacaaaagcaattcttacggagaaaagtagtttctagtctctatcaacttttcaaacaactctttctcaatttaatttgttttagcttctaaactttgaaacctcataaaaaaagaaggtcaataatctttgaagaatcttagtcttcggttgaagaaagaattggcgtcccagtaatgatcacaaatcacaagtgtcttagctttgttgccgacacgtaacccaaaactctcacccaacaccgaccctctttttcatgatgtttacaaggagaatgatacgactcttctttgcttttagataacatcaccattacaaattcgtcttaattatcgtatatatattattgacacacaaagagagagatatgtgtaagagactaatttggcgttgcccaccaacctaacttcccttctacttcatcaacaactcgtgtccactttctcatactaaccttggttcaagattataattataaacacgcctcccgcgtgaatagacaacgcaaacatcataaaaacatcataagaagaagaactctttggcttcactcccgatttgtaatggagaagaaggccaatcatggagatgatgtgcaagagagtgttcctattatccatagccaagtcgtgaagatcaaaagggagtttgagaagatacaacacccgtcactaaagcagcctgagatgccgttagtgttccgcgagatcatgggtccacgtcgttcccgttctcccctcggtttaggagagcgagagagatcaatcc

SEQ ID NO: 49608 - DNA, 528 bp, Arabidopsis thaliana landsberg
actgtggcatagatgatctggacatcattggtcttgaatgtgacggtccaagcgaacttccagactatgatttctcagatgtggagatcgatcttggtctcattggaaccaccattgacaagtatgctttcgttgatcatatcgcaacaactactcccactcctcttaatatcgcgtgcccataagttttgcagctaggtgttattattagctataggagcaacgtaaaaagctcgttgttactcggttttgtcttaagttattaaagtatagcagaggcagttaatctcaagggaagcaaaaaccctaaagatagaagcagatgcagttttgtgtgttggtgttactaaagaaagttttgttgacataatggttttgatgttgtggagaagatagagaggtgtgatcgaaattgtaaatctcaggtggttttttttgaaggcaattgtttctcatttaccgtttttttctatatgaggattgtaaatgaaaagcctttagatgttttctaattcgtaagctctctca

SEQ ID NO: 49609 - DNA, 657 bp, Arabidopsis thaliana landsberg
tacaaacattcaagctttttccaatgcttcattacggcttccactcgatggggatatcatggtatcttgtgctcatgagtaatatcaactaggaagaatcatctgcatgtacgtatcaactaagagtttgcttgtcaaaaaccaggttgattctaaacagttaggagatggacttgtggctgcttcaaagattgttgacggcattacacaaaatgttggaaactatatgccaaaggttagtagaagaatagtatcaatgtcagggttttattatttctattgaagattgactgtatatcagaatccttgttgataatacattttgcaggcaaaggagatggagagtttgttgtcagaattaacaagagtggctagaagtgaaagatcattgacagaaaattgcgttgtggctcttcttaaaacgcaagcttcacaagtactcaacctttctttacataaattgagaatattttaaacttttatgatcatcatgcatcctttctttttcctttgtataagagttttaaaagatctttttatatatatatgttttgcagattgaagaatgttctatgagaagtcaacttatccagcaaacaacaaaagaagagtcatcttctaaatgagcacaactcttgttctactaaagagattgtc

SEQ ID NO: 49610 - DNA, 566 bp, Arabidopsis thaliana landsberg
  unsure (1)..(566): unsure at all n locations
cacgacttccgtggcgttgcnctggtcgccgaaagcgtggcggccgatgcagatcggctccgttcaggtggtnnnnnnnnnnnnnnnnnnnnnnnnnnnnnnnnnnnnnnnnnnnnnnnnnnnnnnnnnnnnnnnnnnnnnnnnnnnnttcggcgatttccacatttgcttgagcttgaattccttcacgcgctcttcgtcgggcgtgatcgtcgcgcatttcacgccgacaccgtattttttgatcgcttcggccgcgtcgacggtgactttgtcctcggtctggtcgcgatgctcgacgccgagatctgaaatatttcaaatctatttcgagatagggaaggatcagcttctttttgatgaagtcccagataatgcgggtcatttcgtcgccgttcagctcgacgacgggatttttcacgacaatctttttcatgcttttctcctgaagaaggagaaagtttattaccggcttttcagagagtcactgaatttcgcgcagcataagcacgtnttctggggttcgggccgtcgcggccgtcttgtgatggaagcgattcatgagc

SEQ ID NO: 49611 - DNA, 454 bp, Arabidopsis thaliana landsberg
  unsure (1)..(454): unsure at all n locations
caacattgcctgaagcagcgacagcacgcccaccgcgcgctcttccacagccgcacaccatgcgtcattgagatctgattcgatggtcacgaggncaccttgaaagctaagcagtggtaattctcaacactcgancggggcaaaatagagctgtgtcgcacgcacnnactactctgtcgcagctaccgcangctacnnnnnnnnnnnnnnnnnnnnnnnnnnnnnnnnnnnnnnnnnnnnnnnnnnnnnnnnnnnnnnnnnnnnnnnnnnnnnnnnnnnnnnnnnnnnnnnnnnnnnnnnnnnnnnnnnnnnnnnnnnnnnnnnnnnnnnnnnnnnnnnnnnnnnnnnnnnnnnnnnnnnnnnnnnnnnnnnnnnnnnnnnnnnnnnnnnnnnnnnnnnnnnnnnnnnnnnnnnnnnnnnnnnnnnnnnnnnnnnnnnnnnnnnncacccgctt

SEQ ID NO: 49612 - DNA, 537 bp, Arabidopsis thaliana landsberg
ggcacttggttccagtgggggctttgggagagatccatatctgtggagttggtgtcgctcgaggatatttgaacaggccagacttgaccgacgaaaaattcattccggatccattcgttaaagaggaagatgcaaggatgtacaagactggagatttggggcgttacctccctgatggtaatatcgtgtacgttggtcgaaatgatcatcaagtcaagatccgaggcttccgcattgaacttggtgagatcgaagcgtgtttgatggaacatccgtgggtatccgaggctgttgttctagcacagggagaagacaacaataagcgtcttgtgtcatatgttgtggcaaaatccaatgatcagcttgtccaggaactccgctcccatgtcgcatccagattacctgcgtatatgatacctgtggcgttcgttcgcttggatacaatgccgttgacaggaaacgcttaaattgatcacaaagctctgccagcttcaggcgaggatgccttttcttgagaaacatatgaagcttccaaag

SEQ ID NO: 49613 - DNA, 617 bp, Arabidopsis thaliana landsberg
ttcattttaaatgtacaatcgaacattttacttttacagaattactgaccttacactttttctatttttcaaacatcaattaacggataatttgatacaaaaacttcatacacaactgcattttatcctatgtaaattatattttttatatattctttatcatttggcttatttgagtctatctaaatattagttagaaaaaaaaaacaatttgtttaaacggagagaaaagaaacgtggttaattgtgaaggcgccgttaaacgactgctaatgctatctttttcattattgtcataaaaactaacttatcaggaaagattagtattttcatcaattaaaaacaaaattttcatgagtaaatacttgaattttttttatccgtaacaagaaaattattcattaactatcgttttcttcataagctttatgaaatagacataacgaagaaaaaactaagctcggatctttgattagtcacataatatcacaaacctatcttgatattctttggcttataatgttgattttctttgcctttaaaacatgaaagatcaatcaaagatgtgatgtgagcatcatcatcattatcaatcatcaataatcattatcttttcc

SEQ ID NO: 49614 - DNA, 937 bp, Arabidopsis thaliana landsberg
ccatgtcgatgttgagaccaagagtgtagagaaggccagtttcttccttcctccataagtaaatatcctcaaaaatgtcttcaatgtaatttatgaaaataacaaggacaagatcaaagtaaattaagtataaaatctgatttaattatctctttaattagtcgataaagaattttatatttttttggcatcacgtttcttaaactattttttcttaccagatttgggtgttggatctttggtcacgtcgttggccatggctgttttttgataatagctgaacgatggatattaaaaataagaaaattatggatgatgatatatttattggaatttgataacttagatcggattctgagagaaatatttctcattagttcatagtgtaacacgtcgtggtaaggttgtggtgacgtggaagtcatgcatggttgatatgtgttgcttgataatcaaactatgttctgatgttcaacatgaagcctcttgtagctaggactatatattcgatgacgagtaaattcgaggggctttagttcgttcgcttggatagtaaatctgatgacttggataattatacaaaaagtaggaataattaactcgttttgacccaaatgtgtgaatttaatcaacttaacgcaatttccagatgattttttctttttcaataatctcttgaacgagtttataaatattatttagaagtctgtcctagtttcttctcgttctcttttagtttttgcgctttaaagtttatattagaactgactatttcactcgttcagcttatagtagaagtaaaagaattgcttttgtggaaattttattatcttcttgactaggtgaccagtcaaagacttatctagtttaaatgtttggttgcaaataaaatacattagatgatttacacttttaccatttggcatttttaaaatat

SEQ ID NO: 49615 - DNA, 549 bp, Arabidopsis thaliana landsberg
cgctgaacatcgcctccagccgccgcattctgctgcacggctcggaaggaaccggcgcggccggtcaggtcattgaggccttcgggcagtttgtggtgggcggcaattacgtggtcggtttcgttctcttcctggccctgatcgccatccagtttctggtcgtctcccacggagccgtgcgcaccgctgaggtcaccgcccgcttcaccctggacgcgatgccgggcaagcagatggccattgacgcggacatgaacgcgggcctgatcgacgaggccgaggcgcgcagacggcggcaggccatcgcgcgcgaggcggaattctacggcgccatggacggcgcggcccgcttcaatcagcgcgattcgctggccaccattctgatcacctgcatcaacatcatcgccggcctgctgatcggcaccctgcagcagggcgtggcgctctccgaggctgcccgcacctatacggtgctcacggtgggcgacggcctggtgacgctgattccctcgctgctggtctcggtggccagaggcatcacgctgaccc

SEQ ID NO: 49616 - DNA, 1415 bp, Arabidopsis thaliana landsberg
tgtgcgctgtcaatgcaatgcatcataaatttctcaaattctgttttttgtatgtaaattattgacgtataatggtaaatatgattaatagattcactcattgttcgacaataatcaaactgaatattgctcgataataactgaacatattacattaacaaattacgcactcacaatcgtcagaaccagccattattctcagctatacattctatatcatttgttatctttttataaccttaggtgatttaggtgatccaggtcacggtaagtatatatagattataaacttttatggaagactgatgactcaatctacaacattggagaaccacaactttttaatctatactttacgttctttaacatttaaatttcaaaactgagatggactttttaagttattatatatgttctaactaagtaatgacaccaattcaaagataatctagattatttagcgtgcttatataggcctttatttgcttggcgacagcgctgactgataaggttgtcagatagagaattacatgttaaatcaaatatgtgaacatacattacatacatatatatacgagtgatgagatcattatatatcacggattcacggagtgtgaaaaaaaaaaccaaatgaagctacgcagttgacagaaaacaaacgaaagatacacaaaaaaatgtttttttttttccataaaatcctcataattgcaaaacttaaaacatcaaaacgtatatatatcatcacaaattttcggcggaaacaaataataatggacaaaagtttcctaaattatagggtaatacaaaagggtacgtgggccattcgtagcatgtgcatgcatgtgcttctcctatctcctattgcccccaccattttccctctccttttgaaacaattaaaatggaccctttccttctcctttctctctcccttacctctctgtctctttccctctctctcgtcgaattcacgaattcgtgaggtgaccgcagatttgttcttagcaatctttgacgacactagaagtaaacaaattcttaaaaaggtatgtgttcatgtctcttctggttataataaggaaccctaaacggggaaaaaatccagtttggttatgtatttgatgtatattagtatattacatacatgtatccctttgatgtataaagacatcatggtatattacttaggattaacttactttttcttgaaaaatgactcataattgagtatatttctacttgattaggatttaggatgcagcctacgagctcaatgaatgaagaattcctaaagaaatggcaaatgggtcttcaaatattccgtccttcgatagacaacacgagcgtccacgagagaaaaaaagcaataaagctctctgcagacgttgcaatggcgtctctaagaaaaggaa

SEQ ID NO: 49617 - DNA, 456 bp, Arabidopsis thaliana landsberg
acaagaatacacattttcacgcttacagtgcgtttctcaactgcgaatacctgaccagctcgctcgattttgaatggaacgaagccacgcaaagaggaagggcatttgtggaaggaagggcgcggtacgatgcaaagctggaaagtggcgaaatgcaacatgtagaaggaggctttgagctgtacctctcgaatcccggaaactggtggtctatattttatttcgtgtttccgggttataactggaacggctgagtgttttacattcgcggatgcgattgattgttattggaggtggcgctgcgggatttttttgtgcgatgaatgccgcgcggttgaatccgtcgttgcatgtgtcggtggtcgaaaaaacgggcaagtttgttgtcgaaggtgcgtatctcgggcggtgggagatgcattgtcacgcatgcatgtttttctatcgatgaaatgg

SEQ ID NO: 49618 - DNA, 371 bp, Arabidopsis thaliana landsberg
  unsure (1)..(371): unsure at all n locations
aagaagagaatacgaaaacaatagatcaaacactagacacgagaccatgctctatcgacgtgttctgtgtttttcgggacagccataatacttttacttcagtgtgacatgtgtccatccagagcagcgtcngaacactttctttaagtcgtctgaatctnatgggtgagattcactttgacatgacataaattangacttgagaactcttcgatacaactgagcgcactaatgcacttaccttcaacacgtcagcaaagtaacttgtgatcagtacccgctgcttacatagctctaggacgcacgcatatnttctcgtacncagatngaggggtactttactaaattactgactacggtactcataaaag

SEQ ID NO: 49619 - DNA, 506 bp, Arabidopsis thaliana landsberg
agctatctcttgcttgttctgtatttacattcgtagggattcggatcagttcaatttcaagtttctgaaccactcatggatcaggcggagctgagtatagagcaggttggtgataattttccttgtataaacctaattcagtagatgcagttttgtatttagcatcattaatacacattgttaaatttaaaattgtttggtaagatatgaatgatgatgacaaattgaaacaggacgatgcaaaccgtcaatatagatctttgtaactttggctacttataaatgtttatcatgtggttttgtcagattttgtaatttctattgttggtttactttgcaggtattgaaaagggacattccatgggagacttacatgaacactaagctggtttcagctaaaggtctccagctcttaaggcgctatgataaaaaacctgaaagtgctagggcacagttgctcgatgaagtaagttttctacaactctttttgtctcctttcaaacagt

SEQ ID NO: 49620 - DNA, 708 bp, Arabidopsis thaliana landsberg
tccattcttttacatattacttcattcatgtaaccattacaaaattcatactctgtactaaaaaaaaaacctcaacttgagctgttttcaactttcaaaattgttggtggatcttgttaaaaagtccatattctaattacacgatgttggcatttatggtgaagtaacaaatctatttttggtataaacacgttctttttatctacaaaagaaaattaaagtttcgaaactagtatgaaattcgattaataatgtttctcactaagaaaaaatggccagtgttagtactccaatctcatttgcacattctcacctgagtttcaaaatatgagtatattactaatactatcattttcaaaatgaatgacttaagttaatgaagaaaagaaaacaaaggacattgacatgtatacagttagtatataatttaagatgaatttgtatgttttgatcatcatggtaagggccgtagtttgataaacatgcggattagccatgacaagtcacttgatgttaactttagacttattggattaatgagtaggccatatccaattagccattattagttttcatttgtcaacattcacacctatccccgctgttttttttttttttttgaatggaaaattaagtaaatgcgagttcgactttagtcccgtctgcatcaaccattcaaaccataacattcaataagaattttatgtt

SEQ ID NO: 49621 - DNA, 958 bp, Arabidopsis thaliana landsberg
atcgaaaaaaatgaaaactaaactttggaagttcatgttatcgtgccaaaaatatttctccatgatgttctctataaaaattcttaagttttaatttccaaaccttttagctgcatcagatttttctttaataaaatgcaaatgacaaaagaaagaaaatctattttgttttcggataaagtcacatatgaagtgtatactgtagttgatatttgtcaaaaaaaaaaatattgttttaaacttttaattcagatttgccttataatgaagaagaaaacaatacaattattttcaaacttagtattggtttggtggtggttatgtacttatgtagtatggagcaactgttttttttttgctaaagattaattgtttttggtatggagaaattgttttactttgacaaaaaccaaaaaagcctcaagctaactaaactgaatagattttggagctgtagtatagaaaaaaaaaaaaaacatttttctgtttggataaaagatttgtaaaaacatttctacctttataaatgatataaagtttcagtccgaacaaatcatacaaaacgaacatccataggaccatcatactcaaagtatgagctacaaatatcgtactccattaatataaaatcaaacaaaacttaaattttcatacatatactaagaaattaataggtgacagaaaacaaaattaaacacgatcgtagttttagttgtagtcgaattaaatctgactaattttcctcaaccaaagagtacgggtttgactttcagttcgaggaatggttatagttaaacagcgttgcatcttcaatgacaattacatatatttaatccattgtcttcttcttcaaacgaatcataataagcagaaacaagaaagagatatggttaaaacccaaaaaaagaacaagaaagatacaagttttgacgcagacgataatgagacgatgataatc

SEQ ID NO: 49622 - DNA, 1127 bp, Arabidopsis thaliana landsberg
aaatcagaaattacccgttcgatgttgagggttatacacttacttttcctataaggatgatcttctgagaatttttatccactactacttccacttgaataaaatcttttgcagctggtctagttttgtagctcagcacgttcacctgtagtgttaacaatgattgattaataaggccacggcttttcacaggactcaagagaaaagaaaccaaacttgtcattgtacctgacatgcataaggaacttcatttcggtactgcataaatattttctctctaacaatctcagaaacaaaaaatctctctggatgctcgctcacaatatcctagaaatcaaatagccgtaagacattaggtaagtgaattgttgcatctgaagcacaaacctcagaatattaagcaaattagactataagctttagctatagcaaggagaggaattcaatactgaagcagggaattttcatacatagtacctttggataataaggtggcccgaagggaagtttggataatatccactctttgacatcctctattccatgtccatactttgcacttacaggtataacttcatcaacatccgtaaatttttcataccactgcaaggagttgcagcatctattaagcaaagaacatagcaataccatgactccaaatcttgatctcaagtttatagtgaagcatcttccaccactgcaagttcattctagaatggtgggattttaataacaggacagtattaccaaggttcaaggatagcaacgacagcatactcacctccagtttcttggcaatctcaccaggtttgatcagatctttcttattcataacaagcaacatgggtggctttttttcaaggtctcccaaaccctctttcaaaacttcttctatctaagcacacaacaccagaaattaggacaggaaactaaactaacaaagcatgagaaacaaatcaaacagagaagcatacattagtaggcgttttacaagcatcaacaagaattactacgcagtccgcattgatggcagcatctttgacattcttcatcatcattgtatctaacctgtgcatcttcttcttaatacaccaggcgtatcataaagtatcatttgcaacacaagc

SEQ ID NO: 49623 - DNA, 369 bp, Arabidopsis thaliana landsberg
atcctagctgctcaattatcacccccgattagttcttaaagttcaagcgatcttcttatttcattctggctatttataaacgtcaagttgtgataatatgtctacatcaacgacatttgagtgatccagattaaagcatccgattttcaaatctaggtttacttgaaattttagatcgataccggctcaaatttaagtagggacgatcaaaatcccgatggcacaagatcactcactcacgaaactccactaatagagaaaacgatgaacgtagaaacttaccaacgtgctgttggccgagtggtacatgttccaggtgtaggtgttgagctcgaggcacttgaactttcagatattcaaactactgtg

SEQ ID NO: 49624 - DNA, 997 bp, Arabidopsis thaliana landsberg
  unsure (1)..(997): unsure at all n locations
aactttttaaacctgatataattggatatcaattcttgcttattcaatttttattggcttctaattagctttttgaattaattcttagtgaaacataccaagggaatttaaattcttgaaatttaattcttatctaaaatatgtttataccaattcgtataataaataatatctatctggggatacaaatgtgtttttattgtttcctcgggaaaccacnccaactnccttccctggcatgtaaaaataaatttttcttagatactcttttcaaagttttcctcaattaaaagtattagattctagcagattttatatttatttttaagaactttatattcataatcatttcatttagtttttcctacattcatatatttttttcgttgtcaccaatcaaaacctctgttagagtggaatcaagaaactatattccattcaatgattgtaaaatcctagacaacatcatattgttagaagaaattggcagataaattatattgatttatagataaaagacaatactaagagaatagtatcatgaatgtttaactaaataaaaatgtcagtaaaaaaaaaaaaaaccaaaaaacgccaaattaggatgcaaatgtctaaatgaacggtgtggccaaagacttggtcttatctttctctctcacccactcattacaattttaaccacagtaaaaaaaaaaaacagaaaatccatatctcaactcaaatccacatttctatttttactttcttcttaccttacgtttgtcttttgcggatattctccaaaaaataattctttttagattactttcctctatttttttttgttttctttcgcgtgtgattattaactcgaggtaatttctctaatcccagttaatatcacacgcggaatatcaaagatcttgatttttgtaaacattgtaccaaaatcatcagaagattattagtggagttttttcgaagaagaacaaatttggtaaacatatcttttgat

SEQ ID NO: 49625 - DNA, 663 bp, Arabidopsis thaliana landsberg
gataccacaccgcatttgcgtacactttggttttctgtctttacctactacaaaccacccataagcacactcatgttatcatgtttttttttttttggtttataaagttatatccttaaattttctatcacagaaccggtctggtctaacaaatgtcgtcaatgatgatcatttaggccaaagagtttgtttaaaactcgttatacttaagtttctaaatctacacaacacaggaatgtaacacttaagcaggcttaatttcaccgttttatatactcacatactgaagaaatttattgtcaatcgccaatgtggtcagcggtaagatctcatataaatcttcctagtagtgttcaagaaaatcacttagagtagcatctaacgtttagaacacctagtcaggatcattttaggtggttaagagttttgtagagtgaatttgtatggtatacctcgactatgacctactactataaacgaaataacatgatcttaatttatcttataagcacaaaaataaacagcaaggaccgagaaaacatataagatataaaccatttccatatataccaacgacctcaaacgtttacatgttcaaaccgtcagaatgttttctaccacgatcgaaaaaaaatagtctgaattgaaacagaggaaaatata

SEQ ID NO: 49626 - DNA, 616 bp, Arabidopsis thaliana landsberg
tggaagcctgaaatcgtaaaaatattgcgggaaagggaaagacttctttcagaggtaagcagatccttatatatttatagcagtcatcacctgatatgattttggtgtctatggttagctattcatttgttctccatgatgctaagtgtaagatcttgcatttctctgatttaagcatttaatatccgaggtggttggtttttaaaatttatatccttgtttcaaggtagccaaaatatataaaatttagaaattatcatttatagataacagattttcttcactgactaccattgctcgtggctgttagcaactgatatgtgtgaacgtcgagttacctgtgtttttcttgattatttaaagatagtttatccattgaaaggtttcagagcctattttattgtgcctgaatagtaattatatttttcttgtagctgaaccggtgtcgtggtaacagtgtctgtttacgagagcagtatttcaaagaacagagtggagctaaaacaggcacaatacaaggacatagataagcggcacttagatcaactgatccagctaaaggtaagacgtagtattaccttgtggtagtgcctgaatggtcaacaaattccacttt

SEQ ID NO: 49627 - DNA, 1129 bp, Arabidopsis thaliana landsberg
ggattccaaggggatcttatgaagacaaaagtaccggtcaaaagaccgttggaatcaaacggatctttttcttcgtcaatggataatatttcacttctactattcttttaacaattttataataaaaaccaaacaaacaaaacatagagaatacataagttatgggcttttgaaaatctaaggcttaaattcttataaagcccattaatttttatatgtgtaagtaagttggccatagaaagcttaaagccttagatatgtaaacacgcaagaatatggtaagttgtttattacgcactgtccacatcatagatcgatagatattctttccacgcaaagcaaagttttattaagatggttctagaattccttcttatccacagaaaatttttatattcaagaaaatccaatttttcatttggagtcgaaatttacgcggccactaacgaaatttgatttaattaaaactagtgggcatttaatatttgaaaataatactatttgttaaatcccaattgaaaatttaataacatttaatataattaacttttttgaaaaaaggaacaaaaaaagccatccaatttgaatgatacatagagcagctgaaaaaaaaaaatctaccttttagaatttattaaatccaaccaaaaatcaaacttagccacacaattacaatagaaacccacgtgtcatccacatgaccactagatattcagacgaatatctccacttccgtagagcgattaggttaatgacacgtgttaaggtggacctgcgaagcagaggaccacctccaccgaatcagccgcgatacagagaaaatcaaaacaatggctcatattaagccacgtcagctcagtgaaggcccgctttgttacacaccgttaattagatttctcaaattgtttatttgctctgagcttatacaacaaagtcttcttctttctctgagaagatattttcgtggttgtgatcgaaagataccaaactaaagagtttaactttcttcttccttcttctttacttcaacatctgatattttctctctctcttttattcagtctgaaacaatatttctcggtagattaagatctaaagcctcgtgatctagattcttggttctattttt

SEQ ID NO: 49628 - DNA, 914 bp, Arabidopsis thaliana landsberg
tcttgaatattttaatgaactacaaaacaacaaacttcaaacaagttgtactatgtacaaaattgtcttatccgttctaattctatcgtaagaaactttcttattaaaagtataataggaatattgaaacttttatgagcgctagatatatataccttaaatataaagttttacagaaatatgtatggatccaacttccaagacaaaaaatctcacaatgaaaaaaccaaaaaaacaatatcgacgaaattatcaaagtaactaacgttaaatcaaaatcaaattagataggatcgataagatattatatatgtaaacatttgaattatactaatgaaactgatcataacgtgttatatagattcacgtaacgctaataggtctaatattcgattcaggagattgaatggacgcaagcttcagctcaagatcgagtccaccggagttacccgagccggatactgatactttcggatctggatatccaagacgaggattgagtaatccttgtttccaaacaacctttgagctcgacccaatatgatcattacatatcctcttagtagtactattttcttcaacattgccggccgaaacctgttgaatataaaaatttgtcaattcaagattattttctatttttttcttcggattctacaagaaattatatgttcatatatacttggtattaaaataaagcttagattaaacttaaaatcttgactaatttttggtttagaaaattccgatattttaagtgggaaaaaaaaacttggaaagaaaactttttaaacaacataaaaattctgtttgaacttttgaagatgtgacttttgttggatacagaaacattttgatttaatacataaaagtttgatacaaagagtttaaattctttttgtcatgcatgtata

SEQ ID NO: 49629 - DNA, 831 bp, Arabidopsis thaliana landsberg
caggtaatgtgagtaaagttgtcaagtccacaagatgacgcattgttggtcgtccgtgtgggcaattccaaggagattcgagatctgccaagtgttctactatctgaccaaaacccaaatgacaaaagcgttaacatatgcagaagaatgtgttttacaattcaagttgaatttaatagagatggattccatcgttagctatcaagggacattgttgtttatcttagggtaagcattggttaccttctgcatttcgttttttctgagtggatctccgatcatcacagatgatctgcatgctcgggatgctagcattgcacggactcgtgatggacaaatcgaatctgttttgctggttttgtagctactagcaaccgaacattccccatggttatctcctagagttgagatcaggtctttaagatctgcccaaaacaataaagtaaataagaacatgtaatgcaaaagacatttgatgcaacagaggtacagaaaaactaccttcgactccaaaggtgatattcttgctataaggaatggctcgtagtctaaagtgttttccgggaggagcacttggattctcctctagaagaaagccattttccctggaaagttgttacattattgaatctccaaaccgatagcaagaataagaaaatgttacaaaagaagtaatggtgatccttcacctgataatatccatgtgcattaacacagttacttcttcttctggagagagttccaagttcaaaggcctgagtttaggaaaaaaatagataaatatgggtaacatatagagtagtggaaaagaggtattactactggttcaag

SEQ ID NO: 49630 - DNA, 836 bp, Arabidopsis thaliana landsberg
gcccatttgatcacattccaccgaactcagaagagtataagtattcccctttttgaaaagaaagaacagataacgtaagatcggttgtgtctcgccgcaatttctcttcataccgtcgtcaacatgtaacgttctgtagtccgcatgaaaccttagcaaattcgcgagcttcgatttccaaattatgggggtttaggccgaccgataattgaagaccgtgatgacgagtttgattttgtctcattgataatgcgtggacatttgctttgtgtttgatgattactgttagagacttagagttattgtacttagtagaagagactaattgtaaattaattaatgcgagctttggagttcaaaaaacctataactgaactagaatctcgttaattatttgtgtgtttctctgattttatgctttcaggataaaacactgtttgatgtgcttcgtatattctctcttagaatgaaatgaattcagaagaaaagtttgtgggtgatggtgataatcatggttgtgatgttgctttgtgtttgtttgattacttattttttggaattttggatgtatattattcaatttaatatactgccatactagaaaacaaatattatagattataaatctacttttttggttataaattattcataacatactgttaatttgttttcctcaaaatatcagattattgctcaaatattgactataatccttaaaatgagactttcttaataattaagtttcattatttaaatatttatttcttaaaatattagtatggttttgcgatacttgagtcttaacatgtacatattgtattaaatatgtttct

SEQ ID NO: 49631 - DNA, 2519 bp, Arabidopsis thaliana landsberg
cgatataattagataatttaaaatatatgcataatatacatatactattatttttatttaatgtgtcgaaggatacaaaattattaaaaccatagcgattacgtaatttattcactattcatcagtttcttaatccaaaagaaaaaaaagaagaagataaagaggtatttatatatcagatgttcaaaaaccctaaatcgcgtttcttctctcaaatctgccgccgccatcattgatccaggtattgctctaaccttgactcttcacgtcattcgcatattactctcctcctcgctgatccattcgaattctgcactcaaatcgtgtttttgtacatcatagtttcaagcattatgattctctctagccaatgacttttcttgcgattgaatccttttgcagtctcgttatcaaaagttgaagaatttagtttagtttggttgtgtagataagatttgtaatcgcaaaattcgatctttgttacagttatggattcgagttactctgattctcgtcccatgttcgtgcaatcaccttatggtggttggaatcaaacacagatgattgattcaatggctaatccaatgaacaatgaacaaggagacttgcattcactatctgaatcacaatcacaatctcaaccgtctcagcaattacagcctgcattgaaaaggcctagacttgttgatgataacttgtttaatcctgcttcgtcgtttcctcagccttcgagtagcaatccttggatggttccatctttgaaccctcctcctgtgaacaaagggactgctaatatattctataagactagaatgtgtgctaaattcagggcagggacttgtaggaatggtgaactctgtaattttgctcatgggattgaggatttgaggcagcctccgtcgaattggcaggaaattgttggacctcctcctgctggtcaagacagggagagggagagagagagggaaagggagagggaaagaccgtctttggcgcctgttgtgaataataattgggaagatgatcagaagataatcttgaggatgaagctttgtaggaagttttgttttggggaagagtgtccttatggggacaggtgcaattttattcatgaggatctgtcaaagtttcgtgaggactcggggaagttgagagagagctcggttataagtgttggtgctactgctgctgatcaaccatctgatactgcttctaatcttattgaagtaaatagacaaggaagcatcccggtacctgcacctatgaacaatggtggtgttgtcaagactgtgtactggaagacgaggttgtgcatgaagtttgacatcacgggtcaatgtccttttggcgataagtgtcactttgctcatggccaagcaggtatgttatatgttgaacatgtatctttgctaatgcgaccttatattatagtatcctagtatagatttgcaagttctgtgtatacaggctatctctgaattctcttcttttgaccgacatttgtttgatcttgatttggttgttgattacgaaattgcagagttgcataactctgttggaagggtagaaggagaagctatgaacgcggtagcgtctgtgaataaacaagcagtggtacctgcgaatgaagcatttgcaatgaaaccgattacacaagtaacagcagattcctctggtctgaatgaagaagggcggagaaagaagtgtttgctcaagtggagcgactccaagaagattaaccgaatatatggagactggatcgatgatttaccggtgggtcaaaagtcgacaaagccagtagagagttgagttttctagcctggtttcatttgtctcgtccttttgatgatcaaaactgataaagctttggtcgaaaattttgaagagtagaaacactctttattttgatcattagcaattctttgattcgctatagcttagaatattgcttttgatataatctgtgattacacaaaagaagtggcttgactcactaatagcatcttattcttaatttgtttcctttggcttctaatgttcatcattatatggataggtttcgtatttcgtttgccttttaatgttctaacgaatcggaagagatatagaaggaattgggcgtatcctaaatttggcctctagtgtttgttgttggttgacaaaataaaaatgtttgttgttgacttttgttttcagattaaggtttaattatctacatcaaagtgcattaaggttaatcggatgttaaaaataaaccactttaccgatttatcaattttcttatatgataaaccaaaaccggtacggtttgctaccgttagattttggatgctcaaattaaatcggttggatggtgctagtttttagaataacgatcatacattctcttttctaatctgttgatatattatatacatacgaatgcttattgttaggtacttaggttcatcgcatgcaaacaaaatcatggaattgtaccatcaatttttaaaatatatatgtctaaactacgaatagtc

SEQ ID NO: 49632 - DNA, 1133 bp, Arabidopsis thaliana landsberg
atgaataagtggtcttggcttgaaaaaagtaatttataaggttttaactttatttgaaattagggggctgtgtgcagttactactaaagaaaaaccagaatctttagggtttatctttgataatagacctaccaaaaagagtggggcatgtttgtcctaagagcaagtaaccatagctcgtgtgtgacagttaacaaccatatccagtacacaattgataaacaaagattcaactttctttggagttttgatgtgttgataaggtttctaaggtcttcgttaaccaataaccatgcaaagcacgaatgttttgtttctttgctcaaattttgtgagaccggatatgaatttacccgtttggattgagcttgtggacatgttgggacatttttaaaggacaaacactgtttaatgccgtagcagccaaggcatttagagtcaacctttttcttttaattgtaatcaagatatggttattgcaaagtaatatacaaaatcccacactttagaaaccttacatctattaaaggttcgaatcattagaacatgatggatgcatgcaaatgcaacatggtatctgtataaagttttagctttttgagccttgaagaaaaggaatggtgtggtatgggaatagtgaagaaaggatgattgagacatcatgagaaagatgacacaaaacccaaagaagaagctctcttacccatgacatgtctcttttttaccttcttcttctgtgtaatttagaactgtccccacaaagtctgtctccacttcaagacaaaactgcttccaccaataatatctctctctcatctgctctgctcagcctcaccaactcttacagtacccaaatacatctatcttattacctctctgttttttacagctcctctgtttccactctactcaatagctttactaaagactcactgttctatataaagctaacagttacaagtccataaaagctcagaatcagaagagagtacatgagtttcctcttctgcctctttggtgattcttagcatttattattactcactcatcttcttttcattacattacataccaaacaagagctctcaaatggaaaggtttcaaggacacatcaacccctgtgtatgtatctt

SEQ ID NO: 49633 - DNA, 539 bp, Arabidopsis thaliana landsberg
aacacgttatcagcacgatgctctcgaccaagcggagataattaggcttctgcgggcatgggagaatgcggccggaccgtggtggggattttcttcgttgacacagccggcgctcgcggcccgtcggagcgcagatcagataagaaaagaaaaggagatattatttgtcgctcacaagaataggaggaaaggtttcggtgtccagaaccttgcaagaaaaaggtcacgttgcgtcgcagtggcattagcgatggaattgaataatccagtaagcaataatctcaaattactcatacctttttcgatttactccatgggcggaacgctgcgttgggtttgagcccgcaccgtgcagccgtggtagccgcgcgccgccgcgatacacgcccatgtgcccacgctgctgaccgcgcagcaagcgctggaacctgtgcctaccggggccgcacgcacacgatgatggtccgacgccatggccgcaccatcggagccgccgccacgcgcgggatggcccgtgcgcccgcgcgtcaacgtcgagg

SEQ ID NO: 49634 - DNA, 1046 bp, Arabidopsis thaliana landsberg
tacaaaatctagacaaaattaagaagatttaaagatatttagttatttacaataaagtttagtttctaattttcggatttaggattgcttgtctatcagattttttgacttcttagttagatttattaaataaatataaaacaataactttgtgttaattacatgtgtctataattctgaatatacttgctatatgtctatttttatttttgtaaattaggtgatagatgtagtagctatgtctaaatttattttaagtttttaactaataaaactaaactttaattgaactgaatttgttgtttttactttttagctaattacatgtttctttgctaagtacctaagatagcctaatttgggacaatctttgcaaaaaaagacgcattggtatcttcgtagaaaagtcttgtattttatcgcacttgttaaataaaaatctcgtgattttttaatcatttttgaaaatacataacttatttccaaaattgtcactatatcaaaaatatttgcaaataatgagtaaagtcattcactatgtctaattctcttttcagtattaaaacttaaccctcattgaacagtgtttgttcataagttcatttcaactagttaatggtgttggctaactagggtttctttgcttaagagcccaaagtaacctaaacgaagtaaaggaataaaaaaacagattaatagaacatttttttacattgagaaaaatgataactagaaaaggacttttgattttagtcaaagggcgggaaaatgaaactggtgatcctaaaagatcggtccctctcgacggtaaaactctccggccgacaagccttgagagcaaaaacaaaaaaccaacaacaacaaaaataatacataaaaacagagagagaggaagaccccaaaaagcgaagcagattcaccacagaagaaccaaaaacattgcttcttctgcgaaaacacgcctaaaaacatcttctgaacaccggagatactcgccggataaatataagataaacgagacttttgtatcatttggtcatgatcac

SEQ ID NO: 49635 - DNA, 970 bp, Arabidopsis thaliana landsberg
gtatggccaacaatttgtataagaaaaccatatgggatacatgtttagccaaacatggatcagtttatgcaattgcaagcgttcttttaatcagattttgtattcagtttctatatatagatttagttcttcataaactctacaatatatttgggacaattatatttcgatctgtgttgggatgcattatttggatgcaattgcacaatatattgtttgtttaaccaattcacactaatatatcaacataaaaagatattttataccaattacatttagaatggtcttactaattcatttctgtgaaatcttcattttacttttaataaaagaaaaatcacgagtttatagacgtgaatttgtacgaaactcttaaaaacgtacatgatagtttcttagatatgccccttggtctaaaagtgtcacacatatttgcgaatagaatacttgtgagttgagagcaatggtttgataattattatatatttctactctacaacaaatactgccaaatagaaaagcaagaaatgttatcaaattcaaatgtatgttacgtttaagtaagagtgaatctcgttgaaaaacgtttatatgattgtgtaaatatctatatagatataaaatggataaaaacgagaagtacaagatggttccaacttccaatcaaatcaaagtatcttactaactattttaaatttaattaaattataaaatattagttagggtttcgtgcgtagagagttgagataatgagatttgagaacattctataaggcatgattcatgcatttacaaattggtacttgttgtactacatctttacttattcttagctaatatatactttatctccgcattaaaaaaatatcatattacactatccatgtcttttattggctaaattgggctctccatatcaatattatggaaagagcaggtgtgtcgaacacatactaaagactttgttcgg

SEQ ID NO: 49636 - DNA, 1251 bp, Arabidopsis thaliana landsberg
acgcttctgagctaaacctttgccccattccagttttatctcctacaagaattagacactacattcgtaactctaattttctcagattcagattatatacatattttgaggagtatagagttaatgacacacagtacctttggcttctctatcacttttttttgcttcgatttaagatattcctcctttgatatacgcttccctgcaatatcaataagtatctgggtgtgagacatgagattatgcattcttactgcaacttataacgactagggacctatagtcctcacctgtgatcttgtcacggaacactgcttctgcgttttgaccagttagctcggaatccatatttttaaacctgtagaagagtataatttgtcagaaagatggtagcctaaaaacatgcaatcgcgaatctcaaatcatcgttactgaagactggtctctttatgaattccctatttaaagacacagaagacaaaatcttagaaacttaggaagtgggcaacatgaaacttcaaggaaataggaaactactcttggcccaatactactgaaactgaaacaaacctgatgcctataactaaaatgcagtaacagattctaaaaagcttaatctactttttgataattacctcaatttttcatcctcctttttctttcgatattcacttccaatgtctttgccactaatcaatccggtctttcgttgctccttgcttatttgaggaggtgatgaatctttgcgaggtctcctcgggggagagctatcaaaattggaactcctggacacattttcagaaaaacgtggcagatctgcggcttttctttgaggcgaaagatctgagtcttgagaatccttcatatttatattccggccgggtggagataaatcagcattcgagccaaaagattttgaagaccttctagctggttcaggtgatggagaatgatatcttcttctccgtggaggagatagatcattgctcttcttttttacatctgagacaggtgaaccatgtaaatctcttttcctgcgaggcggagataaatcatcttccaactcaacagaatctgaacgctttctgctagattcacgcgatggagaatgaacatgtctcctacgaggaggagatagatcttcactcagatatttagcttcaggttctggtgaaggcgaatcattcctggctttttttttgcgaggtggtgacatatctgaatccaaactaaccggcttggtatgttttc

SEQ ID NO: 49637 - DNA, 721 bp, Arabidopsis thaliana landsberg
gatcattcaagcggcaggagcgactagaatcgagcacatatgaaaaggaagcagccaatgtaaactaacagctagcgcttgctaggaatgcctcgttaaggcagtcgtagggcaagagactggcgtcattgatatcattttttacaaaacagggaggcctgtcgaaaagtttaaccctttattaaaaaaagactgggagcatgccacaagccaacacaatcacggactctacacggctatattccctcgttcagtatccactaaatacacacttgaccaagaataaaacaacgttacagcttacaggttctctctcttatgcgatatcatatattaaaaaatgtaagaaaaatcaaatttcaagtggtcgtgatatgctgtgagaattcacgaaggcttataaatttattttcaagttgatatcaaataaattaaatattgttaagaataaattttcattagaaaaaaaaagattcgtcaatgtcatatgtacaaaaccgcctacctagtaccttcttttctgtacactctttacaaaaagacattcttttaaaaagcaattatctattaggaaaatgcgtcctacctatatcagaaatataagtttaatatggtaattaagaagagctttttaactgtgctggttacagatagcatctatatattaaacttataaccaaaatgaaaataaaaatcatgaggtctgtgaattattctatgt

SEQ ID NO: 49638 - DNA, 566 bp, Arabidopsis thaliana landsberg
ctgatctttccaatgcaccagcacctggcgtacaccgcggttgagccgggttcggatggccctagctggctccaaggtgactgccccatggtgaagtgggggtagtggcggtgtaacctgcggtggtgtgccgtgatactttttgaggacgcccacatgaaacacgtcgtggatgcgagcgcgggctggaagctcgaggcggacagcgacctcgttgatgagttccagcacacggtagggcccatagaaccggggcttcagcttgccggtggagtcagtggcgagggaggcaggggagcggtgtcggagaggagcagcacccattcgcccacctgatacgtgacggcgcggtgtccctggtcataatacttcttctggacagcctgtgcctgttccagccgatggcggacatcagcgaggaactcttcgcgctcctccatggttctagccaccgccgcaacacgtgtgtcccccggttcataggaccggatggacggaggctcacgcccgtagacgatcttgaaaggcgtgtccggagagagctctggtaggcggtgttgaagacg

SEQ ID NO: 49639 - DNA, 767 bp, Arabidopsis thaliana landsberg
actcactgcaattgaacttcatagtcagattcacatgaaatttgacagacgaataaatgacggattaaggatggatgtctactaaaatatcactcttgatcacgctgataagccttaaacataacaaaaatccaagaaatcgattctacactaaagtaattgaacaaaacagagtttacgaatcatgcatgatacaaaagtaagagagctcacgcaagcccagagtagactttggcacgcttgtgatacgaatcatgatcagcttcctccatcgtacaatcctctgcttctgcaaccacattgctactactctcaccctgaaccaactgattcaagggaatctcagaggtccaaaagcgatccaattcagcccaagcggcttcactttcctcggcacacagcctcagcctccaacgtgggactcttggtgccctctcgttttcaccgaaattaacaaaatcaccatcgccgttactgttatccatggccgttgctaaagattgtttcttcactctgccgccgttatcgtcttcctcgtcttcgtcttcgtcggtgaagcaagaaaaacaccaaatcctcatgcaacccctaagcccacctccccaaaaacgaaatcttgtctctcgatctaccacatttatagaaaacttgctcacaaaaaccagaatttggggaaaagtaacggaattcggaaaacccagatagaattgagaggaaacagaattgaatctctaattctggatttaaagtgacgggaaggagaagat

SEQ ID NO: 49640 - DNA, 1214 bp, Arabidopsis thaliana landsberg
  unsure (1)..(1214): unsure at all n locations
ttaaaatcaaatcaattgtatgcaatataaaaatagatgaaaaagggcataagctatgtatttactctgaactattactgttcatcgactataatgctgatgtggtttgatagctttatccattatccacaatggttaaatgaatttggtcaaaaaatcataagaacttagtattttacaaaacctcatttgcatgagaaacaaacaataacattaaatcatatacactttacacttaagtactccacagaacatggacttggtccgattctttccctttaacaattaacagtgacgaatttttgtatatcaatatttttctactaaaatttctagatccataactataatcattatataggtcctacaataatcaaatatgttatccagtattttcggcgttgaccattgcgctgttaaattttcaatattttatgttccaaaaaaaaaagtgttcacaaactttgaaaacaagttgaattggaaaaagggagataaatattgaatagcaaaactaaattttcaacatattttaaatcaattatcttagatggacgtttaaaatatcaactttgtagaagttttatagctaaatgaacaacaagcttcattatgttaagttttaaaaccaaaaatatatataaaaatgtatcgtaagtttgtttagacgtgcatgcttcaagcatgttacaacattctgtcttgaatttattatcttggtgcaattgaggaattcacctcccatacttcttacagtcgaatgtcagatctttgtttttgccattcttatatttggtttctaaaactattaaaacaagctttaattgaatccacttcactctttcattaatcttactttatcaagtttttgtcagcccatgttaaagtccattatctattttctaactgataggcccatgtgattagtacaacatacaattgttgatatttcaactggattcactaagccttgtttgcttttaacatttgtttttgagtttgcttattataacaggatttcttccaaaatgaaattataatttaaacgatgatttttttgtgatttctttcttaaactttaacggttaatataaagaaaaggagagcctttggcgttagtatttacattttacaaatgtatatttttctagagaaaattttccttcactaagaaatgatctatttctataaagaactnttgtttttgaagatgt

SEQ ID NO: 49641 - DNA, 724 bp, Arabidopsis thaliana landsberg
tgattagctaatagctaccaatgagacaaaatatattaggttggtttgattagcaattaagacgacgacttgaattatgcataaaaagacatttgagatttgaagatctcattaaacaattggaggagacttggctccatgtctctcactgttttgcacggtaataggagtactacattatataaatttggtaaaactagatcaacatcagattgtttcaatgtttatgtgtacttgggaagagtggccctgcaggtcttaatttaagtttcctcaagtggtaatagtatgaaaaaatataaacgtatatgttcttggacaattagctgtaagttacagcctgtaacgcaaacttgagagtgtaaataaggacaacaacaacaaaagtaaataagaaaatttcagaaatatggttatgtgttgaggagacacaaatcattcctggttctgacttcaatcatactctctgcataaaagaagtagtagtagtattacataaggacaaaaaactattaaatgtaattatttgatctacaaaatgttatttcaacttgagcaaaaaaatgtaaaatgttaatttcaaaattaaaataaaaagaagcaagtgggtgaagtttctgcatggtaaaaagcgtgaaagaagaacatgagaagaggagtggtgttctctgcggtagaggcaaagcctgactcaagttttctagtaaaaaacactttccacata

SEQ ID NO: 49642 - DNA, 392 bp, Arabidopsis thaliana landsberg
actaatcaattatatataaatggaaagctcaaaaccgaggtactttgaactgagttacatccgacttgattacggctattaatcatggttgaagtatggtaaactttcatcttgagatagagtcagacaaaataaaataatggatgcaatgcaaggttccatttatgtacgtaagtgtccccatagagaatgcatggaactcgtaacatttgtaaagataagggggttcagcacattatgcgtagcaaagttcactggtacaagtactctgctcatttgccatacgattgtgacctatgtggattgactttcagaggaaacgcagattcgtaatagcagcgttccggtatgcagtagtaatcagacgtgcacagtcgaggagaattcgttta

SEQ ID NO: 49643 - DNA, 992 bp, Arabidopsis thaliana landsberg
tcagtggtttttatgtggaaaaatgctttatttgttagactagagtcgtactgtatatggtccatatacagccccacattatgatgaatagtatattgaaattatgtttgcgttcttggaggaaagaaatcttgaaacaagtatataaatcattatttcgaatagaaatcgttggtttttgactacttttggtatttttgttgaatatttttggaaaaagagagatttaagagaatctggctagttttggattcattaatatacctttggccttcttcgtcgtcttctttaattttaagctagcacgagtttgccaagttgtcggcaggaagatataagcccattcattacatgtacactttctaagaatgaaaaaaaaaaactacgcttatcataccaatttgctgaaatatatcatgaactagatcataatctgtaaaaactgtcatatattcagataatctaagccaatttctaagcagaagtactatgtagatgaagctttaatttgtttgctctagcttctctttagtccgattttttagtgaaatctataaaaaggtttggactttggaggcatacgtgtgtaggtgagaggacaaaaaatgaagataaagcggtcaaagctaaatcaaacatacaacaacagacaaagagatatgaaaagctgccgtatgagaaaggtccccaacaaagccggcaccgacgaactcacacgaacgaacaagacgatacgagagtcacgagaccgtatcactgtcctcttccacacactgtatgaacataataaaatcagtttatctcaactaagaaaaatgaatcatcacttatctcacgtacaagtcttagttaaagaaaaaaagttctcggtaatattattttaatggtttaagcgtaatttcagcagaatctattcacgataataatttggtggtgattatcaatatactaatatgggtataacccactttattattggggatgctttgggc

SEQ ID NO: 49644 - DNA, 971 bp, Arabidopsis thaliana landsberg
tcctttttcttttctttttcgggaaagctaatattcaaacttgtctatcttcttcaatatgtgatactacacctcttgatgccaaattcagttttattattctgtaatatatagagaatgagattttctgaatttattttgccgtcatgaaaatcatatttaacagaatgtacactattaccaagataattcattatctcaataaccagaagaaagggtccgacaaatgaagatagaccccacaatgcacagtgatgcagcaaactcttatcttccacctccttcctttataaaccgtatataaaaatcttcgaacgtgattacacagagccactctctgattcttcttctttccttttttggtttcttctccaattttgtttcctttctcaccgtatcccaattcaactctcattaaaataatatttctaatgtatctgctgagcttagagaaagcggccccaaaaatttacaattttgcgacatagaaatatctgggctacctctctttctctctgagaactttagaggtaatattctctagatttttctcgtctcttgttcacagaggttgttaaagtttcaatctttaattcatttgtggggttttcttcaaattaagaagatttttctctgttctctttgatgtttacgattgcgatttcgctcatttcgattttgtcgtgtttttgctttttacttagctggattgaacagaatctgaattcatcaagaactaggagaagaacgcaacgacgaagataagaggttcatacatttatcagaatgttctaacttttcaattaagtaaatgttttgtgtagttttgacttctcctttctctcattgtgtgaattattttgactctttagctgaaaccgagaatctggttgacccaatcaacacataacactcttgaatcatgaatattgatatatctcaaacacatcaatcaatctcgaatctttttt

SEQ ID NO: 49645 - DNA, 491 bp, Arabidopsis thaliana landsberg
tcagcaaaacagtcacaatagccagtggcatggtgcatgagattgtttgcttagaattcagaatcactaaaccctcctttcagcatatgtattaaacaagcccatatctattcatatgttcaacttcaacaaaaatcacagaacggaagagtcaatccacagattttagccttgacttcagagagacaaactcacaaaagaggaactgattcaaagttaagttatgtctcaacagttaataactgagtcaatacaataatgatttcaaaatcaagatactctcaatggcacaaagtatcttaaaattcaacaaaaatcacaaagggtcatacattttcagcctagaactgcagagacacagagacacaactttattttagttgtgtgtaatgaccctaactcagtgctcatagatttgattccatgtaatatgcaattcaatatcactgtatcacactatacttgttcaggctacaattcaaatgcatcat

SEQ ID NO: 49646 - DNA, 609 bp, Arabidopsis thaliana landsberg
gacttacaccacaaagttctctcctttatgacgttcacattacaagcatcaattactaatctgagttgcagaggaaagaattcagaaacagtggaaaagtatgggaccatttggcacgagcagagatcatgacggccataggttgtgcctctctacatgacccttcagtggcgatcttgtgaaggccaaacaactccatcttagcttcagcaccaatttcttcagctttcccggattcttccaaaagatttacagcagccgcaaaggctttctcaagttcactcctctcaattccttcccaatcatcatcttcttcaatagtcaactctgttttctcttcattctctgcttcagcatcactctcctccaccatattactactcttttcaactctaacctcctcagattcagcgactaagacatctccaccactttcttcgttttctacgcaaccacttcttcctaattctgttacttcctcttgtccttgactcttaatctcctccgctaccacgttttccggcgagacagaagaaatggactcagcttcagccgagtcgctctgttcgtcctgtcctcgaactaagatcacctcctcggcgatcacat

SEQ ID NO: 49647 - DNA, 649 bp, Arabidopsis thaliana landsberg
  unsure (1)..(649): unsure at all n locations
nnnnnnnnnnnnnnnnnnnnnnnnnnnnnnnnnnnnnnnnnnnnnnnnnnnnnnnnnnnnnnnnnnnnnnnnnnnnnnnnnnnnnnnnnnnnnnnnnnnnnnnnnnnnnnnnnnnnnnnnnnnnnnnnnnnnnnnnnnnnnnnnnnnnnnnnnnnnnnnnnnnnnnnnnnnnnnnnnnnnnnnnnnnnnnnnnnnnnnnnnnnnnnnnnnnnnnnnnnnnnnnnnnnnnnnnnnnnnnnnnnnnnnnnnnnnnnnnnnnnnnnnnnnnnnnnnnnnnnnnnnnnnnnnnnnnnnnnnnnnnnnnnnnnnnnnnnnnnnnnnnnnnnnnnnnnnnnnnnnnnnnnnnnnnnnnnnnnnnnnnnnnnnnnnnnaagggggccccggccccccccctgtggggggggttttttacaacaaaaacaattttttttttttttccccccccccccgcgggcaaattatttttttctggatataaaaaaagaaaggggggcgcgccacccccccttttttttttttttttttctaaagacaacaaaaccacaattttttaaacacaaaaagaaaaaaaattccttcttcatttttatttattttttttataggggtaaaaaaagaggggggtttttttttttttttttttcttcct

SEQ ID NO: 49648 - DNA, 1104 bp, Arabidopsis thaliana landsberg
acattacacactacaaacaaaatagtttgtgtgtgattattattcttttaactttgtaatgtattacttagaaagcataaaaacaaaaactcttcgtattgtaaatgataagtattttcttagtaaataaattatttagctgacaacataatgttgggtagagatgatgacacgtcatcttatcatctttttctcgaactaacattgggttagaagttatattaaaatcaagaataggaaagattaaattactatagaaaattaaggaggaacaatataaatgtaaccaataaagtcggtgagtatgatgcaaagtattgtccttttcgatgccaaaaattattttctcatggtacgtttcttttatttatacatagttttccgcgttatcatgaatatacgtttctcccatgaaaaaaaaaaatatacatatcagaagggagtaatccacataacatgaaaagaaaaggaacaagctaagtggtaggaatttgcaagtaataaattgttttcttagaatattgtaatacatatgtggtttttatatcaaacttagaatttgatttctcatgttgaggtgtgaaaaactaaattatcatgcaaaaacttgtagattttgaatacaataaaagatcacatatcttaaaactaaaattaacaagattaaatttcatattttggaagcctaactgaaaaaaactgactcaacaaaacgaacaacatccggacataactaatacgatgcccattatacaatcattcaaggtccatgatcaaagcacacccacattctatgcctataaaacctaccgacctcggaccatcttgttccgggccctcttcaaaaaaatagcaaattgcaaaagagaaaaatcgaaaaggttgtttgtaaaataattacaaaacataattagtggtgagaataaatctaaatataacgtacaagggggtgaagggggtgtgtctatatatgttggatgaatagtttctgccatgtgctatggaaacaacctcttatgctttatgttcttgttagctcctaccttatactataacttaatttattcatcaaaaattcttaattttcccttcgttttttaaaat

SEQ ID NO: 49649 - DNA, 446 bp, Arabidopsis thaliana landsberg
gtatcaaccagtccacatttgcaccatccaaatcttgaaatttcagggaactagattggtcatacatattgctcgacccagcatcttgcaaaacaggtttcttaggcatagagttactactagcatacagagtaacatactgatgctgtattagagatggaggagctattatattaagctgctcaagtgtcttcacagtcatcttgtttgatagagctagtatgggtgggatactatcgctggactcccccattctatagggattctaggggtcgcaaagattgactagtccaagtcagtagccttaatgagcttagagactgaaaagatgtgccgtcttttagagcctattaccaccttaacatgggctacagtcaaagactgtctccgacaacaaccggtaaacggtacggtacgctgagtttagtggacgatggcatcctgta

SEQ ID NO: 49650 - DNA, 1102 bp, Arabidopsis thaliana landsberg
aagaacacatgatcaaaagcttacaccttttatgaaatgctctctcactctcttaccctttcacccatgcccggttcttagtactgggagtgctatggcacatgacccactatgtttttttgtaaagaaaaaatcatttatattctagctccagcttacagtcctgaacttaattgatatgactcgttgaattcactaatctgaatgaaagactcttcttcgagttctgtttgtagcaagtatgtataactccaagccaaatatgaaatcatggtttcacattattagagggtacgtaatacaaactgagacaagcaaaacatgtaatgtaacaatcaaattctaaaacatatagaattagattcaactgatgatggcagagtgaaatatgcatttaaaagacaaaacaataagcaaaaagtctcgatcgtgctcgttgagtcgctttatcaaaatatggaaatgcaacatttgttgggatacacgagattaaatggtccatatattcatgcatgtgtagcaaacagcgtaagaaataatagacgcaatatattcaaccaattgaaaagagatgaaacaaagtgtatgagaatagagcgacactgatgattcattttctaggccagatcttgtcttggaactctcttatcgcccaaccttagccttagcttctcgaccagtcattccaataatttccacacttgtctctttgcatacctagattaattatttttggatccatcgttcaacgttttataaataaaataacattatttaattttcatgattgtcactatcattctgcaaaaaagtgtaaaaatgtactaatatttttcttaaacaaaatgataagaatgaagtcgtccaaaatgtgttttaacccattttagtaaacctggtgaatactgacgaaaaaaaaaaaaagtaattggacaaaacaaaaatagtcatttaataaaattatatatcatgatatagagctacctaatgcagatacttagaaaactaagattcattattctctgataaagaaaataatcacccacgaaactactcaattataaaaaaactagtccattattaattggaatacacttaagtg

SEQ ID NO: 49651 - DNA, 1519 bp, Arabidopsis thaliana landsberg
aagtacacccgataaaacttaacttaaccgaaatttcattgcgttgattgatcacctagtcagcttatatataggtacttacaagcacatcaagtggatcatgtgtcacagcgtgtccattgatcatgttgatcggtgatgtaaccccttctcgatcgattgtatacacaagagtctcatctccgtcaagccataattgtgcaacatcaagaccagctctaaccagacctccctgatatggaatagccaaaagctaagttgtcggaaaatgatcaagagacgatcattcgcattaaaaacaaaacctgacatttaccggattgttccttaggtctagaatgtatgactgaacatcctgattctccatctcgtgcaccgcattttccatatcggacgctgcagtctatcagaaagttcaaatcagtgaagtagatatcattttgcctatctttttctgtttttcggtttcacaaacactaacctgtgaaaacgctgtgagtttgacataacctgtcttccctaaacgtcaatagggtattctatgtcggattatagcactacccattgcatatagtccaatgtaatctggtggtaacttgacctttacatatatgagagacatttatttagtaagtaacccgaacacatctaacagaaacagcggtaactgttacctctctaataccagaatctgtccctgatccattcacctacaagaaatgacaataacttaattggttttatctcaactatacagggttttcaacaaagagaatgtagaggtaaccgaatagtacatttttaagttttatggtaacaaatgttccaactcggcctctcagcttctgtgctgctgcttcactatcaacatcatctaatttctcacctaaagtctcataaagaagaaacggagttatagccaaatttcagcaatctagttggtaaagataaggaccaatgtaccatttatctcgactaactcctcgccttcatgtataccagcacgatctgccgggctaccttctacgcaagacataacaacctacattgggctctaccatgaaacaagatctacatacttcatgctcagaaaatgaacaaaaagaccaaagaccaagcttatttgggtttcaagatgtgtttgatcactaaccaggtgacctgttcttggttctgagtttatgaaaaggccaacaccttggagatttccatcgctgccaattctgaaactttggtactcctgcaagtcacaagatgtgtcttaactcttaatgcagaacaactttcaaatcatgcccaaaaacactaaagggcacactcatgtagaatcaaaatttgcaagtacctttggggtaatgagtcgagtaaagggatcaccaagcgtagagagcatagctttgagctttccataagcagcatctgctgatcttagaggaaacatttccaccatcgtctgttgcaacttaaaatcccaatctgcaaaatcaatacactctcctcaagagataatctacaaaat

SEQ ID NO: 49652 - DNA, 800 bp, Arabidopsis thaliana landsberg
atcgatataagggaacaagatttcactggcttgttttctttttcttcgttgattcttaaactacctggtttgttagcttcttattttgtcaagcacaaagaaaaagtaatctccttttcattctatcgtcagaaattttgtttttattttcgagaaaattcgattttttctttgcttcttgtagttcccctctctcgaaagaaacaagggtaagggaaaagtaacgggacatgaatgaagttattcatagaaaaaggatctgatacccaactcttttggaatgtatgcacattgcgcacttgttaatatattcgactggctcctctcttgttgaccaaactatccacatttttagtttaaattttcctaatatattataggtttgattctaaaaattatgtataagaaatgagaggtttttcatatttttatatgctgtgaattaaaccatagctaaattgttgttaatatgatataaatttttattgcagtcgtactaagagcatcttccttcttatttctggatttgaattgggtttatgcttgtttgatcctgagtttctgtatgtttggtattgatatagggtttgaggatggatactgatccctaccaagaattaaggatggatactgatcatatgacatacgaggtatgtttgtcaatatcgcaagagcagacaaaacattataaatttatcttatcatcttcattgagtgtgtttttttggctctgcacagcaacttctacagctgtgtaacaatatgggctatgagaactctggtgtaaaagcaagcaacat

SEQ ID NO: 49653 - DNA, 270 bp, Arabidopsis thaliana landsberg
gatggttcatcacgtcttcatgtacgcatatttccgattgcatagcgtatactagctggatgtgttcataccagcacaaatgcaccgattctcctcagaactcctcagttacgcgtgccagtgcgagaaccgtactatgatgggtcacctcccggtcaagtcctcgtgtcgcatacctcttatatgttagacctctcgacttttggttaaaactttccgatttgatacctttaagatcgagatggacgacttgggttgctgcaccgacac

SEQ ID NO: 49654 - DNA, 614 bp, Arabidopsis thaliana landsberg
cctctactgtgctcatcaacaaacgaagttgtaggttcagcttcctagatatcaaaacatttaagtgagtgaaactaatggcaaagaaagaagcatgtggcacagtttaatattagaaactgcaagaaataccatctccaaatgattattggaagtcttttgattctgctgatgtcttgtattgatgatctcctcatgaatagctcttttcttcttcatcacatcaacccattggccagcgggaccctgcacaagaaccaaaacggtttggcttaggctaattataaagaaatatcagaaatacacatataaactaccagccaagtacagatttttgagaaagatgataaatactataatagtcaaacaaacaaagggaaggaaaataagataggaatagcgagggtaccttcacatgtttggatttggcaacttcaccttctgcttcaagtatcgtttgcttgggtctagcacatatcagccattattctaattaataacgttggtattaaagtgcatatgatcataccatcttgaagtctggtcgtatcaaggacataaatagaacacgatgattatactactcacctgaaaattttaattttctggaaaac

SEQ ID NO: 49655 - DNA, 703 bp, Arabidopsis thaliana landsberg
tagctcccggtttgttgttgaaatctgtgactagggctttgagtttagtgttgaagatgatttcggctttgttcacttcttctgcgcagccagtgccgccaccgagggtagcaacaatgcgtggtgtacatccgatcttaccgataccgaacaacgctacattcctcgctcctagtacgtacaattgctacacattgtcacatacaaaaacatatcaatgttaagatatcccacatatagaaaatgttgctctatatattctagataaacgaatgcatgtatgccataatcatataatgatctaatacttaccgtcagatagatacggtagaggcttatgagagatcgagcgtactggtcaggattaaatagacgacgagctagagtaggaggcgacaagaagtagttgttgaggtaatcgttgcttccgatgttgattgtgtatagacattgccttaaccgactcagtggcaccgccgcggttatgatagcggaaaagtggttgtttacttgctgtctcaaactgattctctcaccctatttatatgttcaagattttaggttttttaaaagtattatatatatttatttatcgtagggttgttaccatattttcgctggtttcttcgcgcataccgccggcaccggaagcataaatgagaaagatgttagcttgtgcctgtgatgctccggcaaatggtgg

SEQ ID NO: 49656 - DNA, 431 bp, Arabidopsis thaliana landsberg
tgtgagcctatggttagatagaaattctgacctcgaaaagtgccgtggacggggagtatgtgaaggcgtcgaatataaactgttcaagcttcaggcccgtcgtgaacccatggatggaagggatcttcttctcagctagatggtatctgctcacaagatcgacgacacacaactgtcaggcaggtccaacagatgcggttgcctactctatcgctcaaggcctgactggcgacggcattttggagagaaggcagaggcatactagacaacactcatacactgtccatctcaaggctgtttgccacttggttcaagaagtccagagtgaacatgtgcaggcagatctacaagacaaaaaaatacgcagagaacagttattgtgatggaaggagggcgatagtagacgcgaagcgtcggcatagaccatacgt

SEQ ID NO: 49657 - DNA, 842 bp, Arabidopsis thaliana landsberg
accaactatatctctcgccgtcgtgtttccaaacccagacatccatgttctctggatgtataacgagcaacccaagagaacctttcaggtttatcaaatgactagcttctgtaatctgctcgtcttctcttagtccatctgcatatgcaggcaagtttataacctcgaatttcccttccaaatctactgagagaatcttacctggcgcatctaaagaaacgagccagtaaacttttcctccgacaaaaatatgtccagttcttctgtatggcctaagactacaactcataggaagacaaggcacggtgccaatgtttttccaagaacccgtgctggacgaataaacctcgcattcataggctaaagagtgaccgtattttgtaaaaaaccgaccttcttgaacataaaatccctctgcaggtcctctttcttcaggaattatcttcccagtgcaaaaaatacggtaaactttgtagtcacttacatcagagccataagccactcctatactaggctcaaactcaaatgagggtgttccttggggaagaaggagagtctcctttgtaatggggttgcatatccatatctggagatcacagaacttgttttctacgtcttcatcataaatcatattcacacagcagatgatcccgttataggatgatatcatgtacatgaacacctcaggggttctttgagatggatcaatagtactgaggagggaaagtttacatctctttgcatccatcgaatacaacttcattgttttccccatactagggcagactaccaatgatgaattctttccagattctgctaactgtagctttgcaaaggtgctt

SEQ ID NO: 49658 - DNA, 591 bp, Arabidopsis thaliana landsberg
ttggtacattgtttcttttgaatgtagaaattagagaaaatgattcgaagaagaagagcgtttttttggcaacaacacctatgaagattgaagcagaaaatccgattgattcgccggagaaacttctccccgaggaatggatttattgatgacccaaccattagtatggaaaagtagaatcaaataaaataaaatgaaagattcttgtgttgatgttacaaaagaaaagaaaagattcttgtgttgtatgcttcgtcaccattggattagtaataaaatccaaataagagactctgtatattccattcataatgtaatatcccctattttcagttttcaatttgcataatttagttgtcacaattattaatggattttggggaaattggatcaacaatagttacaataccaatatgaatgactggattcgaacaccatcgttactattggctaaaaggccgaatcaagaatacgaaaaccttttgtgttttttttactatttagctaatggtgaaacccttttatcatatattgttaatttgactaaataaaagtttttttttccctctaaaacttgccattttattggat

SEQ ID NO: 49659 - DNA, 900 bp, Arabidopsis thaliana landsberg
ttctgcatgactaccctcttcacatggttcagcatccaggttttgtctcgttcgtgcagagtattcagcctcactttgatgctgtgagctttaacaatgttcaaggagactgtgtggcgacttaccttgctgaaaagcagaatgtcatgaagtctttagaagggattcctggacgcttctgtctaacgctcgacttttggacctccaagctaactcttgggtatgtgtttataactgctcactacattgacagcgattggaagatacaaaagaagcttctcaatgttttgatggaatcgtatccagaagctgacgaagccttgagtctcgcggttgcaaattgtgtttctgaatggggtctggagggaaagttgtttaacgtcacctttaaccacccggcgagtaactctgcggttgaaaacatcagacctcaactctgcatcaagaaccctgggattctggatggtcagttggtaatagggaattgtgttgcccgaacatttggtagcctcgctaaagatgtcctggagaaagggaaagatgtgatcaagaacatccgggacagtgtgaagcatgtgaaaacgtcagagtcccatgaggagaggtttactgagctcaaggaacagcttcaagttccaagcgagaaggtgctttctcttgatgatcagacgcaatggaacacaacatatatgatgcttgtggctgcttcagaattaaaggaagtgttctcgtgcttagacactgctgatcctgactacaagaaacctccttcagcagaggattggaggcatgtggaggcactttgcacattcctgaagcctcttttcgaagcagtctccactcttcaatctactggaaacccatctgctgttaccttcttccatgaagtgtggaagacac

SEQ ID NO: 49660 - DNA, 1183 bp, Arabidopsis thaliana landsberg
ctttctaaccgtaaatgagaaaaattatggaccactcacgtcgcaatgagttcttggctcaagtccttaactagtgaactatccactagttagcatttaccaataagaattcggttaattttctaatatacatgatgtagacatgtagtttggtttatatatgttaaataaatgtatatattgttaccgaattaatagtttgtaaccagataattacattgctaaatttatttaattcattacaaaaaacacctttataatgttgcggcaggatatcattatgcataggtaggtattccgacaaaaattgaccttcaagttctaaaattagaagaaaccactagaactcaaaaatctagttcgttaatccaaaatatacatattaaaagtaggattgccaagaaaatcttcaaattctggtaaaattggcacgtaagatagagttttgttgttgtcgtaaattcatgttaaatcttggtttgatggttgtaaagtgtgttgtttagaagttaaaaccgcgttttataattaacaacattttaaatgacagcaaataaacaaaacgaattacttcttttgggtgttcattatcttttataaataaacttttcttcatttttcataatttttcattagcctataagtagttctcgggaacaaagttttctagtacttaaatatataaatctaacatatcttatgttacttgctgatatcaaaagaaaaggtgaaaatgaagaagattacaaaaaagctatcaatgaaatacgtgaagcttcacaagctaaaaaagctccgccaagacaggtccatgaagtcagaggaagacggtggagagcctttccgggaatctcattcgctggataatgcggaaagtaatgaaacaaaggagactcctaaggttacaaagattatggagtccatgcatcgtaagctgatgctaaaagacaaggcaaataaaaagaaaattcacgtggacgatcaagatcaatcccaaatgtcagaacgttcggttaggaatggtggtcgtaatcgcaaggaccagcttgatgaaggctcggttagaaatacgaatcgcgatggtacggaccagcttgtaggctcatttaaaaacagtcatatggatcatcttgaagatttgattaggggtcgtgatcgtatggaagggtccaatatgaatggt

SEQ ID NO: 49661 - DNA, 608 bp, Arabidopsis thaliana landsberg
cataacccctttagcttcaatagtagggtatttaacagcaaagtaatttaaatttactctaaccctacttcaaacttagcggggggaggatatgacatgcataaaaaaaagtccatgaaaagtaaactactaatgcacacaacacgagttactcatagttcataggttgaatggttttcttattagcaataagctagggctcgaatatgagcaatttgccacataagtggataaacacgaatttgaaatgaaatctacagcttatgattcttctaatgatactaaattttacaatccagactcgtgtcatcatacattttctacaagatgaaatctcacttgtccgaaaaccaaaattccaaaatgttgcaaatctcacaatatacagtattaatatactcatacatcttagcatatagatcagtaacactatagagattgttatataagaaactcattcaatcccaaaagtacaagagttgtgttacaaactaattaaacctaataagctccaaatacaaacgtatcatcacatatctaaataaaaatcatatataattcagcttaaaatcacaaatcatacacaagagggtattgatgccatgaaa

SEQ ID NO: 49662 - DNA, 1207 bp, Arabidopsis thaliana landsberg
gttccttgaattacaggtattgaaacaggatcaaccatatggcgatctcgctctgaagcagtgttaggcattaagcgtactttgatctagcttcaaacaattctatatatgcggtttaggcgtttataagataaatcattatatactttttttttttttttggtaagagtatatactagatatatagtataaaacaaatataaaatgtaatgattcatcatttatttaataacatagcatttgtttcctttttttgtgaaatcacttcccaattaagtgattttgcaaataaaaaaagtgataatcatttacttcattaactttataatatggttatgtacctcatcattatactgtaaactacatttacaaagataattttgtagttaaagccaaaggtcaaaagttgaaaactctctctctcaaatcttaaaactaaagcacaaatttgagatcacatatccatgcatgtataatgtattgtcacactaaaaatcggtttaatttctcttgagttttaaaccaatcgagttgtaaacaagtttcggtctaatttcgagataaacttggtttggtcttctggttcaattagctcggttgctgtttattttttatcatccatatataacaaaatcgacaacgatatagtaaatgggccaccggcaaaaaaaaaaatatagtacatgggcctttattagtcactatgttaagcccaatacaaatcggtgtttaacagtaagcgaagcccaccagcatcagaataaaagtatgttccactctcaggaaatgccttggtagaaaaaccattctttggtaactttcgcttactctctccccattctctctcgaagagagcctcgccggagtttgtttttcttcttgtttcgcggccaaaaccgccgttgtgtaaagctaccttgttattttcctccgttaaccatctgggtaaactcttcgcttgatttttctgttcttccccctttttcgatttctcactgtttttaatctacgattcaacttgtttaaatctcgttttcgtgttcttcgatttgattcttcgtttaaaatcatgttcttaactcgatccattttgatttcgctgcgttagacaagtaattgatttttggtttttctttgctcttccatttctagggtttcgccgtgcgaagcttccgttcgcgtctttgctttaattctgagattttat

SEQ ID NO: 49663 - DNA, 505 bp, Arabidopsis thaliana landsberg
  unsure (1)..(505): unsure at all n locations
gtttttcaatccttttggcatcttcagtcttcaaatccgatgcatgtttttcggatttcttcctgaggagctggtgaaaaaatgctacttcatctttccagaactcaatttcattgagccagaaaagactatacgcatggagtgactccagcgaggtttcgctgaaatcgctgttgtacttgttaagtgtttgtgttcccattgtattcatatttataagtacaaatttgaaattttgttcaacggtaaaaaatgacgtccatcaaaccgggcaatgacagttaacggctatcaatttttnnnnnnnnnnnnnnnnnnnnnnnnnnnnnttttcccgggcctcaatccaaacttattagcggtgtgcttctgaatatggcgagcagcttcttcaatggaatccgtaaataaaacaattgacatatccgttttgaccaatggtgccggatacctgcatcttgtttaaatgatcgatgatgtgccggtgataatcgatccccatgac

SEQ ID NO: 49664 - DNA, 735 bp, Arabidopsis thaliana landsberg
gattccagttccatcgcagggagtgagagtaactcttggacactcatagttctcaagaaaggctagctttgggaagtagatatgcttcagctccatccacccaacctttaacttggggagtgacgtgagacgcaagacttcaacagcacattctgttgcctccttcggaaatttaccaaaacccatgagtcgtcttcctcctccaatgtggagctttttcaagtgacgcagattcttggaatgcagccaagtgggaagttcctcatgcgggtaacgctgcaggtccagtttcttcaactgatcaagaaaacttccaatatatttggaatatgctttaattgttgccgtccgttccagaaacgagattctcgatgatttgagctccacatcttcacggttgattcttaaatccctcctccatgtcaccttcaagcttgtcaatgctttgagttcaacaagatcctccattatctgttctacaccaatatcatctcggtttatttcgatgctaagctttcgtagcttcttcaaacccttcaaataattaagtttgcacgcagcaccctcatagacttcatcactaaccacaaagcccttgagaacctctaagttttttaacaaagctagcctaaagggaatccattccaacatatagcatcctgtcatatccaaatagattagactccgaagtgaacttatcttttctggaagtttctgtaggacatagcattccct

SEQ ID NO: 49665 - DNA, 1185 bp, Arabidopsis thaliana landsberg
caggtattttatttgtgatatgcactaggatctagctagttgaattgctctaacagtatgatcctttttttttgattggattgagtcacataaaaagtatcaatttagagatgtttaggtttctgaagaatttgatttctggctagaaatctacatattaatatggattttagaaagagtgaagttatacataaagatctttttagtaacatctcacatcttttagattaaatatacatggttctataaccattagaagatccgtggacatcaaactgacatatcaattatattactccgttctgacttattcgaaactctcaaaatcgcataaattttagtcagtttgaaccgatttatgttacatttttatatattaaaacgtgacataaacttacctacaaataagcccaatcatatgatcaaacttttctttaaaagaatataagttttaaactttaatcaatcaaggttttcttacaagtccaaattaattcaaatgcgatagttttaaaactgatttttttttcaatctgaaaaaataaacacacatataattcacaacaagtagaaaatcatgagaaagatatatagaaaactttcaatctagatatttgagttaatatggacctccgatccagtaacaacctacttaaaacatcatccactagatttgtaaataaaagatggaagtaaaagcttatcaagcttagaaatttataaaaggaatatagtaaatataaatgatatttgatttaatcaaataacaaaacatggatttattcaagcaatgatgttaagaagaagacatcgattcctaaaattattattatgcatgacataatgacaatatgaaatctaaacgtataatacagtattgtgtttagggatccttttctgggccactttattaaaaaaataattataaaacatgctatgttttaatcctgaattatatattaagataattttgtcgtgagacaataataataaaataaataatgcgaatccaaccgcactatataattcaattattacaaatgctataaaaataaaagcttttgtgatcatacaattaaaataatagctaaaataattgggtgctctatggattaacatctattgaaatttatataataaaatataataactatgatatagactaaaaaaaataaggggcccatt

SEQ ID NO: 49666 - DNA, 681 bp, Arabidopsis thaliana landsberg
ctgtaataggaaaggcagccaatgattagaccgagccgacaagtaaataatcatcagcaattgtgaagtgagataagtaacacctgttgacaagaaaattcaaaccctccagctgatagtcacgtagtgtacctccaattagccactcaggctgctcgtcaagcttcctcaagctcgctacagagaacagtaaccacaactcagcattagaaaaagagttttcacctactctaaatatcagatataaaatgggaacggaagcatactttgccaccatagacaaaacatagcaaagtgacagagcataaaaatctaagtgatgcctctcttaagtattttgtttaattttctattacactgtacccttcacatttttatgtgaatgaataaaagacaaagacaaagatgctggtcagtttataatcaaattttacatataacttttggattcgagagacgaagaatgcagagaccaaactataaagaaccagttcacaaggttaggcagtttctctaatgaagagtatttttcttgtctgctttccgtataacgtgaaacaaagaaaactacaaaactattgattttaagtaacaaacctttttctttgtacgctgctgttccaccattttcccttgcactgcaaatgaaacttcacgagccttgatcatagattgaaatta

SEQ ID NO: 49667 - DNA, 712 bp, Arabidopsis thaliana landsberg
atagtatatttcaggatcctgattagcagtgtaaaaattcaatttttagaattgtagagtgaaaaattttgtggctattgctgaattttgaatcctatcatgtttatttcctaaatattctagatgtgtttgactaaagatttgaacttgttggggagttatgaaacaggatttgatatggagaagagcatatacaacattcttacaattgaccgttggggatctctaaatcatatggattataggcaggctcgtcttagactggttcatgggaagctggctttgaagtttcttaaatgggtagtgaagcagcctggtttggagactgaccatattgttcagttggtctgtattactacacatatactagttagagctagaatgtatgacccagcaaggcacatcttaaaagagttatctttgatgagtggtaaatcaagctttgtttttggtgctttgatgaccacgtaccgtctttgcaattcaaacccttctgtttacgacatcttgattagagtgtacttgagggaaggaatgattcaagattctctggaaatatttcgcttgatgggtctttatggattcaacccttctgtatatacttggaatgcaatactagctttcgttgtaaagagtggtgaagaagtgtcagtctggtctttcttgaaggaaatgcttaaaagggagatttgtccccgatgtggctaccttc

SEQ ID NO: 49668 - DNA, 634 bp, Arabidopsis thaliana landsberg
tcagggactcttacgaaaatcattccatgcttctagtcgacaaaagaggaaaacatcatatcaagatgacgagtcagaggaagactctgaaaatgacaatgatgagggttttagaagcctggccagaagaggcacaactctccgacaaaacaatggaaggtccaccaataccataggacagagtagtgaagttcgcagctccacccgatcagttcgtaaagtctcttatgtagagagtgaagacagtgaagatatagatgatgggaaaaatcgtaaaaaccaaaaggtatgatatcttgctacattttttaaggttatacatttttacaccctcaacttgcttatgttatcgtgtgggaatctaatacatttgatagagactggcagtagtttcatgagccttctctaaagcggtctaaataactcattgctatagttataatctgcacgtcgtacatattatctttctgttggaaacatgttaaatttggagaacttacggtcttttgatttgattaactccaactatttgacctagagcagccattaatttcaactacttggcctagaatgaaagcaatttctttagaagccttgcccagctacttaatgaaactttttgtatgtattccct

SEQ ID NO: 49669 - DNA, 1068 bp, Arabidopsis thaliana landsberg
ctttttgttttatttatatattgttgaaaagaatctgattgtctagcaacaaaactcgtattgactttgattttgatcgtcctgttggatatggatatcaagtaaactgaaatgtaaaggtcaattggacaagagttaagcaacaattatgtgttaaataagttgagcaattagcaatgaatcagtgcttgttccatcttctcttgaatggcgttgtaacatccgagactacataatggcagcttcgactttgaatccctgtacttgtacgctttctcgcaatttggtcccacacatttctctcgcggaggaggataactgaagcacacagatccatcaaaacacacacttcaaatctcacaattccacatatataaatatgattctataaatatatcctcagatgttagcatacctgtacgtgactggcttgaagatatctggaagaccaatgtcttcagaaaatgtcatagttgttccacttggaccaataaccaatctgatagtgtttgatgcgagtgtgcttgatcttgcagctctctcctgagaagaggaaagatgaaatcagaacaaacagagaggaggagttaataaaatttcatctgtaatcaaaggtacctgagctcgttcttcctgttgtttttttatcttctcctctcttttctttctaccagaatcttgtccgagtattttcctgatagcttcagcctggtgaacaagacaaagaagaagctcttagatcgtcattcggcttgtattggcattatatattaaccagaaaaaatgtatcaactttacctcggcttcttgggcagccttctcacactgcattcgccgtctctgtgcagcttcggccttcttggattgttgctctacctcagaaagcttctgttttggtcctggaattgttcaaggtttagagattaagtatttgcagtcatcagtttgatttgagaaagggaaaaaggtgcaactcacttttagatgaggggcaaggtaagccatcagggaactcaagagaactcgacccgatgacagaatgtggatcctttccagattggagagccc

SEQ ID NO: 49670 - DNA, 551 bp, Arabidopsis thaliana landsberg
taaaagattagtgtatatagtattttgacgttaatctatatttctcctttaatttattttgtagtctctaatatttaaatttttataagagattcattttatcttattccaaattccctagttctttatgtgtaatatcaattttgtgattttttcatgttgagatatattttaattatttttatttttcaaaattatattactatcaaattactccataacttacattttgcaaatttgataagttagttggatattttaccaaaacgctattgagaatgcatggttttctatatgtttaagaattcataacttcataatgccaagttgtagcgcgttttttttttttgaactttgtagtttgtacaaattagtagataattatggaattgatattttgttggactaaaagtttttttttttcttaagaatttcaaaaatgatgaaggtctttgggaagttacttttgaaaaacctttatacaattcagaaagtggatccatccatagtcatctttgctgcctttgacgtccttaatcaattattgttag

SEQ ID NO: 49671 - DNA, 683 bp, Arabidopsis thaliana landsberg
taacgtttacatagcgtaagactcttaatttcttctttgtattcacgagtcaaatactttggtatgttgcttgactaatggctctatggttgtatattatgtttgatatagaaaatttgtactttaatttcccgatatcagtagtttcaactgtcgcacatcttttagctttacaacatttggaaaacatttgtttttaataatatatttggaaaacattataaatgtggtttaagtaaattccatacattaggtttttgtggtatggaggagaagaaaaaggtaaattatcattgattaaaagcagtaatagtgtaggaaaatgacaaaattgtgtatactctgtttgtacaatacataactttttaatagaaaaaacctttgaatctttgatgatcattcttgaaaatattgacagttcctggttttactcctctaattcttctgactgtatccaaactaaccaaaaatattgaaacttttgtggtcatcatctattacaaattctctttattttaagaatttagttcatacacacagattatcccaacatgccacgcggatgttccctccaccgaaaatcaggtgtgattgcactaaggatgcagatgtgtaatattcaacgttgacaaaggacgttattggaattcgatattctgaaaagaaaaaaattccgtactctc

SEQ ID NO: 49672 - DNA, 563 bp, Arabidopsis thaliana landsberg
  unsure (1)..(563): unsure at all n locations
caaaaacccttgccgctttcaaacaatttgcagagcgcactgttaactctaaattatctactgggcgtaggaaaatagggttagtagattgttgttcgctaatttctttcgttataaaagaagattttaaatcaacagatggagccaattgttgttgtnnnnnnnnnnnnnnnnnnnnnnnnnnnnnnnnnnnnnctaaagtaccattggtttctagatcaattaccaatttatctaagctagtacgttgttcaacacgagctgcttcaacactgtaagcaacgcgacgcactgggctgaagcttgcatctatgtgtaaaacacctatcgaatgcttttcttcagaagacgattcgcgtgaagaagcggtttgataaccacgacctaatgcgaccttcattgacattcctaatgtaccggtttcattgacatgtgcaatcacatgttcaggattcacgatttcaacatcgtgctctgcttcaatgtaacctgctgctactatgcctggaccttttttgttaatacgtaaggtcacttcttcccgccatgtaacttgatagcaa

SEQ ID NO: 49673 - DNA, 965 bp, Arabidopsis thaliana landsberg
attggttgtgatatacctgaccagaataagatctactcgttttgagcctagaaaaaaagatgacgacggaggggaaagacttaccttgatctacaagttgcgagattctcgcttctcacgttcttctacttcgttgacttcatttcattgaccttaggcagttaggcttgtaaagaaccaatgggccaagattgtttatccgtctatcctctctttgttatttattaaaaaaatcttaatttgcgaaaaatatataaagaagattatgaaccgtggagatatacgtacgtggatatgatgatgtgtttcctttcgtatgatatataacattgattgatttggaacaaggggaagagttgtggggattttatatagggaaacttatgatgatgatgaacacattttgttggtcttagagtacatcgaatatgtagattttgttcatatgatgacatcaaatgcaaatatgagttcattgtctttccaaacaaagaatatgaatctatgctaatgtgtcacctcaaatattatggtccatgtaaaattttcaaagtaattaattaccatacattatatatgtccacctatatttgattttggtctactgctccaatttgcaatcgaatatagtacatatgttctctacttgccatttttttgtcaccatattatgtgtttaggttagagtcatcatctattgatttaggttcttgtcctcacagcgccgattttgtaccgttggttgactgaattaaatagattaatcggattaaacccgctagttaaccatcacatttggcctttgccattgtagcctcacaacttaggcaattttaggatttgattggttaatagataggtgcaaatgcgagatcttttggtagcaatggttgctgttttaaaagctataaaaatatttatttgattggtataagagttgaaaatatgtgtgtttgtgggatgtt

SEQ ID NO: 49674 - DNA, 505 bp, Arabidopsis thaliana landsberg
  unsure (1)..(505): unsure at all n locations
tgtctgtgtttggtgactgtatctggtgggtgggttggtgggtggggaagtaccctcataatttcacgtgttggtggggatggacagggtggggctaggggcatggtggaacatgaattaaaaaaaagcctcaaaagactgggagatgagtttaacttgctggtgaagctagctgattaacattagtgctgagttgacactgatatctcaatttgctgatagannnnnnnnnnnnnnnnnnnnnnnnnatggaccgaattcttcccggtgacccatgctgattgggccgaggcctgcctgctcctactaggtcctgcttcttgctactgctatcctgacaatatcctatttgactggtaaaatcaatatggttataaaaatacccattaaattatgcgagaagatcaagctgccactactgacctctaaactcaactactgatctcctggcagtccagatgggatttactccaatgtaccatttctaaacaagtctcctttccct

SEQ ID NO: 49675 - DNA, 1184 bp, Arabidopsis thaliana landsberg
ggccccgatcacatatcaaacctgatccaagatgagatcatttaaccgattatgaataaagtttgacagtttattatgctaactctgaccacagtgacaactctgaccattagaactataccttcaatttgatggaactctgcaaggtgggtccgatcaacagcctcgtttctgaagacacggtcaatcgaaaagtacttcttgggcacaaaaggtttctacagtaagatataaatctaattatactactgaattttggaaaccaacgtctcaaaacctgtaagctaaagtctagttgaacctgtgctagtgcataaagcatcctagatgagacagccgttgtgtgggtacgaagaagattcttgtttgcttcttctcttttccaatcataattatacctttattgcaaaaggccatgtcagagtgattgcaaattaattattatttattcaaggtggtaagaagatacaagtcaattaccctcttgatccataaccaccagactcatgaacacgtttcaccctctcaacataatctttcggaagcgtccttgtagtagagggaactacattcaaagatttacgtcttaaatgtaagagttatctattctttgagatgtcaacaagcaacctagaaaaagctgtcctaaacaacaaatttagtgacaaaggattcaagatttgaaccttttagaaagaaggtgtcatgagaatcacgagcagggtgctgctgaggctggaacaaagcatcaaaattccagaagctgtagcgtatatgaatcagattaagatcagccaacaaatagcaagaaaaggatgtataattagatatccttaaagcctccatggaaagctgaaaaccaagattcttaataactagaggatacctgctctccacatagttgtttgttggcatctcctcaaacctatgaccacataaggctcaccattaattttagcaatcaacagaaaaatggggaattacaatatatgtgaagagtttctctcaccccatctgaacaaatatgtctttaaactgcttccgcacctaagggtcaagaaaagtaatataaataaaaactattgaggtttgataaagaaacaacaagcttacactaaagggatacgacaagttcattttttgggtcatgttaccttgagaagagcgtgaagatgcccagcgtc

SEQ ID NO: 49676 - DNA, 746 bp, Arabidopsis thaliana landsberg
gaagaaagtttaagaactcacctaaaacacaaacaaaggaactccactttttttccacaccatttttcaccatgtttagagccatgagcacaaggaaagtccatggtggctacgaaaagctcggcgatgaagaagcgagactgaagagggtctctagcgttccggctagtgtttatggtcattcaagaaacccggttcaagaagtgaagaagacaccgacagcgaaaccaaccggtggttctgttcatcctttgtttagtttctttgacgttcattttcaaagaaagaagaagaataaggcgaagaagaagagtttagcaacggcgaaaccagagtttgctaggtatatggagtatgtgagagaaggaggtgtgtgggatccgagttctaacgcaccagtgattcattacagatagattcgtcaaggaaaatgaataaaagatttgtatatcgtctttttttttcaaatatataatctatgagaaagccaaacaatccttgattcgattcgaaaagatgcatcaaacactgtattagtcatttttgcacgaattgatgagtgttttgtacactctcatggagattccgtcaagaataagataagttcaagggtcttgactttaatatatgatcaaaaagttgattttggttttcttatttaaaaagatatgttatatgaactgaatcaattcgtagtagttgctaatatagaagcggtcccagagctgatatctttgaatcatgtt

SEQ ID NO: 49677 - DNA, 1173 bp, Arabidopsis thaliana landsberg
tttcttgacgcaccattttttttgcctttaattaattgtatttcgagctatgaatgcttagtaatattacactattaggttttgtttgcttgatgattttttatatagtcggaactttaatattgtcatcaaatatcattaaatttaatgttttcattcgtgttttatttagtttttgttgttttcgtaagttttaagtggctagttatattttttatttagactttgacagtaacagtagattagcataggcctaagttaactttgtcaagttaaaaagatcgaaaatacaacatctgaaatctcgatatatatttattattattatgaaagcttttaaaattgtatgcatcttggaaattagaagaaaaaatatggcctaattaacgtttaatacttgaaagttacttctataaaagagaactagaaaattgaaaatacattggtccgatgatttttcaatacccaattatagaatcccttttagagatttttttttgtacataaactgaacctgtaggacttaaagttactgtaaaattactagtattgtactattgttaaaaccaaaatttactattcttttatctgatcatacgcaattttagatttatgttttcgatggctgagcttcaaacaactttttggaaaaaataaaataataatctcttacaattcaaaatgtgattatatatcattatttttttacatccaagacatatggttaaattattattaccatagagaaactgggaagtaaaacagtatcatgctatcatgaagtaagttcagctttttaagttgaatttaattatcctctgaaaaagagcatcttcagttcctccatcaaaagaatcaactaaaaagccctaaatctcctattttatagatttgacaaaagtttaatgattctctgagacttgtaattactttcttcatcaattaaactaaaattattatatagctaaaaaaacaaactcataatatatctattcagtagatccacaattttttatattactccatcagatcttgtaaatcaaaataaaaaaatacacatcacaatgaatgtaaatattacttcaaatatacagaaattctaaatgttttttacacacctttatttttttttatcgaatataaaaattaaaaattaaaaattagtaaatggtg

SEQ ID NO: 49678 - DNA, 772 bp, Arabidopsis thaliana landsberg
ctcggtgtgctggctattttattttatcaaaagctaacaacttgcttaggataatcatattttctgtcattatcacaaatcataataattgtttgaaagcaaattatatgttatgcttactaattttaaatctgagagtcaattaggaactactcgtctcatcaattcaaaataatattttctcctgagtttaggggagttttattagttccaatagatgtggtatttatttaaatacattttgtatgcgtgatgacttaatcttagttaaatttattatttattttgaatgagcttttctatatttaaatttagaaaacaaatttagaatttctaaacaatgaataataataaattcaactccagttcatgtgcatcactaagttgaaggacactaaaattagactacttctacattagatcctccagaattggagatatcgactattgtttgatttttaatttatagaatttatgttgaatattttgagtcatatactatcataaaatcatgggtgcattatcaatcatccgaagattttttgttgttgttgttgatcatatagtattcccaagcttccactattcaataaatctaaaacatattagtgtatactaatctctacatatttctagagtgacacatttttaaatgaaataacatcaattcgttttacatccgttcgatttttatatgttagaaaatatatctttgcatttttctgtcgacattattgaagttcttaaaagtatgaatcggtgatatatgatt

SEQ ID NO: 49679 - DNA, 601 bp, Arabidopsis thaliana landsberg
caacgttgtttattccatgtttgcagagccacagcttccggaacgctccggcagtcccaagcccgggctcttccaagtcgtcgtcggcggcggcggcggcgatccgattcccggtctcagcgttcgccgttgtcgtcgccgcgactctgctctcgcactgcctcctctgaagatgcccgggtgtttggtggttttagttcatgatgatgagttgtgacgtgaacctgtgtatccgcactgtgtcataattcgttgagttcaattgactaatcgaccatgttggctgttggcatactgcatgcagctattcatgtcgttctgcaaggaatttctgtgtccaggtacccaccttaacgttcacaaaactatgctgaaaacaacgcaatgcaacacatctcgttttagtttcgacacaagatttgctgccaattcatgttttgaaagatacaggatatattaaaagccatgcaatttttattcgcctgttcatttcaaactggaaaccaaacatagtctggactgaatttttatcccaaagaaagagcaagataagaccctgatccattgcatggtaatagttaagtttaagattgtcatttag

SEQ ID NO: 49680 - DNA, 796 bp, Arabidopsis thaliana landsberg
accgaagccgctaatcttcttattgctgacaaattactttacggagactccaaattcgtcactccctttaacctcctccaccttcgtgacctttgagattataataacctttcactaaaaaaattgtaatctctacttttggtggcttagagtggttagcgttaaaaaacatatatgtaatagatttgttcttttttttgttgttatattattatagatttggagtttgtggtttggtttcgtttctgttaaagccatggttttacgcttaagttgatattgagatttttgtttgtttgtcttggaatctacaagtgtcggatactaagaatcatacttgtctaaataagaaagtattaactcagtcacatttattaaagtaaagaacattggaaagctttggaaagctaaagggaataatcagttgtatacttgtttatatttggtaactgaggataaaatattggaccgttgggcttaagccataacagaaaagacgaaagtagccctcttccatgcacattcaaagacaaaaaaaaaacacccttcggatcaataggaatcagaaaacagagaggattaaggaagaaaaagacaagaagaaagagagggaaggaataagggaagggtgtcagtggtttgatctgataggaccggtccggagttcggacccgaatatccgacaacgaaaggacggctgcaaaaacaaataagacacatcgttccatggcacacacacaacacacacatcacacaaaccacacctgtcttgtttctctctctctctctttctatg

SEQ ID NO: 49681 - DNA, 500 bp, Arabidopsis thaliana landsberg
aatcgcatagaccatccgagtaggtgtgaatatttattgtcagatatcaataatctgctagacgtttctaaaaacatctctaatcgtaacttaccaagttacctttgaggtttcttctaaatgagtcggtgactatgataagacggtgtatcacatcacaatcaactcccaaatgtcagtgtcgagaaaaacctaatcaagtatcaactacaaagaattggttatgcatccgaaggatgaaaccacattaaatacatgatgagactgggtttctccgtggatgattcgtgttttggatgtggttgtgtgtgaactaaaatttgacaaccatgtacatgagtcagcagacacagaagaagacaaaaaataactttttccagttagtttgggctgttgtgtctgtgtgttgtccgtggagaatcattaaggtcattacagatctttgaatcaaatgccaaaaataaaggaccccctttagacggtgctcatgtcacgaatga

SEQ ID NO: 49682 - DNA, 689 bp, Arabidopsis thaliana landsberg
acatgatatataaaatccggatttaacggttcgaagtctttttgaacaaaatcaaaatacgtttaatgaactaaggaaatattcagttaatataaaatttatttagaaaaaataggtcaaatgagacccttgcaaaacttggatattacaacagaaaaatgttccttaactgcgttttgttttattcatatgtgtgttttgcgtcagttcgtatatcatatgctatttatggatatcacacgcgtaataagcaaataaataacatgttatttaaacatttacctatttaaacaacatgttttgttgtttttaattacgagtgtattatcccgcaatggcatgttatgcttagacacctatacgactacaatcgtccatggcttctcattgttgcacatgctcaccggtcccagatcttattttcttgcttttttgaactttttcttcagttttacagataatcttagattagttcattttaaccgccctataagagataacttacgtagactatagctgattcctagctctaatcctccttatcattttatttgtttgtcaacaatatgtaactatcacaaattacaaggctacatatcttgatcaacggatctttaataatcatctaattaacataagtatatggcaatacttatatagggaaaataacagaaaagtataccttttat

SEQ ID NO: 49683 - DNA, 219 bp, Arabidopsis thaliana landsberg
tagtatttagggctggttcgttggtgcgcaaccagcgttcggaggggcttctgagaattagggtcgaaccatcatggttgctcggaattagccatcgccctgtcatgtgccgcgcgctattgcgcattcctggaagcgggaggaggtgcgtgtgtctcgtatagctggcactctcacttctggtccttcagttgatatccagcccacggtcttgtcggg

SEQ ID NO: 49684 - DNA, 744 bp, Arabidopsis thaliana landsberg
ttcaacaaaatggctgaaaaatgtatatatagatttgaaaaagccattcatgttatgagaaaaatattcaacataaactaacaagtgaataagtgaaatagttaatagaaattctggtatatatatataattttgttttaattaatataacatgttagttgatccaaaaataataattaatataatatgttacgcgacgctgcatttccagagacaaaccaattcattagtcaatctaactgtttttgtttgtcttttcttttatcaatctaattgttgtcatgaaaacatttggatctattttaaactcattgttagtgatataaaactatcaatcacattcttatttttgatctttcgtttatcaattttcacattattagcttgttccaaataatcttctgacgaccagttttccgcagtaagaatctcgatgaagtcatggaactcactacagagcatacccgaaaaacgtccaaaccctcttacaaaaaaatctcaacggcgggtcagcgaaaaacgtccacaatacatctttttggccaaggatgagttatgtaattgactaccaacaaatgtatatggctacaaaccttttttttttttttaatcttctgttaaatcttacaaaccttatgacatgttcgtaatattatttcatagtagaagtggaagaaaaagtttaacaaagtcattttattgtaaatcttgctcaagaaagagttttggtcgtcaaagaagact

SEQ ID NO: 49685 - DNA, 541 bp, Arabidopsis thaliana landsberg
  unsure (1)..(541): unsure at all n locations
gaccctatttgccgggatcaccatttctctgtacacatttatatcgctaaagttttaccgccttcagcaaagtcaggcgacccgtttgcggccaaacgggcgccaaatagtgcccaccattggtggcaccaatcatcgacagaggagttctacccagcaaacattctccttgacaataacgaatcctttcgcttacgagattactgtccaagataacctgagacagcagtatcactgtactcgttgtgctggcaggtcatcgacgagcgcccttccaccagacagtagtgccaatgcgagcacatcttctggacgcacacattcttgacactgtccactgaacagngctcgaacgaaggccaaaaaattccaaagtgtctgaagctgatttgccgccaaagtacgaagaactggaagagccacccaagtatgaagaggtgtctgcnnnnnnnnnnnnnnnnnnnnnnnnnnnnnnnnnnnnnnntgatgctgaccatgatcttgaagctgcttaaccgaattcactgctgtgactacattt

SEQ ID NO: 49686 - DNA, 1075 bp, Arabidopsis thaliana landsberg
  unsure (1)..(1075): unsure at all n locations
caactaacatggtgaattataatatcgaaagataaagacaaatggttttcttactataaaatagatcagacacagctataaatatttttttgttaaagatataactacaaatatacacaatacaaattttcaatcccttaattagtcgtcaaagatatgcttcaaatatatgcttcttctactgcttgcaataccatcaccatcattggaagaaccctctgaatgagcaagcaactttcccttttgcttacggtccaagtcatcttcatcatgttcatcatcagctacatcatcataatgttcgtccctatagctctcttctgaggatgactcatcgcttggtgtttgaaaaatcgtaatactctcattttccctatttcggtaagagaagcttctagaacttcctccgtacaagggaagaacataatcttttaacttagacttggactcatctatgtctctcccaagactataggtcgacgagagtttccttttcacgtnttccctcttttgaatcaaatcaccgattttatcaaccgcggattcattggccgttgattcgttttgaagtctcgttatcgttttatcaatttctctactcttcctgtgtagcaaacgctggaagaaaaatggactgtgagatactagaaaacagaggattcttgaaatgtaaatgaagttaaagatccttgttacacaagctagggtttcttactcgcttgtccaagaaagtactgaagggacgatcttgaagcttctttttcttccagaatataaaacagaacctcacaagagccgcaaagaggaccataatcacaaactcgaacagtaaaaaccaaattatcgctctttcgttccctaaaagaaaaaaataacagtctctcttagagatttgaatgaccaagaaaaccatttgaaagatactggaatttaaagtgttcatgttttagttaagtttaccaatgtagatatcaagatgctctggttctgcaaatgaacaactagatgacagcttttcgtgtttagaacgacatcgaaatggatttccagaactagaggctgncacgaacgcaag

SEQ ID NO: 49687 - DNA, 186 bp, Arabidopsis thaliana landsberg
cgctacagcgtgcgtgagatcaccttcctgctcggctttgccgatgccagcgcgtttgcgcgcgcgttcaaacgctggtgcggcgtcacgccgtcggagtttcgcgacacgcggaactgagctgcctcgatcaccgcatcacgcgcgcttgaacgccgtctttgatcaaacgcaatcgcgatttca

SEQ ID NO: 49688 - DNA, 865 bp, Arabidopsis thaliana landsberg
atttacacagcatattctatgttacaaagccctaaacttttaaaatattagaatttatgtgtttatacgaaggaccagtagactcggtccaagggttagtatgtttcttgctttctcttttttttttttgttactacatgcaacacgacaggtcgtctcttttaatcgtaaggttattgcatgttggtttgtcctcgagagtctgtctaaaccgaagtatggcggctaataatttccactgctggttaatcaccaggtttgcggcttcgtaccggtgaaatagaagatgttaatgtacttataaatctatgtaccggtagatataattcgttagttaatgcgtgatttgaatgatgtgatttatatgtgtaccgtgaaaaacaaaatgtgtaccgtgaaatgaaaaagagataactatgctcgtacatgtagaaagtaattacttgtgacaagacttgagtttgcataaattataaatcagatacatcaaatttataacaatattttattttgcatgacagttttgttttttgattttagattttttgttttatttttgttttttgatgaaaagagaaatgaaacgaatataaatgatcttcaaatgagttttagttaaattttatgtataagcaaataatacatgtacttggcagttggcagaaagatcatatgtttgaacgatttgtcttaaatacgtaattatgaatttcaaacgattttcagtttcattttatgacacatccgaagagcatttcgatgcgattcacacccaaacagtaaagtaatttttggcaatgaaaaatatatttagattaggccaatttttgagtgaaaaaaaggagggtacagaaccaagttcggt

SEQ ID NO: 49689 - DNA, 955 bp, Arabidopsis thaliana landsberg
tgatgtacggctgtgagtattttgtaggttacaaaacctacaatagctaaatctcatatcataaagcaaactgaaaataattcagaggatgtaaatatgacatgtgaaacccttagatatatcacctcaattgttgcataatttttgtgtgtgtgtgcaaaatagcaaaagattcggttcttccatatactgtttgagtattaatctgaaatttggacaccaaacgttcaaactaataatagatgagtgggatgaagaagatgtgttgattagacaaatcacgagacagacgacataccatatcttaaaaatccacgtgtgaagtgacagttttgagcttctgtccaaaagatttaagatgcctctctacctcttatttgtctcctattgttttgtagtttagttatcactctcataatctgtacttgattgtgacccgtacacataattccattattacatctcattttttcgtagttaacgttaaatcgtacgtatcatatccgcaaattgattttgtcatttaccctccaaataatcatttcctttttttttccccttccaaagcaaagttctttcccacaaaccttttaccttggaaacgaaagagattgagttttagtgtcctttcctatttaggacaatcatatgaactcaatgaataagtttttttttgtggtaatcatgtttctctaaaataaaaaatcagtagttagtaatatacttacggttagtttattgatgtcaatatagagattatacgtagatgattgatatttatatatcacggagaataatatatatacgtgtgatataaagccaacaaagatcttatggaatatggttgaagactaaagaaaacatgaaaattgatcctccgactgttaatttaccacgcaaccaaaaagaaccaaatgaaatagtaacttttgctgggtcgggtcgtgactagatt

SEQ ID NO: 49690 - DNA, 743 bp, Arabidopsis thaliana landsberg
aactgaacactacttatcaccttgtggaaaagaccggcattggcatatccgtttatgagacagcaaaaggtctttgtgtttgctttcataccttcgctacgcatctgatcaaatgtcaactccatgttctttgcatcaccaacatccgcaaacgcctcgatgatattgttgtaggttgatgttgtccacggaaactctagctttcgcatgtattccatgacagacgacatcttatcatacattctcttcttcccataagaaccaatcaaaatattgaaagtccgagtctctggctcaatcccaaagttcctgaacttttcgtaccagctctccatcatgtctatcttacccatgtttccaaacacactaaggatgatattcatagtccacacatcgggtttgcaagcagtactcaccaacatatcagacaaaactttctccatctgatcaaaccttccgaccctaccgtacccacttaaaactatgttctgggtcacagtgtttggagttatcaaacgctcgtccatttccttgtataacgaatccaccaagtcaaactgagaagcatccacacaagccttgagcagagtgctgtacgtgaaaacatcaggttggcattgaggaaagcttttcattttatcaagaattgaaaaagcatcgtcgatgagattgctgcgagtgtaagcagcgagaagagcagtgtacagttcaacagttggttcaagtccttcttcaagcatttc

SEQ ID NO: 49691 - DNA, 331 bp, Arabidopsis thaliana landsberg
cggttgtagacgtatactctactactgctcacgatatcccgggaatattagataagcactccgcaaatgacgactgatatgtataacagactcagtcgctaccgagggaggtacgaatattaatattcgatgctcatgcggcaatcgtgacacatatctatcactacgcttggtatgtctcttcgtgtgtatttctcacaagcgaagtcttcctaccagttctgtgagctgctgagtcttcaatcaatcagtgacggtgagagcttgacatacgcggcctacgagtctattatatggtaatgtgcataggccttcaagcttcggtgtttgt

SEQ ID NO: 49692 - DNA, 308 bp, Arabidopsis thaliana landsberg
cggatggcgaggtcggctctgctactgcgcatgatgtcccgggtcgctcagataagctgtcggaaagtgacgactgcgttgtttatcagtctcatgtcgctgtataggtacgtgcgtgtagaactattggatgctcatgtgggatctctgacagatatcgggtggtaccagtgggatatcgcttcactcgtaattcaccctagcggagacttgtctccgccacgttcgaagtgctatctcgtcaatcattccgtgaccgtgcgagtgttcgccatgcgcggagtgcgagtcgactgaaggctaatggg

SEQ ID NO: 49693 - DNA, 779 bp, Arabidopsis thaliana landsberg
aagacatacgctttaaaataagagccattccgccttgagttgtctggcattcttcaaaaaaattttttgccttgatcaacaacacaggttgtgaggtctttgttggtgtagaaactggtattgaacttgtatcagattgagatgatggagcagcttcttgtgaaggtagaagagtaatatgattcccttcatagctgaaattataagtgttaacaaagccatcatgaattgtacgccggtcgtattgccttggacgccctaaaagaatgtgacaagcatccattgggatcacatcgtaacaaaccaaatccttgtaatttgttccaatagagaaaggaacacgacatcttttggaaatacttaaatcagtcttcgcattgagccaagcaagtcgatatggcgtaggatgtggttcagtgaaaagagcaagtttagcaacaacctcttctgaaacaatgtttgtacaactacccgcataaatgatgaggcgacaaacttttcctcgatttgtacatgtggagcagaaaatgttagtccttaaccaagattcttcaataacgtgatgagtaaaaagatttctcctaattaccaaagcaagaccggtatcccctgcaacttgttattctttttcttcttgcggttgatccttgatatcttcatcatacacaacttcttcttccccaaatagaacacgtttagggcaagatgcccgacgatgtcctgtttccccacagttaaagcacttgaatgtcaaagatcgagtaggattaagtgccgag

SEQ ID NO: 49694 - DNA, 225 bp, Arabidopsis thaliana landsberg
tttggaggctggctgcctggcgcccgttagattctgatttctcactacgcacatcagtacttgtcgcgagcgtgaacattgggctaatcagttgatacggtatatcgatctgttagtatcagcgtagttgccacggggctaactgagtcttgtggcgccaggcgttcgtagcgacgttggcgattgatccgactacgtcggatcattcaagcgcagttcgtcaga

SEQ ID NO: 49695 - DNA, 769 bp, Arabidopsis thaliana landsberg
gacaatcatagattacgatgaattatattttaatataagtgtgtacgaaagaatattttaactcattcagatgattttgacgagacttggaagctaaattttcgtcaaatttggacggtggacctaataatattgcatcttgtggaacaagtcatatatttcttttttggtgaaaaacgtttggtagattttatttaattttttttgcacctttgcttaaattcatgtaagctggcatcagtgttaagtgcttggttaaatgtaacagttgctatgacttacaaatttattacaaaccaataactgatatgaaaccttatcttttttacaataagattttttttttttttctttttatataactgacttgtaacattttctgaattttgttaataacttttgtaaactgtaatttttgaaaattaacattctaaatgaaacgtaatttttaggactactaacagaatcatttattacttaactaagaattatcaaatccgagtcacatcccatggatacaagtcaaatatagatgagcctatcaccaagttaacataatcttagaattattcctttaaacgcaattagtcaatactgctgacttaggattgaagagtaaaattcaaagcaaacggtcgatctcaaacgagtaacagaattctgaaaaagacttgaatctaaaaatcaaaaagtcaaaacaccaaaccgactcaaaccccacacaaattaaatacccaacacacaaaaaaaaaacactcataaaaaaacc

SEQ ID NO: 49696 - DNA, 1292 bp, Arabidopsis thaliana landsberg
ctgctcctgcttctggtctgttgcttttctttctctcctcgtcttttcctattgggttcctcggaaattaagttattgattgagtaaatgtgctccactactgtaatgggtttggagtattttgaattagcatagaaaaaaattgaaactttataagatttttggttgatagtggccgatagtttggacagagtttctatggagattctcactctgattctgttgatacttgatagtatgagtagaatctttgaaatttggttgttttatgtgtcgtgaatggaccataggagactgactagtcgagtgtttttatttgtgtgtgtattgactctatttgttgattctggtgttatgtatcaggtacatcttcatcctctaagacgccacgtagaagatcaggtcgactagaaggagttggaaaaagcatggaggattcggtgaaacgtaaaatggaacagttttatgaaggaaccgatggaccacctctccgtattcttcccataggaggccttggtgaaattggaatgaactgtatgcttgttggaaactatgatcgttacattctaatcgacgctggtataatgttccctgagtaagtccggagatacattcatcttgttaatattggcgagaagtcattatctttgtgtgcgtggtgctaactctccgtggaaaacattgctgtataatgttacagttatgatgagcctgggatccagaaaataatgccagacacaggatttatcagacgatggaaacacaaaattgaagctgttgttataacgcatggtcatgaagatcacattggtgcgttgccttgggtaaggtcttcttctactccttgaaaaatccataatgagccatagacttttggagatttctagatagagtctagcttttatttttcaattaacagctgcggctcgtgtgtataatgcagttcttttcctcagtccattgctggtttctgttctttttttgaccgatacccttttacatgagcaggttatcccagcattggaccctaatacaccaatattcgcatcatccttcaccatggaggtgatttacaccttgattcttgacttttacttttctgtttcaataagtcctatttttcttatttatattaacagctactagcttagatatataccttcagttcaaaatgtatgtacctcagcttgcgttcatatcagtcagaattgtcatgtacaggccagtagttgcctatatccaatcacgctaaaacttccctcattaaaatttttttgtttttctgggcaata

SEQ ID NO: 49697 - DNA, 523 bp, Arabidopsis thaliana landsberg
  unsure (1)..(523): unsure at all n locations
tttgccggaaggatagtggccgtccgcatgcgggcgagcaccggataggcgctcttagccgttcttctcgatcttcgtgagatcggtcagtgcctgatcgttcttgccgtcttcggcgagcgaaagcgcctgggaaaaagcatcgcctgattggttggcccgcttagtatcccaatggcgatagaggacgaagccgacggtcgcgataaccacgatgaggccgagggcaatcagccagaggccgtatttcgacaggaaagccttcgcctgatcctggcgcagttcnnnnnnnnnnnnnnnnnnnnnnnnnnnnnnnnnnnnnnnnnnnnnncgattttccgggcgcccggcgcccaaaccccgaaaggacgcggttgcccccgtccacgttccatagctgcatgcgcggatgggttttccccgttctttccgcgtacaccaccagcgggagccttttagccgaatttcgtccgtttggaaggtgcgggcggcaaaatcgcgcgccgggtcggatgatcgacat

SEQ ID NO: 49698 - DNA, 1095 bp, Arabidopsis thaliana landsberg
caactgacgctttagtaatgacattttattatcattcatactaattatccagagaaaagtcgtttaaaattaattaatgtcacaaacaattcaagataaaatagtacatatagagataaaagtttatactttaattttaaaaatgaccataagaagtggttagtcttaaatctaactgtttgttctaagctcctttttatagacacatataatcggtctgataagaataatcttattaatatcgtaagtatattttgatatgctatttgtgagagtaggaaagtttctctttaatgaagatttcgtacgtgaaaataagagatttaactaatttggtctttttttttgtttatgtatgttagatgttattttgttaaatgatagagatattgttattttaacttaagaatcgtatattttgttaaatgttgaactatttatatttattaatttactctcattaataaaaaagaaatgcaagcttaattttgttgtataaatacaatacaaagtttaatctttaatgtatctactatatataaagtcaaggttgttgaccaaatgggtagatcaatggttcacaccatccatgcggatcatgtgagaatctccttgcacgggctttgtactttttaaattgactcctaaattcgttaaggttgtggatgcaatgcactgcaaatggtttattaattattagtagagcaagctttagttctacatactcccaaaaaattgcattcattttcataattgacatatgcattatatgtgtttcataatcgaataaaagggattgatataaaagaagccacataaaattactttcataattcgtatttttattatatgagtttttttattatcaattattgatttttgaaattatcttaacgattttctttaatttacttttctaccatcagttccgaacatagacttgtaataaaacaatgatgaagagtaggtgtcgcagcgattttcaattggtttcaaccgttagatttaggcattatgttttaatgtttaatgttttcaaccgtcagatttaggcattatgtttaatgttttttgcatccaaagtttaattacgtt

SEQ ID NO: 49699 - DNA, 181 bp, Arabidopsis thaliana landsberg
tagtagcggccgtccagtgagcactaaaggcagctggagctgcggacgacatatcagaatcagttgaagtgtttgagtcctaaaaagccccaaaacgattcgcaaaacttgcagccggaattccagaagggagttcttttgagacgggacctccggggacaaggtaagacttagcctgcta

SEQ ID NO: 49700 - DNA, 739 bp, Arabidopsis thaliana landsberg
ggcatctgagaagctcagattctgacacgtgtcttttgttatctgaatttgcatccgttggataaacatgacgctgacaggtggattgaaaagtaaccagcttggatttctgtgtatatgttacaccgccacttcccttaattttttcgttcttagttaaaataaaaaaggtttaatttatgagtaaaagtatgtaaaacgacaacgattactataagaattaaaatttatctttgcttagtaatttgcactttagattggattcaaattttgtaaaaagctaatgttacatatatgtccattgaaaaaattgcatttgactttacaagcattgaaattaattaatttgggacccctttttttgttagtttcaaaggaagaattattttaggctgagatgggtccctccataaactcactattctgccagcatacaaattccttaacatatggtccaaatagcagttccaaccactaatatccaataataatctgaacaaattatctttctttttttttcctgataatcttgtatttgtttgttcaatgagcttaatacgtatattagttatgacttataactaaatactttgactcacttgatccgtacacattgatttcgtttattcaaatccgaacaacgtaatgatctttttgggccgagttatttgtattctcaacctgagtccaatcatgctttatgggctattctgtttatttatgcatgtaaagcttataa

SEQ ID NO: 49701 - DNA, 1012 bp, Arabidopsis thaliana landsberg
ctggctggggtgtgcgcaacagatccatttcgtcgtatggactatttcctgaagcagttggagtccattgggttcgttggtgtccagaactttccaactgttggtctctttgatggtaattttagacaaaatcttgaggagacaggaatgggatatgggtaagctacaaagcaggtttcaagaatcattttttgtgtatggattgtgtttaaatttccacataaacttgtccgatattgcagtcttgaagttaaaatgatctcataagcgcacaaaatggggctgttgaccactccatatgctttcaacccaaaagaaggagaagaaatggcaaaagcgggagctgatatcatagtagcccacatgggtctaacgacatccggaaatattggggcgaaaaccgcagtttcagtggaagaaagcgttgttcgtgtacaagctattgcagatgctgctcgtagattcaacccagacattatcgtcctctgccacggaggtatagtaacttctaaaatccatcattcactgtttgatatagaagttttgttgtagtaagctttttgtttttaggtccgatatcgggtccagaagaggcagagtttgtgttgaagagaacacagggttgtgtccatggcttctacggagcatcaagcatggaaaggctacctgtagaacaagcaataacaaacactgttcaaaaatacaagtccatatcgatcaagtgaagtcaaaataataagttcacttagaaacctttatctttggtgtttctagtatatttgcatgtgttgaggcctatgggtgtggatgcatgcttttgtagcatggtggattgttttatggacctctttgcttgcctctgcaggatcatatatgatctctagctttggatatcaggatacttgcctgcatactaaagatcgtagagcttagctttgtgcctactacttgcaaagggaaggcattcacctaatgactgttgttattatggtttgacacagtactaatgcat

SEQ ID NO: 49702 - DNA, 1060 bp, Arabidopsis thaliana landsberg
gcatcaatgataagtggaatattacaaccacaaatctttaccatttaacgttgatatggcatatacctttgcgatcctaggttcggctcaacacttttacttttctattttaaaaaaatattgaaatcaatcaaacgtatcttaagtagcggctcttgaccctctaaataatcaactcttgcatgtatctccaccgtccgattagatgattagtggagtgcttatcagttattaacttatcaacttttcttttcaccctttaaaggttcttttgaccttataaacttgattactagtgttgatcacatagcttttggtttaggtaaatcgggtatactacaataaaagttacaaaacttttaaccgctgttataatcttgttttcccaatcgagttttaacaaagtcgtagacgactctataaagaaaactacagtcgtacatattattctcttttcaaaatgacttatcttagagttcaaagtcttgaacacttactactataaatatatatatatgaaagactacaagatatatatatatatatatatatataaacattctcaaatttcaactggaattcaatgggaaaatgaagtgaagagactaataatgtaatatgaaaataggaagatcaatttcaaaacggcagacggaaagagaagagagggtatggaccaaaaacagttgtttccttatctcaagccattactgagaaaacgaaacattctcacaaatctactagcactcttctcttttgctggattgatagctattttatacgtacattgtaattaatatacatattattactttacatttgaccaaaacatgtagattttttgtgatttacatttttaatataaatattcctaccaataatacaatattctagacttgccgagttttttaagaatattattctgatttattgggtttttagttctctgctatcaattcataatacttttgtctgtttgatttgttgacaaagaaataatactaataaaattgtgacccaaaaagatgtctaagaacaaaataaacaaaggtaattaatg

SEQ ID NO: 49703 - DNA, 1095 bp, Arabidopsis thaliana landsberg
  unsure (1)..(1095): unsure at all n locations
acactaaacaattcgaaacacttcgtattttggaaaaataaaaactattgattttctacaagcagaaagcatgcatcgcaggtgtggacagcatctgaacacgttgctggattctctttttgttcttatgcattccgatttgtatataaacgtgaacggtgaactactttttggacaatttatactttttttttctctatctttaaactagttttgtaacaaaatcacccacttacacgtacactatctacgtaaagtggagtgcaaaacagttcatatccgtggaggtctagtaatttatttcaagaagttcttaaatttatttttttggtcaggaaatttagaatgttcttatcacattattcttaaaatgcattcgttatgttatgtgaatgcactagccaaaaataaataaatgcaactaccatcattggttaatattcatgaaactttttttttttttcatgaaacttatatatctattaaaagtttaaaaccttattatacgaaatgtttgagaatctattatctgtcaccacccgtttgtgaccagagagtagatttctaaagtgttttggataagtttagtgttttattgtatttaaaaatttagaagcacttttcattagactctatatatgacatatctataataatattcctgaatttgaatttagcatctacttatatcgcataactcatttatggtactgaaatttagtggaaaacagctagtaaaagagaagtattggtgtgataaataaagctcagaggctcaggataagtcaggattccttaactcattttagctagcctatctctctctttctctctctctgtctctccctatatataaatcgataaataaatgagtgtgaggtaattaaggaactagaaaggaataagaaattatggagagaatatgtgaaatgtggagagaaatgaaagatataacggcaatggtggtggttcaaatagctacggcagggttaaacatatttttcaagctagcaatggaagatggtatgaacccaagtgtactcgtggcctatcgtcttttgttgctacactnttcatgattcctatatgcttcat

SEQ ID NO: 49704 - DNA, 274 bp, Arabidopsis thaliana landsberg
atttatactaaagtaccaagcttaacggttcttaactatcacagaaaaggtcttactcggtacatatatgagtggagtatgaaactattaaaaagggatttaatgtaaaaggaaaatctcttgtaagttttgtcttcaaacatgacttggagttccgttctcccgcgttggaatgttagccaaagctacttttcgggctctctttggacctacaatccccggcaaatttgaggcttccttcgggcaatcctggtggttcccaatccccggtcaa

SEQ ID NO: 49705 - DNA, 431 bp, Arabidopsis thaliana landsberg
aatagtcactagttacatgtaacatatctttaaacaaataaaaatgggcaggattatggagtgacgataaatttgtatagaacacagtttctagtagatgtggttcaagaaaaggcaggacgagtgcttgtgcttgactccatcaaacaagccgatgcttggcttggcatggatgttcttatcttcaactcgtggcactggtggactcacacctccggacttcagccgtacgatctctataaattaaactctctcttttgataagtttcattaattatatatgcttcttaattaaacgtttaataatggtttgtttaattaccagctgggattatatgagggaaggaaaccaattgtacaaagacatgaacaggcttgtggcttattacaaaggacttaacacatgggctcgttggattaacaataacatt

SEQ ID NO: 49706 - DNA, 566 bp, Arabidopsis thaliana landsberg
aaaaaggactgatgacgacacttgttgcagagttaaaccaatttaataaagtgaaaatatgaaaaatgaccttttatttttattaattgttaatttattccaaaaatttcctaaacaatgttttttttttcttaaagattatttttgcctcctttttgtgttaatatatttttggaaagcaacatataacaactgaaaaaaactcaaaaaatttttttttacttgttttaccacaattttcatactttttatattacaagtgatatggaattctgtttatttattacgtcacttacaaaatatctaatataagttacatattaacaaattccctattcatgtttatgtaacttaaagttacagtaaattctatttgtctgacaaacgcaaaaaaaaatgaaaagcaacaattataagtgatttacatacaaagaaagaaatttgcaaaaataaagcgagaatcacgagaacacttatcatatggtaggcatgaaacaagccatattatagtagaaacatccaaaacttcactgacaaattgtagacatgttcatttttaactcctc

SEQ ID NO: 49707 - DNA, 774 bp, Arabidopsis thaliana landsberg
cagaagacggtcataggacagagtgctttctacagctagtatctgactttgtctattgctcaggagttcttgatagacttcttgaaattcagaagctagacaaattagacattgaaggagcgattcattgttattacgatattatcaaccagccttgccctatatgtaaagaaggtaggccactggaggcggaattgtctctacatgctttacctttagatgaaagcttgaagatcgtgaaggagtatttgatagctgcaactgccaaagactgtagtattatgatcagttttcaatcaaggaatgcttgggattcagaaccctctggtgattacgtctctctaaaaccgaccaatcaaacgtttgattacaaggtatgatccattttaacacattcttgtcttatatggtgaaagaactattaataatatttgctgagatcattggtacaattctctaaaaataaaatgtgggatccgcgaatcattataagaacagaaatttccttagaaaacgttgagttctcaggaaccatataatcggtttcttcattttgttatatttgtttgatatttgatttatgtaactgtaggtacatttcattgatctaagcctgaaaccacttaagagaatggagtcatactacaaattggataagaagataattagcttttacaatcggaagcagaaagccgaatacactgcagaacaaatcggcaactcaaaaccttcccacagctaagtcatgtatcgtctcaataccactagctcttt

SEQ ID NO: 49708 - DNA, 645 bp, Arabidopsis thaliana landsberg
  unsure (1)..(645): unsure at all n locations
nnnnnnnnnnnnnnnnnnnnnnnnnnnnnnnnnnnnnnnnnnnnnnnnnnnnnnnnnnnnnnnnnnnnnnnnnnnnnnnnnnnnnnnnnnnnnnnnnnnnnnnnnnnnnnnnnnnnnnnnnnnnnnnnnnnnnnnnnnnnnnnnnnnnnnnnnnnnnnnnnnnnnnnnnnnnnnnnnnnnnnnnnnnnnnnnnnnnnnnnnnnnnnnnnnnnnnnnnnnnnnnnnnnnnnnnnnnnnnnnnnnnnnnnnnnnnnnnnnnnnnnnnnnnnnnnnnnnnnnnnnnnnnnnnnnnnnnnnnnnnnnnnnnnnnnnnnnnnnnnnnnnnnnnnnnnnnnnnnnnnnnnnnnnnnnnnnnnnnnnnnnnnnnnnnnnnnnnnnnnnnnnnnnnnnnnnnnnnnnnnnnnnnnnnnnnnnnnnnnnnnnnnnnnnnnnnnnnnnnnnnnnnnnnnnnnnnnnnnnnnnnnnnnnnnnnnnnnnnnnnnnnnnnnnnnnnnnnnnnnnnnnnnnnnnnnnnnnnnnnnnnnntttggcacaaaaaaaaagaaaaaccccccccctcttttttttctccgggggttttttttttttttttctttttttgggggccaaaggcccgcccccccccaaattggggttttttttttt

SEQ ID NO: 49709 - DNA, 861 bp, Arabidopsis thaliana landsberg
tttgggtttttgctcctcgatgatgaatataatctcacttttgatacttttcctcctcaaagattctaattaacgtcacatctctccattttcttttgcattggagaatgaagaacttttatgaattctcagtataatatcaccaagaaacacacacactctctctttcctctctcttacaccaaaacctatgacgatgaagagagctttaccatctccttcctcactgctcttcttctttctcctgataacaccactcttcctctgccaagaaaacagagtctctgcctcaatgcctccatctgagtcagaaactctcttcaagatcatggaatcaatgtcttctgatcaacaatggcgtcaatcccacccaaacccttgtgcacctggctcatcttggccaggcattgagtgcaaaaccggtccagaccacttatcacacgtctctcgactcgatttcggctctgctccaaacccctcttgtaaatcctctgcttctttcccttcttcaatcttcactctcccttttctccaatcagtcttcttcttcaactgcttcactcacttcccaaccacaatcatgttccctataaaactcatccctaactcttctcttcaacaacttagcctcagatcaaacccttctctctcaggtcaaatccctcctggcatttcttctctcaaatctttacaaatcctcactctctcacaaaaccgattaaccggagatatccctccggcgattttctcattgaaaagcctcgtacacctcgatctcagctacaacaagctcacaggtaaaatccctctgcaattagggaatctaaataacctcgttggcttagatttaagctacaattc

SEQ ID NO: 49710 - DNA, 1121 bp, Arabidopsis thaliana landsberg
gtcattaagtttgactacacgaaatgacatgtttaaatatttccgaaagacaagaggttaagtaccatgactgagtcaaccatgtctatgtcaaatctgttgagaagttttcccaagagagcaccagatacaaagagtgataaacccaatttcatctcgtacactgaaacttgaattggctgagttatatcgacatattcagaatagtcacttgacatccgatcaataaaagatattgctgtctcctgcagaatccaaggaattgatatttgaaaatgaagcttgatggctaaagcaaaaagaatactaatgacagtcatgagataaacatacctgccagttgaaaacctgctcaacaacctgattccaatcaagcacttcaatatcgttgaccagacttatgggacgtgtgagaaatccagcaaattcatccagcgcccttcgtaaatcctggtacttttttggatcagatctaaaaataacctgtttcagaaggtaagaaaaaaaggtgagcatgaaaatgggataggtcagataataattatcacacagcgaagaggtgaaaaacctatggtggctgctacatacctttctttgcaatcttttatgctcagttttgagcttagataatgtatgttcactgctttcgtcattgtttccagagtaaagcaatccagacagatacccacattctccccggacctggtaatacatgaataggccaatcaatgaaacaaagacggacaatatgcaatgctattgtgaacctacacaatacgaaagagtaagcaccttgatgtttagctcaagtgatgagattttctcttctagctttaacagcttgcaagtgatcttcatggctggatctataacatctaagctattcaaaagatggaagcgtagtcctacaagataaagccacgccaagccaagattgcagtagaattctacaaaagttgggcataacgctgtattaaataattacaaccgtcgaggaaggtttgccttgctaagaatcaaacttctacagctcatatatgaactatagaacaataccatttgatgagcaatcggaataaagacgttctgctaatggtccgaccaatgagtgagtaccggat

SEQ ID NO: 49711 - DNA, 364 bp, Arabidopsis thaliana landsberg
tgaaatctttgtccagcctctgcctctccgctctccgcgtgtagacttgaggtcccggccgccgcacgagatctctgaactctgacaagtacaaagccgtgtttcgttctctaccaattatacatatataccactaataaggcactagataatatatagcaagactcaagacagatcaaaccgtactagaatgaggggagggtggcgagatgcatgcttacgactaacctagctataccagggatggatatagagtttcggtggccactttgtgccaaattaataacaacgcttgctttggtctcttccagacttcttccagtgcaaccttggggacacagggtttaatttaataatttggcag

SEQ ID NO: 49712 - DNA, 552 bp, Arabidopsis thaliana landsberg
tgccacttccagatgccccaacccccaagaatgtgctaagcatgagtgagtagccctcggtagcacaggaagtatcatgcccaaccagtggccacattataagaaacctaatcagcaaaggctcctccttccgtgctccagatcaacacaaaacaagaatatggcccaaaatgcttttattatggagataagaccaagaaagcccctgcagtacaagaaaccttatgctattagctcgtagctacatttcgctctgactaaggtttccaacactcgagcgcatagaagccaattcagacaagaagaagcagccgcgcacaaacgacgcccccgcaacgggaacggggaagggagacagcgaggctcacctggattcggctttcgcctcgtcggtaaccaaactagccggctcgtggcgcgcaggctgcggccggacaaggagctcccggaagctctgcttcttgggcctcgctggggcgacgaactcggtggagcgcgcgtccgcgcgacgatctccgtggagcgggaaaccgcgccccatcatctccggag

SEQ ID NO: 49713 - DNA, 378 bp, Arabidopsis thaliana landsberg
gctgtacggttctgtacaaatcagatgtcagtgacctgcagtttgaggaaagagaaatatgttgtcaacaaggaagtgatttaaatagtgccctgggttcgtcagcaattatgcctttcttcttaattgctgcaaactatataaattctaataggaaataaattatttatttaccacgtaatgacaaaggtcttaaggagaaggggcttaattatttaaaaggcctaatacccgggaggccatactcttgggtgatttcactgaagctgttaaagttgaagagatgctttaaaacaggagtgtaaactttgacacatgacaactaaaagggccagcactgcatcagaaagtgactggatgcacgtctgaaaaggcact

SEQ ID NO: 49714 - DNA, 516 bp, Arabidopsis thaliana landsberg
ttaggtgtattatcactggaagagaaacactaacattcccagaaatttcggggttacgtttcgctttatttgcaaaacgatttatcagattgtgatagttaaagaagctgtctgtgtattattatggattgccactagagaaaaactcgaatgctctgttttgtgctctcgagaaaagtctcagactcagagatgagtgaaagcagataagaatgatgagacgcggggctaatggaaacaacgttttcgatactataaacgcagctgctcctgcgtatggcttcgtttgatgatcgtcttcatcaatcttctccgatggatgtgagtcttctgtctgcgttgcaatctgctcagtcagaaactttcatgtctgattatgctcttaagcattagaccgaacacattgtatgcaattgtcagatctgtgtgatttcgatttctcgactctgactttgctgctttccgttatcataagaacagaaaatggtggaatcgatggagtctggtgacatgttc

SEQ ID NO: 49715 - DNA, 805 bp, Arabidopsis thaliana landsberg
atctgattctacctttccattttctttctaaaagtcgtggctttgagaatagttttttcctctttttctcatcagactcggtttcctagttgactcattttcaagatctgggcatctgtcatttcttttataaaagctttctttttttatttatcccttttgttttcagctgctggttgcttgtagtaggtatagttttgggtggccttacttgcttttcagcaaaagctgggagattgagatttcttcttcttctctctctttagtctttgggatctgcgcatttctcagaaattatatgggactctcgaaagcatgatgctttttgttgtctcacttgtaatttgttcgggactttgttgctgaagaaaactaagcaatgtctgtagaaacatggttcatgattcagaagactactactagctcatgagttcactggtacttggaattaagatgattgatcagttcatcaactttgtaattcgacctcctaggtacttctccaccctctttagctctttcaagtctcaacttttttgcattcaattgatagctgttgggggtgttttgacagggctgagtatgatcctgatcagtatttgtgggagaaggagtttagcctcggtggcacaaagtgtaaaagacaagacttggaggcaagtatgggcacctaacgatttagtgttttcttattgtcctcttcaaattctggttcctcttgaggtataacattataggtctcatgtttttgtactctcgtagcttacaaattcgagggggctcactgtgcgaacagtctaagatg

SEQ ID NO: 49716 - DNA, 1129 bp, Arabidopsis thaliana landsberg
atacattactagtggaatcattttcacttccaatatagtataatctaacacaactgacgaatccatctgcaaactatcagaatctctacagcaacttctacaaatcgtagatctcttaacccaattttttttttttaattttctattttttatgatgattttatggtacccacatttccatatttgtcaagttttgttgattttacaaatgttggaagattaagatagataaacaattcaataaatcatcattgagtgataaattaacaaaaatatgacggatgtcatcgatatgaatgaacatcaaattagatataaatatttctattaatagtacaatttgctaaaataaaactagtatgaatatgaagtaacttaaatcattagttaacaatttttcaaaagcatacttttgctaatgtctaaactagtggaccaaataccctattaccggccaagccgctaaaaaaatgtaagcaaagagtattttcataatcttatgtggaaatgtcgatcttctcaaatgaagtataagcagttgcacaaaacttaattaccacgcaaaaactgaagaaatcttgacgtcttttagtaaaagaccactatactaattgattgcacaaaaatgtttatgtagtaacaagaattataagaacaattagaataaattttagaaataatgttgcatagatatggatggcatatacacacacgtgcacacagtatgagttgtatataattgagaaattgagacacagaatcagaacccatcatctttggttgtaactttagtacagacagggaaacatgttttgtgaccataggggacatatctattctgcacgtgtatctctctgcaattctttttttttttgtccttttacccccaaaactttgacatttgttcacatgcatccccctgcagtcactatacatgttgatcaatagttagagactaacgtcgaatcatttttgaaacgcccaaggttcggtttccaactcttcttatttcgacttaattaggatttgatcccggccgagagaatatttaagaaaaaaaaaattttatggattttcaccaagggtttttacgcttttattaaaatagaggttaaaaagtggaaaaatc

SEQ ID NO: 49717 - DNA, 805 bp, Arabidopsis thaliana landsberg
ctcagaatacatgaagtcatgcagaatgttggaaactttctgtacgagccatcttcgtcattgaatgtatcacagcatatttagctaaaccatgacgtaaatacaattcttttgttcgatccattaagtatattatatgggaccaaacaaacacataccaaaaaaattggaggttcgtacaatactttatcaatttaataaatacgtttggccatagaccgcctaatataagaacattcatattaaaagttggagctacattcaatgggagcaaaaaaaaaacttcaacattggtgtctttttcaattcaaaccaaaccaataaagacacatcaaccggaattgagaaaaatataccaaaaatggtaaaggatacgtaaatacatgaatctaaattaagaaataacttcctatatttgttcatactttttaagaaatgaaaactaacttcctaattttgttcatttatttttaccaacctatctagagacttaggttaggcacgtgtagcatgtagggatgttatatagggcttaaatttaaggtccggtccgggcccgttaaagtgtttcgggctaaaacaagactggccctattacattatttttatttattttaggacaagagtaacgtgatggttttatcatttacgaattgactagtcctgcgaatggactaattccaaacgccattttagacaagtatgagtttgactttgaccaaacaaaagaggtttctaatcaaattaattaatccactcacctactactgattaagcacgtggttcatgttccacaaaacgcacc

SEQ ID NO: 49718 - DNA, 1161 bp, Arabidopsis thaliana landsberg
tctttagtaaaagtacgagtataatatttgcttatatcccgtaaatctgacattttttagtaatgtttctttattatcgaaactatatgtttcactaacataaatgtttcagtaatatttgttgtcaaaaaaataaaaataaaaataatcgagttacatcagacccaatttcatgatttcctcgcattagttatctaaaatatataaaacgtaagtttcctttttctttttgagaatacaggataaaaaaactataaatcaaataatgaacatactgcacttttatttttgcaatttcgttagcacctagtaattaactaactaatatatagacactttgttttggttataattaacaacattacgagtacaatcaatttgattgctacaaaaaaaagagatatgtaggggtcatacacgtaaatttgcataaatcattgaaaagaatattgggagtgattgtcgtaaaccggaatactcatttggcctgcggtgacagtaattattttgactccaccgtcaaagacaaagaccgcactcattctctctcgttggtcgagtcaaacacatttaaaactgttccttcctttcacgctcttctcgtgttctgcttcggttacaacttctggtatccaatacttccaaatctccacttcacaataagaacccattattgatttctctacaagttatacattacaagaaaaaagatgggaaactgtcaagcagtggatacagcgagagtggtgatacaacacccaaatgggaaagaagaaaagctaagttgtccagtttctgctagttatgtgatgaagatgaatcctggccactgtgtttctctcctcatctctaccaccgcaatctcgtcagcatcttccggtcatggagggcctcttaggctcacgaggatcaagctccttcgtcccatggatacgcttgttctcggccacgtctatagactcattaccaccaaaggtatatattagagtaacatgcctaaatctactccaacatttcaactaacaataattctactccaactctatattcttgcatctcgattacatatctcgttaattgaatttgaactatatttattagtcccggtggataaaatatgttaacaatatatttttggaaagattgcaaacccctagggaa

SEQ ID NO: 49719 - DNA, 1236 bp, Arabidopsis thaliana landsberg
ggtcctaatttattattttattttgttaaaaagtgagtttgttgaattttttatttatataaagaatattttatgaatgtttgttcgctggatatatctatttgtcattaataacaacaaaaagggttaattttttaatttgctttctaatagtactagttaaaactacagttttttttgctattattgttggtgtatttatgttttagttagtagcagtataacatgtcaaaaataaaaaatttagtagcagtctaagatgtaagtcatgtgacatctacctataagaatcagaaacactagtatgaaacataattaaatattctattttgatttaaacattgttaaatataattttgtatcaaaatggtgaattataaaataaaaattcttttactaaacttagattttactaaactacaaatgtatgattaataaattgactcttaatgtttagattaagcttagaattaacaaatcaattgataagagttataacaagtttaagctcttcttcttcctaaactgaatattatgccaatatttcaaatattagaaataaaggttttaaactaaatgtaaatctatgacatgacataatccttttatatttttgtaataaacataagaataataggatagtgcagaaaaagctgtgattccaatataattatgtgattgattgactaaacaaaaatatgaagtctaaagaattataaatttctgtagttatgaatcccatctatcattggttgcttattaatttatgagaaaaataaatttttattgacaatcttatttgttttgtttttggtagtctaatattgaagtacacatttattaaagtaataaaaataaaccattttaaggacacatacgaaaaaaagaaaaaagaaaaaaaaacagagagaattgcggagtaaaataaaaagaaaagagaagaaggcagaaacagagtggtggtcttgttcgtctcctttcaaaacttgcggcggcggaaactacctttcacggcggcggtcttaagtttcttccttctgaatcttctctcttataaaaagaaaaaaagttccctttcgctgtaattgcaaactggccaagtaccccacttgcttctactcttgtcttcaaaggttctcttttttttattcctccccttttttttcaccaaattaaacaaatgggtttggttagttgcacaagagtaaaaaactaaccaaaagtaaaaaagtttgg

SEQ ID NO: 49720 - DNA, 604 bp, Arabidopsis thaliana landsberg
tccgttaatttcatttaggaaatcaggctcattgccaatccactaagaaacatctctgatagatccaaataataaaaataatataatatgaagcaaaatagaacgaaatatctcacgcggaccaaactttgaactttattataaaacaaatcagcacgtgaaagtaatggtcggttcggtccaagatgccaagaacgttcctcctccggtccatccatcaacctaaccttttttggatataaaaattagcaaattccatttccacgaccacacaacaacaacacatccactcgaattttctatttccgaataacaaaaccggtaaactcatcacaaacttaagttactttgtagtttgtgttttgtccttgtatgtaatgaagaagatccaactaactactactcaatatttttgtattgaccgttgatttctcagatctgacttttacttctccttcttccagatcggcggagacatgacggcggcacaagggaactctaacgagactctgttttcttcttacaagatgggaagattcgatctctctcatcggtgagtttcagctagattaatgatcttgagtggtttttgaatgcagtgtag

SEQ ID NO: 49721 - DNA, 557 bp, Arabidopsis thaliana landsberg
gggatcctgaagagcggattattcctcgcagtgtagatgctgatgattctgatgttgatatcaaaagtgacgatgataggtaccttttcttcatctcttccattcttttcttcttctttgcagttttttatatgttgtgctttaaatttggctaagactgtcaaggttgggggctgatacataagcctaactgtacctcattgcttttcatctagaccatagtttgggaaaaatacaattgatattggggaaaatgtttaactactggcgttccattctcttgtcgagtttttgttgacttcaatactctagttccttcaaaggtatcttacaatctatttatctttgttagtgatgacgaaagtgacgatgatgatgaggacgacactgaagctcttatggcggaactcgaccagataaagaaagaaagagtggaagagaggctcaggaaggtaatattgctattgtctgggatgtttctgctcagattgctattagaaatgactaggataggttttttaaaacatattgacataacaaagatttctcttgtgact

SEQ ID NO: 49722 - DNA, 707 bp, Arabidopsis thaliana landsberg
atttttcttttgggtgattttattttaagatcattttgttttacttttggttgtgttaaaaggacaaagctatgcagtcgccgattattgtaatagagatgctgactgtaagcgggtatgcttaagaccgtacgcatgcaacttaacccgtcacctttgtatgtgtcatccaaatgatgtcagttcttctaaacaacattgtattccaggacataaaggttgtggaggaggacctccaccacaacgattgaaattatatcgataaaaacgtgtatgtatatattctgataagatgttatttggacaaaataacttgagtaaaaagttatttgaataaaatacatttatttcaaagaaatttgatggttataataggtggatgatcatgtatatgaaacatgtcttgatttattgaatgaataaaatcaatatgaattaagatcactcaaactgaaacatacaaaaagagtaatttgacaaaaattccacccgagtgttaaaacttaaaaatcatgcatagtttcaaaattgaaatattttaaatataactccgatatattcatacacgttttaataatcttgcaaaaaggtgttttattttgttgaaaataaagtggttacgtcgaaagtttttctttgtatattccttatgtaataagagtgtaggctcattttatttcagagctaaaaagagtacaaacacatgt

SEQ ID NO: 49723 - DNA, 543 bp, Arabidopsis thaliana landsberg
tcataaacaccgcgccaaacacctcagccgacgtgcttattcttagagtgactgtgggtcacctttcacatatatgacggtaccacgtgtcgcaaacattgtcctgatgacgccacacgtggatcgggctttcggatcctagtatggtagccttcggtcgagcattaaatttgtaacgtaaaagagttgcaatcgtcaattgatataaaacatctacttatgggagtgatccatagttgtgcgttgtgacatgacatgggtgtatatttggttgagtggggctaaatgtcgttaagataagggcttaattgaaactattcaactttctagaggccccaattttacatcccttgattataactcttaacacgattttgtacgcatgcagatatatatgataaaacatactaacttctttagcgaaatattgaatttgaattctaattatggtaagcgtccacgtggtaacgatgacgattccagccgttggatctgcgaccatagagcataactgttttatacgtgttttgatacaaagttggc

SEQ ID NO: 49724 - DNA, 474 bp, Arabidopsis thaliana landsberg
gtattttcccgtaaattttgaattttctaaacagattaaataataagaatatcaaactgaaaaagcaaaagaaattttgatacttttaaaagaattactgtaaaggcaaaaaattggaaaatatttgtgcagattatttctctgaaattatcagccaattaataaagaatggtaattaaacttccaaagaagatcaatattagtctagatatatttgtatataatttggtttccttaagaattttgtaacaatgaaatcttttttttttgtaacaatgaaatctaaaaatcactttttatcgataacagtaaaaaaaaaatctttaagctatgcatataattagattatatatacgacactcaaaaatatgagtgttcatttaatcaagtaatattttccataatattacacatgaagtttttttcttctaaaactcttttaacgagacatcgtaagcgctgtaaaaaaagacc

SEQ ID NO: 49725 - DNA, 1222 bp, Arabidopsis thaliana landsberg
gtggggttttttaacgggcaaacatcttttgggtatttgagtaatttacatatctaaaatcatatttcacgagcaagtattttaaaatactttgacttaggtattttggtacccataagcaatttttcacataagaactcaaatatgtgtgtgaactgaaagtaataactaaccaaggtcgtcgtttctagattcctaagtaaataactaatcaagatttcttttcaataagtccgctctgatctctttaatcgcgttgttacatagttacatgtctaactcatggcacagagagagatgccaaataaaagggataaatgttgaattggacttataagaagctaagaacatgattgggcatgtttgggcacatgcaaaaggagcattaggaaaacgggcaaatgtcacattcacaatttgatattctgaagaaagaaaaactgctgattcaaaatcttgaggtttttaacaaaagaatccaaaagagcgaaccatattctaaaatttagagcggacacattgcaaatattgaactttgagaatgaggatattcgcttcccttcagatttatgaactacaaatatgtatatttatacttatatacattactcaaatcttactttccttatatctgaaaaatgcaataaaatttctagtactgattataatttctattcgaattttttctttttaattttagttttgatatctttctaaacttttaaaaattttccttaaaactttttctagatatctatcttttccctggaatattagatattctgatagttgtagagtatagatgatatggacggatcgaatcaaaagtattaaaaaacaaaatcacaaaatccgttctacactaacagaacaactaaaggcaactaaacacactcaatttgcaatgtttcataaagttacgagtaaaatgagttagaatattatcaacaatgtaacaatagtgccttatattattgaggaacaagaaccacatttataagtatgttatcttattatattaaattcaacgtaagatcaagcaacgattatgtaacccaccagaagctgaagcagctcgcctagcttcctctacgagagcagtacgtgcagacgagattccggcagggactagacacgtgtcaaacgttgaacaatcgatccaatccttaagaagctcttcttgtccccatatctccggtatccaaaccctaccagcgatctc

SEQ ID NO: 49726 - DNA, 658 bp, Arabidopsis thaliana landsberg
cacaaaatccttctagttggagaaggaaacttctcattctcactatgtctagcttcagcttttggctcggccatgaacataactgcgacctctctcgattctgaaggtatgtaaaacccattttatatgaacatttataatatacatctatcgatcactagtcgtaactaatgtattgacttaaatcaataaaattttacatgtagatgaactgagcataaaatatatggatgcggtggataacataaacatattgaagagatacgggtgtgatattcagcacgaggttgacgtgcacacaatgagcttcgataatagtttgagtctgcaacgttatgaccgcattgtcttcaattttcctcacgcagggtctcgtttctttggtcgtgaattgtcctctagggccatcgagtaacgaaatatattctttcattttcttactataatatatagtttatgatttggactgatgtaatgataaaatgctgtgttttggatcaggagccacaaagagttagtgagaggatttcttgagaacgctaaggagatgttggaagaggacggagagatccatattacacacaagacaacgtatccatttagcgattgggggataaagaagctgggtaaagtagaaggtttgaagctggttaagaaa

SEQ ID NO: 49727 - DNA, 641 bp, Arabidopsis thaliana landsberg
aatgtgactacctcatttattttttctcatttctatcaaaaaaaaaaaaataatctcactaacctcacatcatacttttatttttttctcactagaaattattacttttctaaaaatatctcattttatattttcttactcatctttaaccaaaaaataattaaatctctctcatgtcacatcatatttttatctttttactctatatgaattattgttttattctaccgtgcattttttattctctatatatatttcataattttttcatttttcttctcatccacaacttttactttaatttcaacttcatttatatacatatgtaccttttttggtacatatgcattaaatatttggtagattttatgtctaccaaaactaataatacaattattttcttattattattctctataaatgtcacatgacatttttctattttttcatatccacaacttttgcttcactttcaactttacttaaatgatgcaactaataatacaattattttattattattattctctataaatgtcacatgacatttttctcttttttcatattcacaacttttgcttcactttcaactttacttaaatgcatttgcactctttcttgtacatatgcatttaatattt

SEQ ID NO: 49728 - DNA, 408 bp, Arabidopsis thaliana landsberg
ttatggattattaaacaaaatattctagcctgtttgcaatctcttgcatacagccttacaaataacaaaaacaatcattttcatagacattctcataataaaaatcaacaaatcaaatttcctctaatctcgcgacgtatggttgcacatctgcatgcacaattgtttaatttagtggcggacacgtaatatacattaaggtatggcagaggacaagcaaaaatacagtagcattttctcatcgtcaagtttgtggacgagccacattgcacactcttgctctgctgccatagcacactgggcatgtagccaccgtgccccatgtgcatgtggatcgcaagagctcttgagatgcgcacgaagtgcctgcgagagcgtacggagggacgcatgtcgcgtagctgtgta

SEQ ID NO: 49729 - DNA, 1156 bp, Arabidopsis thaliana landsberg
atcaacattttcccaactgcaacatggcttgccacgtggttggattgttcatggctttgatttgttagtctaaggatgacatatttttaagtatggtttattttgcgatttgttcacacatcattgtacttcaatattttgaagcttaattttcaatatcatatttaatgttcgaattatggaaaataattataaaaagaacgacaatttggatttaaattattaaagttatctaaatttaataatcttattgttggtgtaccgtatataaaagattttgtgattctaccggtttttaccagtttgttacatgatttttagtctatataatttatttttggtaaggagatttagtctatattattgtatgtatgttaagtaactccaattttatgctctttttatacaaagaataaaggccatgcaatgttttttctttgtagtttcgtcaaaataatatttataccaattgaatttttttaaagtattttttttgtcatcactttgagtcatagcaaatctttgttaatgggaagatggaagcctttaaaacttcataaataataagatcaaaataataagatcaaaataataagatcaaacgattattacagaaatggtaacggaataagatgggattcaccacaaaagatcataataacccattttgctaatctcctcattaaacaacattgatgaataaaaatacggtttttaataaatttattgcttgttgttcaagagaatagctcgtagctcagccgggtcaatctcctcagaaacggtttccggtctgtaataaccggttttaggatctggaacccatggtgccttctcgcttgaagcttccccagctctcttcttcatctccgcggtcgaaacgcttccatctaacgccgttttggctgcggcggcaaaccctcgtctgaagagaatccaaaatccaaaacgtcagcgttttgttaaagcgacgagaaaacagagcaatacataacgtttttgtttcagaaacagatgttacctgaaaacggcgttcgagagcttttcggagccgaagacggattggatcttagcgttagcgagagaacgagccattgtggttataggttttacgagttttggagaaaaagaaaacagcgcaaaagagaagttctca

SEQ ID NO: 49730 - DNA, 1291 bp, Arabidopsis thaliana landsberg
acctcccccggttaatggtattttgttcaccaattttctatttcaaaagtttgttttgatcttgctgctatgatctttttaaataattagattttttgaaccataacgaacatattataagaaaatagccatggtagcaaaaccaaacttttaaaatatcaccaatccaacagacaaaaagagaatactagtgggcaaaaagtgaaggaaaatttatcatttcacatcgtaattttttgtttaattgaaaaagtgcaaatgaaatgatgggtcaactataaatacataaggattttgtaattgaactaagaaaataaaactctgtggatcatgacgaaagttagaaaagttaggcacatgtagtttcagtgttgtcatgtttttttttatgtaagagtaggaagaagctctcttataggacgggtatgatcagctgacaagttccaaaccctataaaaagtgatgtacattgtggaatctggtagcttgacgatgatgaatgtgatatatctctttcatagttacgttttcatggtaattgttaaaattttcataaacaatcgagttcatttttatcggaatcataataattactacaaaaatgagcatacgtataaatgtaattatcaatcatctgtaagaaaatttgtattagttagtttaagaaatatattagcgactttttttttggtcacaagagtgtccattttatttatatcaaacatcaaactaaggtccaagacaaacacatcaagcgaaggtgtaagacaaaatttcttatgaaatatataattaacttttttaaaattggtgtattttcagaagtgaataatattttaggttatttttatatcaaaaactgcctctcatatttataattttttaaaagattatttgccaacaaccaccacaagtgtcaacaaaaggaaattaaaaagtgaggtgggacttgaaaacagtactactctaatattttttttgtttgtcataaatagaaggtcgaggaaacattgctatatagtttatagtacacgatataaaaatatattttcaaaaccgacataacatcgggatccatctgcgcatggacggacacaaacctaacccgatgttgggaagctcgtcacaaatttgttcttctatttaaataactctcattttgcccttttcctcttccaacaccattattcaattattcaagatcgagacaagtgaagagtcgacaagaacatatagagattcatccatatcttggttagttatttttgatcttatttatttatgtttcgtc

SEQ ID NO: 49731 - DNA, 2559 bp, Arabidopsis thaliana landsberg
tctttatgcgttatgagaaacttggatatggtgaccgagaacttagagagggttttgtttttgatcttaagattttcagagtttccccattggaaagaaaaacaaagccctcataagatcatgatcacaaaacaacgaaatcaaatgaccaaaaccaaaccaaagttgatttagctgaagcatactatagattaatacgagttgattcatatggatggatggatagctgcagagaagaccaaaaaccgagaaacaagattgatcctcttaagaaatcgaaaaactgaaaacaagattgatcctcttaagaaagcaagcattcgcatcatcggtcactgtgaggtcattgtgaaaatccaaaaaaaaacaaaaaaaaaaaacaagtatgctttgctaccataacaaagctatgtaaggtgaaaaacaaattgggtccaagtaccgatgaccaaaaacaatcttgaacttaggcaagaaaacttggcaactgatatcaaaatggactcttaaatacaaaagagaaaggggcgacactaccataaaagaggaatgtgatgaaagagattgagaagcttataaaaacctatggggaagaaaacaatgcttgaaggaaagaaaactcaggttgtttattccagagaaaatcaacttgaagcttttgaaagagtcccaaaactttttccagtactcaaaaagacagatttaaaacaagaatgtaaaaccattatgtctgatcctacaaacgggtctcaagacaactgcagctggaagatacagacttttggcagttatgacatatagtggacaaaactataaatgtcataagcttcttctccagctagagcgaacagataattcaatgaaaatgcgggaaaacataaaaccaaaaacaaggaaaaacaaaagagaaaaacatacgccatgccacaaaagaaaaccagacgtgagtttgatgggtaaggagaagacagaagaccataatgggggactccaaaagggaaaacaaagagatagcaaactactttaaaccaatattgatcctagtaactaaatcttctagacaaaatgaccacatttcactggtttatgagaacagagcagaacaccaatgacagacttccagagagcaacagaaaattcatcctttgagcacacatctccctcaaaatggctcatataggggtagatacctcgttaaaagagactataaataatgaaactaaaaaagtaggtttgaaacatcaggcatagaaaataaagatccgcaaaaaaaactcctgcaattcccaaaatatcaagttggagtcgaagataccggactaatcattagcctaatctataacttgaaatatcagagaacatggtcataccacttgggttctcttatctcagataccaagcacgttcaccatcaaaaccagcaccagcaccagcacccgcaccaacaccgttaacattaccatcaccaacatattgtcccaccattcccatatgattcggtggcatcataggtccttgattcatcatacccgagccaaacatacgataattctgtaaaccaacaaccatcggattacccatcattgcaccatacataggattaaaaccaggaggaggctgagaatgtccataaaagggcatgttctgtccagcatacattgacatattctgctgctgctgatgtcctttatcaagtccatgacccaaatcaatcccaggcaaagccatttcactctgattacccgtatgactcaaatcaagcttcacagactcaaccggctgttgttgttctcgtggctttccagaattaaacggcctagctggtaaacaactaacagttcgattatacattctcttctccggattcttcaacgccgctctcgctcctttacgcgtcttaaacaacacaaagccaaaacctttagctcttcctgtatctttatccataaccacagaacattccgttatctccccataaacctcaaaagccgccttgagattctcatgcgttgtatcccatccaagaccacgcacgaatatgttccgttgagaactatctctatccgctgattcaaacactgctgagatcaatttagaacctttctcagcagttttgtaaattaggttaataagctcctctttagagtaagattcaagtagattcttaatatcttccttatcgaattcgaaatcagaatcagactcaatggtaacaatcgggaccgtaacaggctttgaatcgacgatctcttcggattcatctgatgatctcttatgtttcttcttactctccttcgatttcttaggagatggagatggagatggagatttctcctcttcttctacttcttcgtatttcttcgatttcttctttgatttctctggtttctcttcctctttggatttcgatttatgtttttttgagattttcttctctcttacagcgagttcttcagcttcgcgacgcttcctctccttcctctccttcttctctttcttctcaatcttacgttcttcacattctttcgccattgttgacggcagtggctcgcaaaaaac

SEQ ID NO: 49732 - DNA, 901 bp, Arabidopsis thaliana landsberg
ccgttcctatgggcgtgtgtccatatggatctatcacctggcttacgaggatcccatactctaaggattggatctgagccaccagcagctataaggtcagaactttcaccaccaacatctaccgtgttgagagcttttccacagaactacaatttcacagaaacaaaccggttttaagtttccggcgaaaacaacttcaaaagcactgatttttcggcaacaacatgtctggtgtgtgccctaatatttacgaaagaaaaggagagagagaaggcataccaagttcaaagaatctttccctgtctcaacatcccatctcctaacggaatggtcccacgaagaggaataaattacatcatgctctggccaaacaactgatgatacacactgtgtgtgtccaaccaaagaagtcactgcctctccctgtaagaagttcaatatcgtaattgatatcagacacttggaactcagaaaaacacaactgggagtacatttctctattttgatttgaagagtagatagtacgtttcaaaagaatgcatattatccggtacctctgactgagattcctcggcctgattatttccttttcttttctttactgatactgactccccttctgaagtagattcatttgtgttccataaattgatggtgcaatcccatgaactcgagcaaacctaaattccattatacaacaaaaaaagggggtcagcttagctcgaagaaatatagcaacaaaattatacttgcaaaacacaagttaagtgaaaggaagaacagcaaaccatgtttccggatttctgagctgaaacactttgaactgaccccttgtgttcaccccatatcttggttgcccttactttcgtaggagagtcaacagacttagctggatcaaact

SEQ ID NO: 49733 - DNA, 1210 bp, Arabidopsis thaliana landsberg
tacaaaaatttccagtgtccagcaattattattaatttatagtagttttactctattttcacttacttaattgcaatatcctgcttcagacttatatactaggacataataataataaaaaaaattaacccgattctatgtgatggccaaattaactaaaatctagattttcttggtttgcgttcgggcgtaataaaagatggaaaaatatagaaagtgattttaatctttttactctgttttcttcttgtattgccaactccttaacacgagctagagtttgttaattctgtttattcataaacggacaaagcgaaacaagtgagtagagccacacgacgactttggcttgtccagtgatggctgcttcaagtcttagtctgttgtgaaggtttccacattcctggtatctgtaacaaacgaatcatataatcagacttttaagactaaagttgcaaagaaagagtgatactgatacacaacacagccacaaacctcaacaccatgaggaccgattctgttacgtgatatgaaattcagaactagattcgcaaactcctccggtacatcttcctgtattccacgtatatcatcattgcataaaagactcgacataaagatcattaggcgatcgcatttatacctgtatggcatgtccggtgtgtttgaccacaatcatctgaaactttccttgcatttgaccaattgtgagggtcctaatccaatccatcaacatcgttattacaaaacactacagatttcgattcaatttaagttgagacctgagttccagaggggggtagaggaatatacctgtccaacctatcagttccagctaatagcaagagtttcggaactggagatgacaaaaacttctctgagagaccatcgtacctgcagggcaattaacattgttcgaatcaaaaactattcaagagaggtaaatgtttgcactcagattcacaacggcaactgttgcaactaacaactcttaatattcaaccgtctcaggaatacaagaggtaatgatggtcataccagcctttccaatattgctctgtttcctctagacgtgttcggtaaacgtagctggacaaaggttcatatttccactcattatgaagcaaaaatgtgaaccctcaaaacaggaaaagcagtaacaatacgcaccaatgctttgaatcatcatatttgagagttgtggggatag

SEQ ID NO: 49734 - DNA, 587 bp, Arabidopsis thaliana landsberg
ttatcaccctttttgggatatttttaaaaaattttgaaaataaaagaaatattctttatctgattcctattactgaaaagtgaacactgaataaaacgtcagttcattggtttttcctatttttacaattacagaaaatcatctctctattttgtttgggtatttcgtttagtacaatgccgcaaataaaaacactagccatttaataactcactttgtttgcttattgaattgtccaaccaattactcattcttaattagtatgactgttagtatcttttagaagaaaattaaagcgaagaattataattcaaacatttttctaacgacaaattaacacgcactactaccacatcatttatcatcaattgattccctcatatggtcagtcaacaacatatgctcagtgaacaaaaacctcaccatcttctctccctcccttttcttgctagaaaacttcatttcctttcacttttgctcaccatgaccgtattaggcttaaaattaaaattaaaatgagtaatttctagtctctatttatataaccgcatccgcatgagtatttaaaaattagtaaatctagtctc

SEQ ID NO: 49735 - DNA, 1846 bp, Arabidopsis thaliana landsberg
acaagattgttataccaaaaaaaaaaaaaaaaaaaaatttgtggttgtaatttcatttttttgatatcgtttgtgttacatcttcttcttctggtattaaattttcttgtctgaaatatcaaatctttattattatttattattacaattatctcctcttggtcgttagttatttcaatgtagtctcattcttatttctcattaaccatccatttttattacttttggtaattctccttcttatcattacttattttttctttatatacacacaacatatcaacaatgcctccatggttttacttctgcttctctttgtctctctgttactcccactcttatcagtcaaaactcaaaatacatcttctctattttagtccattcttccaaactaggtataagtaaaaggcatatataaatgttaaatttaagggcctcagccagttctcctcaagcccgaatctgaattcaagcgttaagttattacaagtaggcctagctggcccatcttctttatctgcaaaatgaaatagagagaaagttaaggtttgcatatgaaaggctaatagcttggtactcaagaaagattgaggcctatccttttaagtaaacacacattttcagtattatgaccttacaaatgaaaataaacaaacagaatcttcaaaagaggaaatttacaaactcgcttgaaagaagcgagatgtaagcaaaatttcggaacctatatccccacgggaatctataggttctaattcaaggagatataggtttcaaagtttgtttttggggacatctagcactaagtcatagtatggtgtggatctggtgcgacgtgatagttctcatgaagaaatatatagtgttcccttgaatcaactaatctaacataaagagtacctacatttaaatatatttctcagaccaaacacacgaacttccatatagctagatggaaaggaattcccattatcttgacccataaatttatcattgaatggtacaagttagagaaaatagctaaatctaagtaaaacgtgtgtaaataggtcataatattgaaaacgtgcatgcgttaattcaatggcagagagggacagcgatgaactgagacagagagaaaaaaagaaaagagaaacatatatcttagtaaaggtcaagtctttatcttaagctttgtactgaaacacaaagttaaatcatgttatgctttattattcatcattgaaataatgatgaatacttgagtttaaactagctcaaaatttgcttgtaaaagtaaaaagagtcaaaatagttttctttctatgtaataaaaggtctaaacatctatataaagtttcatgtatttatatatatatatacaggcaatctgagttaagtgatggaaaagctaagcaccacacatgcaatgaaacttattatcatgtttaatatataattaaagatcaccctatagtaaaagaatggaaggctactaaaattaaagatttttgggtttctaaaagataatatgagttcaccattatgtttcataaattgtatcagatggggttgtaacttgtgataaatttgataacagaaaaagcacatccaggtaatttacacatttgatggttttgtagtttagagttttaaagtttccaagatcgtatattgtgatacgtttgtgaagtcaaatatattttcaagcaccagcttgagaagaacccaagacgtagaaactattatagacatgtaacatgttgtgatcatatcgtgttgtatgataagttgaggtcgtgtgcaacttagttagttagttatatttctcgttggggaccagagaaaccattacaaatggaaa

SEQ ID NO: 49736 - DNA, 1364 bp, Arabidopsis thaliana landsberg
gacatttggaacaaagatcaccccaccgaagcatgaagagtaataatgaagcaaagttactatgaaccattttcatctgacgccgcacattgttcttccccattggaattgcttctgccctgaaaagatataaacctcaaagttctcatacacaattcatcgaacacaacatgtgcaataacaaagtttagggaccttgagcctaaacaaaaacaaaaaagctactaaatttgcttaaattagaatatcaaaaccaacaacaactttccagaatgttctatttgtgaaagctttctaaaactaaactaaaaatttatcggagtttcctaaaataacccaattttgatgagaagagattacacacagagaagagaatgacctaaaattatcatctgggttttcaattttttcactaactatactcttatagctcaactaatcaaacaattttaaactaaagtcttaaactttagaagaaacccagaaaaaggacttacaaagaattagcgtgttgaacatcagcttccaaaaccttcaaagattcatagtacgaagaagatgaagaagacgaagatatcgccaactgattatacatatctctctctctaattgtgagattacagcaaagaggaatcgattgaagaaaattcccagaaatataagaagaacgaaagagaataagatgctaaaagtgaaggagggattggtctgattgatcggaaaaaggcaagaacctcacagactaaacattgaagctataaacaccgtaagaacacaagtctcacttcttcttctctctctctctctctctttgctttttgcctttttgattctttgtttcacggttgctagctttttatttatatattaatcatgtttgaagaaaaattcgtcttcttcttaatgacaaaattaatatgtttttttccttgtttaataagctaattaattataaactttgagttgagatggctttttgtatgtgaatgaatatgaactttttaattatttcaaagtgaatgaatataggtttaatagtcgctttcattcaaattgtaacagcttttggaataaatacctaaagtgaatatagacaaaacaaaaacccaaagtggaagaacgcgtgtactttgcctcactaataaaacatgttttccgtaattcaagaataaacccaatattattctatggtctaaaagaagacatgcgcacaaaaaacataacttaagttcaaaattatttgaatcgaaactaaatttagtttgtataaaagcctactttgatctaataataaatttataacgaaactaagtataaagtttagaaatcgtatcctccgctggtccatctggtatacgacaaaa

SEQ ID NO: 49737 - DNA, 481 bp, Arabidopsis thaliana landsberg
ggtcggtctcgttggccgggccgtagtacttggcgtagatctcgccggcaccatgcgaggacggcacctcgacgaacttcggttcgatccagtggcgcgcggtgaagccgggcttcatggtgttggtcagttcgcgcggcgtgccgccggccgcgttctgcacggccagctggtcgaacatgtacggcgccgaatgcaacacggccaactgctggccgttgggcgacagggcgaaaccgtccacgccctggtattgcgtgaggcgagccagcgtgccgccgtcggaaggcacgcgatagacgtcgtagctgtacggcgccaccttgttggccagcaggtagaaccacttgccgtcggcgctgagctgcggctggctcacttcgaacttgctgccgccggcaatctcgcgcgccttgccgtccagcgacttggtgtacagccgcgaccagccgctggcttcgctgagataccacagcgtgcg

SEQ ID NO: 49738 - DNA, 1017 bp, Arabidopsis thaliana landsberg
tctttgtgtgccgtctaacgtggtacaatattcttctttatcatacattaattattaatctacccaattatatgtacatatctgcgaaatacgatgaatcgtcacagtttggcaattgaaattatttatctgtgtacgtgtctattataacaggattcttaaaaatataaaaagtgaccaaaaagaaaaagaccagtgcatttgcaagttcatttttgttcatccatgattaaacactatatgcttttcatcaatgtgtatgttagtagatgggtcatacttagtgtaagtaggggtagacacaaaacgcgaatatatatccgcagatttgagatatatatcatatatgtgatatgctccgttttgtatatatatcaactttattttcgatattaaaaagaaaacatgtgtacacttaaaaaacatcttaagacaaatcataaattttaatatatatgtatttctattttcaattgatttgtaatctacgccgtcaaagcagaagcggaagtattaattagtgtgatgacaccagatcttgtgtggatgacattgttaggttggtgtcctcctccaacttctttaacgtggttagcattttaacaacatctatatgtcgtacgtagtatgatattatatatgttcgagtacacatgttaatttaagtttgatataacagtgttagtttaagttggtaagatatgttaatgagaatggcctaccaccatgcatgtcgtcgccatgctaccagaaaatgttaaatataagtattgtcaccagacattagtaggtccattagggtactggtaataacatcaatttaatggtgatctgatgcgaaaccataacacattgtcttttgatcaccgaaaccataaaccataataattaacttcgcaggggataacaatttagtttttttcgttactacatattacaattcccctcaatcctaagctaaaatttgaatttcgtgtaaaaatatcccgaaaatgttaaatcagacgactaatattt

SEQ ID NO: 49739 - DNA, 1008 bp, Arabidopsis thaliana landsberg
cttcactgcgtatgctctcttctctcactgcgaatgatgccaaaaagagttcagctcgcaagcggagtctcattggccgtgaatcagaagctaccatgttctaacttgcacttagtcaattgggaagattaaccacaacaaatcgtaaacatcagatcggacctttattttattagcgttctttcttttagtttgaacaacaaagtccgggccaacaatatcccaagttaatctgtaaaagtcagctggaaaaccatccgagccaggggatttgtcgagcggcatgctgaaaagacaatttggaatctcctccgtagttaacctgttgcagaagattcgcttgcatctagttggagcatctgatgaagtcgataagagagcgaagggatgagatagaggctcgagtgtggttcaccggtgaaaactgaaacaggttggagaagtaacgaatggcttcttcttggatatcacttgttcgaaatagatccacaccttgatctgatgtaattctgcggattgcattagcagattttctggcttcggcaactctatgaaagatcgccgatgaaaaaaaaggcaatatccactcgtagatcgggttggttatatttatataagggctattttgcatatttttaatgttgataggcagtagggtaaggaaaggatcatcaatctatgataatttccgagttgcaaaatccaaatacaacctgacttgaatccttactggactacttcatatgccttccgcacacaggacagaggaattcactccacacacgagccaactcccctaaaaggcctttctttcatgcaattggcgacgccatcgccttatatctttcttgttaagatcttaagcttcctggacgtctacaaatctgttaggcaggaaatgtttacatcgggggaagagttcatgctatcatgtcgctaaaaagtgggctttttgcctctacctttgaaagtagtgttaaaaagcctgacttcattggttcgatcagt

SEQ ID NO: 49740 - DNA, 787 bp, Arabidopsis thaliana landsberg
gaaacgcgctttgactttgactcctaaagatataacaagttttctaattgggtcaacctttcggtctccatgtggtcattatggtctgggctttcttggcccactctttttatttgacccacttacataaacccgcttttaatattttttatataaaatagtatattagatttggtttcttgttaatttcgttttgtttcttgtttttatcctttgatggcctctaatcatttaatttaacgtgggatattaacattttgttttgttagtgtgagtacaaagaaagagagaccagtcacatgatatgatgataaactcgaacgaagaatccaatgcgccacgtcttccatgttcctcgtcttggtagctttagaatctcaatggatctaattcctttcaattatataatctcattatcgtccttaaaagtatatattattccacattttaaaaaccatgcatgatgctgattattattggtggtatgacattgatataccttccgttcaaactcaagccccaatatgtatactgaattaggaaccgaataaagagacaaatcataagtgtattaaaaggtattaccaaccgcagcggcaaagttccggctaataattcccatatataatctatttaaaagagaaaatatagaaacggctaatcatgatcatatggttcgagaaagatattgattagtgttaaaataatgtactcaccaaattaaaagacatcatgattcgtctcaaacaaggccatattttgttcacatgcacgataacgactccca

SEQ ID NO: 49741 - DNA, 268 bp, Arabidopsis thaliana landsberg
cgctgcacggcgacttgttgccgtagcgcgagcgcggttccaccgtcggcaccggttccggaatcttgctgaagtcgattccggcgatgtcggggctggaatcgttgcgctggcagtagcgctgcgattgcgtggcgccggtgttgtcgcgacacgtggccgatgctgtcgatgtgcgcccgtgcgttgcgtggcgcaagggattcagcgaacacccggtcagcgccagcagcgcgatgggcagtaggccgagcgcccaacccgtcat

SEQ ID NO: 49742 - DNA, 1980 bp, Arabidopsis thaliana landsberg
gaaaacgttactttcaagtgtggatttggttagatttgtaacttatttatggtttggaatgtttccattctagtttcttaataacattgtgaaagcgtattcaccaaaaaaaaaataaaaattgtgaaagcgtattcaccaaaaaaaaaacattgtgaaagcgtcttctccttaagcgattaatttaaagaaatgtaaataaaggcaatactataatggacttatagtaaaatttactctacaaactgatcttttccttgtttctttggttagtgcaacccctttttaattagtaaaaccttcttttttttttgttgcttacctacatgtaatctactattccaatcgttttcattatcaatatcatggctagagtataaataactacaatcttctgtattcaacttcacacgacaaacaaaactggtttgcaactggaacatgtcactaatttatattatgatacattaattattccaaccttacatgaaatacatctttaagtagatcaacatacacaaaatatccgtccttagacatacctccaatatctctcctcttctccactattacatctcctctaaaaagtttcatttcacatgtgtatatttacatatgtgcatactctcatgtacagtttactctctaaatgtctgaagatggaaccaagatctctagcggtatacctgctataggctccaacacttgagcttctgggagctcttttaacaataattcctgcattcacaattcaaacatccaaaacattatatcaccattgatttggaattttggatttattttctttttggttaagagaaagctgcaccttaaatgattcaatagttccttctttctttactaggcttgctaaaagtccctttgcttcaagctcgccattttgcatcggcacaacaaacctaaatgtccaagataaacctgattgataactacaaagtgcaagagtgtagatacattatcttgagactaaaacgaaaagacgatagatgattatttacttggctttcaagagtttggcaagctggacagcgtcttcttgaccagaaacaagagtaaatcgtgggagaagttgtttgatgaccggtgtgattacaatgtcggctctttcattcttcagaagttccatgttgcatacacaatgcggttcatagtagagagatatctgatcttcaggggatacaaggagatacctgagaacacaaaagaagcagaactgaaataaccatgaccaggttattaattatgtgttgcagaacaaatctacagagcaactggaagcttgataagagtttttttcttttacccgttttcagggcgttgccacggtggaccaaggacaggtccagctgtggctttaactcgaaccttagaaccgtttcttgcatttagctcaaagctatctccaggttccagataagtgacctatagtaatatttcagaaactcttatatataactctttctcattttacatttttttgaagatagtctgcaattctgatttagattaggaagtttgaaacaagtcacttacgttactaaaaagaggatctagcaaaggcttagcatttggggttgctataacctttatgcctggagatttctcggaaagtggcctaagggtattcaaatgacaatgatcatcaaggctttgagttatgagaaggcaatcaacttcagggagatcatcaagctgcacagaatatagaatcaaagaaacttataatgaaactgcactgcaaactagattcctgaatatactcgtaacctgatgatgattcatgcttctttacaaatacgaaccccacaaatgatgattagaatgaaagaaaaaaataaacaagtgttaccttgaaggccttcaaatatctcttggcagcatcataaagccatgggatataaaaagtccaaattacccacaagaatcggatcaactaggattttcagtccagaagtttcc

SEQ ID NO: 49743 - DNA, 228 bp, Arabidopsis thaliana landsberg
tgtaattgtgacaaaaaagaatgtacgttgaagtttccttcttatacaagtcgtcttccgcataagagatcctcctcgttaataccaaataacttttgattcccaccagcgtgatgcccacaccaaatcgtgacataacgagtcgcatccttaatatgaagatcccttaaacaactccgtaatatccatttgctagatctccaccaccaccacctccaccccccaccc

SEQ ID NO: 49744 - DNA, 909 bp, Arabidopsis thaliana landsberg
tgtttatgaaaaacaatgtctatatgcgaaacaatcaactcccttttttttttttttgataggatttaattcccaaccaatacgaaacagtcaaattccttcatctttggacaattatatgcatacatactactactactactaaacgaatttcaatgatgataaccaaattttttgaaatttccttctgtttcattctaaatttcgtttaagaatttttcacagtcaattggtaagagcaaagatattttgaaacgcggtcctggccaaatcaaggatgattacggcttgaaaatttgtattaataacacttttatcttataactaaaaaattaacatgataaagataaatttgaaatttgttttaaatatatgaatgaaatacaaaacatattttaaaaagaataaaaacgaattattaaaactaacatttattgtgaaacagcaaaaaaagaatttatgcatactatcagaaatatttttaaatgaattcatcaaacaaatgttttttttctttataagaatgtaaaatatcattataaaatgaaaagtttaagttattacatgacacataactttaaaaaaaagttgcatgccaaaaaaaggtaaaaaaacatagaaacataaaccattcgaacctcattctcattgatcaacaaaattttaaacaattaggctcttagtgcgaagatctaataaagtcaatctaaatactctcctaagtgaacatgagacagataccaagagcagaaaaagaaacaagaacaaaaggtgaaagacgaaaagcgaagaacataaaaataaataagaaaaaaaatgtgaaaggcgaaaagcaaagaggaagtcctttcgataatagcccgaaaaacaaatgaaatttctttttatgttcttttgacatataatttt

SEQ ID NO: 49745 - DNA, 628 bp, Arabidopsis thaliana landsberg
tatatgctacagtacccgtgggggtgattatctcggctaatcaaggtcagtaacagccaccacacaggacacagtcatgagctagcgcgcacggccaatgcacatctaacagttagcagcgcgcatgtacgcaacgcaagaggcaggctacaagccagggggacaggagagcaatgtcctgcctaatgcttccctaattctataggacatgttagttttttagctaattctcatgtaaatagtgcaaaaaatgcttctaacagcctccttaatataatttggcccccctaattttagatcatggcttcaaccctgctgcaagcaacaccatgacagtactgctgcagcatgctagtacatcaggcctgcgagaacgtcgtcgtggcactcacccccaaaatgatcgttggtggctccgcaaacatgttttaatttatagcccctcctttgatccaatcctggatccgccactggtgttacatacttgtattcttgaacattttttacattaaatcaacccaaaagaaacttccccattcatatgactaattggaccactacaacataaaagctcaagggtgccagacagtctatcaagcattatgtactaaggttcggttagtgaaga

SEQ ID NO: 49746 - DNA, 869 bp, Arabidopsis thaliana landsberg
gataaaaacgtgtgttatatctattctattgatagaactagcttagctttacgaggactagagagtagagagtttaagttttatatagatgataaacaacaaaaatgtgcttaaagaaaaggaaaacgcgaacaataatgtggtagtctggagagccgtagaggtgacgtgaggattttggcacagtaaataaaaaaacacctacgtggaagtaaacctctataaaagcaatcagcctcgggattgcttcttgatccctcgtaactcctatagaaaaacagaagtaaaacaaaaataaaataaaaacacaaagatggagtgctatgagcagagtcagagagctgcgttcgttgtgctgttgttgatcgttatgttgggatcccaggcacaggcccaactacgcactgacttctattcggacagctgtccatcactgctccctacggtgaggcgggtggtggagcgagaggtggccaaagagcgtcggatagctgcttccctcctccgactattcttccatgattgcttcgtcaacgtaggtcttcttttcggttttttttatatatattgtttttttgttaataaaagaaaggaagcgtacgcttgccatgtctacatgtattttcgttaattagaatgctaacattgttgtaaactgaaacaaaaatggcagggctgtgatgcgtcaatattattggatgatacacgttcattcctcggagaaaagacggctggacctaacaataattccgttcgaggatatgaagtcatcgacgcaatcaaatcaagggttgagagactctgcccaggcgtggtgttatgcgctgacatcctggcaatcacggctcgggactcggtccttctagtta

SEQ ID NO: 49747 - DNA, 502 bp, Arabidopsis thaliana landsberg
tagttgcttcgaaccaacgacctcaccaaaattcaactttgctcgaagtggtggttaaaaatagcgacaaaaggagtaacctaatccatcatgcatcctctgtcattaatcgcttagtcactcttcccaaaaaaaccgcatctcatcgagcttgattgctctgatgccacaacttctaactattccccattcaaactttcatcatcatttatgctccatttaactttgatcatcggatcactaccgcctagccaccacatgcgaaacgtcattgtccaagtcaacaaagagaaactagtgtttttgatattatgccttaccaatttcgatccattttggtcttctcttggcccaacttcaaaagtggcggcccatacctttcatccattagcccaagtattaatctgtatattttaccgagtctataccacagaaagattggctcagaactcctttctaggcttttgttgatatcgggtcaagggaatatttgtttaccact

SEQ ID NO: 49748 - DNA, 603 bp, Arabidopsis thaliana landsberg
  unsure (1)..(603): unsure at all n locations
caattcatataatctaaaaccaagtcatcaaatctgaaatgaataacaaagaacaaatagggaggtctattcacatcatttaacaagtcataaatctaaataaaataaatcattgttgaattaatagtgctgcaataatattctacaaatacatcacaagaatatctcaaggtactcgtatacaaaacagcaaggattgcactatgcaagaatccatgctatatgcccacctggagagtcttgccgagccccatctcatctgcaattaggcaacgtccacgccttcgaagcccaaacatcactccttcaagttggnnnnnnnnnnnnnnnnnnnnnnnnnnntgtggcagtttcttgagaagctcatgtacttcttcatcagaagcccacttttggacgtgatacctaggtatattctgaataattctctttgtgctagaaggtatttcttgcacagaagctccaggtaatttcttaaggcatttcaacaccacaccatagtccacaagcttaaatacaggacgaagatgtgcgctttgacttagcgactgtgttgcagagtattgtacaacctaacagtgcaaacattgaaggaacatgagt

SEQ ID NO: 49749 - DNA, 520 bp, Arabidopsis thaliana landsberg
gttaggttttctacaaagaacaaattcatgctttgtaaaatttacttgccgttttatgtaacgagaacgacgcacactctttaacgcaaaaccattaattgtttagttaaaccggtttacggtttacgaggagtttcccacagattcctcatcgataattatgttgagctgaacgtgatgctcacgtgacaagtcaaacttgattgggattagtgaaattgtgaatagagctgggggtaaaaacgacaatttttataatgttaacggcgttaagaagggaacgttaagttcttcagtggaaacttaacgaacattaaacatttcgttatcaccgtcaaaatcaaaatccgggacgataattctcgcacacgttctccatcactttccctcgatccaaaaccagagtgggaactacacgcgaatcgaatcataaatggaatgtgaattttgaaatcgaggaagaagacgaaatcggagcattattggattgagttttgaagttttaggagaaggaaatgat

SEQ ID NO: 49750 - DNA, 736 bp, Arabidopsis thaliana landsberg
acaagttttgtctgtccgtacattttcgacgtgttgatgagaaggtaagaacaaaactgatgatgacaaagaaactttctcttacttgtaaaaattaagtggtccaaattattatttttgtttcttaacccaaagtacttaagaaccttacaagactttttccttgaaacgaagtattttttggtaatgtgacacctaagtttcaaataaagattattcgatatttcatttttccgcactaatcacaaagcaaaacatgcactagtgttatttttcgtattgatcatgatgttaatgtgaccgtttaccatattactcatatttatcagcaatgactcgtttcatttagtaaacaaattatttatttacatgtttctttgtaacagagatggcctgcattagctgaagtagtaaaatcagttcttattgattatccaaagctgaaactaacccaaggtagaaaggtaaaattaatcttaatctccctctttttactagtcactaggctaattaagtatttattacatctttacttaatctatttcatttataaaatcaggtacttgaaatccgccccacaatcaaatgggaacaaggggccagggcacctcaatttttttactaaaatcattaggtggagagagccccctcataaaatccttattttattttttcattttcgaatatggaaaaaatttaaaaggaatcttcaaggtttcttcactaatcatatttt

SEQ ID NO: 49751 - DNA, 648 bp, Arabidopsis thaliana landsberg
aagcacacttcgagttcgagcaggcgaaacaaaacagttcactgccgcatcattggtagtacaaatgaagcctgaagcaggatatatttaaagggatagataaacgagacatgacaggccaaagtaccaaaccatactaaacaaaaggctaatgatgttcctcagcgatgtgcacagagtgcagagcatcacgagttcgttccttaaaacggcttctccagttgatctcgtccagagtaccagcgaaggcagtctggtgaagcatggcgtccgtcgatctcgtcgccgtcctcccatttccagctggacaggcatgccaaatatcagtcaaatgctggaaactggaagctatactggagaagtgggtttgcaagcaccacgaagcctacgcgcatcaaacaggaatgcaatggcaatggcattcatgtccaccgactgactggcgctcgcaataggcgttcatcagctgggtgggtggcctcttaatccggaatatcaaactgacatgaaaaaaaaatcatattgtcacacccggatttaagaacaaagctgggtacatctgatatatgcgtcagagaagatacacatataatacatagtgcataaagatgaatgtcatcatatcataaatgtcttattcataatgaa

SEQ ID NO: 49752 - DNA, 927 bp, Arabidopsis thaliana landsberg
cccaaaagcttaccaacaaaacattaaggtaaacatttgggatttttctaggacagtttgaaagaagcgaattctctaggtcggctgtcaaaataatcaaaataccggttagaatagtattagaaaccaaaaaataaagttgggagtgaattcacacatcaactaggatttcagattttgttctcttcaatctcattttcttcttacaaaaaaaaaacagaacttaacctctaagtcttagcatttccactaacttatctctctcttctttcataaccaaaataaagaaccttctttacaagttctctacaacactcactttttctctctaatggtggaagcaagaagcttgaagaaaccaatccaattgggtaataaagaagatcaaaaccctagaaaattctactctcgattcatctttaaagctcttatcctcaccgtgctctgctccgtcgtacctgtcttcctttcacagacgccggagcttgctaaccaaacaagactcctcgagcttctccaccttgtttttgtcggtatcgccgtctcttacggtctcttcagccgcaggaactacgacggaggaggatcaagcaatagtgatcacaacaaagctgatcatcataataacaattcgcattcatatgtgccaaagattcttgaagtatcctctgtttttaacgtgggtcacgagagtgaatctgaactgtccgatgattcctccggtgatcaccgtaagtttcagacatggaagaacaaataccacatgaaaatccccgaggttgagactcgcttcgttgatcgagttagttcagaaaacagagagaagcctctgcttctgccggttcggagcttgaattattctcgtgtttctgattcttccggcgataattccggtcgatgggagaaagtgagatctaagagagaact

SEQ ID NO: 49753 - DNA, 580 bp, Arabidopsis thaliana landsberg
  unsure (1)..(580): unsure at all n locations
atttatcgaggttttactgtagctagtttttacttgttactattgtctgtctaatttctactacaaccttgacatacatcacagtagtaacctaatttcccttgatcgccttttcaacattcaaatagagtgttaaaaaaacataatccattcatatgttgacatatataattgaaatattgatctattctcttaattgttgtcttaccataaaatcaataacttgaactataagacatatagagagagattcattaaagttataaaaaactaaattaattcatcaattgttccagtgaaaaagaattaagatcccaaattattcaggtgcactaactaattttttttttttttttttttttttgaggctggttctttattaagaaggaaacaatcaaatatttttaactttattattatgaaaaacctgaagattaattgaagattggtttggagtcgagcgaagttgaatagctcatgtgatgtgttacaaggagttatcatgaaatcgatgtatcatcacatttatggcttcttgcaaccccacattctcccctccttccaccaccgnacttagggg

SEQ ID NO: 49754 - DNA, 818 bp, Arabidopsis thaliana landsberg
  unsure (1)..(818): unsure at all n locations
aaaggatgtccgccactttgagttccagtttgtttcttctgtaagtactttgctgtcacttacttaggtcaaagttcagtcgattttgagggtgatttcttattatcctctttggttttctactcttttaagactatcgaatatgaagttggcgatgttgttgagcttcttccaagccaaaattcttcagtggtagatgcgtttatagaacgctgcggtttagacccagaatcattcattacagtaagtagctccactcttgtgatataaaattatctcagattgttattcaaaataaatcccgagagttattttttttttcaggttggtccgcgagagacagagaatagtagttttagtgaagaaatgattacacagatccctattaagcttaagacttttgttgaattaacaatggatgttacatccgcttcacctcgacgatacttctttgaggtaagaaccctttaatttcaatcattcagttctaatgcatttgaatttcaaatctatgaaagtcctttgagttttatgagacaagtatttgatggacacccttgtaatgtatgatgtatcatctctgttcagattatgagcttctatgcaacagctgaacatgagaaggaaagacttcaatactttgcctcacccgaggggcgggatgatctctacaattacaatcagaaggaaagaagaagcattcttgaggtaaaatagcaccagatctcacaggttcaccactcgtcttgaatatgcattcactctattagccnatcgtattgctaatgcatatgtaggtgctagaggattttccttcc

SEQ ID NO: 49755 - DNA, 1260 bp, Arabidopsis thaliana landsberg
gcacagatttctacatcctattatggtgagggccacattctatagcaaatgacgccacatgctatttcttctacgttaacggctcatcaacaccacccaaaataatataggattatggttgatttttgccatttcgtgacttaaatcttttagatttgccaccttcaaatattttagattttgcattgtctgcaactttaaaaaatgaaacacttgagatttttttttgtaaaatacatacttaataacaaacactataccctaaaaaaaaaatggaactaaataaacccaaacgtaatgagttaaattgtcttttttagatataaaaaatggcaaaatctataaataccactaaaaaaatccttgtcgggtaattggttcaaaaaaaatttcaatccatgtcaaggagattagctttaacttgcttcttttgaattatactacttacagaaaatctacgaaaagaaattcaaatctcttaagaaatccgtataattttttttttttttaataacatctagttttataggaaagaatgaaaaatttccattcctaataatgaatgacatcgtcaatgtggtgtactaacagagggatatatttctgttagaaaacaaattaaaagatatgagcttagtcaggattttttttttttttgcgtataagtttcatttatttaagtaaataaccaatttgcaaaattgtgaataagtaaaagtctaatgtgacagattttaccaaagtataccttgctacgcaaaattatgattttatgacatttactttcaattttttttttgtgtgtttgtggcattttttaaaaatcttgtccagttacaactattgatgacattattcacccatggactataattaaaacctccgttgattgcaagccttttatacacctaggatcatagcaatagaggttaaattttcttgggaagaaaaacaaacatggtctcctcctcaccggaaagaatatgttgtaagacttaaaaaaacatgttcttgggaagaaaaacaacatgttcttccacctggaatgtttttggaaatcggacggacacttttcaaccgtaagcatttccttagatttgggtcattgagagattccaagtaaacgtcagcaggtggaagaaactccagctttgaacaactacccatcagtaaattctcagttcgttcccgaaattatgaattgaagaagttagagtattccaaagatttgcatattacaaaccaccaacatatcgagat

SEQ ID NO: 49756 - DNA, 892 bp, Arabidopsis thaliana landsberg
tcactatacagctgggactaactaaataatccccactcgtcttttcttggtttgacaattagtttgcgaataagatttgttaaccattccaaatcaatgacttgattatttgtgtccatcactcaggattgccacctaccattttatattattttattgttatttcaaagttggtagttagaaacaaacacaatgttttttacccttttaattaaatgctagttgcaaattttaaactcaaactctattaaaatgaaaaaacaaccataataaaatatggaagatgaaaacttgatgagtcaaacaaagattgtgtttcaagttaaaaacatacaatatgtcgtaactcgttaaacctttagtgtgtggtttcctcgtttatgctctgcattcattacttctctatcttttgcatcatcttcatcgcgttatatactctgtctctgcacttcttataagctcagtgttttgtgcttaaagtggttgaaagtttgtgttcatgagaggttaaaattccataatatgattgcaatttgttgtacaattgcaagcgtttgtaaattttgctattagttctgcttcttaatttacttggtaactcgatcgtatcttcgatattgaatgcagactaataaaaagaacatccaaatatacgagttcccttcgagttaccgaagtaaacctcgcctcgaggtcatgcgtcacctatactaatcagaaagatgtttctctcttagcgttacatggttcttatagcatttccctctttctcttgctggtatcaatcggccaaagaagaattactaaagaaatgaagaagtaatcacataccactccgagcttctaacctcccttaggcatggacgcaatcagcaacccacttctttctatt

SEQ ID NO: 49757 - DNA, 630 bp, Arabidopsis thaliana landsberg
aacttattatatatccttacatcgccaaaaattagcatctttactgactttcgcttctgcacccatgttcagtcctttgtgccttccaacatattttagttaacacatttattattgcactcttagtgacactttttttctagttgtttttaactaacatagaattaaaatactcaatggaggtacagtgatttaaaattttagtcatgacttatctgtgatttaacatatacatgtatttaacgcttcgttatggaatatactaaagattttgcattcatctcctttgtaatttgaaatttaattaaaactcttattcgattactgtatgtggttatgtaactagaagcctagtagatgagttatcctcacaactcttgataacatagaatcttgaaaattttatattcgcaactattaccaatctaaagttttttttttcataccaaacagttttattctttgttccgcaatttgcacacggtacacaatacaaagtcaaagctctccccctaagtaaaaaacatgaagacggattaatgttaaagaaggaaatacatacacagcaaaaagcctgtctgtatgtacatcgtcaaacctacagacaaaacccgaactgtgtatctgaga

SEQ ID NO: 49758 - DNA, 980 bp, Arabidopsis thaliana landsberg
  unsure (1)..(980): unsure at all n locations
aaaaaaaataaaaatctttagagagaattgatctaataattggcggcagcaaatatcttagccacctatgaaaataagtaaattgtcggaatgtcgaaaagacttcatcttaaaattgacaaatgacgaatacatctaactaaccatccatcactcttcataaatacacaactactctttcagtgtatatcctcttattcaatattttggttaaatcttttattcttttatttacttttacactcataataattgcacatcagggaatatcgatattgatagtgttttgaggattatttagtaagtaaaaacctaattttagtttagtaaacagtaaaatatactaagagtgttaatagtttttctaaaaagtccataatatagatcgtcgaactataaatgtaatttgtacaaagagaatctcccttgaaaaagagaagacagaaacctcagaaggaatatatgacagtacaaacagtaaatgaatctcttacccactttagatatataattggggttgaaatagtcttcatttgtcgtaatatgtacatatgttctccaatctccatataccaaatagacatgagagaagagtgaagactatttcagcccagttcaacaaattgagttatagaatcatgtattgttatgctttgtaaaatgcatatgtataatatagttttagttttgcttagtaagacaagtttatcattcataataatacttttgtttgcatgctattttacaaaagagtttctctgatagatttgtcttcatttacatgtcatccttttcactatctctctttatgtcnnnnnnnnnnnnnnnnnnnatcaagcactaaaaaaagaaaagaagaaagaaatcaagcattgcagtcacatcgttctcacacccaaatgatctaccagatgccattttattattaattaccaaactattaactactcatattaaatatntttcaataatgataatgc

SEQ ID NO: 49759 - DNA, 718 bp, Arabidopsis thaliana landsberg
tgcgtactccatactcccatatgagtgaaggatcacatgtaagtcttactgtgtttgtattaactcaaaattctttgtatatgctatatcgttaggttatttcctcagtgttcattgattttctgcaaaacttgcaggtacgagagcccaattttgaatattaagtggcaacggactcttaatactcaacaacctaagttgattactaccgacaaacacattgttagaatatgggatccaaacacggtaagcatcagataagaacaggtttaacctcataatttttttgaaaaaacaagaaatatgtcgagatttttgattcaccatattctgttttgttattttcaatttgtgtttatcagggagaaggtatgaccagcattgaaccgactcaaggaggaataaacgacatttgtgtgttccgtggaagcggacttatgcttcttgctttagactctagcctaatcccatcttacttcatacctgaactcggtcctgcccccaaatggtgttctcctcttgaaaatctaacggtaaattgaaaattcttcctatccttttacaggtttaccattccagtgatgtcaccattgttacaaacacgtttcttgtgtttaatattgttctcaggaagagttggaggaaagtgcacagacaactatttatgataattacaaatttttggcaatggaagatctggagaagttgcagctaactc

SEQ ID NO: 49760 - DNA, 824 bp, Arabidopsis thaliana landsberg
ggtcgctgacgtggatcactcctctccgccacaaaaacaaaacagaaaaacaaactcagtacatgagcaagagctagccgtgcactctcactctctgatgtctcacgaattccgatttcaattctaacttaaaccatatttctccgatcaaacatggcgtccgtatctccatctccgtcgtgttccactatacccataccacttcgacgaacatctttcgccgttgctgagttgagacgattaaaacaaagaagagcgatcccacctgtgtccgtcggtctcggacacttcgctgatgttgtacgcaatgacggtgatttcctgaagaacaaaatcggtatcggactccgttgggctaacgaggcttttcgtgtaccggaagtgactaaatccgctgaggaactgttttggcttaagcatcttgaggatcatacttctcagaatttgaagtcacaatcttggcctcagccttcctactcaggtgttcgttttcgttttcggtgatcatgattgttaatttgttgcttgacttgatcagaacaatgctttgatagagatatctcagttctgaactatttgatgcatcgttcgaatgaaagagaagatcttttttaaaagtagaggaagattagattcttagatatacttgcaatggtgactgtgataataaaagtgaaagcctttaggttggagtatcagtggaagtcgattactgtcaatgatcaatcaagttgattggtctttccaatcaatggcattcctataaatttggagctaatttgataggctaaattgaactaaaaagctgacaagaccattcctaa

SEQ ID NO: 49761 - DNA, 462 bp, Arabidopsis thaliana landsberg
  unsure (1)..(462): unsure at all n locations
ggggcttccccccctctgctgcttcggccgtttccccctcttctctgtccccttccccccgcgctcgctctcctcgctctctctctacctccccctccccccgccggtccctcccttctctttcgctccccgccnnnnnnnnnnnnnnnnnnnnnnnnnnnnnnnnnnnnnnnnnnnnnnnnnnnnnnnnnnnnnnnnnnnnnnnnnnnnnnnnnnnnnnnnnnnnnnnnnnnnnnnnnnnnnnnnnnnnnnnnnnnnnnnnnnnnnnnnnnnnnnnnnnnnnnnnnnnnnnnnnnnnnnnnnnnnnnnnnnnnnnnnnnnnnnnnnnnnnnnnnnnnnnnnnnnnnnnnnnnnnnnnnnnnnnnnnnnnnnnnnnnnnnnnnnnnnnnnnnnnnnnnnnnnnnnnnnnnnnnnnnnnnnnnnnnnnnnnnnnnnnnnnnnnnnnnnnnnnnnnnnnnnnca

SEQ ID NO: 49762 - DNA, 678 bp, Arabidopsis thaliana landsberg
tggagtaagatacaatcaaatctagttacgagctaagttcacatgctcctatcaccttgaattgatttcacattacaagtcaagtgatgaattagattaacttcaatgtgatgaagcaacacagtcctaagtatcactgactaaaacttgcgagattcgtcaccagtcaagaccacactaaagtcaacggaaacaaagagaagccagagataatacctgaaggcgcataagcagatcggcgctatgtttctgcacgaatcgattatccgaaaaagacttcctagcttcttcgacggcggcgagatcctcaggagtaccgagattcggatcgaactcccaaaactgtcttccgacgtgattattggtggttctaagccatggactacctccttccgcgatcttcagtttccacattatcactctctcgagagggaaaaatatgccgtttgatcggaaaatgagtttgaatcaaagatggattctagagattcagtgaggagaaaatcggaaatttggctattgtatattgtggatgaaatcgaggatcgaagaagaagacagagatgcagatttgtgccagatgtgtacaatacatcgaatagagtgaaaggatgtggaaccaactataaagttaatagaataaataaaatgctgatttgtcacgtgatttcgatatac

SEQ ID NO: 49763 - DNA, 469 bp, Arabidopsis thaliana landsberg
gccccacatcttctaatctacgtcgtcgaatttcagaacagcggtcgacgtgcctcccgccacctccagccgaggaatagcggcggcagggcaagccgggcggtggcatggcggatcaatcgaccatctatttttgcgaacaaaacttcgattcgagggatatacatgatgcacagggtatgaagaacacaactgagagcaacctaccgatggttatggtgcatggggccttgaccacggtgacctgcgatccgctgaggattccgtgcaccgacgagcgattgccgcaagccaaaccgtccacacgccaacgcaggcaacgaataagccaccccggatctcgcgcaccgtaaccgaccgatgcccaaggttggaccgtcggcaaggacgagacccacagcgctttttctcgatcttcaatggcgacaacgatgctcgagggttgatggaggatggcatgggggggaag

SEQ ID NO: 49764 - DNA, 1045 bp, Arabidopsis thaliana landsberg
aaagaagtgggactgtccacgatccaaagtctctctaactttagcccaataatttttaccggaccgtttgattttagttagccaaacagtcgtcgttttatcttcagatggcaccgctctctgagaatcgacatcagccgaaacattcactgataacacaaagaggaagaaaaagatcgagaatatgcataataggttaaaaacttgaccagactttactttttcagccattttgatgttttctttgttttaaattaatgtggtaagagatgcttattaggatgaaacttacatatacacacatgtttgagtttgcaaagcgaagcgagtcggcacctaaagtcatcgtggggccagagcaggtgtgtagagcgtgaaccgtgaacgccaaaatgacccacgtgaattaggtggcaggtggctcattaacctccgagacacgttgctgtttcacactttcagattatttcgtgtttttccaaccagatccgaccggcttatcagttgagcaaaccgggttttggatctcttttggaaattatgccacgaccacatttagaaaaaagggtaaaaaattggttcggtcctgcaacgtaaccattaggtgactaatcttatgatacaacaactattaaagtttccctaaaaaaaaaacaactattaaagttcaaaattcgaaaaccaagagacgatctcgtatttaatcatcatgtcaacatctcaagagacttatatactgtgttaaattgtttaaacaattgatcaatactcaaacaaaagtcactaggtgctgatttttaaaatttgaaaaatgaccagatctattacaccttcaattttgattttgattagataaactaaagtccacattgcatgaagacaggtaaccacgtttgtgcttatttaggcatatatgtttaaatattaagagactggctcaaaatagtccttgatatagcttggtttatgtatcacttataggaaatatctagtgaacaatccgatatatatgttgtggatgtcggcttgctttaatcattataaa

SEQ ID NO: 49765 - DNA, 928 bp, Arabidopsis thaliana landsberg
ctaatcagtaattatagattccattaacaaaaaactgattccattaactagagtaaaagttggtaaagagaaaactcataattcctaaaatgataaaagtttttaaaatatctgaactttaaattggaaactagtattaatctctgattgcatagaaaaaaatgtcataccataaagaagtataagaaaactaatataaaaattcgatttttttttggaaaacctcaaaaacacactcttctctctctcttcttcttcttcccctctttcaatttttttcagattccgagtacaatccctaaatctccgtctctctgtttctctcttctctcaagtctcagctatgaatccttactagggtttattctttctgtgtttctcactctgcatttgcttctgtggagtagatagattcttcagggctaaatgagtcattttctcactttctgcttcctctcactccttctcctcctccacggtgccaacgccgtcaccgaaacggagctccgatctctactcgagttccgtaaagggatccgtgacgagacctcacaccaacgaatctcatggtcagatacaagcagcctcactgatccatctacttgccctaatgactggcctggtatctcttgcgaccctgaaaccggttcaatcatcgccattaatctcgaccgtcgtggtctctccggcgaactcaaattcagcactctctctggtcttactcgtcttcgtaacctctctttatccggaaacagcttctcgggtcgggtcgttccttcattgggtggaatctcgtcgcttcaacacttagatctgtcggataacggtttctacggacctataccgggtcggatctcggagctttggagtttgaatcatctcaatttgtcttccaacaagttcgaaagtgggtttcctagtggctttc

SEQ ID NO: 49766 - DNA, 1018 bp, Arabidopsis thaliana landsberg
ggtcagtttctttttaaattgtagtttaagtggtcagtggctggccaagttggacgtggaccaatgagaaacaaatattgagacagtgtactcgtacgttttctgttgttagttggaccatttaatttattaaaaatacatataaagtcacaattatttcgcagccggatgttgttgtatccaaactctcattacaattgacaaaattagatatgtaaattaatgctatatacaacgttagcttctctaaaagaaacactaataagccatgcattttcaccaacagctaccatgcttttgaaaatctatacgctctatatgtttaatcttatcatacatattcaaaacatcaaacgcagttagtaatatacgttgttttgggacaaatcgtttgaagatgattagtgagtatatggttcccagagattgaggtcgaagtagcattctccatgatctatctgcaaatagtaaaccaaccaaactctctagaaactaaacagaaataattcgagagtagcaaattctaatcatacacgatcacatgtatctaccactatatttgtttcatatgcttcgttcgtttcgttgggcattgattgtaccattgtactatttgaagcctatacttttacattttcgacaacattgaccttttgtttttaatggtaattaatcgagaaagtctgaaccaaagttaatgtatttccaaaaatcgtttagaaaccctctcaacttaaactcaaactagggtatccagactattcgcatgacgttcaccactagcccaacactaattatttggctggatagcttggtttgcttatgccaagtgactagaatctagtaatttttaaagatgtgtatgaatgttctagtattttcttgaaaaggaatatgaatatattcactatgtgcagtactctcttcacattatattttacggttacaaatattatatttagtttagatctgatcaaagaattttgggtagcattcaactaggcaaatgtcatgaaaa

SEQ ID NO: 49767 - DNA, 492 bp, Arabidopsis thaliana landsberg
acttcatgctaaagtttttgaactgtgcattctaaatggatttgaaatttaaaactacatttgaatttagttggaaatggaaaaaataataaaataaatgaaaagaaaagaaaaaggaaatcagagctgggcgggctttaatctgcaatttcggccattgtgcccttctctccgcgcggcccagccggggtggggggaggcacgcgcactgactggagggccctccacgtcagccgctccctctgccgcgatattactctctctgtcatgtggccctgcgatgtcagcaccttcctcttcctggaaccggacgccgggagtagagtaacagaacccgcgcgactcgctcgcacgcttaccggcctccgtcttcttcgcagcactagctccagccctcgtaaccggccactacaagcgctgcccaattactccgtagacttgttcctctggcaacttggaccgccctcgcatgcgcgctcccctgcagtgtag

SEQ ID NO: 49768 - DNA, 559 bp, Arabidopsis thaliana landsberg
tctcgtctcctagtaaagcaaacccaaatatagtgcattgtaggtggtggttcgagccaacaaacatgcctaatggcttatcatacatattagtcttatgtgtagtatcaaaggtaactgcatcaccaaaatcaatgtactcggcttgctggctagcatgggaccaaaatatgcttaaaatcttcccttctttgtccagttgaaagtcagaaaatttttttggattatctttcttgcataatgaaaaaaagataatagcttcgacacatcatttgcatttctttccctttgccatgctttcttcctgtcaaaaaatgtaattattaagcactacatatttttaacacatttcgattgtttcagtaatatataataccattattgtcaatgcataatacacttataggttactcatgccctgcacggttattggaacgttttctggaccaccatgcatttctgaaacaaaatccataatgcaatgttgtggaacctgctttcttgcatcgactaaggaacccatataacacgatcatgagttttgtgcattgcattgcct

SEQ ID NO: 49769 - DNA, 863 bp, Arabidopsis thaliana landsberg
ctctgcttcattggtttcaaatgagataccaaaatgcagataagagttatgtgcaagtcctgagatttttttttatccattttaagtatcttgcattttgtttttaatgataccttcaaattcatcgtcgtctccacttaaagatccatcctttggccgaagttcaggagctccataccatttcctaagcttgggaccgccttaaaacaagaacacacaaagaccaaactcaagacagttaaaaagtctcaatttttcttctcataaaaaattcaaattcaaatttccatggaaatgagaataccttcgatataatcgagaatctgatccacaaaactgattttcttcttagcgaaacaacgaacaagacaacgttttccagatgttatcccaattcgacatttattagcttctgagtcctgattcgaagaagagaagagtaacgaaggtccttgactgaggagacacgaaggtagagaagtacctgccatgtctgcaaccacaaagataaggtttcgtcctcaccttgcttctactgtaaatctctcaacagttcacagtaaccctctagataagaaagaggtttctctaaaccgggataactacaaaaatacctgctattggatcggataaaattgttatgcaaggtgtccagagcaagtactttcattttgcaaccttatctcaacgttcttctgctgataaagtgtgggactttcttcataaaaatgtgtgcatgctagcttctagctatattctctctttctttgcgttatcgtctatgagtctctctatgcatagatgttttcgcttgactatatataccttagtcatgttatctattatgatgtagctcggtctta

SEQ ID NO: 49770 - DNA, 983 bp, Arabidopsis thaliana landsberg
ttcatgaacatagatagtggagaaaattttggtacttatccataactagtcctttgtgacccatgttacatatgttggtactatgtctcaaaagcaatgacttatccataactagtcccttgtataatgttggtactatgtactatgaacagctcctggattgtcactttgtagcaagtagattcttgtaacactcaaccataccaactagcatataatattctaattataggcataaatctcaacaaaacacttttgactgctagtttttagtctttttggagaccaaatttcattgttaagatttgatcaaaaggtattattcaagttatatgcaaatcattgcaagatttgttccaataatcatcaattccaaaagtaaatgcctttgtctcattgttaccatgtaataaatggtgaaagtgatgttaaatcttgcatcactgtttttaagggtctgcttaatacagaagtttaggtgggaattactttaatgagcaagttggttcaaaaaacaagttgacaagacttgatatgaatgatttagcagatgagaggctgcatttattcttgctgaaaaagaataaaactgaaaagcccttattgtcctcgtcatacttttatcaatccaactgaggaaaaaaaaagaacagtccaaattagctagagttgtctttattatcatgcggaggaaaaaaggtaaagtgaaaccaaaatttattttcactataacacaaagatcatattcagaactattttctttttaattcactcacagacggtacttttctataaagtttgattaatgcattttaatagtagaagaagaagagaccatacctaatacctactactctcaaatgcacaacacaccacaggacaaaaaaatctttctctcatattaaatacatgggacccattatatatctatacctctctttaaccccattaccaatttcaagaatcttggctttttttttttc

SEQ ID NO: 49771 - DNA, 590 bp, Arabidopsis thaliana landsberg
atatgtatccaaaatggatcaaacagtaatggaaactaatcatcacagaagggtaagacatggtccagagtccaaccaaaatgagagtaaaagaggcaaaagaagcacaaagagaagttctcaccagtaaaactaagaatagaggaacaaattgttgtgtaaaatatctggttatgtatttccatattataacctttaaaaagtttgtcttggaatgtgcttgtaaaaccatcaagcctgttagccattttaccaacacccagttatggacataacaaacgagtattaaggttcctatcccaaaaccaaacaacaatgaaacgagtaaaacggatatgtacccaagataaccaaccataagggatacaccccacacagtattttctcttcccttgttgtacggactaatatcatctcccgcctacaactcaaatacaaaaacaacagagcagccaagataagcttactacaaactaatagagagatctctttagaaagattgtgtttttaccggaaaaagaataaacacagagcagccaagagtcacgagaaaggccactagataatcaaatcccctatactttttcgca

SEQ ID NO: 49772 - DNA, 1256 bp, Arabidopsis thaliana landsberg
tcgcttgattggtaactaatgatacggttcaactcacaagcatatcaaagtagataccaaacaaacctgagttcagttttgctacaactatgagtatatagacgagtgtgtaatcaatcggtcaaacacttacactctccatttttgtaaaatgacaagccctaaaagaaaagatgatgaaggaatgtaataactccaaattaacatcgtttccccaattttcatgcttaattatttggaatctattcttggtccattaaaagcttgcttcttctctatttgtatatggtcaatttttgttacttagatcttgatggatgtcatgattacgtaatcattcgtcagacaaaaagggagtttctagaaattttgttttaaatgatctttgtcgtttttatgggtatagttataaacgaagtttcaatggcttgggtctgtgtctttgtctttgacccttcaaacttcaaagtaccacgagaaagagaaggataaatggtcaaaccgtcatccttacgtcatgctgtcgctgataaacgtgtgcgcttatctgaactaatctacctttattcaaatactatatgcaattgaacaataatttattctttattgtttttttttgttttctgtggaacatattactattagttacaactttccgtgtttttttttggtaactgaaacatttattttgtcaacaactttttattaaaaagatcggatgtatattaatatgattattcttttgttacaaattttctatatccaagtggagtccaacatagatatattatcaaaattcgaaatgatgatcataaattctgtatagtttgttgtattattatggtcaagaatgctaatttctaaaaccaataaaaaaacatatggaaaaagagaatgctaatttctaaaaccaaaaaaaaaagaaaagaaaaagagaatgctaatttggtagtaattattttgttatctccactgacgtaacaaaatgagtagagtagacaataaccatttggtcaggattatctacatgattaaaaccaaatggaaatttactctttctcatatgtcgtaaaaaatgtattttttggttgtacgtaaccatgattaatatactgtatgatactccaaaaaacacacacacatgattactatattggtaagaatttcttcattttgtgtaataaatcaagcaaacgaaatcaaccatttaaaaaaaaaattacattttatacccggctttaaaagcctcaaaatac

SEQ ID NO: 49773 - DNA, 1065 bp, Arabidopsis thaliana landsberg
cgattactgtacggaaaacggcaatctcgtttgcaattccaaaaggggctacggcggataaagatttcagcgtgtctgagtcatgcttctctacttccaccagttcaccacaaagcagtatccttaacgccgccaatagtcgtccctctactggctctgggcctccaatggttacctattagtataagaagaaaatagttagagattcttcttctcggaaataaatagtacttaaaatatcgtgatatagaaatggcggtttaaaaccttcagatttggcatttccccggctaaatttaactgggaaagcagctgatgttgccatggagctggtgaagagaattttggggaagaaacaccagccgccatgctagccgcatccataagctgttcatcgtatttaagctcaattgtatcgtatggatttgattcgatcacaaatccgtagtccaaaaggaaaaaatcattactaaggcaaccatagttaagtagcaaaggatcgttttctttgacttcagtctctgcaacaacctaatgcacaacaaaagagaaacatcatttacattcagttaaacaaaaagccagtttaaaaccagagatctaaaacgcaaaccttaacaagagtattagagtcagctccgttctgttcttgaatgatccgagcattaggtttgaagctgtggttgcacatattctatcaaaggaagcatcatgggaacatcatcagaagatccaccttgaagctttttattaccatgtaaacgaaacgctctagttgaaacagctgacatagtccaccctagggcagatgcatttacatcttggccactgaaaggatgatcactagccttaacatcttcaagagtacgtctaatctcttgctcaaactcaagaagaaaacggcatcttttgttgacctggtggagaagaggagcatattgcaagtttttgatatcttctccgggaaagaatatgggaacagtataagtatccgggagattgctaatgtatggccaccagaaagaatctgcattggctctttcttgtacaacctcaatcccaagt

SEQ ID NO: 49774 - DNA, 834 bp, Arabidopsis thaliana landsberg
aaacataaaatatgatatttaaagaatatttctttacatttttttatatactctatcgtatataaatagattgtgattgatctgttcattctacatgacagccggataactgatagaaatttcattacatcaatgatcgtggaggttaagagatcgctggagcatattgcaaaaaaagcgaatcagagaaaactgcccggagcaattcaggtggtacaacagcccgtatcaattcagagacaacagccaaaagcaaatagccagggttgcatatttaatgtcaaggacctcaagataagcggctcgcataatcccagatattggacctttgagtctatatccgagtcaccaaagtaagggttttcttactagttcatagtatatttatacttgcctatatttattagatatattatttgtcatctctgtttttttttttttttttgatcaacctatctttaactctgaaaaaaagctagatctccaaggatgacaaaagttatataaaaaaaaaaaaaccttatccgaaatttgtttagctagctaaccttttgatcaacctacttatccattgttcaaatctggtgttattcgtgttttatgattcctaaatactagttaacatgttaatgttctttcttcaactattttgtataacaatttaattaatagatcttaacaaatctatgaagattttttagttaaaaagtacaaagagacaaaattttaagaatcgaaattatttgcaaaacagataaaagtttatattaattttaaatcatgtaaaactaaattgaattgaaatgttttaaaatacatgaacgagtagactga

SEQ ID NO: 49775 - DNA, 1200 bp, Arabidopsis thaliana landsberg
tttaggtagaataccaaaaaagcgaagaagaaaagtccataaaggacagcatcagctaataataataattaaaatgtaacgttttactcgatctattgatttttataatattaaagattcggtttatcatcgcaatcatgtgcgtatgatttggtttaatcaaattaaacggttcctggactatgttagttaacatatatttggttttgtattatattaacagcattgacaatggaacgattattaaatggcatacaatttaaaataacaccatgtgacgttaatccgacaccaaatcttttcttaatctgatactttcatatcatctcttctaccaagatatatattggtcttctatcaaataggtatacactgagaataatgttattttatattgatagtttctctgtatttggagtcgacgttttcttcatataatcgaaagaacatcttatcagttgttgttaaattgttgttgttacttgttaccacataaaaaatattagtattcaaatgttgccgacctcaatcaactggaatttaacaaaactttatatgcataatgttatctatatgaatgaaaggtatttataatattgaatagtctgtatcacacaaattattattagaaattattaatactaggttttaaaaaaaaaaaaaaaaaaaaaactagcattatagcaaaacgaaaatgtaacactggttttcactctttctaaaacctaaaaaccaaaccaagtaaaccggattgtccacctctatatataacatatttaaaccatatattcaatatgacattgtttgtttaagaaagtacatgaatttttaaagttcctttaaaaaatatgaaattaattaccttaactttttttttatattataaaaatattctttatcaactaagaaatgacgaatacatagagatggtgaatgagttagccttgataaatatcataacccaacaatgattaacagagttttgcagtcatctttcattagtatgtttttttattactgttaagtgaattatgctccttgcttattgcttgtagtccaaataacacaactagttaggacttaggatgtcagtccatgtttagacgccgttgctttaaaaatgatcaattccaccttcctccgtggcagatgctaaattttacagaggcccttttacggcttgcctgttttagcaataca

SEQ ID NO: 49776 - DNA, 999 bp, Arabidopsis thaliana landsberg
gtcatcccagcattatttacaagatgatccactgcaagaccaaagaaattcaatgttttgtagaccaaacttgtgaatggtaacaaaaaaacggtcggttttgatagaatgatagtgattagcgtcccgtggcgtgacttacatctgccaaaatgggtgatggtgtcatcaacgattcgtctacagtcatcaggtttggagacatcagcatgaacggtaacaacattgggagatccgagttcacgagcaatctctgccacttcctctagacggttcttccttcgggcggtcagggctaaacatgcacctctacatgcgtactcatatgccaattgctgatatttcatatacgcaaatagactcaaatcaatcattttaccatataaaatatatatccgtttcacaaaaatatcgtttatatatatttttttttttttgttttatcatttatattttcttattcatatatatttgttagaaaaacctaatgttttaccctgaaaatacactgataattgtagcactgaaagtcatgattatataaattaatcatttaagattaaatgtgtgaaacttagtactatagtaccagtgaccaattaggttattaagtctacaattttaaaataaaggcattatgaccaaacctcgcctataccggaggaagcaccagtgatgagaacaactttcccgtaaagattttcagagaaaattgtcgagaaaatagactgcaagaacttgaagaagtaaaaaggaggcaagaagaagcagagaccaaagaaggtgaagaaaggcgcagttaggttgagaaagtcgtttatcaactccatttttgtcgatcaaaacgtaaatgatttagctctcatcgatcattctcttttatcagcgatatataaatacgacgccaatactaagttggattttagacaaaaacggtgatgagacgaagagagacaagacacgaagatcaagtggtagtgtggcaacattgcatggaac

SEQ ID NO: 49777 - DNA, 1582 bp, Arabidopsis thaliana landsberg
attggggagaagagtaacttctttttttgatacttgtaagtttgaattccttttcccctgctttaaaagttttatattttatttatagttttgatttcttattgtaactaagggattcgattttgatcgttgactagctatacaatcccgtgtaatcactacatttggtattggtacgcatctgttacataccatttttacggcggttttagtgaactatattaaaaaaaaaaatcgtaagtttttttgtgtgtgtgttaacaatgtactcactactcactgttccatatttttgatgtacgtatatcgaaaacattctgccaacaaatgcaaacataacaaaagtcaaaaacaataacataaccgggaattaaaccaaaatgtaattgctttttattagtgtcaggccttctgcttaaaaatattcttgggccagagcccattaacacctatctcaattcatattaaagaaaatgactatattacttgacaaaaactttagtcagaaaaatatggaatctctttcggtactgctaagtgctaaccttaaatagtatagaattcttagttcattctcaaaaacatagctatatgtagattataaaagttcgatattatttcctgcaaaagatgttataatgttacaacttacaagaaaatgatgtatatgtagattttataaactggtaccgtaattcataaaagatggtggtgggtatgtatcagtaacggaacttacatatgcgtgtgtattactatgtctatatggtgtattcctttgtgtggaacaatgcacgtcagagttgtttattttcttatagaatttaaggaatcaattattggatttctcaaggtgaaagtggacttctttgcacgcaaggtctagttgccgacttgccgttgcatgtaacatgattgttgaaataaagtgaattgagagaagtttggccagacattttaaatttaacccaaaaaaagtagggcctaacacaaaatataacctctctttgttcaaaggaaataacacctacgtcttataattgaaccaaacattgaatcattgaactcacctataataattataataacacgaattcacaagacacctaaaagaaaaagttcacaaaaacaaataaaaatttacctctcaccaaacacactcacctacccgtctggtcccactgaccccaacatacaacaccgactctctcccacaccaatttttttttttggcgttttaaaacaaataaactatctattttttttcttaccaactgattaattcgtgaataatctattatcttcttcttttttttgtgacggatgattagtgcgtggggaaatcaaaatttgggatgattccgatttttgccattcgattaattttggttaaaaaaatactattcattcaccaagttttcagatgagtctaaaagataatatcatttcactagtcacttaaaaaaagggttaaaagaacatcaataatatcactggttttcttaagtgacccaaaaaaaagaagaaaaagtcactagtttctttttggaaattttactgggcatatagaccaaattgtaat

SEQ ID NO: 49778 - DNA, 754 bp, Arabidopsis thaliana landsberg
cttactaaaccgattttaaattttttaccaggaaggaatatgatgtcggtttagtgtatatgttaattttataagaattttaatattgtagatgagtcattaggcctatttacacaaaagtccagtcaaaatatgtttatttggtttgatctcttatagttagagactttcagagcttattcacaaatgacgttaacagtgagtatctttcacgtcattcgatattacaacactttctaaccaacggtctttttcttacatcattttaccgacgttaaatacgatattaaacaacgtgattagccatctttttgtagtgaatttcttacttcaattttctctttgacccatcttatttgatttatgcaatgcctagagtttacagtttttaattccaatattaactagtccctaccttcaaacatgctcctcttgctattaccatgcattgctatatctacccgtacttgcgccgaaactacttgcagaacttaaaaacgaagtttacggttttgaagtgtcatacttaataggcatttcaaaactatttagagagaaaatacagtgattggtttgcttatactttaaattttggcttcaatcaaaagaaatgaatttgtatttatagagtataccacgtcaagatcagataccggatcctaggctaacccgacgtaagttattgattggtttacctgttctcctcccatcgagagttgggttgttgttggagagaggttgtacgtacgtgagt

SEQ ID NO: 49779 - DNA, 618 bp, Arabidopsis thaliana landsberg
aatgtgctagactcttatcttccaactcttataaggtttacgtgattgcttagcttgcagacaagcatgatactttgatctcctaacaacatgaattttcggaatcaaattaagcttagacaattggataatgcgatcaaaattaatatgacaaaggcgagagtgccaaacagcaggctctcctacatttaatttagaatatgaaactaagtttgccacattattacaatcatcagccactgaaaggcagaacaaaccaccaatgttataacctttgccaataaacaaaccaaatttcgagataataaacttgttcgactcaaacactaacttaaagccatcacaacataaagagaaccactaataaggttcctatttatttcaggaacgtcctacacattcttcaaagagagtctttccagaggtcaacttcagatcgactcttcgtattacatgtacaacatcccttaacccattggccatcaagatggcgctactgtcagtagcctgataagaagaaaataaatttagatcagaacaaccatgtacattggccccagtgtctaaccacaatcaatggattgcgacctaagagaatttgaggacgatcatagaatt

SEQ ID NO: 49780 - DNA, 1283 bp, Arabidopsis thaliana landsberg
ttgtcactagtcgcatatagtcgcataaaacactattgcaaaatatgtatgttatgctctacactcagcgcatatctgtgtgatggccgtcagcagcgtattatatccagtgaactttaaggatttcttcagtatgtctcaacagaacagttcaattttgaattttagtttttttataacaaaagaaatctattagattttgggtttccaactcaaaaccaattgacaatgggtacacataaagatattgacaatccactcatttcgagtcggttttgaattaaaacccataaaccttaaaaatgtaggttacaatataaatttgtttcataaagatgcaaagaaaaaagaaaaatatgtcatatcatttattaatttatcccgttattaatttagtatcttcattgaaatgataatgtcaattaagatcgtttacaaaaaaaaaaaaaaatgtcaattaagatcaaatatatagcttttaatcaaatcaacataaaggatatagagatactcacaatctttgtagttgagtcaaattttggaagccacgaactatgatcccacttaaccctctcgatgataagtctctgtagatatgagcatagtagaaaaagtttttaagtttaagatacttaaagctgcagaaggtagagagagtaatcttacaaggaaataattcttgggggtgtagacttagtagtatagatgcattctacacctttccatttccattgttctgggaggcaaggatctccttcccaactaattatgttcaatcgataggcgtcttgaatattcttgatcgcagccactgccataaaggttcaaaaagcccaacaataattctatgaaacgtttttttcttacagttaatcgttacattcaatgccctttaaatagatgctgttcaagatggtaatttatttttttccattgctttaagactaatctcagctcttttggattggcgaaatcttgttatgtcaactttggtatatgatagagacggtggaatgactcatagcctttatattatactaggaagtaactcaaacaaagcgctaggtgaggcagtgcgggcttgatttagagtttaagaaaaatcaagtaagctaaatgactattatgtcatattgatgcaatgtagtaaaactatgttagtgcgaaaaaatagctgatctatataatctccttttaaaatgccattttgtttggattgcaaaagaaattatatgcaacacatatgtatagacaacacatggtataaagtccacaaagaagat

SEQ ID NO: 49781 - DNA, 791 bp, Arabidopsis thaliana landsberg
  unsure (1)..(791): unsure at all n locations
gagaaccaaagctactaaatttaaagaaacccaaaacaaactccaatctattcaaatgataaaaaatctgcacctacagattcaaacatcaagcctttcaagaacactatgaactatctaatcatcaagaattcaagatactataaaccaaaaaattgagagaaactacacaagccagaaacttgatcaaacctatacactgagaaccaaagctactaactttaaagaaacccaaaaaacatctactctataaagctaatctgagaactaaagcttttaacttcaaagaaacccaaaacgtcaaatccaattccaactcaaaacatttcaaaaagccataaactttcatgaaaacttacagttttaagctgaccaaaacgttcagaatcagaaagaaactctttaagcaaagcagttctaggattatgaacccacatagtaccatccataatctgaacaccattagcttcacaagcagcaacaatcttatcaaactcagttacattcatagcaacaggcttctccaaaaggatatgtttccctttctcagctgctttaatagcccactcaacgtggagactagtggggagaggaacgtagagagcatcgatctctggatcttcgagaagagattcgtaagagccatggattttggttgattctgggtagttattggcggtggcaaaggctttggctttatctaaagagcgcttgctacgcagcgattgtggcgttangagcgagatggattgctcgagagacttttcgagcgatgtctgcgcacccattac

SEQ ID NO: 49782 - DNA, 1018 bp, Arabidopsis thaliana landsberg
aggataaatatggatttgtccatttgaaccatgtcgtttttttgtgattgactaccatgaaaaatatgttatgaaaagtataacaacttttgataaatcacatttatcaacaataaatcaagacaaaatatgtcaacaataatagtagtagaagatattaattcaaattcatccgtaacaacaaaaaatcataccacaattaagtgtacagaaaaaccttttggatatatttattgtcgcttttcaatgattttcgtgaaaaggatatatttgtgtaaaataagaaggatcttgacgggtgtaaaaacatgcacaattcttaatttagaccaatcagaagacaacacgaacacttctttattataagctattaaacaaaatcttgcctattttgcttagaataatatgaagagtgactcatcagggagtggaaaatatctcaggatttgcttttagctctaacatgtcaaactatctagatgccaacaacacaaagtgcaaattcttttaatatgaaaacaacaataatatttctaatagaaaattaaaaagggaaataaaatattttttttaaatatacaaaagaagaaggaatccatcatcaaagttttataaaattgtaatataatacaaacttgtttgcttccttgtctctccctctgtctctctcatctctcctatcttctccatatatacttcatcttcacacccaaaactccacacaaaatatctctccctctatctgcaaattttccaaagttgcatcctttcaatttccactcctctctaatataattcacattttcccactattgctaattcatttttttttgtgaattatttcaaacccacataaaaaaatctttgtttaaatttaaaaccatggatccttcatttaggttcattaaagaagagtttcctgctggattcagtgattctccatcaccaccatcttcttcctcatacctttattcatctttcatggctgaagcagccataaatgatccaacaacattga

SEQ ID NO: 49783 - DNA, 999 bp, Arabidopsis thaliana landsberg
  unsure (1)..(999): unsure at all n locations
cctgccactgtttttggagatggccaagttcgctctatttgtgttactttagtgttattaagaaacctataaatgagctgatgatgttcttcaagcttcttcaaagtctaggtcgtgacttatatgcagcaaaccaccccccccccccatactatgagatcttctatctcaaaagttttgcatttttgcttcctcttctttatattttcagctgagacagcaattcttcggagacagcccttggtgaggccgaaaaagttactggccaaaagcattccaaaattaagcaagttggtctatatatttccactctccacaaacattttgaattctttaaattctttgatttatttctaaacttttcaaaatagtaagaatttttgttgttgcaataaagttacatttcaaaataaaaaaaagtagcattcctcattcattgctccaatcgaaattctctgactactggtctgaaatctgacgaactcatgttctatttgttatcaagttccgttttatttatctttggaacaattcgcttcccttttgctttgctccatatcgtgaacgtccttttgctttgctcaacatcttgaacatcttttgatgccctattatttgcattgtatactttttgaattgtttctttggttgctctatcctttttcatgaaatcatattgaacaccgacagattattaacagataatattgtgataatacgtttagagaaacataaaactttcatgatcctataaacattcggaaaagtggtgcgattcatacgtgcttatgtaactttattatagtttaatatacgtaaacacttggcatttaaagaaaaacttgctagtataggcagagatatnctacatcccaccgcctccaccttctccacggccacttncaccaccaccttcttctttcgtttcaccacccccacgaactccacctccaccttctctgccgccttcaccaacatgaacacctcctccaccgcctt

SEQ ID NO: 49784 - DNA, 566 bp, Arabidopsis thaliana landsberg
  unsure (1)..(566): unsure at all n locations
aacgggtcgagacaaggccatttactaaagcaagagcttgttgggatgaggaagactcttgttttatctaaggtagggccccaaatggtcagaaatctgattggataatgcacgaataccgtcttgagaccgatgaaaatggaccgcctcatgaggaaggatgggtggtttgtcgcgctttcaagaagaagctaaccacgatgaactacaacaatccaagaacaatgatgggatcatcatcaggccaagaatctaactggttcacgcagcaaatggatgtggggaatggtaattactatcatcttcctgatctagagagtccgagaatgtttcaaggctcatcatcatcatcactatcatcattacatcagaatgatcaagacccttatggntgtcgtactcagcactattaacgcaaccccaactacaataatgcaacgagatgatggtcatgtgattaccaatgatgatgatcatatgatcatgatgaacacaagtactgggtgatcatcatcaatcangattactagtcaatgatgatcataatgatcaagtaatggattggc

SEQ ID NO: 49785 - DNA, 1102 bp, Arabidopsis thaliana landsberg
tacggttgtcggggtgattcttggctggccattttctatcttggcctttttacctgtcgttatttactctctggttaagagattcaagcaagcatttatcgctggtgcagtcaccactatatttctccttgtaagctaacaccaatcctagatgctttgtctgtgtgaattttatgggaattattggatctcgctgactttcattagcacctgtaactttaaattactattttctcttctaattagttttgtctcttttctagggagtctcactacttgtggattactattattacaagagatggacatcatcagttttgaatctcttgatatacaatgtgttagggggtggagagagccatctctatgggactgaaggagcgttattttatataagaaatggatttaacaacttcaacttctgtttcattttggcaatgttgtttgtcgcaatatatcctgttatcagaaggaagtatgaccgtgccctgctggttgtgatttccccgatgtatatttggctggcgttcatgtcacttcagccccacaaagaagaaaggtgattttctaagatctttcatcttgtaattttttgagcattcgtatggtggcttctatatcgttgaggaaaccagttttatgatacttttacaaaatcacggtatgcaacaaacaatgtttttgattgtcaattaattgactgcaggttcctttatcctatataccctcttatttgtgtctctgcttctgctgttattgagaacatccctgagctgttccgggaaaagtatagctcacgtgaaagtcttctggtgacagtaagttccaacttacaatatctcagtctctgatttatacctttccgcaaattgaaaagaagtagattgtacgattctcacatatctgtttaatacgcagataaccaaatacatgcgacctgtgattcttggttgtatcttatgtgcttcacattctcgcacatttgctcttattaatggctattccgctcccttggaggtctacaaactactggagcatcatgatgatgcaggaccaggtatatccaattcgaactgaacttctgatcattataatgctagac

SEQ ID NO: 49786 - DNA, 496 bp, Arabidopsis thaliana landsberg
  unsure (1)..(496): unsure at all n locations
gtgagannnnnnnnnnnnnnnnnnnnnnnnnnnnnnnnnnnnnnnnnnnnnnnnnnnnnnnnnnnnnnnnnnnnnnnnnnnnnnnnnnnnnnnnnnnnnnnnnnnnnnnnnnnnnnnnnnnnnnnnnnnnnnnnnnnnnnnnnnnnnnnnnnnnnnnnnnnnnnnnnnnnnnnnnnnnnnnnnnnnnnnnnnnnnnnnnnnnnnnnnnnnnnnnnnnnnnnnnnnnnnnnnnnnnnnnnnnnnnnnnnnnnnnnnnnnnnnnnnnnnnnnnnnnnnnnnnnnnnnnnnnnnnnnnnnnnnnnnnnnnnnnnnnnncttagcagtccgtataaatggactattctatttgtatatatatgatagagggctatatccaacccttttattttatatagcaggcagaccaataatcatgaaaaatgtcggaaaagcatagcctatccccctttcaaaaccgtttgtctcatgtttgtactggcgaaccccggtttaggga

SEQ ID NO: 49787 - DNA, 570 bp, Arabidopsis thaliana landsberg
tactgcttttaaaaattcattttaaccaagattaattttccattccacaaaacttagctttaaactgtgaccaaaatgctaaccatatttcccatgtaagactagaatcttattcagatactggggaatctgaagaaggagggaaggaggaaagatatctttactgtcttgcttatgttggccattttaagaactacatgcaaaagtgatgtttctacctgaggataaatttactcaaacttcaagaattcattgagaccaagtgccgtggctcatgcctgtaatcccagcacttttgggagctgaggcggggggatcacttgaggccagaagtttgaaaccagcctggccaacatagtaaaaccatctctactaaaagtacaaaatatgagaaattaaccgagcttggtggttcatgcctttactttcagctacgtgggaggctaagacaagaggattgcttgaggctgggatatcaggctgcagtgagctataattgtgccacatgaccctgcctgtgtgcagacaagacctgtccaatcaacaacaactcatatatgataactgtgt

SEQ ID NO: 49788 - DNA, 566 bp, Arabidopsis thaliana landsberg
cactcgagatcatgacggacggccctgtctacatcgctctagaatttctgattagtatggaaccactaatctacaaaaaaaagtgcactctctaagaatcaaagccagacatgttgtagaaacttttaaaccaagggacttccacacatatatagatgtttatgatttaaagataataacttatatactaatcagtaatcaatgttgattttttctcggaaatatgaatgcaagatatcatctttggttaaggttttttttcgtatacatgggtacaacaactaggaagcaaaaaatctcctacaaactttacagatacgtaagagccctgagaatacaatatggtattgttctaacgactctctgacgctagataaaatttgaagagtccacaaactgatacataagatttacaataataaggatgagtaggttagtgtaataaacttacactagcagagtacgttagtgttgatgtttataggaccgcggttggttgttttaggatagtccttgacggataggtattgtcatagtccgtaactatcttactttgctatgtatta

SEQ ID NO: 49789 - DNA, 667 bp, Arabidopsis thaliana landsberg
cactcttaattagacctagttaacgaaggtgcgagtataactacggtcattcttcttttgacgtgtgtttatctcccacacgtctataaaccaaaatgcataattacttagtctagcaaaatatacactaatcaagtgatcatttgtatattcacttgtcacacgaatgctattagctgttttttcttctactttagtgtggaccgatccgtgatttgcggaccaaatcaatattggatctaaaaccagacaaaaacaaacatgactaaataaaaatcatataaatcagactaagcctagtccaatacgaaccgtttggcctattcctacatctctaggggtgagttgtgtgatgacatacatacgtgggatccaaacaatgaggcgtttggtaataacatggattgtgagacttttcattcaaccaaccaaaattagagtacatccacaacaacgatggtaccccctcatgtgatcctagaaaaaatgaatacattttctttaatttcgaaatattcaatttggttttacgtatcatatctggtttcatgtgtttctctggcctgttcattttcacgtttaccatataaatggttattaatgactagcgaacaaaataaatatcgtcatgtggctacttgctcataattattaaggtgagtcgttt

SEQ ID NO: 49790 - DNA, 606 bp, Arabidopsis thaliana landsberg
  unsure (1)..(606): unsure at all n locations
atatactagttgtattagaacttgccaccaaatacttcatattataacttcatcatatgcacgctctacagagtctgtctcaaagttgtaacttgtaaaacttctcgagaagcgaggtttgagaacacttgcatgacgtgataatgtttgctgcgaaggtattttcttagataaatttgaagaggatgatgagacaaatcaagaggatatgttacatggaagcgtctgatcaactcaaacgatatatttcaaaaatacccttgatcaacattttggagcattatttattctttttattcagatattttggtgcgttgttaatattccattttttgaaaagaaacacacaatctttccaaaatttctagacaatgtatcggcaatatcgaatttacaaagttcttttgttcacacaaaaagctaacagtctcgaaattaaactaagtttaatatgagtnaattaaaagacaagaaaacacaattaaattggttgtaaattaaaatgactaaaggctaaagcgtcagatttagggaacttggccttcactatatctnntatattttagacaggtgaaatatcttnccatgaattcttangcgaagaaa

SEQ ID NO: 49791 - DNA, 1271 bp, Arabidopsis thaliana landsberg
cgactctatgcggatcccctcaattcttcacgaatgaactttgatggagcgaacaacatcttcttcgcgtataatctcacatatgattacgtctccttgctttactttgttcctcgtaaacatttcgttccacttgtatatcacaacacgatctttccatttcccaacctttctcgttaattccccgaatccatcgattagattgaccgtgccgtcaaagtttaagccatagtcttttattacttgcctagcaattacctacgatcaaccaacataagactagtaaatacatagttaatttttcacaacaaagcaacataaagttcaaaaggctttattaccaatatacgcctggaacacgatgaagttgaaatgaagaacgggttattgggatcagcaagaaaaatttgcggagtaatagaagcaagagaatcatcacgatgctttcttgtaacccttcctgctgaagaagatcactcaataagtatttttagcatcaatacaaacaaaaactagacaagtttggtttacctttcttggaacttccactagctttgttaacttcatcacaaatcgctgtatcataatcatcatcatcatcatcaccaacttcatcgctgcttccgagagaaagagaaactatcatgttctcatcggtatctccttcttcttccatatgaggatcaccatcaccattggtctcatcttcatcatccgatatctcttgtattttgataggagcggttggctccaaggggaggccattccggtggatgcgtacccaaaagctccgggaaccatcataggtgaataagagaaagtctctgtcaataagaccattgtctttgacaaactttacccaaccttcttgcaagctaataatcacctcttggctttttgtccattggacattccaaaatcttccttccggattcttgagaacagctgtctgagggagagggtttggataatacctgttgtagcttcttgggattacctacgaaatgacaatggcacacacataggttaaatgttccacttagtgacaaggaaaccaaactaacgtgacatcaagaattaaggaatcagatttgaagctgaacatatcatatcctaagagatcaggaacagaaccaaactcctaataaattatgaacaagaccagtaccctagacattaagaatagaaccaaaccctaagaaattaggaacagaaccagacccttagacatcaagaaccgaaccaaaccttaacaaagttcacttttggac

SEQ ID NO: 49792 - DNA, 601 bp, Arabidopsis thaliana landsberg
tcaggacactaaagaacctcgcctttccctgcacaacagaagtaacatcaagggcacgtttatgacctgtgtaataaatagaagccgcatcagcaattgttcaaacacataaatggacgagataagatgatgtggctgctagataaaggtgacaaagataaggacaaagacagtgacctctgatgattgcgaacacagcattagatatagagaatggttcaccagcagcatgcagtagagatcgtgccattccatttccagtacctgttgcacattgtagttgtgtgaaaagtctgcccaacaaaaaactgaaaaaagctaccagatacaactaatgtgcatcattatatccatataataaaggagctgctatgataatgtacctgctgaaatgatcccaagtggcacttttattgctgtttccagtcctccctttgcaggagaccattgacaacctaaaaacaacatatgatgacaataagagatagaaacacaacatagcaagcaagcaaatataatcaacagtgttaaatatctgagaacatgagaattttcagagcctaataaattgcacagaattgcattcgcatacagagaatgt

SEQ ID NO: 49793 - DNA, 2016 bp, Arabidopsis thaliana landsberg
tgaccgaggagcaggttgagagaataatcgcgaaagggtagttgtactgctgatgtatccatgtattgatcgatggaagtgatcttgcgtgtttctttggtgagatcacgaagtcgaaccggaagacagcaatatatttatcttcttgtatataaataaataaaaatatgaaaaatgtatgttatatatgttgccttcgcaaaccaaaaacaaattggggtgttgggtggggataaaaaaaaaaaaaaagttggaaaggtttctagcgatttagatattaatcgtggttttttgtataattgttaaaaaaaatcttggtatagaggtttatctaatcctatatagtataccggaacatattgtccgttccgtgccatacaaggtcctcctctgtgtctcacatgtgaagttaggaggcttttttcgctaacagctaacatgcttgaagcttgaatcatttttttaaaaaaaatatcgtcgtggatctcaactagttaataccggttttgtttaataactcaagtggcgtttcttattaactcgatgtgaataaatcttcgactgctaacgttagtttctgaaaatactctgtacgctttaacaaaaaaaaaaaaaaaaaatactctgttttgttaattataataacctatgtacgaagagcttaaatactatacattaaacattgtttaattttttatatcgtttcttattctataatttagttgacttagtcgtggttggaatataattttcctcattaagatttgaatcgttcctaatatacatacatacagttaaatacttaaattactagctctagctggacagctaaaatgttcaataactagtagattctactaaaataataatccatcttaattttgttttaaataaaaaatatttattattaatacccatttataaatttataaaatttcaaccaatcataaaaatcggtacgtaacagaaatgactattgtttgacaaaaaatagaaatgactactaaatgcacttaaattttacatagaaaataacaaaacatctaattaaataaaacatataaaaaatcctataacatcctagaagtcaaaaatgaatttatctaaacaacagttagagccaatttatttttaaaacgttttggccacgtcaaaataggaccggccatgtgtatagtcctttttttaatttctcaaaggcagttgaactttaaataattattccacaaattaagtcttaattaatttatttttcttgaatatagaagtcgtcatatcgtccagaatttgaatcgttctttgtcactgaaaattaaatgaaaggtcaaactagcgaacagctaagagattagtcttcaatcatcttctaattgatgcgattacttaatgctgttttgtttaataaaccaagtggatttcctattaatctgatgttaatcacgattctcgaattaataagtgcggcaagctgtgctgacggcctgaattttcgtgcccacatgaaaaaattctcatcatgcccccaactcttgtagctcccagggaacaaggacacgttgtgattaaacaaatcttgctaattaaccagatcctatccataatgtgaaatgttgacggtgaaacctagactcgtacaaaatacattgctgatgtagaaggaaaatgcctagaagcccaaatggcaaatagagtaaaattgaatccttatctactaacgaatagcgtggacgaagccattttaagggtatgaatcttaaatgggcttataaaccgttcactaattgattatgctcctaagcccatctaaactatggatccatatttactagttagagaaagtgaatgttgtgaatctcaagcctgaaaagtttagcgcaggttatgtgttaataatgaaaaaacattgctcacaggtcacagctatatattggatccgaaaagacatgaagaacacatgcttcagatcgtttactttcgtccctcttggagcttagtatgttttttatgggctggaat

SEQ ID NO: 49794 - DNA, 831 bp, Arabidopsis thaliana landsberg
ggaaagtctttctaacaaatccacaaaatcaaagcataaacaaccacagaatcagaaatcgaaagtcaaacaacacagatttaaaacaaaaaacaaaaaatgtaataagaaaaaaacgaaatttccaggtgaagacaaagaagaagaggaaggaagcgatcaaatttgggggaagaagacggacctgagagagaggagagaagaagagagctgtttcgtcgtcgtcttcttcgtctactttgtgtttgtgttgtgggtctctctctcttctctctgggttttttctttctctcacacaacttccacgaacggtcaatagagaatgatacaagccttatgacggctctttatttcatctaatcgacggctacgatttgttcctttggtgggcgcttctaatccaataccgaaccaacacgtgttataatagaccagctggacgactcacccacataatttgacgcgtgttgaagcccctcgcttttttgaaattattttaaaattttagattcttttagagatttggagcaaaacagaaaacagaaacttaaaataatcacgaaaatacaccaaatacttttaattgctactgttccgtcctttataaaatcgcaaccggaaaaataaaaccaaacgaaaccgttaaaccaaaatcgaattgattttttttttacaccatatcagttgatttctttaattacaatcgataaccaaaactcatttagtgcacacaaaccaaattgaaccagataaataaataaaccgaagtgaattaaaataattgatactaaaatggattgaaacaaactgaaattgagttatgtacatttt

SEQ ID NO: 49795 - DNA, 531 bp, Arabidopsis thaliana landsberg
ttagtcattttcataaataaatattagtaataacttttgattcttctcgactccaaaatatacaattttaaatgttcaataaactttttaacaattataaaacattgtccgacaaataggcaacaagctataaaaggaaagcacgagtgtttagcggacgcattagtcgagtaaatatttatttaacttggataatatttctttatcataagaatagtcgtcggatgttaaggagaaagcaaaacaaatgaacggcgtcagatacagaaaatctgtttaaagtatgccaaagtaaaactatagggtttggttcgatatcttgttgggctttcgattcggtagcttctaacccaatcttccgacatatggcccgtttctgcggatatattaaacattatttttctcctagtaaaacattttgccgttcagaaaaccatgatacatgtgaagttgtaaataaatctatagcacgaaataagatctaaaatactcttgatcttcgtcaaatccgatgcgaaggaacgctttttt

SEQ ID NO: 49796 - DNA, 631 bp, Arabidopsis thaliana landsberg
tgtcagaaattatcttttaaaaattgttcagggaatggtaaagggtcacaacagtaacggtacctatttaagaacaattggccagccgggggccatatcagctattatccagggggatatgattgcaattacctatggggatggatctgttaagctttacaaccagaacggcacttatgtaaaaacgctttagaaatgacttaaaaaccaaacgaacatttttatgagcacagaacattttttttattttgatccggcaaaaaattgggaagtttttttttacccttgaaaaattttttttgtggttatagggagaacaacaaaaatttgaaaaaccccaatgttttttttggttaagggctttaatatttccccctaaaaaaaatatttgtttttttgggaaaaccaaaaccaattttttgggggctttttgttaaaaaaaacccggggggttcccccccccccctttttttttttgggaaaaacacccccaaaaaaaatattgggggggggggaaaataataatcttctccttttgggaaaaaaaaaaaaaaaaaaaaaaaaactggggagggggggttttttttttttttttcttttttttgttgttgggggggaaaaaaaaaaaaac

SEQ ID NO: 49797 - DNA, 807 bp, Arabidopsis thaliana landsberg
gatctagatatgtttgttatgtttaaggttcgtttcaagctaatattaagaatggcttgtttcaatgtgaaaaaggttatgctcatttgtaaatggatattgttaaatcagtttaagaaagtttcctacgcactaaacgtgtcaaactaaatctcaaggctataacttattttatgtattttgatcgggtactagctttaatcatgctgttacaagattcagttacattctattacaccgtccaaacttatgttgttatcttcacccaaataaaatgaaatgttttctgctgggagatcgattaaaaccaaaagaaattatatttgacaagactatcagccaaattaaaatcaagattcaactatggaaaacttgtagctatttttcaaaacctaagttttaggaaactttgccattatattggtgtttatctaaggattagaacatttattttagttaaattaaatcaataaatcgtaaagttgttaattaggaaaaaaagtattaaaatgcaaatatatttgtcattcgaacctctatgcggtggggagggtttacgctcatgtttgaaagtcaaagcagtgttcataataatctcaacgcgggaccagcatgtgatatacgaatgtctatatacattattttctctgttttgtaacaataaacgagtaatgaaattatattttattggtttcaatttgtaacaaccagcaagaggtctaatgagccaactagaatacagcccacgataaataatcaaacccatgaaacttccttctctctttcctttgccatttccaaacacta

SEQ ID NO: 49798 - DNA, 606 bp, Arabidopsis thaliana landsberg
ggtcgcatctatttttatcactctctggactgcgcgtcaatttccagagagtgcaggggctaatccatagtttttccaaagactcagttctccaccagagtggactgcgggttgaatcacaaaaagagcaggggctcttttgcaaagtggtggccgaaagggtatgactagatctcggccgatggattttgaatctacggtcaggattagattctcgttgtaatgaaccggtacgctataacggacgtaagattcgcgatccacagccttcatcaagccacaccgcgatcagcactgatccctccatcggttgatcaatggcaaggatcactgcatcgcaaaacggtacccccaatcccatctccaccgtagatcatggagtcaatggtacctgccttcccccgaccgaactgataagcccagcacgatccaagccgcaccacatgagatcaacgactcatacgtgttcttcccaccataacaggggcggcggcacaagaccggccgaggtggcgccatcaccggcgacccgcaccccccatcccaaatgccatattctccatctgaagcgctcgactcaaagtgaagtcggaagtgagcaagtga

SEQ ID NO: 49799 - DNA, 1504 bp, Arabidopsis thaliana landsberg
agtgttctgtgaaagatgatagaagcgtagctgtagaggatcgggatgatgacattgaagagttctcttctcctgaggattttcctacgggtaattacaattttgagcttctgcttcgtcttttcgaatatgggtcttacttaaactgctggaataggaatcgagcattgttagatctcttattaaacgtcaatgagctgattagcctatctttcattcattaggcgtcttggatcctaaacacattgatattgaaagaccatcccttagtttatcatagagaacttaaaactgatggatttaggaagcctgatgcaaaccctcttctatttagatatcaggatcagtttgttgtggctcaaagatgaaaacttgattgcagttgttgacactaataggtagactagagtgggtttggagccttcaggctgagaatttgttatttataaggacattgattaagcttcattccactcaaactggtttcttttggatttctttagtgtaatattttaagtcatccatattgtgttggtttcatcttggtataaaacttgtgttgcttcatgcagacgcaccggcctcaacaagaagtcatttttctagttgcagctcaagggtgccacttcatggttctggggttttatctaatcaaccttctatctctcggggaaaaagaaagcagtcggatgttcaagcatctgctgcctctgggattagttctgttgcatcgttgtttcagatgtcaagtcgtagtcctctacgaaggttccagctactagattcagattctgaagatgaccatccatccaccagcagagatttaagcggagcaactaaaaaacatgattcattctcaaagaatcaaccatctattgcaagtaaaccgaagagaaaggaacctggatctatcccctgtattaaagatctgtggaaagatttttccccggcaagttccaagattcagacaccagctttcgatgatgtttgtcaggactattttagctccatcaagacgactagcacagctcagaaacaaagcagtgctgtggcaagtagtagcaatagcgaaaatcataacttgactggctttcagcaaactgagctattccacgatttttcccacccttctcctccatctcatcgtttcttcttgcatagtgatccaaggatccggaatctagctcgacagcggttaccaaacttctttcctctgggaattgtcaatgatagggagagccagcgagaggtgttccttgttgattatatgtaggttactcctaatctatttcttattttgatacttacaatcttctgcttcctgtggattgacacatctttcgaatgccattgcaggaatcaatttggcagcaaagggagttctaaagctggagactctagcagcaaaagctgcagaagagggaaaacaaagtcaaaggtttcacagagccaagagagcgcacacatttttgaaggctggttaattcctaaaacgagagctgca

SEQ ID NO: 49800 - DNA, 513 bp, Arabidopsis thaliana landsberg
gatagaaatacataatgagattaattacagttaaatgtctatgaaaggatacaagtcttctatattgcctacatcacatttttctttccattttatagacaacaccaatcaatggcttcaacaaacttatgaagccatgaaaattaagaagcacaattctactacttgcatattgagatttttgttttaccatattttgaagcttctgggaaaatcttctgcaaataagtcagaggatcctcaaactcctcctttgttggtctgtagacaggacattctggaagcctctcggtccattttagatcatctgtctcaagcttctccactttttccttcatcaagccacctctcacagtagatgcaccatgcactttagatactgtatcactagaagttacccgtaatctcattccacatgacgctgaagttggtctcaaagcatcaccaccacttctagccattgtgctgaagcctactgtttcattgacagagtctgatctcattttttgaagc

SEQ ID NO: 49801 - DNA, 1283 bp, Arabidopsis thaliana landsberg
ttacatttgggtggctggtaaattccgtaatgttttcttttgatacctaaatttgaactgtctcatataagactattgaaagggagtttttgatgacgatagaggtctagagatttcttggaaaaaaaaagctagctttataaattgatgtgaatggagatatacgtacaaaaggcttagtaataatgtattccacattttgtgttcgttggtaattccattatcctctgtttaatttcttctaattattacaacaccaaaacaaaaaataaagttacaccaaagtggcttttgctacaaaggacattgcttagtggaacatgtgatggcctcaacctgtcccaccttaaatgttgaacaacaaaagaatatcttcaaacactgtttttgaaacaacccttattgcacaattctcaccaagacaaaaaaaaaataaaaaaaaaataaaatcttaatgcttaccactttgatccactcataaagattggtggtttctgttgagttgagagcctgttgacacatgatgcattgagttttgaaagtcaacagctactatttttttcttggacaagaaaaccagaaggataatgatcttgatgttatgtctcaatagtcaatactatgttattattcctggagattactcagcagaacattggatacattgtgttctaaaacaatttgattcttttcttttcagtcacatgttctacccactattctagcttgtaacaataaaaatcgttgtatgtagctcgatagatggatatatatatactaccaattcaaaaatggatcaaactatgttgtacagatgaagaattcttccacaccttatatcctctgcctcattcgtcaatatgcattgatcatgtattgcaccgtgggataagtcaaccgtagaaataaattccagcgacaagcagataaatgattacatcatccaagatcaacaaaacatgacaaattaggcaattttcatataaatgagcctatgttcatcaaactttgtaggcaattttcccactcctctgacgcgaacttggcttgttgctttacttcttcttctttttttttttggtcaaatattgctttgcttcttctattcgtgaattattcacacccaaacaacaatcagcccaactataaccttttttacatgctactctgaggtctctctcatcaggttttttttttcctctaaatatgaaagaaatcattggtttacacatttttagaaattcattcttggattttggaggagtggacagtttgaaattatt

SEQ ID NO: 49802 - DNA, 1043 bp, Arabidopsis thaliana landsberg
cgggtggacctgcaaacatgtaattccttcccaattttttattttaaaatcttaaaaagatactaagaactgatgaagaagatattgtacaccagtcggtacttcgaaaaaaaaaaatgagattttttcacaaaacctccattgaagcaacttttgtagctttcttcgtttaggtatctaattaaacatgacgacgaagctatcgagcttctgtttcttaacccatggattagcaggaatctcctgcgagagagaacatggaagttctcgtcgatttttctatctcccttctcgtcgattagtttctacttcgtgtaagatgcgacaacaacgtggtttcgagtgagttttttttttttttttgtcgatttctgtgttggggtttgagaatttatgtaccaattcgattgatttatgtaacttggcatttttgaattttgcattataaagttttgtttttctcagctttagagttatggtgaatgctcatagatgtgaacgtgtttataattatcttgatttaaattcatttgtatgagtttggagaggactatgagaattaaaactctgattttacttagtgatgagatcaaaatgttgcatttgatttttgatatgaatccaatttttgttaaagctagcctctttgtagcttaagttcctttcatttcccatttgatttgcattacaccaagccaaaaaaaatctgatatcttgactaatttgcagctctagtaaaagacaagaggtcaagaaaggctcccctaaaccgatcctatctataaattcaggtcttcagagcaacaatgatgaggaatctgatctggagaatggttctgcggacagtgtcccgagtcttaagtcagatgctgaaaagggtagtagtattcatggcagcatagatatgaatcatgctgatgagaatcttgaaaagaaagatgatatacaaacaactgaagttactcggcgcaagagtaaaactgcaaagatgaaaggggagagtattcatgctacgattgatattggacatgatgatgggaaga

SEQ ID NO: 49803 - DNA, 490 bp, Arabidopsis thaliana landsberg
tcataacgtctctcaagtcaaatcctggcctttgattgcgacacgtttctctctccgacaaaccataaccaagcgttttgacatccgtactttcttctctccatcatctctgtttcaccttttttcttcttcttcttcttctttcatttaatctaaaatgtaaaatgttgttggattcattcttcattctagggttttctctatttaatcacttctcactttcgctatatagagagagaagtaaagcagccgacacatgtatgctttgcatgaaagagagagtgagtgagtgattaaggaaaaaaaagtttgtttttcggcagcaattctgagtttatctccttaacctttgtttctttaaaaaaagaaaaattctaaaactgggaattagagaagaaaccctaacttgcagtgtccgtacttagattcatactttccttttatggatccatcgatcaagtctttgttagttgctgttttttcccagatt

SEQ ID NO: 49804 - DNA, 636 bp, Arabidopsis thaliana landsberg
gtttatgttttcgacataaaaatttaattcttatattcatataaaaactacatttagattcaaagctactcataataactaacataacacaacaaacttacaaaagtgttttatttctcgtgtgaatttgagttcatgagggcttagaccgtcaagacttttctatcaaacttagagattttaattagtgttagtgcctataagtctaggtttgtgctggttggattatacagttatacatctcaaaagaaaccaaaagcgaagatacgtattttaacttttcttgatacgatgcaaaatccaatgatttttccaatttataaataattactaaataaaaaggataaacgttatttttcttccttagcaaaaaaaaaaaactttttgactgcaatagtggaatgtacacaatacaacagtcactttttacacttaataaaatgcacgtaaagcttttttcttgcctcaaagttacagccagatgtttttttaccagaacctagtaaccaaattagattcatgtctagctatttagccgtgtcttgtctttactatccaattttcttaccttaattgcgttttctttctttttcaagatttctttaactcaaaagtagttgaaaaccactaaaactg

SEQ ID NO: 49805 - DNA, 930 bp, Arabidopsis thaliana landsberg
tgacatgactatagacatcacattcactttcatgaaatttacaactactctttggatttgggttgcagaaagatgcatacagtaaaacagctccatcaacctcttatgctcatgtttcatgcacataagtactcaattagccataggtggaagcttagaccctgtttcgactttcgagtagctcggatatatatgcattatatcacatatcccttagcaccatattttctaatttaatttacaatatcactcattgccacaagtgtataaaaaccatagcaatagaagggtatcaaagttcaagtaaccaattaaattagaacactagaaatacattctatcatccaatctaagcaatcaagttaaatcattagaacaatattgaactaccgccgaagtaagatctcgtctaccggagatattgtcagattcttgcctccgttttgtatttgttgttttgatttgtaaaactttggctcaagtccaattcaggtattataatatttttaaaaaaaagaatattgaactattaataaaatcttaacattttctgttggtccctagtacttttgatgggctctctatatcttcgcttttgtatgtttgaagcattaaggccgaattcatttaaaactcaacttctataccaaaaaatttattttaaattttatgtaattaaaataaactaaccaattttttaaaaattactattttaatcacatataaaattaagttttaatttatctttctatacaaaaatatcatcattaatgaaattaactaatttattatatttttttaatcattttttcacttataaattttatctaaaactgaatcgattaatttcttatatctctaaagatatccgtatggtaacaaaattgactccaaacatttcttaagtcgatttctaaaaccgctccaaag

SEQ ID NO: 49806 - DNA, 301 bp, Arabidopsis thaliana landsberg
cactcgtttactaaacccgagagaatcttttttttttgctaacaaaatcaaacagaagagaacgcttacactttttctcatttgggctttggttgctgctgctaacgctcatttttctatgggtgcaagtggacactacccctaaaaaacttaatttccagctgcatggcctggactcgaaacaatggcatacctctatctacatcaaatagtacatggcagaccaacaaagaacatcatgaatacttaaactcacctcctttactcccacctgttgctttgtcactctactctcactcta

SEQ ID NO: 49807 - DNA, 604 bp, Arabidopsis thaliana landsberg
agctaatatagaatctataccgctctatctgtttatcctcggatacgtttttggtttggcgtggcgcaggagaactctgtgatcgtgtaggtgagataaatgacgacaggagaggatcaggagttacacttgacgcaacagaaccattacgagaagtaaatcctaacaacctttgtagatctccttctcttagttctttccgaagaagtgaaagtgtcgaattggtaccgctttttcgtgactttctctttcgctgcaagtaaaactcattaaggaattcaacagaggaatgtgattccatggtgagaaactaagaatatctgtaagttataaacgtagaaattgaaaaaaggatatcttaaataaactcccatggtgaagcgttatgtgtgctacgatatcaactcccactttaagagaacaaacagggcatacctgaaaaatccaatgtacacatttgctatataatttttgattccaagttgatttgatagtaaagaccagtagagagcaataccgcgttcttcgactctaaagtatgttcatcatctatgtgacagcacaacccgatgatatcatacgattctgcacagaacgggcaagc

SEQ ID NO: 49808 - DNA, 1096 bp, Arabidopsis thaliana landsberg
cctaaaaagtttaggtttcagtgtagggagtttccttgttggaatagaaaggagaatgtgtgtgatgttgttggggataaagatgatagtaatcttgctggtgttttgttgtctatgtcgaaagaaaacagtgtggatggtaagggagacaatgctaggaattgtggttctagagaaattgagagtgatgtagagaaagagaagagcttgctttgtgatcctttgagtatatataagaggagaaacgagtcggtgggtggttttgaagatggggtaaagaagaaggttaaagttgctgataaagaggaagaataatgatgtaagaaggctttgatttggatacagaagaggcattatgtgttacacaaccaacatttcttattttaatagatttcttacacaagaatggtaaggtttataactttgtcactagtttagattcttaaccttatattcagatataaccacaatggttcatggtttcatttgtctttgcaatcaactaacagttgtaggatacttaacatccacataatatgcaataaaaagtgtaaattctttccattgatgataaactcgattgcttggtttataagtttgtgtaggtcaaattaggagcaagaaaggcttgttttatcttgatgattaactcaatcttagtcattcatgggagcggtgggcagtttcaggattagtaggcgctcaaaatcttgaaggcttcgcggactctcctcgccctccgtccttccatagatgaagttgaattctctgacaattctcaccatgaacaattttaggtgatttcaaatagataagaaagctcttgttggaaggcagtgcactaaagggtcctgatatcctacttgtattccaaaaaactcttctcttgaatatgaaaggctgcaaagcgttggtgcgacttccaaattgttaccggaacttacggagtatatgcagaattttgtgctttatggaacaagaataaacttgaaatgccaaaggtattgcattggagtctgttttatgcttaagtgcaactgtgcaagctaacatcagccatctgatatggctttacttcaagaatcgctagaagctc

SEQ ID NO: 49809 - DNA, 1294 bp, Arabidopsis thaliana landsberg
  unsure (1)..(1294): unsure at all n locations
gaatcctgtcatctagtatttgcaacgtgcaaacatattaggagaattataatgtttataaaaataaatttaatcttaggtttacggcatcatgttctagttacttttattgttttgatatctagaattcaaatttcaattttagtttcagtattaatttaatttttatttctaaaatagataaccactgatgaaaatctattgctattaatttaatttttatttctaaaatagataactactgatgaaaatttattgctatcgataacatcttagcgcagtcgtcccaatagatgatgaagtctgtggtgaggtttttatcaaaaaacaaaaaaaaaagtctgtggtgaggtttttgttttcgtgttcatgaaaagcagccacaaaagtgatagtctcgtccctctctatacacttaattcattggtcttttaaggtcatgcaaacatagaccatacactttaccattcagctttgtggatgatgtgatattagattaagaagtatgatgtacctatcggaagaaactattacaaaagtttatttacattgacaacatcttaatgcagacgatccctataattgacgaaatatgtggtgtcgtgttcatatggctttcccatctagattttgttcgtgattttccgctccaactcatacatgttcacactctccataatttctggtaaatatatgctacattttaagatatttaaaaaaaacagaagaaaacaaaaatagagaaatctactcatttcctctaagattagacgaccgttcaatttttttttcaaattagatttttaaaaatagagagaaatgaaacatgttagacatcattcactggccttcaaatatgtctttttccatatttagttcttaattgtgtatacggtttgatttggttatctctgacattttccctttttctagctatgatatttgattatgttcgttttatttatcatactactctatcacgtttatccgttttataaattttctgtgatatgattaattaatatttagtcaacagtagatatataatatgtccgggcggcataaatatattatttattatttaaatatttgattattaagtattttccttgcttgtttagctaatataccttgattgaattttcgcaaatcaagtccatacttttcattattacttataactaacttccaatccaaagaanaagagttacaagcataaaattattgtttctactataaactaaactagataaatttatgggatagaaattaaatacccataaatagaaagatg

SEQ ID NO: 49810 - DNA, 559 bp, Arabidopsis thaliana landsberg
atgtactatataattaccaatcgattataaaataaataaaatgttttcattttaaacaattttggtactctaggtttgctaatcactcttaatcctattggttttcaccactttgtgcaggttcttgtgagtaaagatcaactcttgcaagaagcggagagaggagaaatattcaaaggttactccgaaggaactttagggtttaaaccaacatacaaatacaatgtaggaagcagcgactatgatacaagccataagatcagggttccagcttggacagataggatcttattcaagatccaagatactgataatattcaagcaactcttcactcttatgattccatagaccaagtatatggttctgatcataagcctgtcaaagcggatctttgcttgaaatgggtcaacagttaaataaatgcataaaatttaattatgaaggataatatggtatatatgtaaaaacggattattacttttttgagattaaatagtcaaaacattttgagttctttattaatgtttttgaatgtaagaaacttaaagttaagggttc

SEQ ID NO: 49811 - DNA, 815 bp, Arabidopsis thaliana landsberg
agggtttgagctaaaactcaaatttaagaaccaaattacctcgggggaagaatcgtcccgtagaggatcaacttcgcgaacaatctttgccatgtcgggaggagaatccgaggaagcaaaagaagaagaagacgaagctgctatcttgtgccatgccttgtctacaactacaggacacttcatcaaccaaatcgatctatcacttttctctatatcgagattatgaatatcttccatcgttactcctctcttctccaaagtcaatcttctttctcttgtcgcagtttctttacttctcttgagctctgtctgatcttccgatttcgttttgacttaaaacctaagtcttcttactttgaagcggaggtgaaaaaaaaggaatcccatctcatatgacccgacccgttactatatacgtggaccgacttgggcgttaaaacaaataggccaaggcccatattattgtaagaatccagtttctttaatgggccgtttgttattcgcaaaaacatatatttcttgttgccacattttgaattgttttattttctaaagtatagatgacatgattaataggggtatatgtatgtccatactgcatacataaacacatgtagagcatgcatggatcatggatgtatggtgcatgtataaatgtattaaatttaaatggatcacatacatattgtttggacttttggaccactattgtgctgataaagagtaaagagaacaccaaggttgttgttgacaaaaaaggaaacaaaataccgaggatggaaatggattggcgattaggacaacgacaatgaata

SEQ ID NO: 49812 - DNA, 1126 bp, Arabidopsis thaliana landsberg
tcggcaaaaaaatccagatatttaaaaccgatgaagagcacatctattgtattttaatattcatccttgtaaaatccaaacaatgtatttttttaaactcacaaaactctttaattcttttctatttagaattttttttattttgtatggtttgagatttcatctcgttttcctttttcgtattttgatttccatttttgtttgtcaattcttctcagtttctctttttaactgcctaattttttttaaaaatgtcgaacatgggttattagcgaattttggaggtcacgatacatcataatttctgaatttagagaccctaaaatgttaatatatttctgggatttgaggcaaatgccttttttgttaacctatagtcacggtcaggccaaacatatatataaacgtcttagacttcacttcatagtctggtttaaacagtcacagactcatagtacatggtcccaaataatttcaaatctcatgcaaaaagaaagaaatactagtccacgtgacttatgtcaaaattaactacgtaaaatgttcaaaattagagtgtgtaagcaagataaaggaattctaattaaaacttggaagagtaatgtagctaataatatataacaatagaaaaaccccatgaatggagagatctaaaacaaaaaacaaacaacatagagcacttaccacgtgcaaaaataacctcaaatattactttacattcgatattaattttaaacgcttcatagtgatgtaagaaaatagaaagatgtatcaggctttgatctggaaccttgaacacttgatcgatccgatggaaatgtcgatttcgatgagattatcgtcttcatactcggctgataattggataagcctgaaatctgggatgttgttgtacatgatcttttgatcttgtttaccaatcatagtactatagtggtggccaatgtaatggccgcttggtaaggagagctctatgagactttcctcatcagggattgtcccgtcatcttcgtcattatttttgacaatatcattagtggtcgtagatgatagttcagtctctcctaagtagtcttgttgactaagatcttgaaccttggagtttggtttttggattgagagaggg

SEQ ID NO: 49813 - DNA, 531 bp, Arabidopsis thaliana landsberg
  unsure (1)..(531): unsure at all n locations
tgcagtgtacatgccatatgaccaaagcatatgacaagaggggttggggcgaggcacacacgggcacggccaccacatcatcatcatgcatatgtacatacaccacccggcctgtgcattgatcactacgtannnnnnnnnnnnnnnnnnnnnnnntttccagctcccctgcagattatctcgatcgctagctctttcattagcgttggtgttagaatcaagtatatacatattctgtcagtctcatcatgcatgcgcatatatacatacatagagcgttgattgctaatgaagtacaggaaggaaacaaagcttgcagcatcacgcacgtccgtccgctagcgaccgagctctgctgccaccacgaagaagcctccatatacgttttccagctggacacacacacacacgcatgcatgcatgcgtacacgaggggagagcatatatcagcagcatgcacatgtatgtatgtatacatacaagctagcgtaccggcgcccggaataaggccgcgggagaggccgcctcgtg

SEQ ID NO: 49814 - DNA, 1400 bp, Arabidopsis thaliana landsberg
gctttctaataactagctagcatatttatcatcagtcctgttggcaactttcatcttttgatgtaaagaaaaaccctttcttttcatcattactaaattacgcattctctagctcaatgtattaccaaaaaataataatgtgaagtgcttttagaattattacaaaacaaaaaatgatttaattaagacataaagaacagaagaatattataaactagggtttgtttgggaatcaccagggaggactggtccttctccctaggctcagacttggtgtgattaaattgtgaaatggttacacatgagaaattggaatcaatgactgtgtttgaagtgatagtgattgatgagttcttcatctgtaggatggaactagttccatgtgccattacgtttattaaaaaaaaggtttccaagaaaccccaaagatatggaatctttctttgtagaaaacgtacaacttttttgaaagattgagaagtgtatctcctctctttattctatttttttttctccagcaattctactacgtattgatatgatgttctgacaaaccttgaggatgatgaatacatcaaaaatgataacgaactgataattatattcaagggtctgagcatgcatcattggaaattctcaggtgccttacgttactgaaacacaattatatatacatacaaaattcatccgtattattttcttggttaaatttagatcctggaatatatgagatttttacaaaataggagtatgaacttataaagcacctatatattaaaccaaaaaaatttaaaacttataagcacctataaagaagaaaagaaaaagagagaggagcgtacgtatggatgcatcaaatccgaggagacaatcgcatcaagaaatggacggacacaatctcgacgagtcatgtgtcccaaagaaacatcacatacgattactcaaaaaaatggaagtatccgcaggcttttacatcaaatcaaaagcccattcaattttcctttcactctctatacaaaaagaaaactctgcacttttgagttttgatcgagtacgaatatttttacgtgctttagtcgatatgccacatatgttgactaaagaaacaagtaatggatcttcaaactgacattatatattgcacccattaattcttttgttccagccacgaactcatttaaattctctatatgagattgtccaaccaagagaaaaatattattaaaataacggcacaaaaatgtcttgaagtttaaccaaacattaaattggagaaaaaatgtttttatcaaacttaaatcgaagcaaactaaattcattcaaaaatttaaagaaagctgaccacttagtcattatactataccgaccatttaaaagcaatacgtttcaaaatcatgaca

SEQ ID NO: 49815 - DNA, 751 bp, Arabidopsis thaliana landsberg
aacggaatccttgaggcttattcaggcatatttcaaggtttcaagaactccgccaaaacccagctcctgattcctttcgcaccccatatcctccagtttttggacagtatatacatggagaaagacatgtaagtttggttacgacccaactgaatttctattatgtcatagcagttgtttaattttgtggtaaaattgccttgggacagggacgaggtggtgatgaagacagcgattggggtcttaggagatttagcagatacactagggagtcatgtgggtggtttgatacaacagtcagtgtcaagtaaagagttcttaaacgaatgtttgtcttctgaagaccacacaattaaagaagcagccgaatgggcgaagcatgccataacccgtgccatatctgtttgaaggctcttcttttgcctataagaaagaaaattccttttgctttttagtaaagtctgcatgcatctctgggtgggttgagttcagcggggggaggggtagagctgcaacatccgagtcacatcagcatcatcagcatcagtttcatttgcatcatcaacataactggggtcagtcagggaatcgttgagtcgtggatgtggggaatgatgagttttggggtaaataatgaaactggaagagtcacgggtgaaagtttcccgggtaaggtttaaagccccccggaagtatggaagaagaaggaaattgaatcaatgggtcgtttttcccagagttggggtttttg

SEQ ID NO: 49816 - DNA, 422 bp, Arabidopsis thaliana landsberg
gtgcctcagtgttcaagcatgtctctaagttgtgggagtcctgaggtggctacacgggaaacgcgcaaggcccctgatatccgatatcccacgcgattatatcttcgaccggtcaatgagcatcggtagagcgttccattgtgtgcactgctgtcatgtttcgaaactctgcgcactttgacacttcggcggatgagcctcagagtgctctgcgtaggacctctagcgataatgatcgtatatgtgcgactatcggacactaggtgttgctactttataatcctcgtcccatctaggagccggattcctccgaagctctcgtcgggattctcggagctcgcccgcgaatgtgtagagggtaaggccaacgttcggcagtcgttgatagcgcaattgcctctgtcgaccctctaactagctat

SEQ ID NO: 49817 - DNA, 1099 bp, Arabidopsis thaliana landsberg
  unsure (1)..(1099): unsure at all n locations
ttttttgtgcatttccgaatgcaatggattttgttttacgtacacaaccgtcatattagtagcacatttgtcaccctggggagggccagggtcttttgccgcatatatttggtagtgtttacgacgtaacttgttcacatattgttgacatatatgatatatcgatcggtacgagaaaagtcacttaattaacaatatcatagaagattatgtagaatttctagcgagttcattcaaatcgctccaaattacttggactgattccaagagcatgataatattaatattgaatgtacaaattacatagataattgttaataatgaaccaatccagctgcatggaggacccgacccgcaataatctaaaatcgaatataactagtaattttcctgcgtcatcaagccaacgaaagttttcagatatttcgaacatcttttcaacgtaatattacatgacaggaactacgtacagacttatatatgtaatctgttgtataaacgtgatataatttttattttccgtctcccatgattttgttagaaacttgaaaatatattagttgtaatgataagagatatacattgaaatatatatataaattgaggaccggagtaccattttataacttcggattttcattttagttccatgatttgtttgatttgacgtactttcaataagttgaccgagtcaaattatatatgcatattacgtttttctgaagttcaattttttttttcttttctaatgtgtgttgtctttaaacagataaagaacttcccctttctaaatatgtttgttttgggtatttctcggttaaaattaaataaaagctgggtttatcagtaaagccagaaaacgagacgagtggagtgcgaggcatgatgacattagacctgtcaaatttcaattatttagatatgaagtgtttaataatcccaagactaatacttaattattcctaaatgaaaactatgaatatttaagtcactgattaaagaattaaaaaaaaaaagacacttgaaggagtttggcatgcaccgaaaatgatgatgttttgggttaaaagctcatttnccgagatcatacagcanaaca

SEQ ID NO: 49818 - DNA, 590 bp, Arabidopsis thaliana landsberg
aaataatatactaaaaactgaagtacaccaattacaatgttaaaaatatttatatcataaacaaatgactgtgttaatcttacagtactagtgatatacaatgataaattttaataatatttaaaagtataattttgaatacattagattattggagttcgagtccaaaatacaagtatacttaatataaaaaagattataattagagtccaaaatataagtataccaggtataaatattttatttaaaaatatgatattcaactaagtttcaactaaataatgtatatgtactattgttcataatttgcttgtaatgtgatttttatcaactataaatccatcgataaaacaaattaatacttgttatgatgctatgttctaaatcaagtaagtatccgaatataaatccgaattcgaactatccgttttgtattagtattcgacagtattcgtattcgtatccgtattcggattaaaatatggtaaatagtgacattcgaatccgtttccatgcgtatccgatccgaatccaccctagttgtttggtgttgtcccgaacttgcgtcgacaaatggattgtctactggc

SEQ ID NO: 49819 - DNA, 359 bp, Arabidopsis thaliana landsberg
accttgtttttatcaccatcttcacttgtttttcttgctttttagtaccaagactctctagatcaaacatattgaaaaaggaaaagactcgtactcgatccgaacctcttacttcacgtcggattcatgttagaatatcgggtccggtttttttccacccctggaaccaaacatcactacttaattcgttgtagataaagccaatgttagaaatgtcaattagggccaaagtctgaagtccagtccatcccaacaatgacactattgagagagagagagagagagaaaggacattccacaagaagttatgcctcaattgatacttatatatagtagaaccatacatcacttcttctctt

SEQ ID NO: 49820 - DNA, 266 bp, Arabidopsis thaliana landsberg
cacgcaattcacactcctcttagaaacatccacaatcaagcatatataacaatattattgtaataaaactcaaccatgaaaaacatggtgaaaacaacataggcatacttgtatatcacaagcataataacaacttcattctcaccaatgaccagcgatatctaccgcattaatgaaacaatatcgcactttcagaaattaattacatcatgcattaagccatgatcaacttaccacattcaccgtactagaagtagggaccggtg

SEQ ID NO: 49821 - DNA, 688 bp, Arabidopsis thaliana landsberg
acggatgggcccattactttatttattccacttttgtcttagtagtaccgtgagggggcaaaacaaccctgttcatgaattggaaccataagcggaaaaaaacatctatacgaaaaacctgattatacagctttgtttgttctcaaatatgggacacaagtgaaggaggaggatacaaagacagaaacatgaaaactactacataaattaatactatcttatgggcaatatattaatacagacatgagtatgctgtgttcttagcaataatcatgttgacctgcaatggatagattcagtctcaggtatcaaaagcttcggaccagaagcggtctgtcaagacagagagcgactttgtcgaatatataagatcatcggatcaacactttgcctactagcgacttccgacgaccaacatcttgaggttgcctgcctcctaacgaagatgcgggttttgttctaatttaaaccgacacttcttgcttcaattctaaagcttgaggtgttgatgttgttgctctatccttgacaaatgtccttaggcatccgttgattatgcgtggtgctgatccatcgcagatccgttttgcaagatcaacagccttttatcacatcatagttgttagttagttcactacacaatcaaggtcatcatattgcaaagctgaccgaagatggatctacattt

SEQ ID NO: 49822 - DNA, 609 bp, Arabidopsis thaliana landsberg
aaaaaattgtatatatatattaagaaaaaatatattttcatcgccaataattttagtgagaaaatataaaatagcgaatttaaattgaaaaagatcgctaccaaataaaaacaaataatatttaacgatcgatgacataaatagaaaaaatactaaacgatctacttactaatggttttattcaatattcagttaacataccttttataatataatttttgaaatataacggtctcaatatcataaattaagttattatacattaaacgatatatataatcatatcgtactattttctattttattaaaatgtcaatattacgactaccacaataaaaatcaacctttttagttcttaactaaactttaattacgttaataatagaaaaaaaaaacttgttctttataaaagtctcaatcaaaactgcattcaatcttttattcaacatcattttttctttcctaaaacttttaagtagaatgcaatacatgaactttctgaagatcacccatttaagtattattctcgtccaaatatgttcaaattcaaagttttgatgtaatatgtgcattaatgctggtatgatgatcccattcaaatttaacatc

SEQ ID NO: 49823 - DNA, 1026 bp, Arabidopsis thaliana landsberg
aaacacggacggatccaatactttatttaggttagagcatatgaatatacaaaatatatgggctagacgcatttaaatgaactaacactaattctttaaagggaaaacaatagttgggaagactaaaccacataggacttgctttacgtttgcctctacgaaagggcgataattgtttttttaagagcgataaatgtttgatcaagaagactacaagtggtggcgatacataagcaatagtgacattatcgtctgaaaataatggcaaacataaatgctgtttagcttttttcgattagttttatatgtttctatatttttgatcgaataattcgggtatcaaattattattcaaaccatgaacaaaaccaaagaaaaaaaaaacagaaacaacaggaaaaagaatactattgattaattttcctggaagacaaacatgataaggattctttgatcgttatcgatcacccaattcacatttcttatacatggccaacaatggtatctgaattgaacaactcctaacgccatttcctattggtgagagaaattttataagtgaggcatatacatgtcttatttacctatagacagttttcaaaaaattcaacacttatgttgtttttcaaattcacaaaatgttgtggtgaagttctatataataggggtaaaattgacaataatataagtagtacacacaatattataatcttatgaaatagttactagttttttttggtagggtaaaatagttactagttagtaactgaattttattgtttatttttgccaatttcctaaataaaattagggttgataagaaatttaaaaattggttcttttaaaaatccccaaactaaaaatgaaaaagaaaacaatttcttatgattgtttactactaagcatgcctgtcttcttccataagtacttgagattacttactatgttaacaatataaaaagctagttttatatatatataaatattgggtatgaatactctgaattcattcctctcaaattaaaa

SEQ ID NO: 49824 - DNA, 613 bp, Arabidopsis thaliana landsberg
  unsure (1)..(613): unsure at all n locations
ctacgtacattgctcgcatgcatgttgcgtacgatgcttttgtgaggacaatatatactagagcaccacgtccttttgttctttgctaatgtctaaacactttcagttactaggtaccagctaatttttagatatccaattttactaaataaaggctttttgatgcttaatagatggttggatagtacgttgaaggtgtatatnnnnnnnnnnnnnnnnntattaattttgaatttattaatacaactagtagttaccagttctttaacatttattagtatctttagctacagctaccagtattttttagctgctattttctagaactaataggtctaaacataatgtagagacttggaacgccctaaaaataactccgatatctgcttagtaggatttttttggaaattggcctaactaattatgataatactagtagtagaacctacttgtacttgaattcagcgaccattgactcgtttataactagtagtcaaaaggagggctggagggggtggtggtcgtgctttctttcggttgcactgctggtacgcgttaactggcctggggtgctcaactcaaaactaggcagggctagggctagctaggaggt

SEQ ID NO: 49825 - DNA, 405 bp, Arabidopsis thaliana landsberg
tcttgaaaattgaatcctacccatggcatatcagcttgtcctatatttttccccaatgcgagttccccaccacctgttgctttatcctgcgtttaacaatggccctttatgatgcccttacgctgacgcacccgaagtaatggaggcatacgtacaatgaagttcgtgcggggatacatagatcatggcatgcttaaagtatcaccatagtccgtataaacgatcttctgagtgggaggatataagaaatcaccctcctggtttggtatcgctggaaccccagaatctatagtctcttggcgaatcagccaagatgcaacgatgcgctgttacgaccgagatatgggaactggttgacatggcttattactactcatgcgagctcgattcggctcactatgtgcg

SEQ ID NO: 49826 - DNA, 473 bp, Arabidopsis thaliana landsberg
cgagccacgcatagcccgggtgcatgttcagcgtgttcagggcgaagcgcgactgtttgatcatgtgcacgcattcctgcgccagttcgaacgggcactgggtcgcgaccacgaaatacagcgtaccgctggccgggtcgtaccaaccgttgccgttgtccggctccagtgcggccggctcgatggacggcgtcttgtagcgctcgtcgaacaccagccagtcctcgggcgggttgtccagctgctcggccatgcgcttggcgtagaacaggccctgctcggtcaggtcgccatgctggttgggctgcttcgaccacaccggcttgcggttgaggatggtggggaacagcatggaattcttcaggctggagaattcatcatcgtcgaacggcgtggcaccgcccacgcgcacgaagcggaagctgccgtaggggtcgcgctggtacagcggcgcctgggcgccatagcggatc

SEQ ID NO: 49827 - DNA, 1010 bp, Arabidopsis thaliana landsberg
ttataaggatcttgccaataggctaagcgatttatatgcaagcctagtttgatgaaaggtaacaatagctttctgttatgagactatcagttactagtaactatagagcaaagaaaaggagaaaagatgaagaagaaagtatctcatgataccttcataactgcaacgttagtgtcaattccttctactttcacttgttcaactgtcgcctgagcagcttcagctctgtctgtgtctaggattgactgtttcagagctatctccaatggactcgtctccccaacacaaaaatctcctacgattgtcatttcttcacccatatttgtaccagtttctagattcaagccaaaatgctcaagcaatttgagtgagactggagataaatttgagggccatttcatatactgaacagaaccgacatcagaagcaacatcagtggttatgcgagagacacggctggacagagcttctaagaccatatctccaccggggagactttctgccaggttaaatataagcaatgttttgtattgggaagagaagacttgaaaagcttcccttattgcacggtaccggaatatgccaaggattgctcttgcaagtatttctgatcgttgaatccctttaaagttgtatcttcgtatgaaccattgtacacgaaggatctccaggcaaattcccaaccagtagtctcgacgagcattgcctttaaactctgtaaattcaaaaaatactggctctggtctgtacaaacgaaacaagatagagcaaagatataaatccattagaaaacagattttgtgaagaatcataaaagagacagacataagattgtagtccaatagcatacgtacactgtaattgatttatacatgatggctttatcaaatatacgagcacccaatggccctgtcaactcaggtttgatgacctgttttgtgtcttcagtgagaacatatcgcatggccttttcaccaccacccattgaatcaaaatatagagcacagttg

SEQ ID NO: 49828 - DNA, 1005 bp, Arabidopsis thaliana landsberg
  unsure (1)..(1005): unsure at all n locations
tatttttgtgaatgatagaacaataatcaattttaattcaagtgagagtatattattaattcaacaatatnattttatgtgatacttagtgcttacgctttctatagttgttcctttgatttcttcagaatctttatcaaatatcacaaaagtttccgagtcacatccatcattcactatataaataaaaatgccaacagaaagaaatataattaaaaaagatagttttgaaggtttcttagcaattttttttatgatttataatattattgaaactatatattttttatagaaatttcaaaaaatattattattttattgttttatcgattttgttaaaaaaggagtagtattggaaggagatttctaacaatttctcataattcaaatacttttttcaaagataacaataattcaaaattaaaaaacaagttattctatccattgaaatgtcgtaaaaaaacacaagatatacaaaacccaatgaaattaaatttgataacagttaaggtttacataaaattggtcaagcgaacttttagaaaaaaaaacaaaaaaaaaatccatgtaaatatactcatctagctaattaaaaataataatgaaatgaaatggaaaaagtgtatctttagtacatgcatcaagaaaagtgtagacgttactaataagattagttttccaaagaatattccgttctcgatttccctggtcttaggtttggcctacaagaaaaggtttacttaagacatagtgtcacaaaacccatgaaagaattcatctctttctttcttgtaatccctatgtagtctcctcaagtaatcaacaaccctaatggcctaatccaaacgtttcgtattcaaattcgtttgtccccttaaattctaactttacgttatcataactctaatttgctaaaagccgtttgagccattccaaaaaaatcctcaaagagacatttctcgatccatgtggtttgtatttggtatcaatcacatagggtttttt

SEQ ID NO: 49829 - DNA, 1172 bp, Arabidopsis thaliana landsberg
gtcaaatttgtggacattgcttgtcaccttccaataagtttgtaactagtggttgcaatactatgcatgtgtcagtatataacttgtttagtactctaataattttaccaaattgttaattatagctccccaacaatcaggagacttcttagaacttgacgaacatatgccgaaagtataatcgacaaatagcgatcattcaaataacgttttctttgaaataaacatgttaccgaccatatggtgataaaatcgtatgtaacaaataatgttatacgtatttttatgttttgtacaaataacatgagatttcgagtatattataaaattataacaacatgcttgaaattaattaaaaagtatattttttgcaaaaaaaaaaagctctaaaaagaaatatcatcagaattaacccaaaaaacgacaaaaagaaaaaatttaacacaaaaaaaatatgtaattttcttctgttaacacaaacgtttatctgatttatataaacctttcaaaggattagtctttccatagcaatgtatcccaaaaagatattcgtttggttcactccgaaaactaaaaccttaattcaaaaatttgatagttttccattatttttttgtctagttgtgagtttgttccatcctaacacgtgaagtgaacacttatctatttgttccacttgcttgttcttctatactatatatttttctcaaccatccaaaaacatgcttctttctttttcacttcatttcacaaatgttttgtgtatgttcaagattcttggtattgttgttctatactatatgtttctcgtacattggaaaccataactccatactcgaatagaaaaaaaaaaaatttaatctaattttaagagaaaggtttctcgagtctttttccttttaaaaaaaaattttggtaaatctttttatgagttatgtgtatgagaatttttgtctctacattttggagttcgattttcgttttagtttaggatggtgaagtatttacaaaaaagaaatctatttgcgaacctaaatatcgaataatcgtatctttagatgtagatggattagtacatatcgtgatatcgatagatccacacatagttttgtacaaaaattatcaaaatgactactagtaaaagagtatttatcaaaataatctagtagtta

SEQ ID NO: 49830 - DNA, 968 bp, Arabidopsis thaliana landsberg
cttattttcgtccttgttactgttggcatttgtctaaacctgaactccgacgtaattaagttgtcaaattgtataatacgcacgtcagcaggacattctgcaaaatcacaacgaaaagcatggtaaaaataattgccagaaaaatacatcacatgtgtctaaaatcttcagaatattttatttatagtttttaatagttgctgaaatttgaacagccagttggttttgggacattatgcatgtgtgtttatgtgaccaggatcttctgtgaccaaaaaaaaaaaaaatgtgaccatgatctactttattattgaattaactttagtctccataactgaagccaaattaattggatataccttatcatcttcaactaagaattaaaattagttaccactaatgtgattaccgtttatgcaaaaataaataaataatgtgactgtaaaatattacagtacattttacaaaaaaatgctctaagcagtaattttttttttttctttgacatcatcaaacagtaataattttctgtggcaaaaatagaaagaaaataagcccatgcgtccatgatgcatgtgtctcttgctcacgtacagatacaagagggatttaataaatgaccgttgcaggaaagactgaatacatgaaagtttgtgataatcagtcacatatctaaatacagacctagattgtttgttactacttttattttgcttgattcgtttgtttgatttgcatgttagtacttgatgtttgatcagcttgttagtttaatccaattctcgcatctctggtatgtaacaaacgtactggtacctctgagtttgatatgctttataataccatcagttttatcttttatatattcctaaaaaaatattatcagaaactaagattcgatcacatcaatatttttactgtattggaaactgtcaaattatcaaaatgaaaatagcataactagcgat

SEQ ID NO: 49831 - DNA, 861 bp, Arabidopsis thaliana landsberg
cctctcctcagctaaaagacctgcattctccaagactacatcaaaagtatcgagagaaataacattaacaaggacaatgactagaagaagaatgagaacaccatcagtgttatttctacacctaatcttgatcagatctattctgatggtgattccgcgtcgtccatccttggcggtccatatgacgaagagctagattactttcaaaatatctttgcaaaccatccgatttctcttgagaatttaggtttgagccaaacttcggatgaggtaactcagtcttcatcatctgggttcatgatcaagaaccctaaccctaacttgcacgacagtgttggaattcatcatcaagaggcaacgatcacagctccggcgaatacaccccaccttgcgtctgatatctacttatcttatttattgaacggtacgacgtcttcatactccgacactcattttccgtcttcctcatcttccacgtcatccaccaccgtagagcatggaggccacaacgagtttcttgagcctcaagctaactctacaagtgaaagaagagaaatggatctgatagagatgctctctggttctattcaaggtagcaacatctgcttcccgttggtctagctacatccatgatcatgtgatgttattcgatcattctatctttatgttcctttgcttaataatttagtcctttcaatttcttaaacctgtccatagatcataagttacaagctgcttcttctatcaaaataattaaggtttgtgtgctagctacattgttagcgatttttggttcttggaaatatattgaaatcctttattaattctgttttttggctgttttcatcataacgtatatat

SEQ ID NO: 49832 - DNA, 1163 bp, Arabidopsis thaliana landsberg
attttctctaaatcgtttttattattaaacccgcgaagaactaaaacatatctcagaccaataaaactaaggaaaatcaaattctcagacaacttttttcgaagaagacgacgaattttaaagattttgttttctatattctcttctggtaatctttttgtttgtttcttttttttgtcatccatatttgatctttctttgttgctgattgtcaacttttcttttactagctgatttttcctttttcaaaactaagcaagtttgtgttcacgtcttcatcaatgacataattgcccttagtttattccacatagttgtcatacaaattactttcgtttctatgtgttttatattcacaatcatagatgaagttcataacttagatgtttaagaaaaaaacagagttcataacttgtgattttgtgctttgtcttatttgttagattacgggtacgtaatttcttacgaaagaaggctctctttaataagataaattcatttttctctcatcttttgagttaatacttcttgacctgatttgagtttggtcgttaggtttttcttgatttcggttcaagttttctcttagctctgaattatatgtaccgtgtaagaaagtgaattatatgtaccgtgtaagaaagtgaaattttcggttcaagaagtgaaattttctttaagttgtgtttttttttttcacttatgaagtcatatgataatttgatatgaatcttaaaaagcttttttttttatgacatgatgcagatagtgaagtctcggagactgaatgatattgtttctggtcaacttaaccaatttcagaacatggcaaacagagcagacaactcaatgcgttggtttgtgacttttacaagattattgaatccttgagttcattgtgaaagagatgatgattactgattcctagtgttctgtttttatttttgtgcagttcaaatagtaagaaaccgaatgacggtatgatgctcgtaatatcgattttcgcgggaatagttatcggatttttattaggcatatctttccctacattatcactaactaaggtaaattcttgtaaagttttacttttttttcaagaaataaatgtttggtgtgattttgtaaaagatgtgtttatatattttcagatgaatttttcatca

SEQ ID NO: 49833 - DNA, 675 bp, Arabidopsis thaliana landsberg
  unsure (1)..(675): unsure at all n locations
gttaaaaaaaattttaagagtccaaagtttcaaaacatatattttgttatattaacaaaaattacttcaatagttagattaaatacaccccctctttagatttgatactttatgcgttttgcagagtaagtttggtgtgaaggttaacgaaagtcaagtaaccaagtgatacacacgggttttgcattatttgtatttatattattaaaaagcataataatatttactaattaattatgtaagtatgtacatattcatatatcactgagtatatatatcctactcatctctgcctttttctctcgttcccaactccttacgcgctctctctctatctctttagctttctctttctagcggcgaagccatgggttatccggtgggctacactgagctcctcctcccaagaatcttccttcacttactctctctcttaggcttaatacgaacactcatagacacgggttttcggatattgggtctacccgactttctcgaatccgacccggtttcatcgtcatcgtcatggctggaaccaccgtatatgtccacggcggcgcatcatcaccaagaaagctcattttctttccaatggcngcgaggctagcntgagaaatcttgcccgcatcagattcttcgaactaactcgaccccgattcggatcccgatcccgat

SEQ ID NO: 49834 - DNA, 841 bp, Arabidopsis thaliana landsberg
tctgttatccaactcttacaattttatcaggaatgtatttcctcttgaaaagactgttctacttattattctatatattttggcagatgagaaaaaacctgaccttgtgaataaattttcttcgaaaagtctcagcccatctcacaatatgattagaggtgaactataactcggtcatctactcctagcaagaaattttaatgtctattaatctaattcctgtgaagagtgaaaatcgagcactgcaggctagtaatgttttctgtgtacactttcagtattcaaaaagagagaactgcataagtatggggcactgactccagactcaacaacaaaaggtttgatgcttgcttgatatgtttatgtagttggctattggagatagtgaaagcagaatgtcaaaccatttcataaatagacctttggcactttgcttaattcaaaattgatgcttcagattgttaggtgttcgttaatatcacactgatggatgaaccatgctatgtatatcagctctgtattcagtatattgatatcgttttcatcatgtacggcatgtacctgcttgttcagttagattgacactttaattttaaggatcttctggaactcgtagaagcttgtattaataattccattaggatggagaatttttttttttccccatgcacgaacaaacttcatgttagggatatagtaatctttttatgtgttttggatttggtttaatcatgcataatgtagaatgtatgaatgcaagataaaaatgcagaatgtacatctatacttactatttttgtgcatgctatgactaacagcatgtatgcaggtactgtatctc

SEQ ID NO: 49835 - DNA, 566 bp, Arabidopsis thaliana landsberg
gcggtggggaatgtggtaagcctctctgtggctggtgctggcgcgcgaatggtggcggcgaatgcgtgtggacggttgaacagatgggggagggaaggagcgagagagacggggagggagcagtggagcacgacagcgcggagacggaggcgaggcaggacgttgccggagcgcgggtggggtcgttgcgcgcagggtgacacggcgggcgtgatttccgggtggcggacagcgaggcttgcgcaaggaaggtggcgggggcatggtgaaatggtgtggaacccacactgaaatggcgaggcttgcgcgaggaggcgataacgcgcgacgcagggagaccttcctggtcggacggacgccagagcggtcagtatcacgggcgggggcacgacgggggtgtggacgcctcgttgtcgcttatagagtagtaaagatgtatattccttattacactcgtgcttctttaccgtgaataacatccttggacttatttttgagacattttttattaaaaaccataaaagttagatttcggggtttttgaaaaaatattttatagccttttc

SEQ ID NO: 49836 - DNA, 972 bp, Arabidopsis thaliana landsberg
aatatagtttttttttttacgtttccacgtaggattagacaaaacacctagaggcttaaagatagagagaagagaagggtctggtcgtgtgtccgaaccaagtctcgctctttttttctcgaaagtccaccactactatgctctttcgtttccaagagttcaatttcaattacgcaaccatggaaaaatcaaaaaagctttttgtttgctattattaaatacctctaaaaatatgaattaaacccttttgtgaataattaataactttattgacacacaaataaaaaaataaactgctggaagatttgtcgaaatctggtttcttcattcgtttttttcatttctgctccttcttctccttttttcacctgaaattcttcatctcactgtcacttccttctctctctatctccctcttttattttatttttaacaactttttgattagcttcgaagattctttgttcccacgattgagagaagattcggcattgtacatagagatcgattcatttggaacgaaactagtttgaaaaattctcaactttggggtttggctttgtgattacgacttgcgtttttgtttccaaaattggattattggtggaggcagagaggtgaagaaggaattctgggaattgggtctttatcacgctcttgtaattaagcgaaatttgtcaactttttagctaggggtgagaaattagggtttgtgacctgaatttttgggggaagaaggggatctggggtttaggtcaacggaattggagcaatcgagaatgatctgcttgttggtttactaaatcgacggtttggatctgatcggaggagagacagcgccatcccatggcgctgttccgttcgtttttttacaaaaagcctccggatcggcttcttgagatctctgagcgtgtttattgtaatcactccttccttttctctttttcatgatcaaagtatttataaaaagat

SEQ ID NO: 49837 - DNA, 878 bp, Arabidopsis thaliana landsberg
  unsure (1)..(878): unsure at all n locations
ctgcataattggtaccgcaagagatgctctgtgcatcaagtgccacatgtgatttcaagactttgggcaagaaagaatcagtcatcagaaaagagctgctgccgcttatgtgcataccacctcataatagcccatgtccaatactttctccccaaacaaagacatcacagagagactcatagtcttcaaaagttgatccttgactagatgagnnnnnnnnnnnnnnnnnnnnnnntttacttgtatcaacgccaggggaggagtgatttgttggtataatctctggaggcgaagtatgaggtttatgaaccagttcgtccaaagagagtgcctttagtactgcagtttgtgacagaacctctgagaaaactttccccagtctctgtggagtgttgcagtgagatcctgaggccttttttgcatgttcctgcaaaagtgccaggtgagacaggaaaataataagtaggaaacaacccgatggtgctatcatgaagaaagaaaacaaccaacaaaacctcatagcttgtgtcactgctgacagatctgatgttggacttcgagttctggctcgaactactttgttctccattttcaggagcaagactacggcttcttgagtgaagtaccaatgcagaagagttgtttcgtgagagaagagcgcgaagggtagtgagccagaactcagcttcatccttgtccttgcatacctatcaacgagtaagaacttgttagagattgatgtagcaatggagattgcatgtagtcttcagaagacagctaatgcctgtggaataatacatgtcagggaacaacaagaaaaagactacagggaggagcaaagtactaaccaaatcgagagaccgttcgccatatataag

SEQ ID NO: 49838 - DNA, 853 bp, Arabidopsis thaliana landsberg
tctcttccctttttcgctggaactgcttcttttcttctctctctctctctctcttccttctgggcttttagggtttgtcctctccagtccccgatttccgctttatccgatcggccgccgccgagattctaggttacccttcttcacttcatctattcaactttctccctaagatccatcttcagattcatcacttcccaattcgcttttttttttcctgattcgatctcgatcgttcaatcatccatttccaactttagtttcgatttgttcactgttttatgatttgaactcgttcgtaatctgagatttgcttttcgattttttagttagattcatttgttctattaacttgttgatttggtcatcttagtaactagtttgatttcgtgttttatattcgatttcgtgctcggatctgttgttctggctgttatagttgattctgacagtgtttttaagcgtcaatggctcgtgctttgatctcttattgctattacatggttttttcgattcatagtgatttagtagtctttcacctttatggctttttggatcgttgacgagtttcttcatggtgttggcttaatttactgattctgtcttacttcttctttattttcagttttcctgaatctgtttgtttctgttgcagataaacctatggcaatggaggttacgcagttgctcattaatgctcagtcgattgatggaactgtacgtaagcacgcggaagaaagtcttaagcagtttcaggagccaaaccctgcgggtttcttgttgtcgcttgaaagagagcttgcgaatgatgagaagccagtagatagcaggaaagtagttggtttagacctta

SEQ ID NO: 49839 - DNA, 498 bp, Arabidopsis thaliana landsberg
  unsure (1)..(498): unsure at all n locations
tctgagccctgggcagctgccgtcctcccctcgccctgtgtggtcagggttgcagtcgtgtaattctgtctcttggttcccaatacagaatctcagagtgcggaagcagggggaactgagttcttcacgcggtcggcaaccaagttcaagggtgccctggcccagaagttcatgtttgtggatggagaccgggctgtgtgcggctcctacaggtgactctccagctttcagggaagttgtgcgagaggtacctctggctcccaactggcttctgccattaatcctaaccctggttattnnnnnnnnnnnnnnnnnnnnnnnnnnnnnnnnnnnnnnnnnnnnnnnnnnnctgcgcgcctgtctgtctctggaggcaggcagagaagggctctgtctgaggacgctgatggtcccactcggagatgtgcacggcctggaggcttgctgtggccaggcgtgcttcgcaagcctatgggggtcatctgagagcagtcttag

SEQ ID NO: 49840 - DNA, 860 bp, Arabidopsis thaliana landsberg
  unsure (1)..(860): unsure at all n locations
cggcctgttctcctccccaataagaatcgagtaaatcatcgttgaccagtactccggtgtgttcnccggccagtttcattttggtttgtttggtagaggtaatattaaaatccgaagcggtgcccaggtcttgccagtcgccttcgattgctgttcctttgttacggttgtatcctagaccaatatggaggttggttaacccgacagccgtttcgagtccaaattctcctgtcagctcattggtcacactcacactactttttttcttttcggcatatacatctactccaatattgtaaggcctgaaaaaacctcccgtaccttgtccggaaaaagtgaaaatatcgtatgtgctttttgaaggagacagattaggaacctttttactgtaggcaatatcttttttggtaaagtctcgggcaatattgtcgctactggccgaagcggtgaacccatcctgcgagtataagtaaccgtatgccctatcggtgtactcaggatgagtaatatcggttctggaatacattcctgaccagatagaagttggataagacgcacggaattcgggccagattggcgcatcgcccagggctcttattgtaaatggataatgatgacttttcgtctctattccgatattggtcactcgtccaccatatgaaaaattaagagaactggatgttggataaaatgcatgacgtctttgtgcctgtttttctttctcaacagctgtattcaggtttgtttctttaccatgttctacagcttcttttgcttcagcctcacgccttgcatgctctttattgaatttcttacgaactgtatttctaggcaaactgtgagacattgaaaaattaatg

SEQ ID NO: 49841 - DNA, 800 bp, Arabidopsis thaliana landsberg
aacaacacaaaatatgcacattaggctatatatacagtattcataaaataaaataagaaataaacatcaatgtatgaaaatcaataaagaaaagattgtgagtgtgaacatgtagccaagatgagaaatcaaatactagaatgtaatggtctaattatcacacattaaactgcatggaaagagtgtaataaagtatatgttaagtattcaagtttaatatagaaacgttttagtctctcatcaagcacaattaatatagtaattttattaaattcaatcaattaaggccaataattaacgtttcctttcaatggttattacttattaaggcttacaaattcacatatcaactttaatccatttgttataatagtaactttttaacattaaaatacacatattatttttaagttgtttcttccatacacatacatactaataaataagtttctatacattcaaaaaagaaaaatatctatcaaaattcgagtcgttttttgagcccatccacaattgtttcgttagtcgcctcagtttgtccatttccctgtgggtagcgcggaatcgacttatttaagcatatcttctatctggcgcaaaaatcttcgaatacctgaaaattaactgggatccattatctgtgattatttcgtaagagagtccatggcagcagatgatgtttttccatacaaaacgttgaaaatctcctgtttgaatttttagacttttatttttcattttgatatttatgagagaattgttatgtaaacatgctatctaaattcttatccataaaaatc

SEQ ID NO: 49842 - DNA, 511 bp, Arabidopsis thaliana landsberg
tgagagtaaatgatatttcagatcttcgtagtgattaaagtttgagtaggacccaactcattcacctcttcagctacttctacaattttgtttctactataatcgattttaatttttacccaaataaacaaacagaaatacaaatgttatcattcaaaatccttagattctacttctagtaccaaacctttgccaatttatgtatatgttcacatttcaccgtgaatatgttaacagagagtgatatacaaatagttatatgcaacaccatatagtcgtgtcctagctagtgagtagtgactgccgaattacagaggcgagagacgtgtagggatgtaatacgtaggtagggtgcaggcagaaattacggatattaaatttttgtcatgcaaatgtaatacaagcacatagaaggagacaaatgtgtaatattaatatatgaatatatcccgtccaattttcactggcaataatgaataatggttggcgacgagaccaacttacaattttg

SEQ ID NO: 49843 - DNA, 462 bp, Arabidopsis thaliana landsberg
catctgtgtacaagaacacagagtaacatgtatggtgctgtgcttgcttgcttatgctcagctggctgtctttacgtcttgtacattaacgatgcagcccatgaaatggtaccacccacctacttggtgggtcttcccacctcagttagcatcaagacatacccccacatacattcctctggctaccctagtctagacaattcctcaatttagattcttttcccagatggttctaggttacgtcaagttgacagttaaaaccaaccagcatacttggcaactgaaaggaaaaaaaagccccatgtccagtaaatggtgaaaagggaggtgggtgggttgtttctatcacacactcgtgagattcaagataggatggcattcacaggtttcaccagagcacttttgacagacctgagaaattgactagggcagttccataatacggatattctactggacatt

SEQ ID NO: 49844 - DNA, 524 bp, Arabidopsis thaliana landsberg
  unsure (1)..(524): unsure at all n locations
tctacgcaaactaaatcgcatttgcaatccttggcacgctggccgccccggcacccgcacatgcaagctggttctcgcgtctgtttcaggccgacagcgacggcacgccgcaattcaccgatacctataacaaccatgtcgacgctaaaaagcaggacatggccccgcatgccaatgcgctgttcttcatgcagccgggctcgctgccgcaggaatcgtgggagaagctttcccccgagcaacgcgatgcctatgcccgccgcatggaaatcatgaagcatcatacctgtgcgccgcgtcaggacggtgcgatgcctccgccggcgatgatgggtcgcgaccatgacctgcatggcgacaaggcgatgcatgaccagcgcatggaaaaacgccgtgcccaatgggagaagatgaccccggccgagcgtgacgccgncaagaaagcgtgggaagcccgcaaggcccaatgggataagatgacgcctgccgagcgcgaagccgncaagcagcgcttgcatcagcag

SEQ ID NO: 49845 - DNA, 521 bp, Arabidopsis thaliana landsberg
ccgggtaagcaagcagttaaacggactttcaaactttcacaacctgccaaccttccaaatgtgtggggcgaaaaggggaattcagcatccttcaagccgagacttcgacttccgacgtacatcgacaaccaacaggaccctcccaacatctggtcccttacagctggagtagaaaaagtgccccgcgtgctccgtcttgacttgctgttcttccctgccaccaaccccgcagtcccgcgatcgggcccctcgctcaaccacacgagaccgtttctcagaatcttctgtcctgtcgtgacaaccctacatccaaccttgacaactcttccttcgtatagggacatcgtcgatcagcaatcatgtctggaaccaccacgcctttgcagtcacaggcgaacagcagcagctggtccgcctttgttaaggtagctatatacttcttgatcatcgatctcatgaagctagcaagcgctcgcgtttccagctgctgaccctcggtctcgcgactgctttatagtcta

SEQ ID NO: 49846 - DNA, 2130 bp, Arabidopsis thaliana landsberg
agaatgtgactcgttgttgttttcaggaagtcatgaacaatccacacgtagcagcagatgggttttcgtatgagctcgaagccatacaggaatggctaagcatgggacatgacacatctccaatgacaaacctgagactcgattaccagatgcttacaccaaatcacacccttcgttctcttattcaagactggcatagcaaaagagcagcacaagcttcctcttaaattcttttgtataacctcaaattggcaaaaacactatattttgatcatcttaagctatagaatccagatattgtagtaatcaataacaaaggatcaaacttgacaagcttaacacacaaataacctgatgaaaatggacataaagcacgtagcttttcattttaccttaagcttcaacaaaacaaaatctatggttcttcgaaattagctactatcaaacacaaacagacaagggacaaccaaaactaaagagatcccacaacaaaaagaagaaacaaacaaaaggaagaagaagccttttttatttcgtggatacaggagagaaaaggcgagcaattcgatctttctgctcttggaatcgtctttccaagaaagtctcaatgatctccatcaccgaaacgaatctcttcatatgctccaacctccggcttagctcagcttctctcgcccttgctcttctcagccgcgcctcggtttccgccagccggtctcgaagatcgtctaccactgaatcatcttctccgtcatgcgatcggcgacggagactgcttcgcgacgacaacgattgattgtgaccgtaacacatcgtaaaaggaaagataaacacaaaaatcaattcttcggttttggcctttttgggtttctctctaaaggaagaagaacataatgaagggtgttttggtcatttcattaatggtcaaaagtcaaactcttcttattaagtcagagggttttatctattatataaatcagtcaccggcgccggtgaatgaagcaagaacaatgtcgaagccttcttcttcacctttcttctctgaaaccacttctcgtctccaagacgaaacagttttcttctccttattccctgactcatccctctcctccgccgctcttcagtcacttcacttagaaatcatcgatttcgtttctccgtttacttctccttacatatggcagcacgagcctttctctctctcaatcgctctctcttcctcttgtgcttgtaccaatactgctatacctcatctccacgggaagctcaagtacggtgacaatctcgaagacgaatggttcgctgtgtttttactttttcgaatctccgccgcgtttctgtctaattcgattcgtgtttgggacactgacggcgagtttctcctaatcgaagctgcttttcatctcccgcgttggcttaatccggagactagtctcaatcgtgtcttcattcgcggtggtgacctccacatagttcccagaagccgtttgcctgatccttctttggttgcgtctctacggtttctaatcgagcgtggtaacgaatctcgtgcgtcggattcagttcaatctgcgttgaagaatcggatatctgattatcctgaaagagcgtggaggaatatgcatcgtgttagggttagggttccggtatcggtagctcaagtgattaggcatgaacctttcttgatctcacttgctgtggaagggttttacgatcgtgatatggattcaatgaaacacgcagcgaagatggagaagtttctgagcaaaggaagagaagagaagcttgtgcttgttcttgtcaagatgtctcgtgctatgtatgggcagctagtgcagcagaagtttcaagcaccgaattgttatccaatgcctagtgtcagtgacagggatgctttctctgaagctgagctagggatgaagatagcttgtggtatggaaatgatgtaccagcagaggaagaaggaaggagaagatgggaaagggattagttggagcaagtataaagacaatcttgagaagtatggttattttgaaggactgctttctggttcgaaggagtataagaggttgatggagaatgctgaggaataccaccagaagagttcttcgttttcgaggactaggtaaa

SEQ ID NO: 49847 - DNA, 1066 bp, Arabidopsis thaliana landsberg
gagaatgcaaggtacaattcgaaagatattttagaaacattgtatttgaaaaaatgtcgatcgtatggtccactacaattatttgaaatgattcaacatcaattcatttatttgatcgttttattgcgttattgtttgacattagcggttctaaaatgaattatagcaaaacaaagttacgatagtgacttatattatgtttttgtttttgagtatttgtaacaaacaagtggtatataattggtgcataagaggcatgacaaatactgacatacggttggttcgaaaaaacccaaaatacacgtagcaaataacaaggaatttaaatacaagttgaaataattaacattgagagatgattaaacttgtattatcttcacgtgaatgatgatcttacttgaatatgtatgtaccttcaagtccaaataaaataatttataatagcaagttgaaattgtttcaacttatttaaatctttgaaacaaattatatatatcgtcgggagaaatgataagtaatcattgaaacccattttgttagtcaatacagtacttaagaatatcattaaacacaaaatcctgcattaaatttataaagttactattttctataaccattaacaaaaaaaaaagttattttctataaacacacaaaattcataaaagcatattcccaaatatatacggcgacgattattataaacagaggccaaatcctatttttagtgatgaatctctaaaaacagtagagagagaaaccttcttcttctttcttcttcttctacaaaatttcacaaaacgagagagaggagagattcaaacaaacgaatcaacaggtgagaaattcgaaatctctgcgagctcgtctcgcccagaatctcgatttctccacctttcctcttcaattcatcttccaaatccctaaaaaaaagactcaaactttttaattttggtccaaaaaagagtcaaactttcttcatcaatggcggagaaaatcacgagagagacgtcgttacctaaagagagaagcagcccacaagctctaattctgggacgatacgaaatgg

SEQ ID NO: 49848 - DNA, 584 bp, Arabidopsis thaliana landsberg
caataggctattctctgaatttgtctccaactctcctgctcgtgatggtagcccgggccatagagtgtgaccctcccctaaggatattgaagccttgattgccccacttcggagtcttcctgaggctgagagccaaactcattttgagatgccagctagcaccgatgatgttgagatggacgtcgtgcttagcttgctagctggggaatcgtctgactctacctgtaccgagccgatggccatcacgactggacaagagtttggcgaggatgtgaagatccataaacccgaaggtgcccgcccaaagcgttcatgccgagtgaaccgcccgactacacctattgaggagaagaagaagaagaggcgacttcggcgactgtcgtgccttgatcaagatgctggtccttctgcgtcgatccttggtgatgttctagtggatgccattgccaaggtcaatgctgaaggttgtgatgatgtgcaggctgctagcggtgtgtttaaagaggatgaagaggaagaagaagaagaaattcactgatccgcaagaacagccgtcactatagaggcagccctcactatagagg

SEQ ID NO: 49849 - DNA, 1216 bp, Arabidopsis thaliana landsberg
aggtatggccacgtgtttaacatccagttgtttagttacccgcatgtgggccgaatctagaagagagcaaaagactcgtgtgtgttcgactctgagtctctgacgcactcatttgtacaaaaagctctcagactacaaaaccaaatcctttccgttgagtttcaagctcactctctctctctccatctgtctcccttttctgttacagccgttagatctctttcatatctctactcttgatccgacggccattatctattgtatcatatcttgtagtgcatgattaaaatgattcaccattgtgtctatttccgtgtggatctcagcaacatatagagttggcaaaaatgttctgaggcaaagttagattgtgcaacaaaaaactagtggtttatttaaggtttagtactatttttaacaaggaggttcgacacacgtatatgttctctaattaaggttttgtttgttcacgtattttaagtagttagcatagatatctatagctaggatactagttggctttattaacttatttttcttgcaaagttgtcatagagatattaataatactatactatactatatgtgtagctatgcattttggtatattttttttcttattcgtggttgatcactaatatttatgaggagcttgctgtatatagaatttaattattaatgtttagataatgtatatatgtgttggatgatcaaaaaaagaaagtgttaattattaaatatttttctgtgttggtattttgataaagagagaaaaaaaaaagggtgaagaatagacgtcaggaagtgaaactgcctcgtgcattaagagatagaggacgtgatcagacgactaaaggtaaaaaagctaagtgagagtcaccgcagagtcatgccatctccatgtcttcacattctacttttcctttatattatctctatttgctgattaacttgtttcttttgttcctttagttacttttatccaaaaaaaactttagttgattgcttccttaatgcaaactcagtgaataattaagatatacatgtgtaacaaattcacaatgacagtattctgcatgtatgagtatatgtttttggctgatacaattacaccaaacatgaatgtgatgtaaattagaagtgcagacaatgatatgcaaaaattgacctctattatcaactaaacgttataatataaacgaatattgttatgttg

SEQ ID NO: 49850 - DNA, 757 bp, Arabidopsis thaliana landsberg
ttcgtaatcatacgttagttttactacaatggaaaaagataccaccctttggcaataattgtatttgaaatcttagtggtaagtagacttacaaatgaagccaagcaaagttcaatcaatctacgatggtgaagggtcattttcattggaggtaaagtaccatattctttgtgtctaaaaaagagtggggaacaatttcaaaaaaaaaaaatgattttatattgttgcaaagatatactattaatttatttattaagcacatatccgagcgtgttgtaaaattatcatataaaatattgctaaagttaaaattatatccgagcgtgttgtaaaatatcatataaaatatcatattaaatattgctaattaaaatattttattcttaattctgtcatcttcattgattgttagatatatttacatattgaagaaagtaaacatagaaagacgacaaacaataattcgtcgccattatgcctttgcgccgctgaggagagcccaaagtccaaaagctttcaatgattgattggtccattatttgattccttcctaatggccgatccattcaatgctgaatgaaatactgaaaacaaatattttgaatttttaatttgaatttaaaggagtttaatgttttttttcttttcttaactgcattgaattttcaatcttttcaagttaccgaaaatttagactcggaacagaaagttcaactgtattactattaccattcttaggcatggttttaatgggtag

SEQ ID NO: 49851 - DNA, 348 bp, Arabidopsis thaliana landsberg
  unsure (1)..(348): unsure at all n locations
nnnnnnnnnnnnnnnnnnnnnnnnnnnnnnnnnnnnnnnnnnnnnnnnnnnnnnnnnnnnnnnnnnnnnnnnnnnnnnnnnnnnnnnnnnnnnnnnnnnnnnnnnnnnnnnnnnnnnnnnnnnnnnnnnnnnnnnnnnnnnnnnnnnnnnnnnnnnnnnnnnnnnnnnnnnnnnnnnnnnnnnnnnnnnnnnnnnnnnnnnnnnnnnnnnnnnagtcacatgtgtatcgaggaggttcagcgccatatgtaaaccattatcatcaatatttctctgatggtctgatagcactgcgtaggatcaagcccaagaatgacggaggattgaattacgtatcgccaaacgaag

SEQ ID NO: 49852 - DNA, 1137 bp, Arabidopsis thaliana landsberg
gatatacatacaagataaacctatatagtttcttttttgtgtatttgaaaagcttatgtaattggttctacatacacgttgttatcaattgtatattctgaatctttaggctttgaatataccaagttttgttagttactatgtgattgttccgacctagtatcaggtaacatacacgataaacgaacattaagtgcaaaatacgcaataaaacgattgaactaagaatgaagatgatgcctactttggatgaacaagggaagcttatgacaaatgcaggtttagtaaattataatagtagggttttcttcagaattgtttcctgtaaattatcattaattggtaccatggaattgagttcagtgtaagtttagggtgagtttaagatgtttcagaagatcaattataatcaatggttgatttgtagaagaagcagagccaaagagaaaattgttacttaaaaacagagtgctctgtttccaaaacagagtcatatgttttttcatggtcgagaacatagtgctatgtttaagtttaagccacacttcaaatcagaattatattcgcaaggatgtaaaatctttagactgcagagaaagttgagaatgaatgttgaggcgatattagggaatatcataaaagtaagttgtttgagatatccttcatttatagtaaacatcttccttaaatgtacaaatacaatcatcactggttgagtcttctccagattataaactctctggaagcaagactataataaggctataaaacaagcagcttatcgcagacgatgatgatgcaacagaggaagcaatgcaagtaaatacaaagatacaaaagatggagtaaacccgttattgatattagaagttaacgttgctcttgaagctctgaccaaaccgccaattagaaggaacaacgttgagagctgctttgatacttccatcactgagttgaactttgaaagatagagattgaccattaaggtaagtattactctgataattagctccccaatttcttgacattgtctcccatttgttgctcttagatcctttgatccaaactttagagatctcaccccctcctgctacgtttgagatgagaacaagctcgaaatagtttctaccgtttatt

SEQ ID NO: 49853 - DNA, 849 bp, Arabidopsis thaliana landsberg
caatctatcatgcctatgccaaatggttattcttatggaaaacaaatccgattctctaatggttccatgggatctgctaaccaaagtctccaagatacgaatagaagcttggtcccaagtgttgcgacaattccaagtgaagccataacatgttcaccggttaccccatttccaacattaaatgggaaacaaaagattaacggtgagtcttcattactctcaccatctccatacattagtaatggtagtactagtacaagaggtgggaagataaatagtgaaatcaccgcggaaaaacaattcgttgacaaaaagcttaggagaaagataaagaaccgagaatccgcagcgagatcacgggcacgaaagcaagtaagaaaatgttatatatatattatctatccatcttgattgattgtgttttatacgtaccaaactgttcatttttgctctctaggctcaaactatggaggttgaagttgaacttgaaaatttaaagaaagactatgaagagctactaaaaaaacatgtagagttgcggaaaagacaaatggaaccagtaatctatttattccaatcttatttcctcaaccgtacatcaattaaaaacttgagaaccttgttctaactttttgtatatctaaataatacgtgaagggaatgattagccttcaagaacgaccggagagaaagctgaggagaacgaaatcggacatcaagtgaatcaatgaaacccgagttggaagatgatgagtttattttgttcatcatgttctgttttcgtataattttgaccaaataagctatttattagtcagtttgacatcttattctttaacccatttgttt

SEQ ID NO: 49854 - DNA, 1085 bp, Arabidopsis thaliana landsberg
ttttgatgtgatttcaagatggggatattttttctgtatcatgtcatctgattgaataaaaataaaagatttggaaagagaaaaatcttaaccggtgatcctaatttttttaaactgacttttttttaataatttatttatcccttgtgtattagtttatacatctttaccagaaacaaaactgtatctaaatcattattaatttttcataagcatttggaaatattgttaattatatatattttttatataacatgtggtatcgaaaacacgtataagttgggcatcgaaaaaagagccactagtcccatatgaattttggttaaaataaaacaatgtaagccaaataaatttgtaatagattataatcataaaaattggtttaacttttcgtgttcacatatgttaatgaaagcaaacaaaaatcctacgaacgctagaagataagagtaattagttaaaggctcttttgaatcccgatcgaaaatatatttgatcatcaatgttggaagggatcaataatgagaatgtgactacaataaaagttacatataaacagaataattaaccatcaggagcatgatggataatcaaagatgccaaagagatctacgaattatctgctagttctaagctaaatcaagaagcatctctgttagaagctgaaggtataaagcctgttaaaatctattgaattcaacactttgggatcgagatacgtaactattattgtcacaatccaatgaatagagagagtgtagaagtgataaattgagtgagtaaatactaaatagtactacgaagaaagctatattatgataatctaaaaacgaggaccatatagtataaagttacagagaaataaagctcaagagagcagcgtgttgtgtcatttactgaatgttttcgtataaagaagaagctcactagaattgtttccttctttataggtcaaaattccatgttagttaaacaccaaaaccaacggttaatgttttcagtatattacgtacttgctaaacagagagcatggtgaaatctagtataagaattctttttacagacaaatttgacaataacatctt

SEQ ID NO: 49855 - DNA, 546 bp, Arabidopsis thaliana landsberg
aagatgtgttcgttcatgtatagtcattttgttttatgttttattaataatacttatacaagtatatgtatattcacgaagttaaggtatatctaagtttagtggttaatatttttagattcaacatatttggtaatatctcttttatatatgtaaaaaaataagttggtataatagagatcaaataccaaaggaaataaatattgagatggttagtggaggtacaaacgcatgcgcggaatctatgagcagagatggctttgatacttaacaataaataaaccactaatgctgatgcaatgcaaatgggtttagtcatttcaattttaaaaagtgtaaggccaaaacgtaacaagtaaaatattgtttatattttgtttgttcatatatatcatttttctagttgggatgccaataaatgaaacactagataatataacaaaaaatagtttataatgaccaaatttggctggattcacacattgaagagtacatttcaagttattagaccccatttgtttataaactaaaaaaattatagttatt

SEQ ID NO: 49856 - DNA, 1217 bp, Arabidopsis thaliana landsberg
  unsure (1)..(1217): unsure at all n locations
atttcgatcttacttagccacagctgatttttgaagggcccatgaagattcagaaaagatacttacctgttacttgaagaccaatcgatctccgctcaatggtttagtggctctgtaagtggagagggaccctcagccatgtgccattatcactagtctttgaagctttcggctatagttaagatgctcagtggcctcctcctgcattaagggtttggcctgcaataaaagttttgatcataacaagacttaaagtacagtttctgaatcgactgctcaacttttcccctgaaatctatctgatatctatgcttttttaacaacttctaggggccggccaactttttctgcaacagcattatggaagactgttacagatagcatggattaaaattccactaacaatgcttttaacatgggaagaaaactgaaagtctttcctctgaaaaaactaaacatctatttcaaacagttgcttacactattgtttcagcatgtccaaacattcacctgagtccttcaccaatacaaggtatccgtgcaatgtgccagcttgtgctcagaaaattcctggagaatgaaatctgaataagctgtaaagggaatcaaagcatcacaatatatcattaagtttatcacatcagtttttgtaacaagtcctncctgcagcagtttcacagggaagaagctgcgaaaattggaactgaaatctatgaagcacaagtgtcaagctaaatttttttgtttactagaagttacttcacaaatagggtacattgagcatgaaagactacgtagttgatagaaatctttagattgttgtggtacaccatcaaagaacccaagatctagctacgtacatactcgcattcacaaaataaatcctgcttttggagctaactaaaaggtcaggtagtctttttggacttgtcagcttcatctgctggggcttcagactctgctttattctgcataacttgctgcagaccctcatggtaacctttaataaagcttgtaagagcatctttataattagaagctcgtgtcatgtaaagacgatgtaaagcaggccttaaagtctccatgccacctcttgcagctaccgctgtatagaagagtaacagaacaaagaatgaaaaacaagcgattatgaatgaaaggatagacatagatcatacatgatgaagtcaataaactaatgcatgctgcagtgaata

SEQ ID NO: 49857 - DNA, 1178 bp, Arabidopsis thaliana landsberg
tctccttgtttcgtattgtttacatattttttaaaatttttattttatattttcagtttcatctagatatggtttgattgatataggaactattattttgatttttgcggcgattaatcttctaacgaaagacgctggtaaatgataattgattttatatagaaaggtatgtggttgaattgtttctagagcttaatattttaaaagaatctatgatttcaagtgaattatattttttaaacatagaaatattaaatagaattttcgtttttgttagtctggtataaataggaagatgcacgataatttaaatttaagcagtgttcctacaaatgtgtttgctttcgttcaaatctatggataatcgatagattagcatataaaatgctacacaaaattaaaaaacgtcgaccgttggaccgataatgcaaatttaataacaacaaaacgcgtacagtgtctattttaagtccaccaggttccgttgtaccaatacaaaattatatctccatataacaattggcagtattagtaaatccaatagaccaataccatctcacatgaataatcaattttctcaagcattgccccaaaattagaatctttcaaataacccaactattaaaagttaacaaagtatacatttttttggtcttcttacgaatttataaaactgttaacaatgtttcgagttgtattattttataatatgctctaagttaactgggacaaatttgcttccacggttgtttccggtttgatttctacttttttactttaaaaaacacacaataaaaccagatatggcgaaacatttgtgacgtggcttttgtgatttgttcacaatgccgtaggcgcatattagcattagcatcgcgtcttcatttgaaaatgcctgtggttaactgacgtgtcgtcgggataaagtccaaagtattttacaaattgagtattctagtctttcaagctcacgttttaccccctattgctcttgtttatgatattacgatccgtatttgtttgaatatcttgtaaatttccttttcggtaattttttggtttaaattttaaaaattaatagaattatagaatataaaccaaaaaattacccgaaagattaccgaaactaccgaatttattttatagattataaacccaagaaataaatttttggattt

SEQ ID NO: 49858 - DNA, 895 bp, Arabidopsis thaliana landsberg
taaattttatcaagtatatgaaaaaatcaagacgttttttttttctctttttttcctgtcaacgatgtccattggaccttctctctcagtcttttgctaagaggtggaacttaacatttattacactatgcgataatgtattgcaaattaaatgtcttttcagtattctaacatagaagaaaataatgatcgagattcattagttttgtaatcgaactctcgtgtttagaacaccacttattttaacagatttgagcccttaaattaatgggttttacaaattttttcccccttcctcaaacgttgaatatgaactatatttagaaaactattgttatacataattgctttcaacgtttagaatacttttaattatttaaccatacattagttggttaattaattaacagcatttaatattaattcgcacacatattccctcctctatgctactacttgatcttggtagtaccaagctatatatattaaagaaattgaaattcttaccaaagtttccccacttgtttgataggtattagtattaattatccacttttactgtaccagctagaagggggtcggacataagtaagaataatttagacgataagaacgaataatcaacgataactattttcttaggatactaaatgaatattttagtgtattaattttttattttacgatcatcttatggttgtctaatgtgtatgtaaggtataagtatgtgcatatctaaatccatttgtgtgcacgcattattcgatgatctaaacaggttagtattttaattatttacagtttgcacgaaaggattcatgtgaaagcttataaaatatgcagacggacaaacaataagaattgaaaatgagtttagcactttcgattgagatat

SEQ ID NO: 49859 - DNA, 1207 bp, Arabidopsis thaliana landsberg
catttcttaataacattcacacgttttcattgaaaatttcctctataattatattgaatgtggcacataataagaaacctaattggtgatttattttactagtaaatttctggtgatgggctttctactacaaagctctcggaaaatcttggaccaaatccatattccatgacttcgattgttaaccctctcagttttcacaaacatactatcaatatcattgcaacggaaaaggtacaagtaaaacattcaatccgatagggaagtgatgtaggaggttgggaagacaggcccagaaagagatttatctgacttgttttgtgtatagttttcaatgttcataaaggaagatggagacttgagaagttttttttggactttgtttagctttgttgggcgtttttttttttttgatcaataactttgttgggcttatgatttgtaatattttcgtggactctttagtttatttagacgtgctaactttgttgggcttatgacttgttgtaacatattgtaacagatgacttgatgtgcgactaatctttacacattaaacatagttctgttttttgaaagttcttattttcatttttatttgaatgttatatatttttctatatttatatttctagtaaaaggcaaattttgcttttaaatgaaaaaaaatatatattccacagtttcacctaatcttatgcatttagcagtacaaattcaaaaatttcccatttttattcatgaatcataccattatatattaactaaatccaaggtaaaaaaaaggtatgaaagctctatagtaagtaaaatataaattccccataaggaaagggccaagtccaccaggcaagtaaaatgagcaagcaccactccaccatcacacaatttcactcatagataacgataagattcatggaattatcttccacgtggcattattccagcggttcaagccgataagggtctcaacacctctccttaggcctttgtggccgttaccaagtaaaattaacctcacacatatccacactcaaaatccaacggtgtagatcctagtccacttgaatctcatgtatcctagaccctccgatcactccaaagcttgttctcattgttgttatcattatatataggatgaccaaagcactagaccaaacctcagtcacacatagagtaaagaagaacaatggctttctctatgctc

SEQ ID NO: 49860 - DNA, 1151 bp, Arabidopsis thaliana landsberg
aataaagcagttttcctatttgccatgggatgatcattgaggtgatcccaattacaacactcttagttcctgactttttcatgattccaacatctgtagtcactccccttagaacccaatctaggacaaaagcaaatgcgcctatagtatcagcaccctttgtcatatactggttataatggataaatatatgctttaaacatggtatttgcatagatccaaacatctcacttaagactgctccgaccttcaagaacaagaaaagaaaatgtgttatattattcgaacatccccagtgacatgcggatatttgaaacccgtaattacgtacaagcatcatggaggtgaacttggggataggaacacctaacttcttgaacaacatatcaaataaacgccataataggaatatggagagaataatgatctccaattgtggaagagggtactcccaaaaatccattcccttagatccggaagccattttctctgcaacgccatgtgagttcaacattatatgtggacttacatcgcaaaacatcttcgtccccatctctgctcttttctcatcgttgttccacatgaactctttgcgccaagtcgcattttctgcatccatttgggacaaatcttgtctacgtaaaaccaaaaagaacaaaaaaaaaaattgacaatgaaaagattttgcagtcaaaaaaagaactaaaattaaaaccggtctgatggtttcacacagatcccaaaggatctctaaaattaggataagggtataaatatagggattgtctcgtccaggtgttgtctttgtttttggcgcttgtaagttgtattactttaaaataaaatgacctctttaggcagtctaaataaacgctttacccatttttaataagatgatccattaattaagacctcaaattcaatcttttatcaaagggaacagagcagagtactctgttaggtaccaaaatctctttttgttgagaaaaacagagtattttgctctgttccctctgatatctctaacacatactaaacttaattataacgtgacaaagtgtgtatgttaaacagaccctgttactacaagagaatatatatttttgaattgtgataacaaaaggcagcttatagttggaaggcggttatca

SEQ ID NO: 49861 - DNA, 752 bp, Arabidopsis thaliana landsberg
ggccacgcgtaacttacggtctataattattttagaccgagagtctgaatatgtttaactaattagatctttcctactgtcgattttaatatgacatggtcttctcttttaagaatttaaattaccgaaaattgatcttcaatccgttttacatggacttctctatgatgatatttgaacaatatgtctgtactacaacaaacatagttaaagatatttgtaacatctatttaggctatcgtaattcgtaactggttttgttatataagacattttcaatgagtttattatatatgcttttgcataaagttacaaacactatatatgcttgagtcatggtttgcttcgtgactcgtcgtcgtcgatcgcataaattatctttgaggtttaaataaaaaatgaaagaaaatgagcgccgtcatgttatccaccggagaaagtaaaacggagccacgtcaacagttacggagcaaagtcgccgacagttgtaacgtcaagcttaatcagccgtcttcattttgaacataacgtaataaaacaaccaaacactcttttttcctctttaacaacaaaagaggcgtcagtgcttacgtggcttttcacacgttctgattttcaacattttgtaaatcattattactaaatgaccaatagcatttattcttttgtttttgttttacatttttagttgggatattttaatcaactagtatgataaagtttattcgccccccacgacttattattaaatt

SEQ ID NO: 49862 - DNA, 618 bp, Arabidopsis thaliana landsberg
  unsure (1)..(618): unsure at all n locations
ccggccaaatttaggataaaaattcaaaacagtaatttgattaaaagttaaaaaaaatcaacggcgtcttttatgtataggtgcgtgcgtgcgtgcacgtgctagtgctactactggtgcgttaaacatttttggcactctagaaaaaaaccaccgacatagagctagtacctagcacgtatacaaaagaaaaataaaatggacgacgaacaaaaaatattcgacaagaaatctatttgtggccacaccccaaccagggccaccacccacgaccaggccaccacttcgccatcgccacggctccacccacgtctcggcttttgcttgcttgcttcctcctctnnnnnnnnnnnnnnnnnnnnnnnnnnnnnnnnnnnnnnnnnnnnnnnnnnnncgggatcgcgccccccatctgacgccaccggcgccggagccacacggcgaccgcgcgcctcatgctccgatctaaaaggtgcgccttcttaccgagattcggcgagcttcagtagcaaggaacgagggacatcggggcagtggttagattggcttgcctgggagggatcggagctggacctgcattttgcgtggtaagtgggaacgtctccgttgtccgtgtga

SEQ ID NO: 49863 - DNA, 217 bp, Arabidopsis thaliana landsberg
  unsure (1)..(217): unsure at all n locations
ctagccttatcatgggttctaaacttcataagactattcgttcctggatggtacgcaacgtgtgccctgttactcatcatgttgtgtagcatcgcgtgtttattggccgggttggatatgtgggagttggtcctatgctctaccggtgttcccgtgaccaccnnnnnnnnnnnnnnnnntaatatgcggatcgtgcacttaactccatatcctcagg

SEQ ID NO: 49864 - DNA, 1120 bp, Arabidopsis thaliana landsberg
ttaaaaacatgattctcaataacatctatacgcaacgtttgagttagtgggtcataagttgaaaacgttccattgtgatatgggccgaaatccatgtaaatgatggaccaaactcttttacttatttgattttgttgttttgtatttatagtaataatgaattttgtatttatttggagtgataatcgtttgtgtacaatcattgtttgagagaaaaaaaaaattgtcgaaggaaaaacatttacttcattattggtagatcgacgattcagtggcaaatatcattgagaatcagatgatctcatcttctctcattattccgattcacaaattgttagttctaaaaggaggtaagctttttgttgcatcagatttatgtttttagttcttttaatttcgtcgattcaatttcttaattttgattctattacttaaatctggatctttgtcaattttgttgaataacccagaatactttgggcaagtatagattttctttgaccatgttagctaaagcatcaatctgtttgtatagattttcagtgtacgaacacacaattttttcaattggtaatctatattgcaatttacagtagattttcaaactttgaaatattcctaagtagttttgtttgtataatatattcagattatgactaacactatgatgacttgccaaaaaaaagaggaaccacgaagataagttgtttaacgccttgttaattctgcataaaaatttattttccatatttgatatattatataatacaaaggtcatgtctgcaggtgaggtattatttggagtctaattcttatggaggtatatataaacattgctttacaaagcgtcagatgttcttaaatatgtaacactgatgaccgtaagttcaatatttgcaggccaagcatcatttggcggttgaattcttttggaggaggttgatatgttgttgtctttgaagcttcttccagaaaaactataagagagaggctagtctgatgtcaaggaatacagttttgttagttgataaccatagatacgtactgatatgtgtttgggaattatgataagtatctgaacgtgatagaagtttcatgtttaaaacattatgtagtaaca

SEQ ID NO: 49865 - DNA, 587 bp, Arabidopsis thaliana landsberg
aattgatatcctttgagtagtagaagacttcaagtgatccagaaccttaagtgatcatcaactcaagagatcaactctctcctaaaataagttcatgcaagtgatgtcaaggatttttatcatgcatatggtgtccatcaaaaacttattgagtactttcaagttggtataatattcacaagtacattttcccagagccttagaacaacccttttatggtaattaatgacaaagggggagaagttggaacaaagatatgtaaatgtgcaagttggaacaaagatatggaaatatgcacaagagacaattggacatgaactcagggggagctattgatcaattgagttagaatgaatacgaatggatcaagagcaaagtatactggtatgatattttattgaacacgagatgcacacaagtagggggagcaagctcgtgaatatatgtatgatgcatttgtttgtgactacatttcttgcttgcatcacatttgtcttatatcctacatacttgtgtgtaagtgtttgctagaactaagacttggatgatgattgattcagtgatatttataagactagtcttagtgt

SEQ ID NO: 49866 - DNA, 427 bp, Arabidopsis thaliana landsberg
aatgaacaaagtttttgtccagcatgttgttgaactagtctacagtgtgttgctttttccattgaaagaaggtaaatcaatctgcgaatttgtaataaacaaaatgttcactttatttgactgctaaagttgtacaaaagcaccacataatatttcatctattgaagggaatggctcgcgcctcctcgggtcctgcgcgcgacccttcgtctcccgcgcgcgacccctccactgcccacagcaccgcgcctcccaacggtccggttgcctaccacccaactccggccgccgtacactccataaacggcggcgccgcagcccccctccgcccggaatcgtcaacctccgccacccaggcacgttcggttggccgccatcccgctccggccaccatccacaccatatacggcgccgccactgcatctct

SEQ ID NO: 49867 - DNA, 402 bp, Arabidopsis thaliana landsberg
ttaaatcaagagttgagatccttacacactcacagtggtacttatatatcctagtccatctaaatgtaactatatatgctcttgttactaaatgtttcttctttttaggcatttgctaggtgaagagctatccgagatggatgtgaatgagcttgagcatctcgaacgccaagtagatgcatcactaagacaaataagatctaccaaggtatatttctaagcttacaaaatcgacaaattttgtttcgaatctttcatcctaaatcgttgtttcgttttcattgccaggctcggtctatgcttgatcaactatctgacctcaaaactaaggtacatactttatataataaaagttacacaatatccaaatacaacactctctcattttctcaatttacagga

SEQ ID NO: 49868 - DNA, 767 bp, Arabidopsis thaliana landsberg
aaaacaaaaccctctctaagatctcggtgactatttttttagtttctcataacacataaagataaaaaagaaagaaaaaaaagttatcaactggtgaatgaataaacaagtagcagagcgacaccaccaatatggctaaaacctctgcctagccaggaatcttttctgacggcgctctaaaagaaaagtaccacaaagttcacaccccgtaaagttagggagcttatggtattccggttgatgtatagccatcataacataaagccagcatcttgccatgtaacctctacaaagatctaaggccttatcttaaatataaagcaaatatttaaaaatatgtaaaataataaaaatattcaaaataaaccaatccaaaaataatctaaatatttgaaaatatattcaaagcaaaatactcgaataaaaaaaaaattaaactgaaaaaatcggaaaaacgacatctcgaggataaagtaaatcgaactcttaacccgaggggaaacaggaaactgaaatcaaaaatcaaaaatcaaaatccctaaaagcttcttgactcgtttatcctctactacaatggcgaaaaccctagacaaatctaagaagcgcaaactcgtgaaatccaaatccacgaatttcgataagaaacagaagattaacaaacaacaacaacaaccagaatcctcaacgccatattcaagttcaagctccagctctgattctagcgattccgaatcagacaacgaattcgacccagaagagctccgtga

SEQ ID NO: 49869 - DNA, 182 bp, Arabidopsis thaliana landsberg
agatacgagcggcgcagagctccgcggtggtgctcaccgatgagcacagacataacctaatgccccgtgctccacatgctcaatatccgatgcaaaaccaagaggaagtgatggcaaaaagggacatgatacctcactgacgatggaggcggcagagcggccacctccggtagcacgcggat

SEQ ID NO: 49870 - DNA, 1393 bp, Arabidopsis thaliana landsberg
tagtcataaggctacaagtagaacctaacgactagaagataagccaccgaatccgaaactcatcatcgtccaccgccgtcgttttcctagctccgatgacttatttattctcttaaataacagatatacacagaatgggccgtttttcatattcatctttgtttcgatatatttatgaatgggctattttgacccaataattagccctttaacgttcaaaaggcccatacatattccgagattattcgttttagtatgtggctattacagatgtaccccttctattttttgtttataaatcattgcacgtgttttgaatatttttcgtaattacatgtgttcccctatattttggctcattacataaatttctcatagttttgattatgcattagtactaagattgtttcagctattttctctaagtttttttggttactcatccaaaggattgacttgatttttctcaaaacgagttttctcttgtcataaattatataatcttcccaacaaccgtgagagagctctacatccatcgtatggctcaaaaggtaaacttgtgagctggaaatgattgagtgcaataagagagaaactcaatgataagggatggactggtgaactgaatttgccaaaacatgactatatcataaaagcgtttggcgtgtgcacaaaaacgtggcaagattttcaatctgaaaacatgaattcaaaggtatgcagatgtgatcccggactgaaccgactgttctaagaagcttgtgtcatctgaaagacaaggaggagggtacacttgacccgaactagaaccataagcttcccaacagaaagactctgtgaaaccatcaccgtttgatggttcaagatcaatgtcttgtagaagtatgttgcgacatggtgaactatcgctgcaagagatcttgattgcttcctttgatgctgaggtgcccctcacgtgaacaaatgagatgttctcaatgctaatagctgatgtctgcagtttttgagttttagacaatttttcaggttcaatattgagctacaaaagaaagatttggcacaagttctttacctgattcgcacacggcttcctagaatcgcagtaatactgatcgatgatgatggggtttgacacattgttcatcttgatgtccctaaagataatttttgagaccaaaccactccctccctggttgaaagaaagagggagcaagcaagttaagttcttttcatctcagaacgtaaatgggaactttgataagatggaatcacctgccatgttttgatccgaacaccattcgcagtgtcagaaaagatggccgtatcaactgttatgtctctaacttcttcccaaaattttgaatttcctaggcttccaatgctacaacaacaa

SEQ ID NO: 49871 - DNA, 642 bp, Arabidopsis thaliana landsberg
aaatcggaacccaacgaatttaagcagagatttatctgtgttttaaccttattttttccagtaattaaataaagatactattaattaacgaaaattgaaaacgagtctctgtcaaaagctgcggaataaggaagacacaccgttgaagcactcgtcgtacaaaggttccttttttcttttctcttctccttcgctttagggtttgattcttccttctccaccactccttaatttctgccaattgcgaaaaagaacctgtctttctcgtcttgttgtttcaaaaccctaattttcttactgttttctctgttcagtctctggttctgtacggagacgacaaaggtactgttttttttttgtttttttttgttactttatttggtctttctctgtttgtgggttttctccggctcggaatttgtaaaaaggagaaagctttatcgatttaaaaggtgattaactgattttgctttgttgggtttgtctcttttgtagactctctgttccgtggagttgaagaaattgaacggaatggaggaaattaagttggcaaacgagataaggctttgtgatgtgaaggcaaataatattccgtagacaatggatatgattaagactcaagcctctgatgtacttatcttg

SEQ ID NO: 49872 - DNA, 1212 bp, Arabidopsis thaliana landsberg
acacactaaaaagaacaatttcccctgaatctttctattaagcaaagcattgaactttacaagcaaatgagcacacacaaacagattcaagagataaccatctaaatatttctattcaaattaaacaaagttggaagctttctgaggttaaatcctactctgcctgaagatccatttactaaaagacgtaatcaaaacaggggaagaagaagctcaccaattcctgggtctgtatcgataatgagcttctcatgcttacccaaaacgtcaccgtttgagatcccaccattacaattctccataccacaatccatctcgacaaagataattaaacgttttctcagcgaaattaaaaccccttgaaactctcagctcctttccagatttatagatacgtatcagatcaaaaaggtctaagctttttttcggaatcctttaggagaaaaaatagctcaaaaacctcaactttatataaaaagcagaatcgaagtggattagttgtgaaataataaacaagatatatggaaagaagacgacgaattgctgagtcgtccagccacaattttcttattttttgttttccctctttttgcgatgacagatgtatatataaaaataatctaaccttattttaacccacatttataagttaaccaatcatgctaaaattatctttcacgataaaccctttcttaaattgaattatctacaaattttccttagaaataaggaattgattactaggctttttatataatgacataatttataaggtgaaaaaggattttcatgtgtttttttcttgattaaaatgtaactttcgtgggattaagacggtttggtgaagcaaataataaaattaaggatcccacagaataatacagtaactagaatatatgtaaaacaattattagattgggaaattgggaggaaggaacctgttacgtcacatgttcccaactacaacagttgtggattgaatatgtcaccaacgacgcattttgactagacgtttatttcgttcacgcatgcgttaaccactttttcattcaaagcttacattttacttatacgtaacataaaaagcccaaattatagtgggcctaaaataaaatcggtactaacagcaattacgcttcttttatttttcttcttctcgagtcaatataatataaaaacctatcatcatgctgcttcattagaaagttattt

SEQ ID NO: 49873 - DNA, 630 bp, Arabidopsis thaliana landsberg
ttcactatccacaatagaatcacaaaattcaactgtataattccatatggattaacaattgttccttgtttcttgacagggttaagcaaatatcatgtgttccaaaataatcaaaattacaccaaatcacttcaatcatatctaaaaacaacaaatccattctaaattacacacctaaacctaaacgtaattagattttgctaactcctttccattactcaaaagtcagaatttcaattatgcactcaaaattctatatacggtaaaaacaataaacacgacaacataatcatgtacgacaatggaagaacatgcgatcatataccaaaatagaaagaaaaccagtttctgtcctgtctgactaattggcgacaacaccaaattcagaatccgataaacacaaaactcagaaagcgatcgatcaccattagtaaacggattctatcttcacaatgtttggatcttcttcagctttggaatccagaaatggtccacgctttctcgaaattactgcacgaaaacggcaaaatcggtagctcaaaagaataaagctcaaaaattttgtaactctctcttgtgacgaaaattgtcattactacgttatcaaaccaaggcccattacaggcctac

SEQ ID NO: 49874 - DNA, 942 bp, Arabidopsis thaliana landsberg
gcaagtttcaacatttttaatgttctatggacatttgttgtattctaaagctttcttttttacttattgggtcactgtttatcacagatagctttgagatattattggtctgtgtatcattgagcctagttactgcttcattaactcatgtttcggttctttatatattttaatgaaatatttaatgacatagtgagcgatgttctctgtctcttgcagcattttacatttagtactattctccaaagatttcgtttcttagattttctgaaatcttttgtctaagtcttaaatacttgtcttctttggtaatgcagtttcatagaaacccaatggacaacaacaacaacaacacttttagttctctggataatgtcatgactaaccaaaatcctcttctcatggattttataccttcaagagaagattcaacttcattctcaacaatgcttccatggaataccatcagatcagatcctctacaaatgggtggctttgatattttcaattctatgctgactaacaaatacttatcatcttctccacggtctatcgatgttcaagataaccgcaatgttgagttcatggctcctcctcctcatcctcctccacttcatcctttggatcatttaagacactatgatgattcctcaaacaacatgtggggttttgaagcaaatagtgagtttcaggcattttcaggtgtagttggtccaagtgaaccaatgatgtctacattcggtgaagaagatttcccgtttctaatttcgaataaaagaaacaatgagctttcattgagtcttgcatcagatgtttctgatgaatgctcggagataagtctttgtgcagctacaagattagcctcagagcaagctttttgcagcagcaaagacatttctaataacgtgttactcaaggtttctctcaacttatatttggctc

SEQ ID NO: 49875 - DNA, 903 bp, Arabidopsis thaliana landsberg
aggcttttaggttaatatctcaagttgcttaggatgctcttaaaaatccacagttttttaaaaattggggaatcatttgataattattcctttgcataatattgaaaattaagagttgaaaagaagagaagctgagtatttggactctttctatatatggactatggtctatggaggctcttctccttaataaccgaaagttttatcagttttgaatttcttttcccaaaattcgacagtcttccactaaactttgtatataagatggctggtcaagtagtctcacgaatgttttctttttgaaattcaaattgagtaatgtggcatctaaaacgagaattaccaattaaagattatcatgagaccttttaaaaacattcattgtacttgaaattaggtgtatataaactttgatcatttaaaccccttggtctaaaattgcataacattgctccggttttgagttttgactatcattctatgaatttctttaaccgtcaacagttttttgtttacacaatttttgtgtaattcgatgacgttgtaaattttttagactttgcatattcatttacgatatcaaatcatcgaataataggtgaatgttatttctgcaaggtactaataattaaatccaaagaggaaaacataacacgtgaacataattctttttattaattatatgcatatattaattcccaagaatatgattacctaatatgctataaagtttaaaataaataaccaatctcattatagacgaacatatatacattaatcatatcttttaactcgaactattttgtttgagttgatcatggatttactgccaccgttttcttttcattttaatttttttaaaattctctataccttataacaaaatataaaaaaaaaatattt

SEQ ID NO: 49876 - DNA, 1000 bp, Arabidopsis thaliana landsberg
tataccaccattcatcaatataacttctatgttacgtttcctttcataaagatatgtgaaaacgaagttcctgtagatgaatgattaagttaagaaatttattcgctatatctataaattcatctgatcaacattgttgtctacgcaattgttgttcattaaatctttacggtcacaaaaataacaacctcatgatatgttagaaaaactttaatcatacacttgcaaaaaaaagtgaagcaaaatctaccataaatatgcaattgtgcagtggtcttctcctcttaattgtgtttgaagtacgtatattcgaaactttatttcgattataatttttcgtacgattctttataagtaaagcaaaataatgatggattgaagaatcttgaaaatggaaagaaatggacgagaggcttttgaccatttgtatggccagaataacaacactcactaccaaatacaataacgtgattttgtttaatagattagatgcggtaggaatatattattcttcgtgaactaaaaccatgttttataacgacaaaaaaaaacccatgttttataagtttatgggccaaaattgggcttttgtattataaacatgtttacggaagtattcagctaagtatatataaaaaaaaacaattacactaatttatttaaattttattattacctacttacaattagtaaaatttaaaattaacaaaaaaaagacttttacttacttttagttattgttttaagaaaaacatcattaattaccctacttttttttttaatactaggaggttctaagccaaaacatcttaattattatatgtttatatgtctaataatatccataaatgtattaaaaaaacttaaaacataaactaaagggtaatagatcataatattattgaatggagtaagaaaatgtataaattataattcaaaaagagaactataatctgcttttctacccaaatgaagtaaaataagacatcaatttgcttta

SEQ ID NO: 49877 - DNA, 712 bp, Arabidopsis thaliana landsberg
aaaaaataaccgacggcctatccatttcgcctctagtgatccacttgaacataaattcaaacgcataaaaggctaacttgctattatcctcttgaattgcaacttctgcaatatagttacacagtatccagctagggcaaagagacttgttccgatcaacagcctgcaaaacaaaaatacacatataattgataaacgagactgcaaaagcttcaaatgtcaatagaagataacaaaaaactcatctgtaccttacacctctcgatgatggagaccagtgtatctgtcctacctttggctacacaactacgaacacattcagtaaagacactggtagataacatataaccagatttcagtgccgtgtccataactttcatggcttcgtcattcttcccaactccaaaatgcattccaataaccaaatcatatgattcatcatccggaagagagtccttccccaagaggagcatcctgaccaaattacatcaagtcatgatacattttgaaaagatctacatttacatgacaacagtatcagtagctgctatgcagagataacctttgattcatcagcaaaccttaccgttcaatcatgtaaagtcttaatctttacactatttctagaagcattgttcattgtacaaaaaaggaatctatctacgaactcagagaatctaaccgttcaagcagcttcatggcggcttcagtc

SEQ ID NO: 49878 - DNA, 826 bp, Arabidopsis thaliana landsberg
aaaaatgttttcaattttcttttttcgttaatttatggaaaaaacagtggccgttaaaaacaaatatagattttatatagctgttgccgacaaaaaacatttccactatattaaaaaaaaagtagaatacaagatagaatgcgattttaatacacgaaaccgataaaagttgaaacttttttataactaagctggtgaaaactaagtcttaaaaagaagcaaagtaagagaaaaatgaagtaaatgacaaaagaatctaataagtaaatcttaaattcaaaaccatcaaaacccgcaaacaatctcatagaaacagttggcgtcgaacctgaacaaaaaaatataagcttaaaagaacaaacaaacagacaatttccaatataccataaccatagaaaacttaaaccgaaagctcaactagtcacaaccgagtagaactgagagaatgaataatccaaagacattatcctgcaaagatataaaaaatgactacttctagttagaaaatctcataagaaatttgagtctctttggttgattaaaaaaatcacataattttttatataatatacctttgtcttagtaatacaacgaacaatatagtatttgaccttcattgagacatagccaacgatttggtcaccaaaacaccatatgaagcaatgacatccctatggaatatggatctgcctctcctttcctcaattacacatgtgataatccccaattgggatctacaaccaaacaaattacccatcttgattgtggcaaacctttaccaaaaatgatcaataactccaaaaccatcctcattctcattcttatg

SEQ ID NO: 49879 - DNA, 783 bp, Arabidopsis thaliana landsberg
aaaccaaacaatcctatttcgcgtattatataatcctagctacatttaagtaatataaacttagttaaatctaaataaccaaatgatgaagatactactttcatatgtaatctttgcaaacgatagatacaaacaattatacaagtggatatttgaattgggattatgattatcttttattaattaatccaatcttatgacgaacttatagcttatattgccgtggaccgaccgaccagtttttcagattattgatttggtcacaagaccaacccctacgtatacatgtattgtccccattatacgaccagacttgtcataaaccacacttaacagttaacaccacctaagattaaaaagtccactttctctgaatcttccccatatttatgtaatttcgtaaaagattttgtttaaaaaggtgttaatgagttatatatcttaaaactgatttgcgattttggaagtatattgattttcagttaggctagagtgtgtatttttataattttttcaaatgttcaaatttattgatttattataaacttagaaaccggatgcaaatgatctcctccgatttccggtttgtctgttttttcgtatcaatttttctggtacaattcggttctaaagcgttgcataataaaatccccagtcagacgtcagctaaccgagcaacataatgggcccttttaatatctcagcccattagtttcaatcaaaaacccaataaagtagtttcttaacagtcttttaagaagaagaatataaccgataaatcga

SEQ ID NO: 49880 - DNA, 303 bp, Arabidopsis thaliana landsberg
ctctacggtacaacccttttataacacttcctcctggcagttgttttccggtccagaagtcataccaattaatttttttaggtaaataaacatcttttgtaatctctcccttttcagttacgggagcaaccagtatggaggagccaaacaaatatgaatcactaattttggccaccctgggatctgatttaaaatcactttgcagtggtcgcataaacgaaccgccattactcgttactttccaggctgtggcatagatgtaaggtaataaatgataacgaagtgtaatgtattttttccagt

SEQ ID NO: 49881 - DNA, 611 bp, Arabidopsis thaliana landsberg
aatctcgaaactaagataatggaggccctttaaagaaataggcccaatatgatacatgttataaaaaaacaaaaaaacaaatgacacgtgtaccctagaatctctaactttcatctccttcctctctctttcccccaaatttcagccgccgcggcaatgttttctcaggcgacgcctaaatctacagccacctgaaaattcctccgtaatctcaatcaccgaaccatgtttctcaatttcgacattgaatcaaaaaagacgaaacaatccttgtttctcgacgaagacatctgtgaagaagaagagctacaaagactttaattttttctttctgagcaagtatggattcatcatcgacgaaatcgaagatctcacattcacgcaagacgaacaaaaagtcaaacaagaagcacgaatcaaatgggaaacaacaacaacaacaagacgtcgatggtggtggtgggtgtttgagatcatcatggatctgcaagaatgcatcgtgtagagctaatgtgcctaaagaagattccttttgcaaaaaatgttcttgttgtgtttgtcataatttcgatgaaaacaaggatcctagtctttggttagtttgtgagcct

SEQ ID NO: 49882 - DNA, 514 bp, Arabidopsis thaliana landsberg
ttgttcggcccaagaaggcccatgtataagaaacaccattttttttttctttcatatctagaaattcaagcccaaaaatcttatattttctaaaaacgggattcacactagaaaaaatccctttcaacatgcttcgaacctagcaccttcacttgagagatttaccactacctcattggtaacaccactatatttttaaactcgagtttcttaacaaaactcattatgtttctatcagttgattaagaaatgaagagagaaaaaattctgaatttttattttttattaattaaatcagatagctagaatgttgatcatgtaatatggattcaaacattttctaaatcaatccagattgaacttttttctttaatcaactttatggtggtgtatatagttaattaaaaacattttctatatttctatataccaaagtaatttggttaagcttaatgtgtttgtacttcgtagtttgtacacgtgctgatataattatatattggtcacctgcaat

SEQ ID NO: 49883 - DNA, 460 bp, Arabidopsis thaliana landsberg
acgtaatacttttagcagaattttcaatctccagcaggcgcatccagcgcctggaaatttctgcctgttctgatccgctgcggcggaataggccaagagtgtcataaaaccctgattcaactacctgcaggcaggaattatcggtggggaaatactggaacagttccgctgaaacaaagccgatcttctttttaatatcccagatgctttcgccgcttcccctctgcctgtcaaataaaattattttattggcataagcctggggattatcgccgtttaccaggctcagcagggtggattttcctgccccgttaggacccagcaatgcccatcgttcttcctgtttgacctgccagttcacaccgtccagacagtttttgaggcctatttgatcaggacatcttccatacccacgatctggttggtaggtatcaccccgtgaaaggggaaaaaagatccc

SEQ ID NO: 49884 - DNA, 652 bp, Arabidopsis thaliana landsberg
gcgtatgtatgatgacacatgagttacgtttgtacctatatattatcatggtaacttaaaccgtaataaaaaaaatgtgtgcagaggtataataatgaaaaaaagagagaataaactaataaataataaataattggagaaaataaaatagcactacatatgttgcatgcagccagcaaagtaacatgcagtaccatgcaagtaaacataatgtataaggaccaaataccacatgggttcttacagttggactttgcttatttcactcacatttgtcactattcttttcttgctttcgtcatttacaataattctgaatcggcaattttatgttcctttctttattaaaccgatcaatagatgaaatggaacaccctaaccaaaaatgaaaagaataaataatgacaggagtacccacggacaaaggcaactagtcgcaacatagactttttagttttaactctttatttactaatcggagcagtttagctttgaacgtacccaagtcataagtatgttataggcccctaccacaggaacaaagttttatttacaaatagaataattcattaccaaaaccaaaaagtttatgcaaatattagtctttcagaaaagagaaaaaatgggcatctttgttactttagctataaaa

SEQ ID NO: 49885 - DNA, 1233 bp, Arabidopsis thaliana landsberg
attaattgaacaatagaatgacggagatgcattataaaaaggaaagagctataggtattgattatcgaggtaattgcaagtaatgatctttaaattcatattgttgccaacataagcaaacagataatgtccaaaaccacctgtcacagaaaacgagactaggggcaatttttgcattgataagaaccttagttagcatttgaatactatgcaaacttactcttccagcttctgatgcatatacacaattaaaggagaattgtttgcatccttctttaaccgatacacgacaagtttgtcaccatctctgatcaaggttaatgaatcagtaggctcctccaggaagcgaataatccgattgttgtatacctatacaagtgaagaccaaatcaagagaaattccattgtctgtgttaacaaaaactccaccaacgcaccagaatgagattcatagcaacagtataccatatagaatatagagatatacctcagtaaccaataaagtctcctcctctggtaaagaacaggcagtgacaagagccttatgaagatcttcaaattttccaaacttaggaacgttgacagtcaatggaataggcaaactactcccatcggcactcatgactgttaaatccattgttcgcattgatgtgcatggcaatggtagcgataggtacatgaacggatcaaacataacagaaacctttttgcaaataggacaaactaatgttgacttgtattggccctgcaaccagaaacacataaatgtcttagtggtcgacaatattaggatcatttttgaacaaatgcactgaaccacagaagatgaggatatccaagatgttaaaagttttcagatggttcaagtgcaaagagcatcatatcaaacgaaaaccaattcttaaatagtaagtgtacagggacaatctaataacttgacgtagttattgacagagcaagatcttccctaaaacaaagaaaatattgtgtgcacagaactcaaatcaagaagataaaattgcactgacaaatctgatggaagaaaattcaaacatatgcagcttaaatcaaaatgatatgtagaacctacaaattggataccaggatactatacagcttgagccatccgacatttttcaagaagaggtcgaactaaagtttcctaatgagcaaccccgatccttagagttaaataaacaatttaggaaacctgaggtatttacttggcacaca

SEQ ID NO: 49886 - DNA, 575 bp, Arabidopsis thaliana landsberg
  unsure (1)..(575): unsure at all n locations
gatccaggccaccaaacaacaggcattaagtgctgtaagtcatgcttgttgtaactcctgcatgacaagaaaccttcaaacaggaactcgaaatgcaaagatctccaccattgtaccatcaattcttcccgtttaaacaaatgacaagccagcgccagatagggataaggtccggagtatggacactcggttaaaatcagtgtcgctgttttgcagccacaagccagagcgtttactacatgctcaaagatcaactgagattgtgggaactcaagaaacacatcaagaactttgtctaaacttgacgaatcatgcggtgcttgagttctgaaagtctccaagaggaatgacagaaatgcaccccgtcctaagtactcagccaacaaagggtcttgctcaagtatataaaagaactcatcacatatggcagacgaaacagggcaaaagagttcttcgactgaggcaaatctcctcagtcagacttaatgtatcacacaatgagcggtctggctctatccagcagtcttgagaagcatcgtagtagctctgttgcaaatgaaaatcgangtggagct

SEQ ID NO: 49887 - DNA, 2359 bp, Arabidopsis thaliana landsberg
aacttctatgcaaaggttcgtaaactgtttatacctcttactctcttgcgtgatcatcaagtaacaattgtttttgtttttttgctgttgagtcaacaattagttaggaaataggaatcaaaaaccgtgttaacttccttttttttggcataactataaccacataaaatccaaaaaaagcttagtttctattttctcctgattcaagcatctttggaggacaagattgatgttgattcatcattaaacacactttaaaaataatataagcttttttttttttttccataaataatataagcttataatgcggggttctctaaaaggactacacaaacaaaagggttgtggctaaactgcgcttgaacagtcagcgactgtgacggcatgtcgagactgactgggcatgcagagatgccatgtactcctaaagaaattctcagccgtcggattggtttcagcgcacacgaggacaaggacagtactcaacttttggttcgttcaccactcgtgggaccctgccttgcttacgatctcgatcgagtggtaatattagcccccacggtgcacgttaacgtatgacaggctcttggaacttctcaatctctctgccctttttggtaatgtgcgtagcgctttttccggagcggttttcccgcgtcttgtctcacatccccaaccctgtcttaaaaatgttttttacctaaactgcgcattttaacaataatatgcgtatgtcagcatgaaatcgcacgttagtaacgcagtcctctcactatcttatgttgatagcagctgaaattgagttcactagaagatactaattattgaacgttaattagaaaatactaattattcttgattaaccatattgtttggtttgttttactagatgtattatcctaatgaagaaaataataaattaggatatgtatacgtttgaatatatatttagtaatgaaaaatgtgataatatgtacgttttgagtatgtgttcaggaggaaggcaagagtaccgtagtgataaagaagactaggaagatcggtgaccggagcaaggaggcagagctacggaggattctaaggggattgggctcatctccaccacggtgctcctccaagtgtggaagatgcactccgtgcaagcctgttcacgttccggtgcctcccggcacgcctgtcaccgccgaatactacccggaagcttggagatgcaagtgcggcaacaagttgtacatgccatgatcttttataatatatatactcacatatatacattatatatatgaattatatgcatgttcgtagttatatcttgtctctactccaaatatttattatacattgacatgttgctaggacaacctcaacgtgaaacttttgctgataaattgattgatgatgctcgtatagacgatatgacgttcttagcatatgatttcgtatatggtgacataattcatgaatcatatcaacatttggtgtcaaaaggaaacatatttcttgtcttcttcttcaacgtacttgcttataatgaacaaaaaataaaaaaacgtgctcgctttctaataagtatcacataggtttaggctcataaacatatggactaacataaataaaccaaaagcccaataacattactcttagcatatacatataagtaaactattaacatctgtctgcgggactcgttgatttcatttaaattctgtagtctcagctcgttcaatttaatctattcgtacacactgataatattcaagaaaacatatgctaacgtataacgtattacgtatccaaatacaccttacaccactcacacatagcccatatataaaagtttgaaggatttaaagtcgcagactcgcggtcatttttttctttaaagtcgcagtcattgactgactgattcttctttcttattgaaaggttttttatgtaaagacgaaagtttaatcaggatgtgaatatggtacggcccatgttctttattcctttttttttttttgtgcaaagttctttcttattctatgttagaaaaataatcaaattaccgacgcgagcaaaggttattatttcctggctattagtctataactgataaataattagtcaatcagatcaaacaatagagaaataattagtctgcaatcagcgattattaaaaaataaataaatagaaacatatctcagcccgatttttcaacagccggcccgatccagaccgtccagcttgaagcggcccgcgtgacttgtccccgtcgatattgccacgtgtgtgagagacaccgccatcccctgtgcccatgttttgttagtataagataacaccaagtcgcatcttcattttcatacctaa

SEQ ID NO: 49888 - DNA, 186 bp, Arabidopsis thaliana landsberg
tatttcatcaaaatgtaggctttaattatatcgtagatctactaacgttttgcggctggaattgttcaatcgacgtgatcaatacatggttgtcataagatgattacacactattacagtgatcaacatcatcgatgttgtggttttctcagcgtaatgctctcataggacacccttgggacgtta

SEQ ID NO: 49889 - DNA, 609 bp, Arabidopsis thaliana landsberg
ctttagagatggaggtagtcatgctattgcgttgtgtgacttgtgagatttgacgctaaaaagctaatacgttttttagtttgtctaaaagttctcctgcttactgtctttcttctgttatatattttggatttctgacttataataaatatactttaattttgtgtctgtcacaatctgtttttttttttaatctaataaagatacagtttgtcaaaaccatgaaacaaatatacgtgatgaaactagagacgcaatcttcgtcctttgatgaatattggtgaagtacaaatgtcttttccacaaaacttttgttacaggctgctcttaaattcttcatgtttacacagtaactttcacactttgtgctgttactgaagctggactatcgacctgaaattgatatagacaggagttgcttgccttttaatcgagattcgatgtctattgattagagaatgcaaatgtagattcttgtattttaccttggctgctttaaacagttcgtctacaacttcagacagtgttggatgtgcatgaacagcaagttttatgtcctgcatttatcatcacacaaagacacacaaaaaaagctcacaatctaaagtc

SEQ ID NO: 49890 - DNA, 915 bp, Arabidopsis thaliana landsberg
ggctcattgtgctatttgttactattgcataatactcatcactttttttaaaaaatgagtgtgtaaaaaatataagtagaaaagtcaaaacggcgttaatctactaaaactcacttttagcatccgtaattattttacgaaaacttaatttagttcagttttttctgctaaagttattcaattaattattttgtgatttttgtgtcataccaatcaagaccaaaaacaatataaaaattagtaaatattcaagtccgtaatttttgaaatagaaatatttatattacacttactcttttggttcgtcaatattgtcgaggtaataaagcgtagggtataatgtatgtgtagattttttgattgcctagtcaaagggtaaccggttaacaaggaagattattagttactacaattctaggacaggagagaatgtatttaggcttcacgccacaactactgaagatagtggtgtcgctatctttagatgtgataaacataaagtcgtgtcggtatccttgaaaagttgaaattagtgcgtattagcattgtttatccctaaaggcacatatatattgttccttactttcaaacgacatatatttcttcagaaccttttgctataatatgtctgaataatcattacaatatagtatatacacacaaaacttattgatactatgcattctctttggctatgttggaaaattcacttgcatgacttgtataaacttctaagttatgcatgcgttttaaataatcaagttactactataaattaagatacaggtatgtataagcaattaattaaaaactaattaatacagtttaataatgaataatgatataaacattataccgtacagtgtcgctgtttcagtaatgatataaatattcacatccagaattacatggtaa

SEQ ID NO: 49891 - DNA, 587 bp, Arabidopsis thaliana landsberg
  unsure (1)..(587): unsure at all n locations
ggtctaagtccgcaaatctctaatttccaacattgttaacacaccgttaacgtgcctgattatcgaacactaatgcatttttatatgaaaatcgcctgcagcccatcgtgaaagccggtccttaagaaggataagccagccccaaaaaataacataaactcattaatccatcaatattatgaacagaactatactcaaacaattaaaaagctacgccctggcaagcaccttgttgtgtttgctggtatgctgtgctaccgaagcnnnnnnnnnnnnnnnnnnnnnnnnnnnnnnnnataagtcaaagacttccgcggcagcaataaaaggaaaagtggtcgatagtgccggttttgctttaccgggtgctacggttaaaattaaaggcacccaaaaggttaccctgactgaccaggcaggcaacttttcgatagacgccgatccgggtgcggtattggtaataagctacaccggttatataactaaagaagtaaccatacgcgataatagctttattactgtaacgctgcgcgacaataatactgccctgcangaagttgtggtggttgggtaccgatcggaaaaaa

SEQ ID NO: 49892 - DNA, 783 bp, Arabidopsis thaliana landsberg
agcaggccaaattttgagggtccaagagttggtacatgcaaccatcatcgaatctgtagttatcgttttatgatatatgtaagcaagtctataaaggagcatctgcagtttggaaaaagaaaggttcttttatgtattggataaatgttcttttcgcgtgcttgtagccatcaacacatcccaaccaaggattcggtggaattattaactaaaaggccaattactttgaagaggttataaataaatcctactaaatcaaggatgacaattgttctatattataaatatataatcgtcagaatgtcaatgaaataatagcatcacgtttgcttcttgaaacaagctttgcagtcacatataccctatttataaacagatttagttatttggaaaattatcacataccagttatatatgtcttcttctgttataaagctggtgagtcgaaccattaattaatatttatatgtacatgtgattaatctcaaaatgtttggcatgttgcaatggaccgtacgtctaggtcacgcatcttatccgacatcatgggaccagatcacgacatggtctagtgagaatatatatgcatatctaaaatgatcttggtctgattgctgatgcattgctttcccacattttaaagatcatgcatgggccgggtctaacccatcgtcggctaccaattgatcttggggtgattatgaaggggaggggctatgaccatttctgggttcgagttctaccaacagataattaacattagcaaattctgggccaaagaga

SEQ ID NO: 49893 - DNA, 738 bp, Arabidopsis thaliana landsberg
tgggatctcaagcggttaatgcaagtatgttacactattctttggaaagtaccagtatctgattcatgtatttaccaatataaatataaaaaatacttgtattacattaaattcgaagtttgacccagtcaaatcagaaagctgcatggattcacatctcccaaaccaaaacacatggtttatactcttttgtctttagatttttgtggctttcacttgttttgttttttcttcccaactccatctttaagaggtttgaaattagaagtcctaatatgggatgtagcaaataacgctttatggttcaatgttgaacaagaagtgtgattgttgttggctctatccggattgtgtgcaacaatcaacgctatcaaattctatcattattttgaaacctactactagtatttaacttttggccggtgctattcttgaatgctctaaactctctaaaaattcgaaccatttacatatgcaacatgtgaataaacgaatacgagaatttgggtaaaccctacaatttatatccagaaattgaacataacaacttgagatgtcaatggaccaaaataaaacaaactaaatgggacctacacaacctcaataggcaaccaccaaacactgaaaattttcgaaattttgaaagtcaaataaattactaaaaccatatacttacttcaatttaataccaatcgaaacaagaactgatttaagataataggaagcaagtatacacat

SEQ ID NO: 49894 - DNA, 611 bp, Arabidopsis thaliana landsberg
cctttggttggtcaagcccaaagcagagtccaacaatgccttgattaagcagcaaaggttgagaaaatgctccgccaaaataggaagaaaagaaagaaggaataaaaatacacttttaggaaagaactatgagtttgaatagagttaagtcaagtgaaaagataaaactaaaactcggatatatattaacctaaagtttctctgtagcattatttgtgaatacatgattagtaatcaaaatttcaatatactatcaaattgtgaaatttccattttataatcaaatactactccgagaaaaaaatgaaaataacacatgatgatgatgtaatattcgggaagtagagaagagaagtgagaaagaatggagattggttcgagaggggaccccacgtgtcctctgttgtctgaatttagagtttagtcgcacgcgtgcatggcgcgtgtgcttaacctttttctaaaatttttaacttattttaaaaatcttccaaagaacgatgtcagggggtcccacattagcgaagacgtgaccgaatatgaaccgttgattagagggcaatgcgatctaaataagcggctaagatatcgagtcaacaaccaatctaatt

SEQ ID NO: 49895 - DNA, 914 bp, Arabidopsis thaliana landsberg
caatgtcatcaatacagattacctcacctctgcaatctttcagtctttgacgtgaaggcaaatagtcaccttcagaaattcctattgccatagtgggagattttagatacatccacaatccttcaatagtttgctgttccccttttagtttcacgctggcatgccaatcataatttatcaggtgaacacgagtataaggaagctttccactggatttgataaagttcatcgattcttcaaaatgttgtactaagatacattctgatttcccttctccacttcttagtaaattaacgcacacaataggaacaaaagcctttttcttctggttttctccaacaggtgcatctagattcctagtatcatatcgcttgcttaacctttggtaatactctgtactgcctttataaggatccctatctgccacataaatttctgcttctgccgcagtcatctttaattctgcaccccaccatattggtatggtgccacgtcgccaaatgtacgagttgaaagcaatgctttgaccatttcttttaggtatccatacaagctgctcacactcaacttcgttacctgcactacacatatacttctaaattaggccctagtcaatccagagccacactttttaagagaacaacaaagaaattaagagagaggagcattttaggggggcatgtcacctgtgccagaacatgaattaatgcccctagctaggtaacgagtccctggatgcagtctgctacgacgggccattagagcaacaatcccttctagctggcctgagctcccaaaaggtcgatattctgcaaacccctataattaacatcaaataagaagatgatgtcatatcaatttatatgcttttgaatcttcacacaaaaccgaaatcggataggtagatcaacctt

SEQ ID NO: 49896 - DNA, 684 bp, Arabidopsis thaliana landsberg
tccctgtggttcaagatgaacaactagttgcggatcaggaaagtgatggatctgtttccgagtgttttagagtcaaacgccgttcttcattgaagtttgagaaccgaacagttgttctagacacaagagagtctgaccatcatcaggtactgaaagccatatacttataaatattaactctctattaaacagtgttcatagactgtaaaaccctgagatttttcgtgtttattaggaacttaagagactgaagaaatcgcatcatcacgaaggaagatatagtagtagcagtagtgttagtaggcaagaagaagaagaagatgagttagtaatttcaaacaggaaagaaactcagcaacaaagtgacgtgaagatgcagaagaagaggatcgagaatcattttggtggctttaaacgtctgaaagtgaaagggctaataaagccgtaacgtgacagcttcaagtttcctcctaactacaattcttttaaattggctgatctctaacaatacaggaaaagcaaaaaaaaaaaaggaatcaaaagcaaaacaaaatattcagtatctgattttattgtcattattttttttaatcatgggagaaagaagaagaagaagcaacagacaaaagaaggaaaaaagcatttaaccagccaagccaaccaaccaaccaaccaaccaacact

SEQ ID NO: 49897 - DNA, 416 bp, Arabidopsis thaliana landsberg
tgaccttaatcaaagactggggcatattggtaccgttgtacaccttgaataacttagctgtagcttgctgaatatattagcaatcaactaataaaataggtcagccttactttaccttatactaaaacaggagattcaaattcccatttggtgtacagaataattacatcagcttcatcataaagaatggaataaataatcagaatattattttgttgtgcttttggcagcacatattattatttattattaaagtcaccattcggagtggtactaccaagtccttaatatatatcctttaatatgatcatgtcggcattactaaacaatcataaggggtaataagttcttaagctttatgcaataagatcaatacttccaacagatctctcacaggtaaacctgcttttttttac

SEQ ID NO: 49898 - DNA, 284 bp, Arabidopsis thaliana landsberg
taactatgattgtctaagtcgagggaagtgccctcctagagatttgaagtcaagttgagaagaaaatgacgaaaacgcgagtgtgtgctactgtctgtgcagcaccagacagtcaggggcacatcaacggacagtccattgtcctgggcgaggcactaccaagcatcgggttccttgtatgaaaatttcgaacattcctggcccaatcatcgggcactcctgcagtattcgggccacatctagttggcaatgtcagcacactcaattagcgattttgacgaccg

SEQ ID NO: 49899 - DNA, 997 bp, Arabidopsis thaliana landsberg
gtggctttcgtgacattggcttaagagggttttgttttttaatttataatttagattatgtcgatataagacataagccattggctatggacataattttttttcttgtaaatgacttactgagagaagtttaaaaaaatatttacacgttgctgtgtaaatctgctatggctactttgctgttgtaaagatcgataaacatgttggttagaagtccccatacatatattgtatattcattggttgtccatgcatgagaatgagacttgggaaggaattgaatgcttgaattttatagtaaccttggcttcatggcttgtatgcatagatcatagtgtatcatattcacataaattatatatggatgtgtatatatgatgacacgtgaaggtgctacttcattataggattagtttaacaaccaagtggtggcatcttgtcgtgtacatgtgagtagcatgctaacagggccatggccatctagtggtatctctaaacgatacacgatacaacaaacatgatcatgatgttcatgcaggacatgaactggaaaaggtttctatatcatgttcatgcattatgatgataatgacacataaggacttgggtaccatatgtacatatatattgtggataaaatcaagctttagatcaatgttatgtgcttacatcagagataaaaaaaattgtagtttttagttgtggggttttcaaaattattttagtttcgaaacacgatgcttttgttagccaatatataaagtggcgatgatgccaaataagtcaatttataaagtatatatctttttctaaatgaattagttctaacatctacgtaaaattaatcaccaatttctcttcttcttcctctttagaaaaaagaagaagattatatatctataggacctttaagatttgcttctcttctttaattaattattatattgatttctgcatatattaggtcctagataaactataaaaaaatgtggtcttc

SEQ ID NO: 49900 - DNA, 607 bp, Arabidopsis thaliana landsberg
cccatgcaattcaatgtcatgatatattcacgtgcacaaggatgaaagccaatgctttttaagttttgaccctttgtgccattttaagtcgtgtcaactctttaagtgttaggatcggcttctgttattaaaaagtcaacatcataagccgagtttaattgaaagtttataagagtaaacaattttgttggaaacaaaatgcatgtgacgatgaacattaaataatagggtatatgttcctattaattacggtcgatttgcccaagaattaggtctgagaaggtgtgttgatcaagtgaaataaatgcattacccataaattatgtcaaataaaactttaaatgcaataccaatttattcgagttttttattgtctgccggaaaaacatactatagatattaaataattatagtcatactattttttttgcttatccttatcatcgtctatctttcaaaaaatcaaaatccttatcatctatcatctatgtatttatttgataaaaaaattcaaaatgtcaagggtgcaaaacttatttaattaagaaggtgtatatattatacacacctgatcgtacatcatttaacgctttactataaagtttgt

SEQ ID NO: 49901 - DNA, 705 bp, Arabidopsis thaliana landsberg
ttagccactgtgatatcggtttcaattcaagttggctaccaatttagcctctattttttgtcgttatgatgaaaaaacaatttaattttttaaagcttgtgaccacagaaaaatcaatcatgaatttgtggctgattagccacaacttaactaccaatattatcaatagctaatcagccaccgattagccaccaaaatgtcaaaaatattttagtagctaatcggtggctatttctagcaattgacaaaatttggtggctagacattggccgatttgctgttttgttacaagattttttgtcgctccgtctctatgacatcgagatcaaagcgacaactcctctcttaaaaaatttgtacaaatgttgaactactcacattttggatgtacaagtccaaacatgtattattttctcgtttccacgtaatcaaaacaaatatttgaagggtctaaataataagaaaataaaaacaaaactcaattttgtttgtatcttttgtaaaaaagtgtctcttatttaatattgtaatgcaatggtcatattaccaattttatctcatctatttctcgttcaaattacattttcctcttgagtttgagtaaaaatccctcaagtcttatttgcgcttgcaatttgaaattcataaactcaaattggaacagatcagcttttgaataaactcaaattggaacagatcagcttt

SEQ ID NO: 49902 - DNA, 819 bp, Arabidopsis thaliana landsberg
agaagctatctactttttatgttataaaacttataatgaattttatgtcattataaatcgaaaaactacactgaaatgaacaaaaagtcaaatgacaacagattaatgattatgtaaactgtataatgtcgattaaaaccacataatgctatcaattatttagcacctatcaaataattgtcacggttgtatatatggcgcgcctagaccgccacttaaagcgctatttcaagtattgttacaaacgaagaaggtaggcggtctaatttttaagtctaaaattagatatctttggacgcctcatattacttattgttttactctgtcggatcctatctcacccaaccatacatttgtggcaacagaaattgcctccaaatgcaaaaaaaaaaaatcattctttctactgttaatacttcgaaatatacaatttttaaagttaatatgtgtttaaataccattttgatctaaattttgtgttttgtgtttctttctatatatatgtacgttttccattatatcagaatcgaatcatatctaaccatatatgaattagtctcggtagatgtaatttggaatatttatttcgcttttcaacgttggtaggttcaaaaatacttaagttaagccacgtttaatttaaatacgttcatatttagaatatgtagagttgaaatttataacttaagtatatgttatggaatttgttgacagctattttaaagtagttgggacaaaacaaaaatgtaggtaggtgctcacattaatttcaccttgtaaagcctaaaactataaatcttagtaacacatatgtgatat

SEQ ID NO: 49903 - DNA, 517 bp, Arabidopsis thaliana landsberg
  unsure (1)..(517): unsure at all n locations
aaaaagattggatcttagattaatggaatcgatctgactttaagaaatgtagtgtagaacttgttttcttttaaagagatttttgtgatgctaaatgttacttgagtgagagagtagatcctttgcgaacaatatgcttctgttgataaaacaaatcaccagggtcagtaattaggaaggttcaagaatggtgaggagtgaaactgaaatgtagtttaagctcttgagcatatttcattcaggtgtaataatatcttgactcttgatcccttgaggtttaagctcttgtctacgtagctgttatgacatttgtgaactcaaatgcttgcttaaaagcgctacaaggttttaactttcttccttcatttattatattcaggaagagctggagcagcttgagaagatggacaatgcatcagcatcctgcacagagtaagaacttgttacataactgatatccggntcacgaataatcattccacacgcttgactagtttctcgaatggatgcaggttct

SEQ ID NO: 49904 - DNA, 1164 bp, Arabidopsis thaliana landsberg
tgctgaagcgattcctattacaacaatggcctccattgttaatgttacgagtccaatacttacgagaaatatcattaccaaattcaaaactccacggctcaaaccagatctaccttctctacaacattctggccagttcaatgcaatcaagaatgatccaataaaaatgataaataagtacgcttcaaggagaaatatcgtggtttcatgtttggatcgacctaactctaggccgaatcaaatatctgggtatgatgctgttatgaaattttatgcctctataaacgagaagaatcaagatcaattaagtagttgcatctctagcgattgttttatcgatgatttctcctttccaaagccttttcgagggaaacaagtaagattttttctataagatctctccgcaaacttttaaatctatacgatgtgtatacatattatacatttcaagatttgttttgtgaatgaattgaaatatttttgcaggaagctatggagttcttcgaagaacttgtgaagagtatgggacaaaacgttaagttttgtgttgaaaatgtgtgtgaaggtgatggacatagtgctgctgttaattggcatcttggtacgttttagtacatatatcgctcatgcttattgcctaattatacatacttatgtttaatagtcgcattggtcttcctttcgttttgtgtttattgtatgaagaatggaaaggacgaaaaattccctttacaagaggatgtagcttctatgaatttatagatgaaggaggaagactggttataaggtaacttgtttttttggagggatatatatgtactaataagtaggagatgaacatagtgctgtgtttttttttctaacaacaagcatttatatatgtaggatggtacactgcatacataaatgatatgtttagtgaaaaaatatctcagtttttatttatttcatatctatactaattaaacagataatcttgtaatctgatttggaccaaaaataaaatcagaaaccgcgaggattttgatttgaatcggcaatttaaaaccgggaaggaataacattggttaaaattagtatttttcaatttttaccaaatgaattatggaaatgaagaagtatttctgagtattttttacatttatttttatggataatatttgg

SEQ ID NO: 49905 - DNA, 320 bp, Arabidopsis thaliana landsberg
  unsure (1)..(320): unsure at all n locations
gagtnngaggaagggtcgaaccaattatacatttttctaatgttagaaaacaaaacatttttcctttcacatgttgtaccacaaccgtctcttctcttatcagccaaattgctcatgttgttcaaataaggttaaacgaaatggcataaggagaggtcgagactgcatgcataataacaggatttgtaatagtttgaggctatgccctattttgtacctaacaaaagtggcaagtagatgtttggttttccaacattggttcctatcattttcagttaacgacataaattccttattttcattgttaatatggtttcaag

SEQ ID NO: 49906 - DNA, 610 bp, Arabidopsis thaliana landsberg
agagacacctccaacaaatagcttattaaaattttcaacgcaagagatatgaaaatagcacaaaaacttaacagaaatatatcagaaattggtggagtggttggcaagccgtttacttactgcaggtgatttggacatcctagggaaatgaggaagacttcgatctataaatccatcaggagcacggtgaccattaactgtctgctgaccaacacatgcgaccatctgactgatattgataggagatcctttggaaccacattgtgacatgatcaagggactatttctccaatgtaatccgctcatacaggcctgtatatcatataatgacaagatgaagctttagtattttggtaggtaaccaggatctggattcattgtcttttgaataaagtagataaattatcaaagatactccttcaatatagattttttactccttactcatcttggaacaatttataactcacctttgaaacaagatactaatggaacgacaaggcaaacaaatagtaaaaaaaaatgactgcaaatcaaagcgtcaccttagcccatacacgtatcttagtaaattaaatcacatatgtaccttagaacatgcattactaac

SEQ ID NO: 49907 - DNA, 2039 bp, Arabidopsis thaliana landsberg
ctcaatactcaatagtcagtccacacctaagttaaagtctgatttctatttagattcgagaagtataggatttttaagtgaacttacctctctttgaaattgagatcttccttgaactgcatctgctttcaaagccttaatagcaacaggggtatgatcaagataacccttatagacaggaccatacccgccttcgcctattttattagccttgtcgaatgagtttgtggcttcttcaatctcaccaatgacataccttcgataccttaaactggaatcagagaaagaacctgcagcttctatagctcttctttgtgtttcgagctctgctatcttgcctgctgtttcagaagcatccttggcagctttatgtgctctctctttttccactatggactttgtagatttctctgataactgtccttcttgcacccacccttcctcttcaattttctgacgttggagctccttcgcctttgatccataagtaaaatttctttcagtcagcactgtacaagaatatatatacacagggacggtttcgtcttatatcgttttacctcttgctttgcagctagtgcttctctgcaagctgatccatacatgtcaattgcgtgtttcagttcctgcttcaatctccgcatctcagcttccacttcttcctatacatttttcaagaaaaatatatagtaaaccattcccgaaaacatatgtattgctatctataaccaatcaaacgcatcttaccaagttttgtggtgaacaagaacaagatgaccgaccgctatcttgtgagacgaatgagaaatcatgttggatatttgtgtcattgaacctgattcctagacgcatagagtgtccagagctcgtcgactctctcggagttaaaccagaatcaggaaaatcgtagatgaaggaagggcttccagtggtgcttgtactcggcctgcctgagctcacaaaagatatgtcagaccttccggtacttgtacttggccggcctgagcttgcggtacttggcctgcctgagcaaacaaatgatatgtcgttttcggaatcttccaaatcaaagaatgagtttgcgtaatttgacgtccttgccataggtgacctgttgacgatattaccgcgaaagaaagagcgataagtatcttccttcaaaacgaatcagttttttgtcaaagacgaaaaatatcctcatgaaacattactttccataatcttcaatggagctagcagtcgaagacctgggaggagccctatctgtttgtaccaacgaaagaaaaaaattcaagatgtgtgtggtgtcacatggtttagcctaaaaaaactagttaatgattttacctctaaagctcatggtgtttctgaacttttcgtagtttatgatttcagagtggttttcaatctgacccataagcggagaccgatatggagcagctcgtgaggcatggcggacagatgatatcttcccttttgaaataacgtaaactgtacagaaatcaggtgctgctttcgctacattgctcggtgtatcagaaatcttaaatttcctgtcaacagattgaatcaaagaaacacataaggataaaacaaggaagaggattcaaacttataggagagaagagattcatattactacctcatgaatccatgcctcgaaggagcaccaagaatcaaattctcaatcacaccagaggaaacatattccgcaagggacttgacaatgttgtcatcctcaagcgtgacatcaaggcattgtatctagcaacagagagtaaagaacaatgcattcaattaccaaaagctatgctataacatagattcactttagaaacaaagcaagcgaggacaagagatattacctcttttcgactgcagtagcaatgaaatgtcacaaaaagattttcagcttgcttatgtttctctgcagtaatctcacctgcaagcaaacccataacaccacaacatttaagtatatccagaatccaaaaaatcaaaacaacaaaaagaacaaaaacaggttttgtcataagctc

SEQ ID NO: 49908 - DNA, 1096 bp, Arabidopsis thaliana landsberg
gtagacattgtaaaagccaagagaacggagaagattctggtggagatgtttattttatgagcacaagaaataacgtcaataatggtcgtcttggtcgaagaaggcagagaaagaaagaaagaaagtttatcaatgggtgaagagtgagcaaccgtagacgagagacgtcggttgttagttaatccgggctgcttcaacagttggttatttttccggtgacagaaaaaggagggaactacaagaagtttgcgagagagtgaaagaatgctttatatacgttcaatttttgttttgtttccgtcaggcctttgcttatttagcccaataagtttagtaaaggcccaatatacctttgtatttttctcatgcccataatcttctatagaaattgtaaatttaactataaatacataaatgcaatttacaaaaattaaacatatcataaatataaaaagatatgatgaaatttcaacaacttgatgattgataacttaatatttagtatggaaaatttattttaatacatgtttaattgctttttttgtttaacaaaataaatgaatcaagtgggaaactaaaagaaaagtaaaaaacaaagctgtaaaaaaagaagaggaaattgagtaaaatacttacatgtgtatgtatatagatgagataaaaaatacatagacatataaaaacggtgttatcgagaagaatcatcatataagaaagaaatcaatcgtatatcttccaatcaggtggcttcgcctctcagattatttccccatctagaagctctctctcgactctctcgtctgtttctatctttcgtggcacctcttctcttctctttccttttctgagtttctgttaattttactctctctttctttttcttctctgctgcttatataataagacttgtctttctgttccaaaaactcgctttctctaattcttctctgccattctaatcaaattccgtatagatcgctcgctcttcatcaaagaagaaatcaggtcaatcaactgaatcagccaccacggatctttttcgctcaggttttttttcccaattcaatcaattccgcctaggcgttatgaaattatc

SEQ ID NO: 49909 - DNA, 581 bp, Arabidopsis thaliana landsberg
  unsure (1)..(581): unsure at all n locations
tctcctggcggtacttcacccaggtcggcacgtacttccacgcgctcatgctcacgttcctcgtgggcatgaccgggttctgcctgaccggcgacgtgttcgacatgttcgtctggttcgagctgatgggcgtgtccgcctacgcgctgaccgcctaccgcccagaagagcgcggcccgatccagggcgcgctcaacttcgccatcacgaacagcgtcggcgcctacttgtccctcaccggcatcgccatgatctacgcccgcaccggcgccctgaacatggcccagatcggcgcgtgggtagcgggccaccccgcctcggggctcgtggttgtcgcgttcctgctgatcatcgccgggctgctggtcaagggggcgatcgtcccgttccacttctggctcgcggacgcgcacgcggtcgcgccgacgccggtgtgcgtgctgttctccggcgtcatggtcgaactgggactgtacgggatcgcgcggatgtactggtcggtgtttcgcgacgggctcgggcaccggngggcgatcttcgcgctgttcctcgtgctgggggtcctgaccgcggtgacgggg

SEQ ID NO: 49910 - DNA, 866 bp, Arabidopsis thaliana landsberg
gagacgtcaaaataaatctttagacaaaaaaacacaaacacaacagccgtcgttgcaaaatctgtcaggacatgtgctcttcgatggtcggaggcattgtgaagaagttgttgatttcacttggaaagtctagctctgccttggtcagcggcaaacttttgaagaagttgtagattcgacttggtatgtcactgcgaagaaactgggaaataagccaactgagcatcaaaacttaaaaccaaatctgtaacggaaccaagcaaacgacaagacaaacgaccaccgcacaaaacgaagccagtggatcgtcacgcgatgtcaatatcgacttgaacctttccacttgtgagtcagcataatccatcatgtacaacaatttctccgacatcttcatcaacctttcgtgcctcaacctcaaaatctcatcatctgcgctagtcatatttttttatacgagaaattacagagaaaaatatagaatgacgacttatcaaatttgaatgtgctctttaaagttttttattcaggcactacccgttcaatgttcatataggacgtaagagaaaaaaacgaaaaaaaaaaaaagaaagtaaaatttaacattaacataattttagaaaagggaaaattcacatatacggtataaatttgtaatagaccgccctatttaaggccgtacatgttcttaattttttctaaatcaacggttctgaactattaggaatttaagaaatcatttccatatatcccaatatctatatatgtaatgcatatactatgtaggtttcatcgcggcccttttggattgagttccagataaagcccattttcaaattaagattcagaacagacccctttccacccgt

SEQ ID NO: 49911 - DNA, 868 bp, Arabidopsis thaliana landsberg
ctaatcggagtccacgctctctacctaacaaaggaccctgatatgggaaacaagacgtttcaacacgctattaatctacaccaccatgattgttcgacattcatcgcgtgtgggcttcaaagccactacattgagctttcgtttctgaaacatggaagcaaaattgtggagatgcttatcgatgaccgtatttcgatggtgcctttggttctactcatgatggagattgtcaagtgtgatgaagatacgttggtgagattggctactgatgaatatgggaataacattttgaaaaagtttctggcacttgccaaagagcataaggaagatttctttggtgatcttgttgacaagttgaatcctttactcgatagtttgcgcgggactctcggagaaaacattgtagcaatcatcgactcagaaacagagatggttaaggatcgaattgtttcacaaggaaataattagggcttttattttgggaatagctttagatgcttaaccaggtttttattttcgattttgtgttgtggattttttctataaaactatgccatcttaaagttgggatgtgaacctagtaggctttttatagttacatatgagtttttatttttttttgaatataatgttaaattagattcaagaaaaaataacgttttgtacatcaaatgctaatgtttcttaaaattctgaactttgttacatatgagttttactattaaagaattgtttaaaggtaaacgaatgaaagtaggttaccttctgaaactttttttttgatgtgtttcattttatgtcaactaacagtttatatataagacaaacagaaaattcatagaaatgattcctggtcttggtcgatctt

SEQ ID NO: 49912 - DNA, 774 bp, Arabidopsis thaliana landsberg
aatcactgccttactggtaaatctaaccttccactattcataacccagaaaccaaaatatgcttaccacaaaaccgattccaaatctaaagattagacctttcaataaacaacttccaaaaattacaagtcttttcaatccataggaaaatctatcctaattgttcattattatgaaaacaatccaaatctaaagatgagacctttaacataggaatcagtaagagaaatggtgaaattagcaaaaagcacgaaccttgtatttgtaatgaggattacggaggcgaagcatgagacgtttcattcgacccagatcgaatccatcatcagaatcagttccagctccttttggtacacctgatttctcatagtttttgagagattctaaaaatcccacaaaatctctgagctcgggatcttcagtagaagaaatggttgaaagatttcgatttgagatcaaatttgctgcagaaattcttctcattctcggagaaattttgatattggaaatggtactaaagtgattccagagtgtcctcatcttcactacctcggtaatcaaattctttctctgcaattttgttcttacaggcgaaaaacgtaaagaacatttcgcttcttctttttttggttatgggctttgtttataacttgggcttagactttgggctcaacgtaaatgtaaatggggaagagggtcttttttacgggaagggatattttaaaatggttttaaatagtaaaaagacataaaacggtgaacatttttcggatt

SEQ ID NO: 49913 - DNA, 1218 bp, Arabidopsis thaliana landsberg
taaaaggaaaagataaatggaaaaggaaaaaaaatttgacgctgtgggctaaggtattccaaaaaaaaagccctaaacctttttgtttctctcgggaaaaaaaaaaagtttttttgtaataataatgaacgtaattgaaaatggaaaaaaaagatgtttttttttttggaagctatttcttctatctttctctctcagtttttgggtacgccctattggactttgtcttattcctcatcttcctctgttcatcgttgacttgttgactttttgtaataaaactttagagtctttgtggagatttttattcaaatccttttcaagttttttttttttgtttgacatcatctttgtggagatttttctttagaaaaccgttatcaattagtttgtttaatgatataaagttggtttgtggaccttgtgaatgaagtttctttgtgggttgtaatgaaggctgaatggaacgaataaatggggaaggctaaattagtaggaacataaattgagcatatgttaataaaacaaattggctagtatatctatgggcccatttaggaaatagctattaacaggcttcactttcatccatggacttgggcccttggccattaatatagttgatgaagtgtatactttttaaacttcaaatgtaatggtattgataatttttgtctataaataaatttgcagaattatatatatatatatatatgtgatttgaaaattttaattaattttagggacacaattattttaaatttagtgcatgattcattttacaatagttgttttcagtatatcatcacttatttatatactacatcaaatagtttacatttagtttattatacactattatatcattattatctctgaaattgactttttttttttcatctctgtctaatgacttttttttttttaatcaacgagacactataattatattaaaaaggacttttgatttcgtgacaaaaaataaagacttgattttacaatggccattgacctttcatgtttctcattactcatatcttggtagtgttacaaaattgtaaatgaagtaacaaattttcaaaatatgtcatttattataacttatatgagaaaagtagaaaacaaatttcaccaaaataaaacagaaaaaattaaaatttataatttaatgtcattaaaataatatgatccaaagattctacatttctactagtaatg

SEQ ID NO: 49914 - DNA, 580 bp, Arabidopsis thaliana landsberg
tcagacggttctgctccatctgctgcatctctttcaggtcgtccagacgccgcaccaaggcccgcaagttccgctgagctggcggctcaggcttccactgacgaagcaaatcttttttctgctgaccgtaagcagcaataaccttggcatcagccttatcagttttgacgcgtcgaaggtccgctccggcaaacttggcaatcacggcgggattcagaatacacacccggtaacccttggcatgaaagcactcagcaagcgcttcgtgataagtgccagtggcctccatgataacccaggcacgtggttcggcatgttgctcaagccaggttgcgaattgctcaaaaccactcggattattggccagcttggctttggtacggactttcccattgggaagtggagttgcaatatcgaaagatcgcttggctacatcgacgccaacaacaacagacatgatcttctccctcagacaacgaagtttcgatcacccagcactcggtttaaccttgcgaatgcgtgctcacgccggggggcggcactagataccgttcgaactgttcgagtgggggttggaggg

SEQ ID NO: 49915 - DNA, 842 bp, Arabidopsis thaliana landsberg
tgggtttccaataatttataagggaacaccaaagttaaatggttttgaataattttataaattttttttggctattttttgtttccctgtttcatggccaatcaaaaaaagttgtaataccaaattaagtggtctaaattatttcagaaaaatcatactgagttttcacatcattgccaaacaatatcataaaactatagaatatagaaaaatgtaatctttccatactaacacgtttgaataatttagttaaagctagttcgatgagtttatataagaatgatacaattgttttcataaaaatatattgaatgtttcttccgtaacataaatgataaaccattacatcgaatgttagactaatcacataaaagaactacgttttgtagtagaataatatcatttgtctaacttaagttaattttcttattacgctgacatagtgacataacttgagaaaagtacagaagatagtttgggtttaaatagtatatagtgtttagttttgagtaagtaatagtatggaccataaagatgggataagctacgtaattaaagcaaacactattaattactactagaagttatatacaattatacataatacatatcatattcatatgattcattggatgaaattttccctgacacggaaatttggatttggaccgcctaaccaaacgtgaacttggtcccactactttacagctgtttcatttcgaacttaattttattaatgttataatggttcatcaacaattcttaatcaaaggcctattatcaatattagcttcaaacaatttttgtcatttgaacgaacccatcctttggacaactaagtc

SEQ ID NO: 49916 - DNA, 602 bp, Arabidopsis thaliana landsberg
tgacgtcatcggtgatgtcatgatgatgcagtcatccggctagggaataaagaaaaaaaacaaaatgaatgtgggagagcacattggcttcacttggtgttatcctcacagggccaagcaacatgtcgctttcgaggtgagttctcatgttttattattttttcttttctatttttaatttctaaatttctatttgatttcctatttttgtctatcaatttcaattttaattttgtgttaattttttaaattcgagtgaaatgcataatcacaaatccagcatgccatgtaagtataattgtatacatatgtttacatcacttcttttgttcatgcttcaaacatataataaaggataattcacacattattcgttttaggaaaatatttttttgagtgtgtgatcaaattaaattttaattcgaaaataaattattcattacttacttattttaagaaacataatttacattgtatcatctttattaagagatgttttacataaatcttataaaatcctacaagggatagcttaatccatattagaataatatttttctcattaatatcttattagacacgatattttttaggagacctaa

SEQ ID NO: 49917 - DNA, 702 bp, Arabidopsis thaliana landsberg
  unsure (1)..(702): unsure at all n locations
tagaaaatntaaatacaggaaaacctttttaaaaaaattatcatcacaccaatttgtgtttaattttacatttaatagaaggtatataaaaattgtcatcataccatatcatctgctttattatcaaataaaaagcaaaaaaataatcttaccattatgaataaatcaaaaattagcggtaaagattaacggtcataaaggacacaagctgtggagatatgaaagaaaataaatttcgattctaaatataattgacatatctataataaaattctagcaataaaaagcacaatcagttaagttcataatgttgaaagctattataaattgtcactcttattgtatatatatactatattaatgacatgtgattgttgtagatgtgagtagtaagacatgtatttatgagaataaacacacaattaaataaaaatatgtagaaatttttattagagagaaaactaaagtgtcatgttcgacacctaaacatgtttgtctaacatcttaaattaaattgtcctgtttgtttatacatatgaatttatgatctgaagatggaccgaattttttatttctttgatttattcagtttacatattagaaaagaaaattttcactattacatatcctttctttgtgcanagactgatttttccattcatacgataagaggaattagagagaataagggttcatcacaac

SEQ ID NO: 49918 - DNA, 516 bp, Arabidopsis thaliana landsberg
tgaaaaatagggttccagactggatcgaaggacacgaacatgccccggatgagctggccgtcgtggaggatggacacgcacaaccacgagagcggctggcgaggtaaagctcatggcgaccggtgcaggagggtcgaggcactgctggggccagggcacgggcagccggcgcagggaggccggactggacagccgagcgcggaacagcaggggtggctgggtgctcggcatcgggcgtcctcggcacgggacaataggggcgctgctcagcgcggaacagcaggggcgcgggtcctccggacgggtgctcctggacggcgcggggacgacggacgcgagcaggaagggcgcgtcgggtcctgcgggtgtcgagctcggtcctcggcgcggtgtcggtgtcgaacgcgcaggggcagggcgcggttgtcgccgggggtgagctcctggcgcgtcggggcttcggtcggtcggcgttggctggggcggctctgctggcacctaggcacgacggtcggg

SEQ ID NO: 49919 - DNA, 735 bp, Arabidopsis thaliana landsberg
gaaaacaaatcccaggtatcaaattcagagcataaatagacattattagtaaacaagaaacttccacagactgatacacactgagaggataaatataacagtgagaaagaccattctaattctgggagtcacaaatggatagaagtagatttgtcaaataatattaatcctccagacagtaaaaaggccaataataatggaaaaaaggcaccacaaaacattcgagaggcgaaaacaataaaatgatgccttcataaatattttgcacttttccccagacatgggataggtaaagaatactgttttaaagaaataaaacatcacaaaagtatagggtcagtgtagaattataaaaccttcagtattaggggaagagtagtaagctctacagcaggaagctccctcaactcactgttcaagctgtgaaatgtttcgcctgttcaatcacagatgattatctaatcagtaaaaccctcaagttacgtttacagtaaaattgaaatgccaactttgaatctaattaggatacagtatgaaagattaagtatttatattagatattaaaaaacaacacggttagtaagaaagtttaaatcaccatgcaaacgctaacaaatctttacattgaaatattcttatatccaaatgcccacgaaacagcatacctagctaaatcccttgcactactactacaaaataaactgaaacgcactccagaattcatttacgtgacac

SEQ ID NO: 49920 - DNA, 333 bp, Arabidopsis thaliana landsberg
tgtatttggtacatagtttagagtaagatgtaggataagttgaatagtcagtattcgtggtcgaccctttattggtgagtaattgtatatgttggacagcgaagagcgaatgagatcaagttggcatgtttgggttatctgtacagtccgagaattatgacgccgtacttttggtcataacgtactcgttaatttataactagataatattggctctgtcgcaaattcttgcattggtaaatatctttattataatccaaactaattttgattcgaatgattgatatctaatcttctttgtttagaacactatattggacctagtcatgtata

SEQ ID NO: 49921 - DNA, 391 bp, Arabidopsis thaliana landsberg
ctggacgccaggccgcacaggtagttcccgtgcacttgtccgcagccaggttcatgtagccaccgtcgagctcgatcaatcttcttccccaccatgctgcaccgaatctgagctcccctggcattttttttcctgcagaaaaactccccgtgggctctggaagtgcccagctcgcgccggagcgtggcgaggcttgactaacgcccagccatggtggctgtaggctgagcagacccctctgctccagccatggcgcggacctcctctggtccgagctcgagcagtgaactctccgtgagcgcttcccctgcaatttttccccttcctcccctcgtacttctgtggcgctcagcactcctagcacaggtccggctgcagcaagcgctctttt

SEQ ID NO: 49922 - DNA, 519 bp, Arabidopsis thaliana landsberg
agagaggttttactcttgctgtacgaagaaagctatcatgtgctttgtaacggccataaagggatattgaagcaaaggagactcctgtatctaggtgggggttgatagcaacactcaacaatatgaaatgagctcgctttttcctttgtgataaaacccatcctatgtactatttactttaacaaggaaagagctctgatagctttattactttcaaaagaaaagtttggacctttggttctgtttttggggtttggactattgtttcatgtgaagagaggtatttggaatatgtctttaccaacaaagagctcaaagataccttgtaaattattattacagctaatatatggcgccggggtctttcgtgcatcatctacacgaaaaatgaaaacactgaaactagaatcacacgaaaactgtcaaaacgaatacttgtttaacaagtcaaagcatcaagttaaaatttttccgttcttttcaaaagctcaaccattttcattagcctcactggcccaa

SEQ ID NO: 49923 - DNA, 556 bp, Arabidopsis thaliana landsberg
  unsure (1)..(556): unsure at all n locations
ttctatgagtaattttgtactatacataattcagttaatgatcaattgcggaaaattctaaatttttatataatgagaaacttatttacaattttaaaacttatttaacattcgtatatatgagttgaacaaatgcaccatgtgtgtgtgaacaaatttgcagtaccatgtaaaactaattagcttaccaagatggactacaagtgtttttggtcgggctagaagtaaatgggttggaaactggtcatagatatgggtaaacgaccagcggctgtgctcttttaaccatctcctaaattactttaatccaaagccaatattnttttgatcattctcattaaaatggtttggttttcccagtgaaattttgaagttnaaggtatattctgtagataagtcaagtagctagattaatcatttgggtaacacttaaggtggtccgagaccattttggngtagctccaaatgtacattctcttgaattcattcgatcaaaggggtcgtttgggtttcatcattctccttaaaatgggatgtactctctgaaaagaaaaaa

SEQ ID NO: 49924 - DNA, 1383 bp, Arabidopsis thaliana landsberg
ctattggcgaatactataatggaggatggctaagcacagacggtatagctcgatatttggcccattttcagttggttagacatgtggacaaagtagacatatcaatgtatataaataggccattcaaataaagttagagtatatggaagtgcagatatgatctgatacatgcttgtcaaagtcatggcactaactcataatgatgttttatgatcacttcacgaatttggcttctatagtggctaatacatcataccgcttattcttaacatatacggcattcatttttatttagatacaactttttgtattcttttacatctcttataaaatcaaaactcaaaagtaagtacttagaaataattcatatatttcaaatcttttaaaagtaaatgatttttttttttactgccctcgatcataaattttgaaatctcttcatcgagaagatcgaggacattgttagttttttaaatttatgaatttataaaaaaataatgtgggagagaggagttatagttgttccatcaacgtggatgctgttttttaattgcgatccacttaatgaagctaactttatggccatatgcatgcactgctttttcggcaaaatgtcaaaatatatcaccaaagatttgtgttcttggaaagtttcccttttgtattttaagtcaacaagaaactttataaaaattcaatagtggcctttggatcacatcacaccttctctatgtgttcaccaatataatagaagtatattactaatcatttcgtatccttttcttaattgacattagcaaaggaaatacattttaagaaaccactagaaagggatatattttacttttcagttttgaggaaagcacctccttggagaacaccacttagaagttagaatattagatcaacacttaagtggacgaatggttctcattcggtttcgggttcgattcgaatcagtccaaatttaatttatccgttaaaaaaatatatacatagaaaattaggaccagcttagatgtcaaaaagggaaggcttaaaatgggcttaaatctggacccttaaaatgggctttcagaaagatatgtggtggagtaggagtactaaacaggctcaattggaatcgtacatttggaataattgattttacttgatattttttgtctctctccgaagcaacgagggttaaagtaaccaagtgtagaaaattagggttttcaggactcagtccatcttctggcttttgatagaagttaggatttctcttcttttttttttctcttgccccatgtgtttgtaacaatgaaaattaaattgtatcttaataaaagcaatgttgacatgaaaatgtaagaatgtttttcatatgccaagttgacatga

SEQ ID NO: 49925 - DNA, 656 bp, Arabidopsis thaliana landsberg
caaagataattagaaaaaccataaaaaaaaaagtaaaaaataagaaattaaaccaaataagcaaaaaagagcaaacaggctttgtgtgttccttctccatcagacgaccccaaaacggcatgcagtgcgtatgaatgttttttggaagcatttgtaataacgtgtgtttttggtcttatattacatgtaacgtacctcgccaggtaagtctttcattataatccacttatcaatcaactcctctctctcccgtttttctagcagataattataagaaaactctttggcgtttttcaatatctcttcccttggaaacgccaattgtgatgcccggtataggttgaacataccggttactgcttggtttgattgccccacaaagcagaaaaactctccctctttctcaaagttcttgaatacatctaaaattaaagaatgagcgtttcatttggttaaatgctaaagtaaataaccaaaaacaaaatatgagttacgttgttacctgcggacacttggtatccatgtagtcttaagagcctaaatgccatggctgtatcatcgatatcttggacatgggaacatctagcccaacatatgccattgtcggtccaatatctgatatttatcatcatcatcattagaagaaccctagttgg

SEQ ID NO: 49926 - DNA, 599 bp, Arabidopsis thaliana landsberg
  unsure (1)..(599): unsure at all n locations
acatacttttcgtttttaattacttaactaggatctttaatatgaaaaattgctaaatggtggaccaagaaaacaaatgtatatctcttctcattgtagataagtttagttgatttacagccacttttgactttcaaatgcgtaaattcatgaaggatatgatcgaaccacagtatgccatagagaacaaaacttcatacatctatctgtttctgtttcgagcagttagtaatgggctaatcgatgaagcagcacaatttaaccggaatagaatagcagaacaaatccattctgtaaaaggtattcttcatagcactattttaacagtttggaacaaggatcaaaatcaaacatcatacaacgaagcaacgagacaagtagaaagtttgcacacagcgtcgacttttagcttggactagtctgaaataattgccgaatttcattcggcatgttcggcataatctctgcgtatgctgcaatgaagaaaagaataaataaaccgtagaaacataacttaaacagatcgttatttaaactaggaataccttcaggtagtgattggatccggaaagcattnctcgcaaatggtaaacgcacag

SEQ ID NO: 49927 - DNA, 583 bp, Arabidopsis thaliana landsberg
ccttttgatcaagacgctcgttccagtttaagcaacggatttagcttctaaaccaatcaccggtttgatcagatttgttgacagttgggagtggatgttggctcatgtatattctcaccgaatctccccttgaaagttgttgtcttctctttccatcaaacgaaacccatgcattgcttcgagcatcatctggaatctgtttttgtttaaagagaattagtcagcatttcaaacagcttaacactgaaaccatcatgtagtcctctactcatgagcttagagctcttcttgggtggtttttactacttacaggaaaagagtgtggttctacaggttaaaagtactgagttgcggatgtatttaaagtctttacctttaactcgagttttgcagaatctggaagtataactggtctgaacgacagggaatgtgggcagattggagtgaacagcatgcaaggaacgtttggatgcacctgcaattttcggatttttataaatgtcatatagaaaaggttcggggactcacggtcactaaaattacggcatgatagttctcagagatggaaatgaggttcatatgg

SEQ ID NO: 49928 - DNA, 630 bp, Arabidopsis thaliana landsberg
  unsure (1)..(630): unsure at all n locations
gatctctttcggatggctcggattagacattgtgcacctcttcaccccaacgactttaaaccgtagatctgaagatgagtgcctaagattagatgttgttataccgattcggccaggccgatgcgaaccgttgagatccgatcgggtggatctagaaggctctaggttatttaaatctacgccgtagatttctaatcgtatggtcggctgcgtaccgcttcgctccgggggtagaatctaatcctagcggttgaattctgatcgggcgaaccacatctggttggtcaacataaaatccaggccgtgcatatcctatcctagggttcctattgagtactagttcgggtgggatctgatttaatcctagctgttccgccataatcgggtggccatgatttgtgcataccccttcactgcgacaaattagcataagtgccctcgggttttaggggaattaaccgtagtccacgctgggtgtctgagtcttggactttcgcgcaatacccctgagctttctgataatgttgcatgcagtccagtcagggaataaacgatgaaaattcatttaganaataattattagtgcaaaattaattcgagaaacttgtttatgtcatagaaaatttattt

SEQ ID NO: 49929 - DNA, 1135 bp, Arabidopsis thaliana landsberg
cacggtatatgtgtgtataattagttaattgcacgtgacctatttttggaagcatcagatttcccgcccaattttaattatctacccagaaaataaaaaaaattgaaatttggggtttatctatgaaattcccaaattgaaactctcatcgatttcgctggaatttgaagattgcgatcagaaattgcagatttttcgaggtgagttcttctcgtcccgtgacattgttagattctccataaacagtgattcaccaattatcaacacttgagtttaaatattgaaacaattccccaatttcgaagaaccctaaaaatagagattggttaattgattcgttgatttcgagacttcttcttgtccgattcgcatactttgcattattggatgctccaatatatagttaagatcaatatttaattgatttatgaatttggatttttccattttgaagcaacattgattcagattggttgagagattgattcgttgatttcaaggtccgtgaacgaattactcgttttaagcataattgtaatatataattaacatttagacattggatttttcattacgaagaaccctaaatacagattttggttaacaaattcgagtgttattttttttttgttgcctcgaaaaaaaaaccatttcttagggaaaaacatgagaaattgcaagaaaaaaacattgattcgtcagacattgaaaaaaacacatctctctgaagtgattctcttttattttgacgatcatacgtagttaggttttgttgcttcttgtctcactgcagcttcatgcttctcatcctgcaataaaaaaaaaaaatgttaaacaggttaaaatgttgttggttcgagtttcatgatgatgagtgggtttatttttgtttctggaagtttcttaggggaaagatttgggaatcgattaatattagataccatattgacaaggaatgattctatttctaggcatattttttgttgtgggagcttttaatttggttctgataaagcctgaagaacactgggaagagaacacttggctgatttaaagcctcttataactcaatatgatagaaaggcaagagaatctctgttaagtaacaagctttatgctgaaacagacatgccct

SEQ ID NO: 49930 - DNA, 881 bp, Arabidopsis thaliana landsberg
gcatcatcaagatttcacaaatcatcaaggattggtgtaaataaacccatttatgattagtttcttgatgtatgtatgagaattttgatgatgcggcagctgcaatcagtggcttacacatataaacaggtttgtgttgattggaaattatttcctagttcaatctttttgtaggaatccacagatcggaggtatttcttggatatagctcgagaactttttggtatgttcattttttctctatcttgaattcttgtagatgttttgaacctctcaaatgatcttagatttccagaaaaaaaatcctagttttttcatatgatcctaatttttttctggttcatatataagtaagtatctctagatcatactgatccattattgtaagatttttacttctctcagctttcatcataatttttgttttctgatgacttcagtatatatgtttgagtagatttaacgactatatgttatagtgatgcattcttgctgtgtattttgattcagatctaccaacagatttttcacattgaattttattgtttataattccatcttcccaaaatgccaatctctgactaggctccaaatggtaaaactagtgggtattgcaagaacttaattttacagataatcgtttgacaatctgatatattaaactttaacagaactatgattttgtttaattgggaggaacattcgtgtgcctgttactgaaaatgcatactagtaaggtatgtcaataatggttgtggccgttctttatatcacacggatctcacatttctttctttgcaacatcttgtacactaaaacctgcagaatgagctataactataaggttcagtttaccgcatgtgaaacagttggagctaatg

SEQ ID NO: 49931 - DNA, 527 bp, Arabidopsis thaliana landsberg
  unsure (1)..(527): unsure at all n locations
tgacacgacacaggccgcgccggtgctgtggtcggtggcgtcgtcggcgccaagaagccgccgctggttggcaagttcaatctgacgcacacggtcgcggacatccgtcgcttcgtcgacgcgtgagtggcagtggctgctgtcgcgtgctgctgtgctgaccgctgtcgtgtgtctccatcatgctcgtgtggattactctctgcctggtggcatcgcttcgcgccctcctcctcgccgtcttgctactgctcattgctgcttgcttcgcttgctgcacagtgcgcacccgctaccggcgggctacgcctacaagctgatcaacacgagcacgcgcccgcaaaaggagctgaccgatgactcggccacgatccagaaggctgggctgtcgaatgcggtgctggtgcaggagttggaccagctgcgtccgtcgtctgcagcgcccaaggcagcggtagctgcgtcgtctacaccggcttcgtctgccggtggcgctgggactggtggagctgctgacgcngcgggcg

SEQ ID NO: 49932 - DNA, 1052 bp, Arabidopsis thaliana landsberg
tatgatttatgatacgtatgaatctatcatctatgtatgcttacatatgctgatatgcatgcatatgtcatgtgtgcatggagtgacggtatacatgcatggagattgaaattcaaaatacatgaagattgaaaacatatgtaacgcaagcatatctatgcatgtgtacgtgtggacggacgacatcttaaagaaatactctaaaaccatttgaaatcaaaagaaaaatgattgcaaccatagacatctatgcacttgaataaaagtcaagggacacacagtacttaactcatatgtactgacaaaatagtgttactttgctcttaaccattggatatcaaaagaaatatgattccacaagtagttgaagacatgcaaaatgaaaaaatctttctatccttcgtttagcggctcaacaaatgaatcaagtttttcagtcgtattccggatcattggcaggatggtccaaaccataattcacatattttaaaactaattttcacatttctatcagcaacggtaattaatagaaaatgttagtattattaaaaatttgcgtgtgggagtcacgaggcaaagaggaggatataaatatttttagtggagattggtcatagaggagtgtgtttggtgacgtccacgtccctcaatctcatttcttaatctggctccactataagaatcagtgatcaatttcgaatcctctccgttcgttttgttgaagttcagaatctctagtaaattctcattagatttctaaatcataaaagaatatatagttagacacgatgatcaaacccaactaacaatagaatatatttgcttatcaatcatcttctaatcatattcttccaaatgtattggtataattgcttccgttaaccacctcattaagtggtcaaatccaactaataatcatgcatcacttcaaatgccgtagctttcagagtgtggtgttgtgtaaaatatcttctttagacacaaggacgattctaggaatgccaaagcagcacgcatgaatgattaacccctcgaaccaaatctaatcgagc

SEQ ID NO: 49933 - DNA, 1114 bp, Arabidopsis thaliana landsberg
accaatgtttacattacaagaaacaccaaattgtttatatatatatccaaatacaatgtacattattttttggtccaacgccaaataaacccatgcggcatttctgcatcaacaaaaaccgtctttgtccattccattagtacctaaaaaagtgtgaataagccatagacaacatcccacataaattatgatttgttaagattgaagcgtattatgactaaacacttctcttgaagtaaaaaaattaaaaaaaaaaaaaaggtgaaagaaaaagacaaaagagaacggagaaaccgaagagaggagagttgaagataacaaatctataaacgaggactgtcctactccccacatgtgcctgacgtgatctcaactccttcacgtgatttctcttcctcattttttgtaattttattactaattctccattttttctcacttcttattaatccctttttattattcaaatttttgttttctgccacttccattttattactattcttgctaaaagagaatggaaaacaaaatcactttgtttaatgcacccacgatccagtttttattttaaattgttgtgccttctgtttgattgcatgtacttaacttcttataataagtgtagatctactcttaacgtgcaattaactaatagtctaatacatcggggacacgttcaattgttggtagcattcttgtttagcattatatataatccatgattttagcaataccaatcaatcattccaaagacagatcgtttcgttttcagtggcttttcattagacgatacattgttaccctactcaaaaacttaactcaaatgggttacttcaacaatcaatattgaaaagaaatcacttctcaacaatagattaagaaaacgaccagaaaggagactttcttgcgcctttgtcttggttccctgaaattaaccatagttcagtcttagtaacatcgaacaaaattgctaaactgatcctaatggggaaaacgatgcatgcatacaaaactgttacacaatactgtaaattgctaaacgcatacaccaaaaaagaagcaatcatagcctataaacagcgttctttgccttcgttacaggttgtgaaacact

SEQ ID NO: 49934 - DNA, 1272 bp, Arabidopsis thaliana landsberg
tcacacgttcatgtggctgcctgcattccttattatccaaggtggagcattgtcattggttggtttcttgagttgggtccttatgttatttatatacatatatctatatctactatatatataaagatagtgtaattaatatttcatatttgcaagagctaaggcattgtataagaaatgggatggctccattctttcttctctcctttgaagaaactatggtttagcgtcaattctgctcaaaagaagagtatgatctctctctctttctctattatgtatgtgtgtgtgtggatcatatactcctttgtttttttttgttctttggatcatttactctttttgtttgccatatgaacatatatctacatataaatatgcattctttgtgttaattttgaaagatggaaaatgtgcaggaagagggatatacatattatacgaggacgtgaagtcatgcccatacgaagatgtgcatgttttgtggtctatacttgtggagtctcacccacacactttgcaaatcaaacaatgataaatccatttcattactctctttttggttcagagggttcatacaccgaatgttcatgctcgaggtcaaaacgaagaagataattcttaatggcatgattcatatatctgttttctctcctcacgtactgtacatataatataaatacacagagactctctttcccataaggttcttgctctctctcgcgatatgcaactatatatagatgtataatgtacatatatgattctctagctcttgaggtcatatacttgatattggtatagagccgtggttaattagacttttgaggggtcatagatgatttcaaatttaccctattatatgtaaaaaaaatgattagacaataatagaatgaaaaagataaaactagtaatgatgaaaaaactttaaaacattttttttttaatactcagtatattcaatgttcaaacctttactcattctcatgtcactaattaaattaaaaatcggagatctaattgtatgcttaatgagtggggctcaagacatttgccttgtatatacaagggttaagttgtcatggctctgtcggtatacatagatagattgcattatttgggaaaatagttagatatgagcatgattggtgtatatgaaaaatgtgctatatatatggatgaaaatgtcggccgtaacaaaaaaagcaagttaaacattgtaccaataagttatttttaaattggggtggaccataaaaaagattaaaggtt

SEQ ID NO: 49935 - DNA, 817 bp, Arabidopsis thaliana landsberg
  unsure (1)..(817): unsure at all n locations
ctaaccagactcagatgctgcaatttgcagtgtttttgtatcatcgtagcaaaaacaagccggagagaatctcagaaaattcaatagatttttattcggttagtagttatttgcaataataatgtaaaatatgtatgtgtctcgttaagaaatttgatgtgattgaccgtcatgcataaaaagaaaaaacacttaaaattaaaagttgacacttatttaatcttacatatacgtattaattaaaatataaatgatctaaaatgtgctgtttttaatattaatttgaatactagtaccgcaaaaaagaaatttctgaaaatagtacaatattttcaaaatatcaaaactactcttatatttttacaacttcctagcagattttctgtagatgctataaatttcaagttcgatatataaaatagattcacaacgtaataaatcccaatataaacccatcaatagtgggccaaatatcatcaacgaaagttaaaatgattccaaaaattaactatcaccaaatcttgtgatccttaaatgattagatgaataagaaatctaatgtttggttcatggtatagattttttctttaaaaactcaccatgtaaaccctcatttataaatatgatcatcaatagtcaagtttgactttcatatgatgaattgttatgaaatcagatttaagtattttgcaaatgaataatatatgtgtgtattaacttttaatgaattagtatcctactcggattatatactataaatatattacattntatgattcttgtcaaaaattattcacaagtttgtatatagtttgta

SEQ ID NO: 49936 - DNA, 571 bp, Arabidopsis thaliana landsberg
gttttgagatttgggtacatctttttgccccctttacataccaactaagtacattcttttgtacgtcatgggtagattaaggtgtatttcttttcaagttcttgtttcgtttctgttgaatttataggttccttttcatgtcttcggtcaatgtaaatataatttctaagtgttagcggtcaatgttcccggtaatttggttctaaactataaactattacttattgtttgggactaacccacgatcgtgccatttgattttattgctttattattgtatgttattatgttttgacatgctcgatcaccaagctatgcagaaaaaaaaataaaaaaatcttgtagaatattctttagatctatagaattcatactaacaagatattagatgacgacgatcaagcaaactttaaagatatatcataaaaaaaaaagaggctttcgcaaatcacgcaaactatatagttttcactaaaaagaaaaacttgtgtattaataactaaacgatctttcgatctaaatattaaacccatgtgggaagattccctatcgcctgaaaataaaatgaaaa

SEQ ID NO: 49937 - DNA, 693 bp, Arabidopsis thaliana landsberg
aataacacatctagatcacagaatattatgaatccttcaagtatttcaatgtactgtatttaccaattgcaataaccaagatctgacagaagcatcacacatcctttgaaagcttcaatgatcaacatattgggattcagaaactgcagaaaaaggaaataatattagaaatagaatggccaaagccattgattttcttaccaatatatcacccatcaacctagagttgaacctcagcgtctgagccattctctgaaacatgattgcattttctcgcgagttccagcatttccattgttcaccgtaggaataatcttatcaggccttaagaactgcgcaataacgaaatcagttaatgctaaaagaagtgaaaaacttatccaggacagatacggatagataaaataatgacattcctgatacatacttgaacaaactcacgaagctctgtgaagcttgaatgctcactatatggcacccctataaaagttacataatcacttgacagtcagacaaatcggcctccacaagtcatcataatataatgatgatatttagagctaagctcatagagaatgtgcattataaaaatcaaacgcaccatccatggtgatttttccccttgaagttggttttaacagatcaaggtgttcacctatcttctcggagtaagtccaacctagaaaccaactt

SEQ ID NO: 49938 - DNA, 475 bp, Arabidopsis thaliana landsberg
gacagattcttcgatggatcacatgatatatcgcttgtctaaaccacgaacttcgagtccgagcactttaggctcttgtcatactgaccaccatccgctcctatatatgataatatatgggaccgatgatgtcgacttaccgacgaagtgctgcaggactggtcccagatagtgttgctgggagtgggaccggcatcacggcccatcagtgaagtgaaccagtgtggtcacggtggacctggatcgtggaccgtggtgccactggtggtcgccggccggacctctgcttggtgttctcctgtatattgtatatatttctccaccttatatgagacctctgcatgatcctaatctatttattcactcattcagtccactgtctgtatcaacacgtatgtatgatcagcatcacatattccaactgttcatccagactatggctggtgtcatcttcattggatagcagcaatcatat

SEQ ID NO: 49939 - DNA, 222 bp, Arabidopsis thaliana landsberg
tcctactatcatcgtttcaatatatcatctctccgctagcgtcttagcctcgagactatactagtgcttgatgtatcgagggctacgcgagtcttcaaggacgccatattgtctgtgccagaataagtccgccgcttcgttctatttcgtaaccatgtgccttctttcgctgtacacccatgcattcacgtcggactcggtaaggggaataccgtgtcaaga

SEQ ID NO: 49940 - DNA, 822 bp, Arabidopsis thaliana landsberg
tcttatttggtggagcgtgggttacaaaaatgtttgaaagttaacaaacgcgcgtctaaattattattatatactattccaaagacgcgttcacatttaacccaatgttaaccaaccaaatctcaagatgtggagatgcattcacacatacaacaagatatatatctacttaacttatctgaaatgcgttcacatcacacgtatagtagtaccaaagacttgccatgaataaagaagataagatgtctagacagatcaatttgtaaccgtcatcatcttccatttttgcatgacgtccaaaagatcacttgaacttttttcatttcgtggtgaagattccattggacaacgtgtgactatatttttggctcatcacttttttgtagtgcgatcatctaccatcttgcaacatagattctcttataattggcaaaatccattaaaccgataacaaaatatcataatgtcacacacactagtgattcctcgtgaacccatccatattctttgcttgaccgcttccataaacaatccaccccgaagcttttacatcatgatgtctttgtaaatttaggaaaacacagacacagttggtcaatgataatcattacagattctaaaagaatttggtagccactagtcaaagaacttaaaaggcaagatttatcgggacattaggacaaggtagatgaatgcattataagaaaataaaaaaaccctttaacattttgtttaatagaaaagaagtagaggttgattagttattgttaaagtaaaatgtgttgggcttgtcttttcctcaaatgtcgcgaagctcaatgg

SEQ ID NO: 49941 - DNA, 511 bp, Arabidopsis thaliana landsberg
tatgacgagttagaattgaaaataaaaaatcacgacaactataaacatgtgctatgatttgtgagtcgtgatacatgttaatgtgtatgaatccaacataattaattttcaaaattatcatgttcactatgtggccgtatattcacgaataaaattgattctctcaattcagagtggaagtgactcaagctggtcagctatgccaaacgcaaccgaattgatatcttttagcaactctacaatcttgtcgttatggtaatatgttgtaaacacaagtgaaaggagaatggacatcacaccatttcaatatttatttcgatatttggtgagcaccataattaattggactaacaattttgctaagtattgattttagagtccaaaggattgcatacaattaaaaaaatatgcaaagcaattcagaagatcaacttagatcaaaattgtcaacaaaggacttaaatgattattgaagatttacaaatatccaagaaacaaattgttgacacct

SEQ ID NO: 49942 - DNA, 615 bp, Arabidopsis thaliana landsberg
attcttttaaatgtgtttctttattaatatatagtgtatgagatatattttttctagaatttgagttggaaagaaagaaaaaagttattaaaaaagcaattattatgcgcctaatctgttttggatttgactaaaaaaacacattttttaccgtttttttaatcaagctctgttagctttctaaattttattgtaatagaaataaactacttttgttgaacgtttggcccacaatcgagaaggtttgaggcccatttcttagctatatgttagtgagaaattgttaaatttaaatatccagcgacaaagcccaccgaatcatctcaacaaccaatttctagaggaacatggcaaataactcgaccatagagatttttttgataaaaaagagattttttgccaaaaccaaaaactcgaccatagagatttaagagcatttaacgacataagttcaataaaagtatcacaatgttacgacatatcatcaattgtaaatcgagaatagaataatatcaatgtacattaccgatgatgtaatgtacatctctttagaccggtgataaaattggatttcatatactctatagtctcttccatctaaattttacacaaatt

SEQ ID NO: 49943 - DNA, 861 bp, Arabidopsis thaliana landsberg
  unsure (1)..(861): unsure at all n locations
actccttcttaagttacttcagagctcgcagcctggcgctctggcattgtcccctagaactcactatctttcaatgatctttaatgtgatttggaatttccttacgcatgaatttaggatttactcttagcttgtccatgaaaagtcttgtaataacaagacttctgagtattttgcatctcccattcagagtacaactgtgctttctatatgtcgtctttaccacccacatatgtctcggctcatcataagagcaatacaccctccatttacacttacctacgataccacacttgaattcaagccttgtcttctcccatcttccttaaactatattattccctgtgtttaaagcatactcaattacagcctctttaaactcaacaccattgaagaataattgacctatagataatctatcgactatgttccttcgaattcttctatctcgcaaaacaatcggatcttcatcttcatctgaactnnnnnnnnnnnnnnnnnnnnnnnnnnnnaactcatcaacgaaatttcctactgaatcttctacttcgaactcaaaccgatcaatcacatcctcaacatcttcggctttactcttctttttctttttcttaccttcccttttgtttctttttcttttgttgtcatcttcgttttcctcactaccattgttatcaacatcttccatgtcaatgtcgggttatatgtcatccatgtctttttcgttgattacgaaacttaaaaaaaattatgaacctacaaaaccagtgagagagaagctatatgaaaccaaagatagaaagaaactatgaaaccaaagagagagaanagaccacaccagagacattgagaggaagagag

SEQ ID NO: 49944 - DNA, 768 bp, Arabidopsis thaliana landsberg
taaacaacttgctaccatatgttgatgcatatataacatcatatagaccatttaaacttctttttaaaacaatgcttttatgatttaaccatgtgatttttcaaactacagtgttcttcctgttactaaaattacaataggctccacaacatgttcagcaaacatttttagatgtcaaaaaagcattatgcttttagccataatgaaagaaaataaaagagccaccattaacaaaacagagatattggcattgttttggcgtgcggctcgagaattcaatatttttctcaatttgtctttggatttcaagaaacattaaagtattaacattagtttcgtcttttaggtggtgagcttattatgtagtaattttaatgtttcagtttaaacaaagattcaccggtttacatgctccgatgattacggtaatcaaaagggtcccaaagttatacgtcggacaagtacacttgataggattccatgtggtggtcccttatgttagtcatcactcatcatccaatcctagccttcttcaatcatatatattacatactcactcgaggctaaattcgtcaaagatgggtttgttttttaagtatgagatgatataaaatgtgacaatgtttgcatattattaggttatctccttttgttagtcaatctatctcaattctagatggtatgtatagtcagactcttaccaaaccacacatgtctgattttgtacgtatatgagtattagttgaataacatttaaaataaatgact

SEQ ID NO: 49945 - DNA, 612 bp, Arabidopsis thaliana landsberg
cccattcgttcaacaaagcccattaagaaacttgtctttttgtttttgggctaactagataaaaaaccttgtctactacatatttagactgagtcttgtgattatgtgtcagtgacaataacagtactgctattatgccaaacacaatctatacagaaactgatagagaaggagagacaatattcatctctgttaattaaactactcagaacccaactccactaatttacaatagatctaaacctaattgtcactcttatgggttccaagttgcagacagctgtgtagagattactactggaacctgcaagacgcgtaaacacaagtccacaactacgtttcagtgatctaactaagcttcttttaagaatctttttagaattaaatttggtatttgttacctcggagattgtcgttttgagcagacttatgtcatttttccgcctgcatcagacttcctcctgtagaagagcacatatgcagcacctgacttcacatcatcttcgtttatgtgtgatatatggctatcatcgaagttataccacctactgtcgtccaaaaactgcagaccatattcgataataaacataagaaaaacaagcaagagactca

SEQ ID NO: 49946 - DNA, 612 bp, Arabidopsis thaliana landsberg
ttctaaattgcagcaattcgtcgttcgttgattgacaatccaaggagtcgtttcatcgacaaatttctagagaacagacgagcacatttggcgactgtaacatcggattgagacatgtgttctagcttgttatagtagaatactttgttagtcatgtatcagatgaaacttattaataatgatttgtgttatgtttttattggtcgtgtgttcgatctcaatgttaaccgctttgtatagaactatgtgacctctctattatctaataaataagttcatcatcattagtttgtttgtcagtgttcttattagtaactacttcctttacagtggggcatttttctggtttcttgttctgtctgcttgtatatatgaggttggctttcgtgtgtgctgttgcttcttataaaaccagcagcagagaaatctcgggttgatttatcatgtgaattacaacagttactggctcagtgaataagttatatgccatccaacataggcattcaggcactcaggcacacaaaaactgagctaaacaacattgcaacacacatgtcacagggccacgaccaggtccaagtgggccacacgacaagtagcaatggtgcacag

SEQ ID NO: 49947 - DNA, 1156 bp, Arabidopsis thaliana landsberg
tgattaatgatgtgtaacgaaaattggaatttttgaaatataatttatgtgaaaacttataatgaaatttcactttaataactctctttcttttgtcaatcatttaagtttaataactctttaatcaaatttgagtagtaaaagaaagaagaagagtcaaagatttatgattgttttagctacaaaatccttttatttttagagtggaattggtaactttgtatcgctaccatatagagtttacagttttcgctgtaactaatcacaaaaactttactatgtgcatggttatcttctctctacacgttaattttttttacccgttgctttgaatagttttaaactacgtatgtattgttatcttctctctgcacgttaaaatttttgttaccaatccgattcttaataaaattatgagactgcaaacttttttctttcaaagtattatactttatatttagtcactgaatcatttcataatgacactatacataaaaatatttagtgggcatgaggagaatctttatagagtagaaagaggtcacaaaatatccgctcgtgcggaagagaatactgacaaaaccggtacccggcccaaccctacggcccacgcgcgtcgaaaaccgtctccggcttttcataaaaacccttcttattttaattctctttttatctaacctaatattattaaattgatttcctagatccgtttgtggtcctcactatattctaattcaaaatttgtcatttacatcgaacattacacaggctaaatgttttagaatcatattctatttttttatgtttcctatgtgtataaactatgttatgtgttaacacttcgagaaaattgtgcttgtttttctcttaatctattcagctcattttttcatgtgaatgtcacagattcttggaattaatgttctattttctgtttatgtatcacacttgcattcggcttattacatgttgatatacgtgctctggaagcagaaaataaggcctcatctatcatccataaccatagcccactataccccacatatttggcatctagaatagattctttttccaaaaaaaagtcattcaacactttaacctgtaactagtccaatcaagtgcttataaaatgcaaacaatccttcagaggcttctc

SEQ ID NO: 49948 - DNA, 800 bp, Arabidopsis thaliana landsberg
gtcgatgtcttcctcccctacacgacaatgttgtacatgcatgttcaaacaatttgcaaatggaagatatatgggaaatttgagaaaggccatgacggagacccacaattaaattcatgagtacataggtgagaacaaagctgaagcatgttctacatgcccaatcaagaaaaagtcaaacttttctcaatgccgactttactgttctaaaatgtatgaaaatacacattaatatacaatgataaatacatgcaaatatatattgttataaactatataatggttacttgatatggatccttatacttaactaacttaacaccaactccctggatctataatgtatatattgggctaaacaggtcatgtggaagttatttgaaaagtacaccatatcgacctaattagattggaggctatttatttagtttttttgtcaacaattagatttgagtaacggatgtaaccatattatttgttcctacctcctaggcattattatagtataaggtttttttttaactaaagatgatttaaaaaaaaaaaagtgggacctaaaccttaaaaattccaataacaaatagtatagaggtcctttttctctttatataaacccccaaaatttcctcttctctgtattctccactcaatacttatttcctctgtcttccttcgcttccctcttctctcaccacaatccgagagagagacagtactgtaatccaagtgagagagagagagaaatgaaaatgcagacgaagaagctctttatcaccattggctcctttcttctctatgct

SEQ ID NO: 49949 - DNA, 889 bp, Arabidopsis thaliana landsberg
atttgattgtagagtattaaataaacctttcaaattttcggttttagaaaacagagatattgaatgaaaatggaatgttatatagttttggttataattccatgtttgcaaatatatctttaaaatcaaagaatatccatagaaaatagtcgtcaattttactttatcatcgcagtttgaatttacgatttgctcattatatatgaaaactaaaactgaatcattgtaatatctcttcatttttggcttttgtaataattattccggtatggacatacagttctttttcaatttggattggttcctctagatacgtaagcaataaactggcataacagaaatgatttgttaattgttgcttcttttttttctgttttgaaagaaataggaaacagggtttgggatcaaaagatcttcaacaatgtgaaggttcgtgtacttcccagtgcttcaaggcgtggacctgggcaaaccggttagaaaatcagtactaaggaacaaaaggagtattaagtagaatagttacttcaaaatattatcaaaaaaaaaattttattttatgatagataaaagtcatgttttgtaaccactcatatgctgtttttttttcaaaagatgttcaattattgcatttgacattatggttcataaaatttgaagtggttaccgaaaaaagtaatgaaaaggagaacccaatgttgaagacttcaaaagtagaaatttcagacagtatttttgcacgactaaaacaaagtaccactttattcaacctttgacgattttacttttcataacaagttaagaacattttgaaaaacatagcaaactttttgagaaccttattaaaaaacccagcaaatcctttttcaaccaccccgaaaaaaacttt

SEQ ID NO: 49950 - DNA, 739 bp, Arabidopsis thaliana landsberg
cttatattatgtactatttcgaattttatagtattattttgcattttttggaaaactcttttattaatgttaagaatttagaaaaatacaaaaacttattaataaataaatatacaaaaattatcaagaaagaaactaatgatgtagtattcattcatatctttaataaccaaacattgacgaaaatttgtaaacttaatgaatggagtttggctttcaaaaaaaaaaaagaaaaatgtgggttttcaagagtttaattgtcttattgacgaaaagtgaatgtggtctagtggtatactgatattcataagtctaccataaactagcaaaatcttcaacctcagtacttaatatcaaattaagtttcttaacactagtgttaattggacaaatgaccggtccatcgtgccttaaaaccgaaaaaatgtgttagactctacttattctatgttttctagtccgctttttttggttcacttgacctaaaacataatggtttgttggaagtattatatgatatttgattttatgtaattatgaaaaatgtgcgatattagatgtgtaagaagaaagactcgttttcagagttgggtgtgtcaccaaccccaggcaggttgttgttgttcgaagggcaagcctttgtagttgttggcacagttaaaggtaaaatcgtaaaacggtgaaagaaaacattggaagcatcgaatccaatacacgcactttaaaaagagaacacaac

SEQ ID NO: 49951 - DNA, 801 bp, Arabidopsis thaliana landsberg
catgcaacttgtgaatggataagaaagagagaactttttagtagcccgttatgaacaacaaacgtgatcacgtaccattagtatcgatttccaagactttagatgttcattgacacaaatcaaagcacattgtctactgactttgataattcttcgttaccagtacttatttctaaacgaaccatttaccatttccaagctccatctttgcacttaacgtcacaaagaaaggcacgaagactacatcagcgtcagattcactaaaaacccttttagcaaaagatccaattcgtttctctggtgaggtttctaggtctcccatgatccagtactcagcactgtattgcttgatcaacgggttctctgggtacggtgggtatttatcgggtgaatgggttttacgggtcgggtgatctgggtcactgggtatacgtgaatctggagtagaagaggaccagtatttgtcgataagaccatagtttagggatcttggaagctcagctacatagacattgataccgttttggagagtgttgtgtgaaatgctcggatttggattggagattaaggaattggagaagaagaagagaagacagtcgtcgaagaggagagagaaagagaggaagatagaaggaattgaacagagaggtctagtagacgccattgatgcgatcttaggaaccatcttcgattttgcttcgcaggaaagatctctgcttttgcttcacaggacagaatgggttattgtaactatgaatcctctagctgaagcagaggcacacacactaatttcttaaattg

SEQ ID NO: 49952 - DNA, 833 bp, Arabidopsis thaliana landsberg
  unsure (1)..(833): unsure at all n locations
gcataagttcgtatgaagctgggctaactatgggcttattggaatttaaaacagtattttaaattccatctttaattgaaacatttgataagcggaagctgccaaaacacgcgtccatctttaattaaaatcaaatgtgaattgttttcatttttgtgacatttaatatttacttctagaaaaagaagatcaagtaaacatgcagttaagttcaaataagattagaattgtgatacccttgaattcgatttagtatgcaatttttttgtatttaaagaaaatatattggagtagacaaagagaggaagatattgtaaattttttgttattttcttttctcaatatatttaaggtaattaatcaggattacgttttattgttggcacatttaatgcctttgcggcactatttgggaaagattaaagattgtttttgggtggattgtaaattacaacctttgagaagaaaacactgttgcgtcttagacacgtgttaactaaagacaaaagaatntggtttgtccagatttttgttgactctttgaccccgatacgtaaaatcaacggcgttgaaatttacacgtgtcaaatattaagtctaattatatgtgtgaaatcttgattggtcggaaagaggaaattgaaaaaaaggcaaataaaagctaaagaggaaagacgaagctacagcttctgaggtcggaaaaaacgaattttgataatgtagggttttgcccttttcttctctcttgcgttatcatcggggttttgattctccggccaagtcccggagacttgtgatctgggggaatttggtgttcaatttcattaagacgc

SEQ ID NO: 49953 - DNA, 1014 bp, Arabidopsis thaliana landsberg
aatgtcaaatggatatagaaatataaatattttacatacaataattataaatccgactaaagtcataataaagaaaagaaagtatatcctttaatctttaaagcgacaaaacatgatcaaaggcaaagattgagttggttagcataaacagcgaactatcttacacaagaaggaactgttttgagcctaagataccatttgattagctcattgtttgatttttttcttgtattttgaaaaaaaaattaagtattgtttttggttgtcatgtttttatgcatgttcacatagggaagagagaaaaaaaaaagtagaaaaaacttttgttatcctaaaaggtttggagtttgtaattattttacaagtaaaagtagggaaaaagaagacgaaaaagggaaataggtgacaagattacacgaaagatgagtgacaaacatgttaaccatttgcatatgcatatccatccacctaaaaagagtaaaaattaacaaaataaactaatcataagattgagttcgtgtcaaaaggtctgtgatatgagagatcaataaacgtaatttgaaattgactaaacaaaggttaacgtctatgaaaacaaatgatgtatgcattttacagtcattatcttttagtctagtctttaacaagaacaaaccaaacctaatatgcaattcagttgaagttgggtttgtaataatagcacttcaaaaacctgattgaaatttgattttaaaacccatttggtatacagcgcagcatattggaaagatgaaagcaccaaaacaaacagagagacaattccatcaacaaagcgaatgagattttgaatggcacactgaaataaagttgcaatggacgtgttcgctctttaaggtttcatgtatcgatcttaagtagagaattgagtgaagtgctgttgaaccgctgagcaaagccgcgaatgacaagtactataacatcgcggagatggcgcgactgcaccactatgtctacttcattctcactatccacaac

SEQ ID NO: 49954 - DNA, 611 bp, Arabidopsis thaliana landsberg
  unsure (1)..(611): unsure at all n locations
tatcactctgagcatcccagaaaaacggttagtccattgtccaaataagtatagatttatctaaattaaatggtaaacaatctcgtcgttatatacttgaaataatatttggatcgatgtccttttcatttataacttttactataaataagatcccacctaaaaaaatgaactctttgaaaaatgaaaatcatgtgaaacagtatattaagttactaattaacctaaacttgtgcgttcaaataaccataaaagtctagaatagattaaaagttttacaaatgaagttcatgctattgttattttgtcttattagttatgaattattggagtttgttctttttcccaaatcaatccatcaatattattgttttaacaaaattaagcgctttactattttcacctacttcattatcatattaattataaacattgatctactcttngaaacgagtaaaattaactatttttgtatagacaatttaatacgtaacgcatgatactacgaaagacggttcaacctactatcaaaattgtctttgaaaatgtaatagtttcaaataaanaaattagtaaattctagggaaaaaaaaatatggtgagtctaaacc

SEQ ID NO: 49955 - DNA, 516 bp, Arabidopsis thaliana landsberg
aattcccgtcgtcgacgagctgctggacgagctcaacggcgcccgtttcttcactaaattggacctgcgatcagggtaccatcaggtgcgcatgaagacggcagatattcacaagacggcctttcgaacccacgacggcctctacgagttcctcgtcatgccgttcggcctttgcaacgcgccggcgacgttccaggccctcatgaacgacgtcctccggcccttcctccgtcggtttgttctagtattttttgacgacatcctgatatacagttcttcatgggccgaccacctgcgccacattcgtgcggtgctgacggtgctgcagcagcaccaactcttcgtcaagcagtccaaatgcgcatttgtcgtgccatcggtggcatacttgggccatgtcatctcggcgtccggcgtggccatggatccagccaaggtggaggccgtccagggctggccacagcacagttcggcgcgggcggtcaggggattcttgggccttgcggggtactacgc

SEQ ID NO: 49956 - DNA, 1002 bp, Arabidopsis thaliana landsberg
aaaaaaaaaaaaaacctagaaaaaacacaagaaaagaatgagcaaaaacctacctctgtccaaaaaaatagtatcattatagtaaacatcataacgactcaaccatccaccagttccatgtcccccaaataacagaagctgcataaacaaattcaatgatgtgagtgatgtaggtcgcatcaacccatccatactcgaaagcaaaaacatatgaatagcatcttgattacagaaataacacggagcaaacaaaagctgaacacacatacataatgtcctccagatgtaactgtatgaccacatcgagatgatggtgcttgtccaggaagcttgagttgggtccatccaggtgtttcacgctctttcttccacaataaaggtaaaccacaatatgatcaataaacagaaaagtagacaaattaagaggtaacctactagattcaatacatttttaagaaattaaggatgaaccttcatctatcagacccttcaaagcccacaaatcacccatgattgggccaccacctcctgccaaagataaccatatcacacaatatattcagttttgttgttattgactcaagccaaacaaactgtgatcatgacctaatccttaggactggacgagagttttaacaatacatatatcatcaatacacccattcaggaaacttcattaaaaatgaagttggtaattgtcagcgatgggaacatcaaacacatcgacatcctaaacactgtttgatgaatgaaaaggcggaatagcaaagtaacatttgacattgacttttatatctatcaggagtctgctcttgagcaatcacacttattagttccagtgttcagtaaaataaagggaaaaaaaacttgagtaacaatattttctatgtactgaatataccaaacacctaaacatatttaaggaatgaatcaaggtgaattcagaagccagcagcaagaatttcaaagttttggtgtagcctacctcggccaccgaaaaca

SEQ ID NO: 49957 - DNA, 955 bp, Arabidopsis thaliana landsberg
acccacatcgattgttaacaaaagggaactgattgaaatgcgcctagtattagcatagattttaactattatatttttgtttttggataatgtgaaaccggcgcatttgatcattgatttattcataatccagaagttagtaaattgaccatccaagtggatcaataagagaaaattttaattaggaatctaatgatgtttcagtccactctattcattaacttatatcaggaaagagcgaaaatgcgacgtcagactatttattccttgttttctattatcaatactaattgtggaggaaagttacaatgcacatgtagcattattggttcatatacatgttatcccaaaatcacaaaacctgatactttatttccttccacatacatatgtctttatttttccgtcgacacacaatacaaggactaaacgtgttaacacgagattttaaggtttatatatgctaaacttgaggacatatttgtgctacttttaaacatctctaaaatctaaatctaatcttgtaaacatggttacggaggacatgtaattgttataagatttaagatttaattttatagttggctttaatatattgacattaaaccttgtaagtagtttacatgttattaaacctcatttgacactttatgttacctatatgaaggagaatgtgacacatcttcctccatatcatcacatagaaatgcaaattataattattattttaatagaccggcttcgctcttgttttaggcgacctaataaatgtgtgtttcttacactagtctatactattacttatctgtatataaaatataattagggatacaccaaataattattccctaaagatgcttaagtaataatagaggtgctcgacggaaaatacaactccaaaaacttagaaccttaagctgagcacaaatatgttatataccagcaaatatacagt

SEQ ID NO: 49958 - DNA, 1259 bp, Arabidopsis thaliana landsberg
gttaggctacatatcttaatccatatgtatatcacttgattaattaacattttatgtacgtatctaacaaactttaattttagatgtgcgagttttattacattattggcttaagtcttataacgggattaacatctttaaaagattgccatttttgaactaatttcgaagtaatttcggtgacactaaaaatatcataattttcacacacacaaacaaaaattcatgatcttcaaatcatcgaatgatcatcttattagttacttatattcacaatttaaaatgcacctcataccgttactactttttataatgcagtggcttcgagtactacatctatgatattacctattagattgttcaaattgtagttgatgatgatacgtatatagaatgatggagaacatattattaggtttacgaatagtgtcattttgacatatgttacatattacatatatacaccctaattaataaaaataataattcaacatacaaataaacccctatctaacactatgattaatgaaatgataatgacttatattcaaagtttattaaatttgaataaagggaaaattataatttttgtttgaaaaataacattaaaatagaaaacgtcatttattttgtgaaacagaaagagtactaattaaaagttacaaatttaatgtgggatttaaatcagcttaactagcattgaaacaattttaatgtcactaatgctgttatttaccattcttaaaccttatcgtcaataactctatcacccagctatcataacagtttattaccatacattttttttggaaacgagttattacaaatttcttcgaatcgagttattgccatttttacgaaaaataaaacaaaaattataattgctcatgatttcatatttttctatatatgattctatgggctaaccattgtcagcatttccgaacacaactgaaattgtcaaagacaaaggtaatctaaagaaaagaaccaaagcactccaaagccttaaagtggtctttactttggttttaaaatttgaatctaaaatgaacagaagaacgttcctcgttaaatgtgtacactctctcaacactggacttaaaaataaaataaagcacagtgtagtttcaatttcatatgctaaatgtaggattattcttccaacggtcgagaaaagcttaaagcatttttaaccaattctttatttattttttaaaacattacagacttttcatatctttattactctctcagta

SEQ ID NO: 49959 - DNA, 794 bp, Arabidopsis thaliana landsberg
atccgatcctacagaaaatggacgcgtacaaattggaccaataactatactcatgtagtcatgtttaagaaagtttgactccaaaaatcatcaactagcttgtttgaaagctttaaatccttattgaaatattatatagtttatatataaccgaagtacatccgtacattccaatgaatatgcaattatgcatgcatgaaccttttgagaatctcatactcttaaaacaaaagaaaaccttttgacttataagtgaaatttcaaaatgtcatttttttctttcttcattttgtattccttgtcaccgtactgagatgcgaaaagaactatattttgattcatatttattcgaaacctttttaagaaaaccatcaaaccttgaacagtataatcttaaaaatccaacgacatccgttttcaaatcattgtggtttcataaaatgacaaataaaaaaaaagttgaattttcaagaatataggtgatcagagatgtctcagtcttggggaagtcaaatttaaatatttggtattatatagtatatagtactactatatattataagtgctagtgagagaactccataaataattttgtctaacatcttcgtggttctcttattcataaatcataaattgtaatgggtccatatccatctctacagctatttcatggctgtgtttttcctcaaggcacgcctcctttcattttcacacccacccatcttttttttgtcttatttttcatatgtcattaccatgcattaaccttatgcatcaattgaatctaaatatcg

SEQ ID NO: 49960 - DNA, 1445 bp, Arabidopsis thaliana landsberg
taaaagactcagaacgcatgtgagagaatgtctgcaactgtaaggagattaagaagaagaagggagtgaatgtgcaactgcaattctgcgaagcatttaataactctgctactctcaatgcaccaaagctgggccacctcttttatttttctaactttaacccgaaaaccaagtgaataagggagtgttgtgtaaccatcgtttcaggggaaatcattcacgtttcttttaacttactgcttagtcttccacaagtagacatttatgaaggcacaacaatccacatctcttctttcccactgtatgtaaccgtccctctttcgttttgtctgcttctgccctcagtttctttctcctaaataatcttcttatcgccaattcaataaaaatactatacacacttaaagaaatgcatttcatttagtcttcttccatttacatttacacattccctcaggttattcatacatctttcatttactttgaatacatcctgcgatcccatcaatctaagagcttcctctcaggtacatgcggtaccatcaatctatgagcttcttatatttctctctccatacccttgaaatccaccacattatatctacatccatttcctttcttagctcctattctttcactactcatagctctcaggagtttctacacccttattatatacaacagagctgcaaccaaaacaagttaattatcaatgtcacttcattaatgcatctcaattatcaccaacaattgtcttctcacctcgagttctgaaggttcttcagtctgtccctccacatcgctgcaaaatgtgatacaagaaaaaaatgaggagtctgcaaagcacactggatatagatgccatccagaacagtttgtatacctgcatcgatgtacctttcctctttagacgccaaatccatattcctcactaatttaagctcttccgataaaggatctggtccatcgggagcgctgaacaagaacacccaccatgtggttagcaactgtgacagagtgagacagtgtaactaacccaggagattcattaacaaactaaaaacctgtcaaggataacattgaaaacaggctttgcgctctgcggtctgcctccataaccaattttgatagcctcttccagcactattgctttgttcacatatattggagcctgagatatgacaaacaaaaacatgttatcgcagtattcaaaaggaacaggttaggattcctcagtttgagaaacagagaaccataaagatagtgagtttaaccacatttcgaaagcaataaattgaggaaagcgtgtaacccccaggtagcatacctggcatgctcttgcaacattgatggcttctgatggccggaatcaatgcatatagccttaatgtccccaagctggatgacccatggttaaccctagacataatggactttgacaaaag

SEQ ID NO: 49961 - DNA, 564 bp, Arabidopsis thaliana landsberg
tgcgtcaaaagctgcatgctcgctcctccctgcaagatgttgtcagattgttgtgttgtgtgagagagaaaaggtggatgcaggcagcccagacaagagagtgaggggagagagagagagagagagaggacgccagagcatcgctagctgctattggctgcaaggtacgtacgtctttcctaccgtgccaaattgttatcgcaattagacgcaaccagagcaaaagcaatggttgccctactagctgctgcagtgcacatacacacctgtcaatctctctctctctctctatcataagtgccacactaccatgtccctgtcctcagctcttgtcgtcttctcctgactgacccctctctcctcgctccattaacgaagaatccaagtagtgaggatgaagagagagaaaagggcatcatcatcattatcactaacccttagcttcaagggtgactgattggttagcagcgatgagaatgcgatggatcatggtctatggatggatgaaaatgaaaggttccttccggcctcatatatcatgcattgacggaactgtacataatg

SEQ ID NO: 49962 - DNA, 1203 bp, Arabidopsis thaliana landsberg
cttttacagtaatctacatgatcgcttgagtacgaggcctttcctcagtcttgtagagaagaagtggttggcgtttcaggttttttttttcttggtcttgtaaccattctatttgaggcacaattttttgtttttttgactgtgtttgttctgcagttgcttcttgctgtgaagcaatgtcatgagaaggatatatgtcatggtaagctttaatagtctgagagggatgatcatcgtgatggtgcattaagttgattcgtttgaatttgcatccttttaggtgatatcaagtgcgagaacgtattgttgacttcctggaactggctttaccttgctgattttgcatccttcaaacctacatacattccttatgatgatccttcagacttctcgttcttctttgacacaaggggacaaagactttgttatctggctccagaggtactatagaaccattatcagaatttatttcttttgtttgatcgtcctagatctgtcaaattgttctattgcacttctgcagaggatattatccctttgtttgtggtgcaccaaatagaactctatccgtatcacttacaaagatgtggtggcaaagaaccatcaacaacaaagcacccttgctaattggtcatgtgtctgtttagtttttagtttattcaagtttaaacagtttgttgcttaattacagagattctatgagcatggaggtgagacacaagtagcacaagatgctccattaaagccctccatggatatatttgctgtggggtgagctcatataccatctctttttgtatcactctatatgttcaatgctcctaatggttcaagcacacataccttttcaaaatggaaaaacattttcaccttaagtattagagtttttatcatattgtaatagttttatcttaatgcttcaggtgtgtgatagccgaactttttcttgagggtcagccactatttgaactggcgcagcttctcgcttatcgtagagggcaacatgatcctagccaacaccttgaaaaggtatttcctattacgatcttttcgcatcgattctcttgatgttcatataacattcttttcacctttcatctgagtggtacatgggacttgtggcttctgtggttctgagttggatttttttttttgctgactcttctacctttattttactcatctttgctgtcttttactttt

SEQ ID NO: 49963 - DNA, 554 bp, Arabidopsis thaliana landsberg
tgatggtagatggctacagctaacaaactgacagccggaaaaggggccacaggtccggatgcagtaaccctaccactaccaggtaccatcacaagatcattttcgatatgtccggccatagatctcatctagcagaacagaaccagaagattttacagttttttctatgcacaaaagagaaaccagatagatcatccagatacagttcaagtttctgaaacgcaactatccacggagcacccggatacggccccagggagagagagagagagagagcaagggaaaaggaaaaaccaacgtggtgcgcaatagataccaaaaagctgattctgaaaagcaaattagtagatgaggtcatgaacactggtcagactaacttcctaccctgtactctatacgggctttgctgcattcttcagccatcttgagttttctgtcttctgcagttgtttctcgtactcatgggagcagcagcatgtctttattcactgttcgggagggattgacgcggcggagacgccttctgggtggatatggcggaacaagggcaactg

SEQ ID NO: 49964 - DNA, 625 bp, Arabidopsis thaliana landsberg
atgttccctcttttccaacttggcaacttcatacaataaatattgatatttatcaagtgtcagaagagagctaagcatttgttccttcgttttttctttccttttcttaaattaacacatttgggttgtttcccaacttaagattattaatacacaaacattaatcgtaagatctcaacctttgatgtatgaagattctgaacaggactcgtggtggagacaaagtatctgaggatgctctaaccttggagggttcatacttcatgttaacctcatgcattttgaccttcttcgtgagtaaaactttacaatacggttctctttcttgatcaacaacctttcttcttgtgtttttatttccctgtaaaacaatttaagaatagttaaaaactgtatgaagctatgaccatttctaagattcatggattctctagtcactatcagaagcctagtttatcatctctaggcttgaacaattgccaagaatggtcacgatgtctttgaacttgtttctcagttcgtatctatcatcttattatttatagattgactctagacagttatattacacatgtaaagcatcaaaggcactactaatcaatatcaccaggttagggatccttac

SEQ ID NO: 49965 - DNA, 1177 bp, Arabidopsis thaliana landsberg
aacgctgaatccctcgacctaaacgagaccaaactggcaccagccacaggcacaaccacaaccacaactgcagcaacagactctgaggagtattcgggctggcctatgatggacataagcaaaatggatccagcacagcttgctagtctgggtaagaggatagacgaggatgaggaagattatgacgaagaaggctaagtcataacagcactataggatatatagagtagcagcgtttagcagtttgtctagaaaatgcttcttctgtcatcaaaatcttctcctgtttccatttattgtatgaaccaaagattgcatgcactctatgaaacttaatttattctcctgatttgttatttaaggttttagagttttacatcagaagttaaaatatcttacagagtaagtaaacactcaaaagtacataaacaaaggagagggactagtcatggtgttgctccgcgtggttgagatgaagagcaccttcatggttcttgtgaacttccaccttgaacttttcctctttttctcccctcttcaacttcagtagcatgttgtattttgcagcctcgccggttacctgtgtccatgtttttaatattaagctcattaatcttgtaatcaccaactattacaactcagacgttagtcctcataccaaggagaaccaatatgttgcttaaagtcttttctacttctaaaacttcaacaccattcggtttcactgacacttgatttcgtttatttgcaatttctcagatgaaattcatgcaaaaacattgtcaaaatctgacaagttctctattgaaattcattttgtgcaattaagatcgaagatagagtatatagtaaattaaagccatacctcagctttagcatgcacaacctccagaagttcataagggaacaaggagttagacctctgctgaatggtcttgacagcctgctcagcaacatgcttcacttctggatcatctccgggaacttccctccatccagattcatgttcacctgatccacaaaacccaattatcataaccaaactctttcctaacccacaatctctgacttgctacatatatatcccctgacattataatgttcttctcagtaactactcaaattcacaccttgcttgcagccaagatcggaggaagtgatagcaggggcatcactg

SEQ ID NO: 49966 - DNA, 871 bp, Arabidopsis thaliana landsberg
aaatccatcatcgtgaggattgaggaagccattcaagaactacaaaagtttacagataaatttgtacctcgtgctcttgtcctttcttgctagacaacaaatttattatttgccttctggactctaatataatcacaacaacacatattgctaggtgcaatatcatcatattagcactttttaattctatggtatatttttgttttgtaaccatatatattgtccattcacaaagtcttttctattacacatattcatgatgagaaaattgatttgatctaattactagagaatcatgcagaggcataaaatgatctggaaagcatttatttatcatttgatttgataataacattttatggaaacacctatctttaccaaagatttggaacaaatagaaaaacataagcaaacaaatatatatagtcggactaaaacaaaaacaaaaagggggatttgactgatggaacaaaagttaaaatcggtggattaaaaatctgtgaaaacgtggaggatgcttattcactggtgaaattgagggatcatatataaatatgaataataatgctagtagaataagttctatttatcacttgatgactacaaatctataatatgctttcaaatttctctcctgatgtgttgatatatattacagtctttttaatatcaaaaaggtttttgtcttctctcattcattcattcatcgttaatacttttgtttttgtttttgtgtgacatattttcattattcttcttgaattatgtcagaaatagctagctagcacgatttgaaagtttattcaaaatccatcttatttgttttgtacttttgacgtcatgaatattatgttgatgtgtttttcccaac

SEQ ID NO: 49967 - DNA, 1318 bp, Arabidopsis thaliana landsberg
aaataaagaattttatttttggtttaaactgacgtgtgattaaaggtattaaagagtggcaggtgggtttggttgtacggtcatttattcatatagagtgtgacccaccaactctctgcctgtccttcttttctcttacccccagtacggagccttcttattttatcattatttattttgcattcatatcttaaaccttgacgtcactcacggaagccaacaaaaaaaaatacactgaaagctgatgaaagaaaaacgtgaaacctaaaaaacatatgaaggcctgttggctctgcctcaaatcattgcgatttattttgggccttcacaacaataaaggcccatcagatttttgaataagactagtttctgtattcgtttgtacactactcatgtatacgctaactactatatacacaagttaaacaaatttgaaattaaaatagataaagaaacaaaaaataataaacgttaccaagaagaaaatgagttggtggtgattaatttgcggctaattttgggggaatataaaaagaaaaaattaccgtattttaaaaccggtctatataggatcgagcttgctaacaccattttagtaagagtcttgattggttcgctttaatttttcatttttgtatctgactgccgcaaactaagtaatatcaacactcaaaagtcacgataataaacattataaaaccttttcttcgctgtcctacgaacgtaccatattacttgattccgaaccagacaatattagacagacaaccaaactaacacaaatcattattctataagctgcggtctaacctactattcaaaatttagttttacttcaagtattaaagaaaggtacgaataacagcgatgagactggattttttttaacatggtaattaatataacgataagtacataattaaacaatactacaaaataaaactaaaaaacaatttcagcgacatctttgattacagattctaagaaaacaccagagaaagttagattaaaatctccctgagcttgttgtgtatcactaaacctcataaacgatgccgttcttggctccccgactcgattatctagtgagatattctggaaaatagcgaagaatctgagaaagacaaaaataatcagagcaagaagataacatatccgagatgcgttgaagaacaagtgatatgctgcaacttgaagacaatacatctttttctcttcttcttcttggctatttcgagtattaaaaggttaaaatctcagaagatgatgtttttttttcttagcatcgagatgtgtgtatatataatagtatacgtgt

SEQ ID NO: 49968 - DNA, 1699 bp, Arabidopsis thaliana landsberg
atcacctgaaccaccatctctgaacggcactgaccggagtattcaagaaaggagcgtaacgttggataatcggagtcaccgtcctccctattctgctccacgtgctctggtggtaaccagctgttaccggtgcttgatacatcagcttcaatagctgccaccaaaataacaaaactcagttcatgagaacaactctcaagatccaaccaacaatcctgcaaacaacctagtagatctttgttttaggaagaatatgaggaaaaggtttttgaacttgacagattttataacaagaacacaagatttttaaccaaaaaaaaacaaaacacagttctcattactatcctgatggtcttagcccatgtaacactttcagtgacagaagatcatcaaagcaacaaaaaaggtgttattacggaaatgcttcttcctatatgttcacttggatcaaattaaacaaagaaaacaggggttctacttgggaatgttgagccatcacaaagaactgatgactacaaccaaaagatgatacgtacctgccagtacatgaacgtctgtataatgttacgttgccatctgcagtaagtaaaatgacaattttgttcagataagtgaaaccagctaatgcaaagctgggaacttagtgagaatataaacttaagtgcgaaaataaactattatcgcttctaacaggttcaaagagcttacgagagcagagagataatcagaaggaagccaatggctatctcagcctgcgatgacaagatgttgagggtagtagtgtttgactccacccacacacaagggtcttccaagtactttctgataaccattacagaacaagacacatgtacaacataagcatcagtaagaatccacacatggaacctactactacattcaaacctgctaatcagctcgatgcaactacctgtatatagtggaccgaccaaagttacgcctcaagaacttggctacttgttcaagtgcccggcacaagatgggaatcaaagcaactgcaacagattgataatgagactagtcataagaatgtacgtgatttgaagacattcacaaaagagttttcaataaattcttacacttgagacagagatgtgaagtgacgaatgtaaggcagtagatgaagtagatgaaatcctttgctgccacaattgattgaaaataaacttgcagcccttgcatattccatgcccttggcctctgcagattataaaattacaattcataagtaacaaaaatttcgcattgcatgatcactagagagaaagaaaacatgaaattcacatggcgtaccccgtataaggagtataaggaatatagagatgagcatgcagttcccatgaaagatagacgataagccctatttgagaggttctttggtattagaggtagcactgccagcacagctataacaaaaacctgcaaaagatgtaatggatttagagacatgaaacgggagataagttacgtgaagcattccagacaaaaagcatttgtcacatctagttcatgtctaagtacacaacaaagattcagcaagacaggagaacataaagacagacaatacactatgcaccatctcattactgtccgtgaagttaaggagtgaacagcagattgcaacaacaatcccaactcacagggctaacaagagctagatctttttattaaacttgtg

SEQ ID NO: 49969 - DNA, 948 bp, Arabidopsis thaliana landsberg
agaaatacaaaataaggaaaacatggcttttaaattgtaattttcttgagaacaagttttatttttttgggcaaatctaatatagaacataaggcgaataattgatgatagagaattgtgtcacgtaagccgattgttccaccaattaggcaattatgcttgtatccccccttacttttgtatgaaacataatgatataaatttgaacactttataaagttctacttactaaagacgtattcatatctttagtatgatatattagtatctaattcaatcaaatatatacctaccatttgacattattttactttaaatcatcgtggatgcgagaattcgttgtaacgagttaagattatatgaatttagaaaagggatttcaaaacttagttatacaacatgaatagacttctttgattgatatatagtagaaatgatacaccgatgcgttttgcaaatgaaaaatctaagagagaaattgaaggtagtaatagtttagaaagaacaaaattctatttatatactggaaataagaaaatgtatagctaactttggctttaaattcatagaacatatatatacattgttttgtcacaaacagtaacacaaaatcaacaataattcctttaaactacaacgttaagtgattatgataattagaaatatatatcaaagataaattgcatatgcgccacttttaaatgttcttacgtaaagatacgatcacaaatctaaacggcgtgagttttctatacatttgataaatagtaaaacttaaattaaagtgggtcaaaaaagaaacatcctttaggattttagtggagaatatgaagaatctcttcgcttttctttctcctttacgcatttgattcttttctaaaaccataaattgatgatacaagtcaaaagtcccataacgttatttacttcccacctgatatattaaaa

SEQ ID NO: 49970 - DNA, 548 bp, Arabidopsis thaliana landsberg
gcttatactcgattcggaggagtgttgtcgagaatgagacaaactctgtacaatccgagcaggccccgtcatctttaacacaacaaacattacactgaccatttcactcatcttatgggaaacaagaggagaggatcggaaccggaggtaaccactttttggggaggcccttcatactgctactctcaataatcaggctgccgggccaaagtgggtattttcgcgaggtgtggtgtgtgtacttgctcgggcggtggtcggtcggagtttcttttattccccaatcccgccgccatttttgggcctccttttagtgccatttcatagaccaggggacgtcacagcggaggaccgagtaaccccgagaaggtaggattcatccgctcctcgattcttttattaagtgtcgtgggagtatctatggtcacatttggtgaatgagatcgcacttaataatcgctcattgtgagggcaaaaccaactgcgtatgtaccgtgctaattggtatatacactgctgtgagtgaagactgctcgaaattgcccatg

SEQ ID NO: 49971 - DNA, 708 bp, Arabidopsis thaliana landsberg
  unsure (1)..(708): unsure at all n locations
ataaaacatgaactttacaatatgaaagggattgcttttgtatttaaagttagtttttacaggtagtgattgttggaatatgtgctctatttcttttgtttatttgtgttcgtttttgttgagattatggttgtgtaagcgtggtttagtatttgtttaaaactattgaggcaatctaatgttgggtcctcttggaagatcatctttgtaatctttcnnnnnnnnnnnnnnnnnnnnntcaaagagttttcggctatgttgcttttgaatgtggtatttatatatttcgtgtgctttaaggttcttctttctttatatccgctttttaatttttgtttttagagtttttctgtacccgccaattttatttttggaaaaaacaaatttttttattaaatataactatacctatcatagattaatcatttagacgagaaaaattaaaagacgttaattttatgtatccgccaattttatttttagaaaaagcaaattttcttattaagtataactatacctatcatggatgaatcatttagacgagaaaaattaaaaagacgtttaattttaaaaacataattagtttcagatattttaaattatggaaattttatagtaaagtttttttaaaataatatgtatttcctccaattataaaatttctaaaaactttttttatttaaaaaatcatgttttaccaacaagttg

SEQ ID NO: 49972 - DNA, 938 bp, Arabidopsis thaliana landsberg
acactggtcaatagagagttaacgtaattcaaatacacaattttatgcatgatccttatatgtataaaaataatacattgtttttccctcaatgaataggaatatacacaattccttcttcaaattggtattggaagtaaactcctataaaaaaaaatccataaacaaagaatgtatgcattcgccattaagaaatataaactatacataattctcaataatctaaggtattttagactgtaacaagaaaaggtcaaacacacatacatacgtacgccctgataacatcgtaatcttctcttcgtcggaagcttctttcagcaaatctcttcgaggactcttacactcatgacatcccctccttctcccttcgctatttcccctgcagccgccgtagcagcagatttgcctaatgaccctgacctgaccatcgttggtttcttgaagtcaccagattcattaccactctatctcttaatcggaatgatcgtttacaccgtctctattccactactgcaactgcaggtttaggcagaaaacaaaacccttgaagaaggagattttgaagtctctcccgaaattaacattctcgcaggaatgtggtgtgaggttatgtaatagtagatgtgtgatatgtcttgaggattacgtggttagtgacattgtgagagtgttgccacattgtggacatcagttccacgctttttgcattgacaagtggtttcagttatgctccacttgcccgtcatgtcgcggcatcccagttatttatcaccctcttttaaatgtattgatccagaaatagttgattatttaactctgtacatacatctatggaaacaccataaacttttaacctattaaccacttttattgcaaacatgcatcacatgattaggtataatataattattccccacatgtactttattttaaat

SEQ ID NO: 49973 - DNA, 456 bp, Arabidopsis thaliana landsberg
  unsure (1)..(456): unsure at all n locations
taaacgccattccacagtagatgatccacgtcaacgagaccctacatccacatgtgtaaagacatgtcgggacatatatatcgtgcaacatgcgcacagacagcatatcattggcagacttgtccagtgatgaagctactagctgtccagcacatgtggtcatctaagatgtcaaatggtcagaccatactaacagatacgtatataccctgcacttcgtccgcagtccctagtacatcatccaagcatcgttgaccaaagatgcaccagtgaatagacatgggggcgacaagcttagcgggccatatacacaccggcggcacatccctcacgtgcatgtcgcaccgatgatagtcctagcacgcgcagtnnnnnnnnnnnnnnnnnnnnnnnnnnnnnagtatcctacctgctcatcggtcgcttcacgagctttatacgccgatcggagtacac

SEQ ID NO: 49974 - DNA, 156 bp, Arabidopsis thaliana landsberg
tggtcggttttctcatggtaatccctaaacggatagagatttaaactctggttgtcccgcatttcttctacttcaccgttgacattgtcgtcgctataaatctctaccacctgtgtatttatcgatctcgtaacatgatttctcatgtggcgtatt

SEQ ID NO: 49975 - DNA, 2198 bp, Arabidopsis thaliana landsberg
gcatacgaatttcttgttgatcaagttccacatctcccccccgctggtgatgcagcgggagcactgttttgcagtccaattcagaccaaaacccctcttcaaaatctcaacataagtcatacccatcacatcagactcattactagctaaaacaggaacatccactagtttctggcacgacatggatgcaatttgtttctcttttccaagtttctttctgtcaaagaccccaaaagatcgaagaagactcgtgtttcgagcacaagtaagagggtatgtcctaaaatcctccagcaggtgatcggaacaattgtaaagtatagtgaagttgatatgagaagggttcacaaagaaaggagtcctatggagggtaagattgttcagcggtctgggacatggatcatgagaagcctttgagttcacgacctgaaacgactgtgttaagtaagatatgttcttgatgacatattcctcaccggagatcccgagaacagggagcttttcttcatcatcacaagtgagttcaaaacttggataaccacaaaaagattcttgctttccagatagataaaatggataggagatctggggacctttgccgcatgatttcggctcacaagccttgaactttggatcaagagagagggtttgagttgctattattgtgaagtagaagaagatggatgtgtagagtaaacttggagttgaaggattcattttttaagaaaaaactagatgaagaagaaacaagaagaagagaacaaaacagaaagaaatcaaagattttcaggaggagtgggtgagagttaaaatgtttgttcaactagtgtgttgaaagagtataatactaattttcttggtgtaaagaaaataaacactgcaatttgacttaaaaactgaaacttttaatttgtctctttgagcctttgaggttgaagatgaccccacaaaaaaaatcttttatgggaattttagtgctctttatttttttaaactggaaaaatcattgtagtggaagtataatggattttgtgtaaaaagagattttttcaagagagggtcggttagagtcgtcgtcggtctactagcagaaacttcaaacgcaagaaaattaaaaagtcgtttttttgcttcttctaagaccgaccatgaaaaagtaaaaccggatcgataataactagtgtaggttcggcccaaaaagcccaagatttgatccagcagcatgctcgcgctacaaaaacaccagctgtgtaatccctaatatttttggagcgaagactaccacataaatacttgggacaaatgataaacagaaaactggacacgtaaatccaggttgaaaaagtcaaaatgtgtctttaaaagattattaaaagttttggtcaatgacgataacaattctcgaccaatttggtcaaagtatacgttctggagtctgacgaaactaatcttaaatgttaatcacatcaagaacagaaattggtactaatcttagaagaaaagtggtactaatcttagaagaagtaaaagcttgaatctaaatgataaacgactaaccttggttagtgttatcgtcgcaggaggagttgtgaggtctgtccgcacatagacaccggaaactctccgaatctaacgccgaaccacaaatcccaccggaatcaatgcatctccggcaagctttgtcttccatgatgtacctcaaatcgaatccttttctcaaagcttccacaaaagttagttcggaccgttgaagctcgtccttagcagacctcagcatcggaatttctgcatatttcatacaaccttcgtcagaatacgacgatcgcaagacatgatatgtcaccggatcctcgtagctttcttcgcaagaaatctgcaacggagctacgccggaacagttgacgaatacatcgatcatctcggtgttggagtctaatgtgaactgattcttcccgttgaagttccaaatgtttaggcaacctccgtctagtaaactatcatcggcaacggaaattttatgatcctccagattcgcagaaacaacgcgaagagtgatgttcccgatcgctagggttaggttttgatcaccctcgcagaaaagtttgattaacgaatgaccgcagaatttgggtttattgaatccaccccagaacggagtacgtggaacactcaaaaaccctgtgtccagatccacatgt

SEQ ID NO: 49976 - DNA, 1074 bp, Arabidopsis thaliana landsberg
gaattgtagcacacattgaaataaacaaactgtaattacacactcctaatgaaaaaaacaagttttttgtatatatctggtagttctgaaaatgcatgtataaaaaaaaagaaaattacattaataataatacgtagattttagatatcgctaatctgcaaaaatggaaggaaaaactgtttaccacgtcatcagttgctcgaacttttcctttcacttttgttgtatttcttctcttatctatcatctcgacgctgtgaagaacaacacaaaacgtacgagatctgcactaatatgttgtatctaaaaatccaaaggttaaaagagatgaaaaccatatgagacaaaagttgtaagcattcagaatcataaaactagtgtataacacaaaagttgcatttttattgtatacaaaaactatctaagtaatgaattaggcaaaataatgaatcaagcgaaataatgaatgaggcgaaaaaatgaaaataaaatccacacacaaacacatgatctagcatctatatactgattttttctggctattttaatgtatttgacgaaataatgatgaagatttaaagaactgagatgataaaattcattttatattaaatctaattaataaacacgcgctggagaaaaacctaaaaggaatgagagaaagtatcttacaaacacggcgatgtagtgctttaagtgttgaaaggcgttaaaaaacataaattaaaccttgagaagccgaaagacggaagcagaaatgcagaagcagaaattaaggttttcccacataattatgtacattttacctggcgacctatagctataaatcctataactgtgtcttacacctattttttagatgtaactaaaagaaatagaagcaaaatatataacagactgtacaatgacattagagtaagaaaaacaagttacattctttatttttactgccattaaagaacaagttatactgaaaagctataagagttaaaaactcatgccattgttttaattcccaacggccatttcttctctttttttttcgaattggttttcttctttttgccaaaattg

SEQ ID NO: 49977 - DNA, 1047 bp, Arabidopsis thaliana landsberg
tgctttcggacctgactttaagactttgaattttaccataacttgcggtttggtttatttgatcttaagactttttagactcttcctagtgacggcaacatttttctccacatcgacggaaataaaagttttcttttgacgtgggcaattaaactattaaagtgtctcactccaatgccttacatttttatgaaactattctaggacattttacaaccaacaaagagctatattacaaagaagctgataacagtttttataccaaaatcactttaatgtgtatgagtggtgggtttggtatttgatatacgtctctacttttatctttaatacgaaaagaaaaaagtgtatctcttatatgaaaagtttttctttctaacattaaagtaagatactaatttgtttttaaagtcgatatatgtttggttgtgattcataaaatattaacatgccattggagtgggttatttggtagagtcaagagtgttcaaatgcgtgagaggaagcatgtgagaggatcatgtgaacccaaaatgtctgagatctgtttttattgaggatgcaactttcttgctttgtgccaaaaacaacccataacatgatattttgttctcccattaaaatatttgaaaaaagtgtcttttatttcaatttcttttgttatcgagtctacctaaccacatatttcatgtagaatatgaagatctagatgaatattatataatatcatatcatgttatttgttttattaaattgttttcttcgcgctggtctacaatggcatatgaattagctttcttaaaattttaccctatgagtctgtaaatgttacgtgaatattctgaagtgaaactaaaatctgacacgaaacgaatccactttacacaaacgaagcaagttgagcaatatatacccttgttgatgaggtttggctatatagattgttgtcaaattgcattcgatgcaatttgaaaataattttatacccaaaagcccattgttctataaaaaagcccattatgcttttctttgtttggatcttgctcg

SEQ ID NO: 49978 - DNA, 1256 bp, Arabidopsis thaliana landsberg
  unsure (1)..(1256): unsure at all n locations
ttatatttttttctatgttaaatcataagattctcctttcttattagagagattgttacattttttcatatttctgtcaatgactcaatgagttgtgaaaatcttgcaaccgaagcaaaatatctcgaaatgtattataccttttagaatatgaacgatttgggccgtgtgttcatacaaaatagccaacgtcatgttacttgtgaattttatcttactaattctgtcctttgtattgtctaaatttattgatgttatgtataagtgttacgttatatgccatatctagtcccatatacttttaacaccgtaagcaatattcaacattttatttcagaatcatattgagatgaaacaattattgtgagtactagaccgacaccaatcgaacccaccaacctccctaattaagaatatggatccaaatctttaaaatcgttataatatataaccatatttgctcaccactcgattcaattattgtttactctcgttctaatacgattatggaacaaaatatctacaactagtcgaagccaattttttaaatttatatgtgttgttttgtcatatggttttctcagttggtgtcacgttatttgtgtatatctaccaaatagtcacttttgtatagttcatgggtccatatctttaaaagacaataaccatatatgtttttggttctgataagactaataaccaaatatgctcactgctactcagttattgtttacgcgttgaaaagttgcaatgcaacaacaacaacaagtaaatatctacctttaatataattgactttccaatatatttaggtttttgatttttgatgtatgatttttcattcttttgtggttttggtaattgaagtttttcctatacactgatatatcaatattaaagtaggacaacacatgcaaattaaaaattgaatattaattgttgaaatattgtaccacggatataatgtgtttagacttgtaagtaaactatatccacttgacatacatgtaaaattaattacgtaacaaaatattcctgcttggaccaaaaaagtgtgtattttacttttcaaacatcattatcctgttaagagttggagtcgactaatacgattcagattccacaaatatcaatgagagaaacgtaataaaacgtgacgataattaataggaaaagagaaaaaaaatacgtcaagtcgttaacaagaaaaaggcttggtttattattattctgntntcaacgagagcaataacaat

SEQ ID NO: 49979 - DNA, 689 bp, Arabidopsis thaliana landsberg
cctaagcaatagtagatatttactatttgttgtcaacataaaacaaatggtaagggtgattactcatgcaagcgtaagcaacagtatacattaattttaaaccaaaaaaacagtatacattagttgttgattttgttgtattaaacttcccttagcttgtcatttattacacttgctgctattcattgactcgaacaaaaggtcaatgtgatgaatttatttagatatgttaaaatgtaagaaaaaataagttctatttgattgtttctttacacgactatatcaaccaatataaaaaaaatcccaatccagtcaaaagacccgatcgactccaagcagaaccagtccataatgaaacacttataacaatggtttagctgccaagctgatgtaagatatatagtataattttgttttcttaagttttccaagctaatacgtaaattaatcactaaatagattttttgagcgtattagtgtaacacaattggattcgaagttagattatgacacaacaacaacaaaaacaacaacaacatcgatacatattattcagccacatggccttcaccttcatgccttgtcatacagtttacatggtatatttttttttaaaagtgttgactaatattttgctagatatttttgtttatagttttggtcgttggatatcctactatattattttg

SEQ ID NO: 49980 - DNA, 1009 bp, Arabidopsis thaliana landsberg
gatatagaactttaatttgcaatgttaaaattacatgaagataaggcaaatttttggtatattagttattatggatataagtagaaataaacagtagagtatagttattatggatataagtagaaataaacagttattacttactcgtgagttggagatgaagctgtctgcaaaagttgatcaacgtttgctttgggagcttcttgcaagccaacgacaagcaaatcgaacttcctttctttgccaacaagctcaactaaatcctcatacgaaaccttcacatgtattaatatagtacatttagtaacatagttgaatctaattatgaaggaggatttttcatatggcagaattagatgaatatgtggtacatatacgtacgtacatttccattcatgttccatgtgatgatacggatgcaaagatctgcttttctagaaaaactgcaactgttaacagcttcgattgttttaataccgtcgtgagatgatgagtttttcgcaaatgaaccgatcggagacttcttgtagttcggaaacctattgatgatatacacaacaacacatataagttatatattcatatgtctatctacaagagttacaaatacttgtatatatagaaaccaacgtagcaagcaagattcgtttgataccaattattattacctttttagcccacacatcgaattcttattccccattgtcggcatgtagtgttactctgtaaaaggcaagattctaattgtttttttttagagagagaaattttatcgaggagaagtttgcgaagttaaagagaaatgatataatgagaacctaaaagcaatttaacgatgttatcttcaatattcatatatatatatatattgattggggttatattagagaaactaggcacatgcaatgttacgtggttttctaggaaggtaggtaaatggtgttgactacaaaaacgtgtacctcttccaatggacgggcggaatttgaaaatgactttgctgggtttt

SEQ ID NO: 49981 - DNA, 1478 bp, Arabidopsis thaliana landsberg
ggtcgcgatatgattcaattagcttccgactcattcatccaaataccgagtcgccaaaattcaaactagactcgttaaatgaatgaatgatgcggtagacaaattggatcattgattctctttgattggactgaagggagctccctctctcttttgtattccaattttcttgattaatctttcctgcacaaaaacatgcttgatccactaagtgacatatatgctgccttcgtatatatagttctggtaaaattaacattttgggtttatctttatttaaggcatcgccatggataggtgaagaagaatatgaccagttgtggatattcaaatctggtatgacttactttcttcatatctctttagattagcgaatgcaatcattttctccatttaatttttcatctttctaggttaactatatttgatttgatgaaccctagcgagtaaactaggttttcatttttgtaagccactatcattttctaaaatcgcagactaaatttacccttataagtgttccttgctttttctttgaatctctctctttttattctctgggaattggcggtttcaacaatttacaagtagggttttgtctattattttagatggctagggtttagcgtaattacaaatatttgttttaaaaaggaaggaataaagcttggcgacaaactcatgagctttgattgctcttggggcatgaagagttaatactgcagcaacaagttcccataattttcatttattttacacttcccaattatgctcctctctcttcaatgacattctttagttatttttatatttttggtatttacatatatatcacatttgaaagtgcttcggtttctgcttttctggcctttggaagttgaaatgacagattttatcttttgttgcaaaattcattcgtttattgacttgattaattattcaaaatttgctgtaagatttataaatatataatttctaaccaattactgattgctaatgttacaaatatttgaaatcatgttaccatagtcacataagacataacaagatttatattcataactttaattacgaactatttttcctacgttcacatgttacattgatatcttcaggtcgatgtcggtctatattttctgtcacatttcacttcttctttataacatgtttctctttattatgtttgaacccgcaataattttgttgtttatatcaaaatttcttcctttttgtttttcctttttgttttggctatatcatatcttgtctttaaaaggcaatgttatttaaacacaaaacctatctgttactttttttttctaatgatattttttgtcagcattatcttctaatgtttgtaattaatctaagcatttgagttggcccttccaatatccctaaacatcaagtccaatggcttaatattggaaagaaacaaactctagattcttgacaaagggaataaaggaatctggaag

SEQ ID NO: 49982 - DNA, 783 bp, Arabidopsis thaliana landsberg
aggttctcttggtcatcgaggcttataagactctccgtgacagagctccttacccggctaaccacgttgttgctcacctaagtggcgatttcgcctttgtggtctttgataaatcaacctccactctgtttgtagcctctgtaagttcttttaaccccctgataaacactttttaaactgtgaagtagattgaatctaatggtaacaaaaaacggtgtttgatttgctgcaggaccaagttggcaaggttccattgtattggggaataacagctgatggctatgtggcatttgctgatgatgttgacttactaaaaggtgcttgtggcaagtctcttgcgtctttccctcaaggttcgtttttcagttttgtttgttcactcctaaattcaagatttttggggcatcacccgctcaatggttttgtatgcgtgttttgcaggctgttattactcgacggcattaggtgggcttaggagcttcgagaaccctaagaacaagatcactgcagttcctgctaatgagggagaaatttggggagctaccttcaaggtgattgattcttcaaaactaaatcatattttagtatttttgtttagcaacatctaaaaagcttatataacacaaactttggtggtgggaacaggtggaaggagcaacagttcttgcagattgaaaatgaaagagaaacacaaaagaagtttcatgtctcttaaagctctcgaactgtaacagcacaaacaaaaaaaaatatgtaggaaaaacaaaaagctgttctatgagt

SEQ ID NO: 49983 - DNA, 739 bp, Arabidopsis thaliana landsberg
gaagcttttatcccaactgctagacaagaagaatattcttttgctgtttgcgccagaacaagcaactcaacatcctttgagcaaaggtccattaaataaagctgaacttcagtgtcaaagaaatcatttttctgattcaaatgccgttcttgctccaacagagtttctgcaaggtccccgttgctcaaatctatttctttcagcaaaatatcaagctgagatcccatgctgttagatctttgcaacatcaggtcctcctggtactgtaaccctgaaattttctgatcaaaactgcttaattttgtagtaagtagattagttgcttcttcatttcttgaaattctttcaaaaccattctttatatcagtcagtagtttacccttcagatttgcaaacatttctagctcccttcttaaccttagattattatctcttaatccggctatggaagagtttgatacacacagaccacgttgaagcaaaccattttcggtattgatccctgtaactgtttccaacaaaatccccatatggcataggtgcagaactgagatagcacaatccttcatgattatttctgaccagatatcctcaaggaataatctagctgagtttgtttctgaaacccaagactttaactcatataaatctttggccatgccagtcaaggccacagatgattcatcctgtaattttctgacaacagtggccagctcttcgacagatttcctattccatc

SEQ ID NO: 49984 - DNA, 497 bp, Arabidopsis thaliana landsberg
  unsure (1)..(497): unsure at all n locations
cacacattaccagtgcaatatagaaggacaaaactgtcatgtacgaccgaccctacgtcaggcaacgatgtgcccaggatgtgtggcgtgcgcgtgagcctnncaggaggcaacaactgtcggctctagtggataggatagaaactagataagtttgtttgcatgcctagaattaaggatagaaactagataagtttgtttgcatgcctaaaattaagggttgtttgcatgcctagaattaggcagcagttagctccatgcggttaggcctaggggcctatatattcctgtaaccagacctgagttggaattaagaaagatcattatcctaatctctctctctcaactaagccgacgacagaggggcataacctcgccggagaagacgacggaccgcggctatgatctccgtagccgagggcacctaccctagacagtaaggccttgacaactggtatccagtcacgccgatctactcatcacctgtgccgcgccga

SEQ ID NO: 49985 - DNA, 305 bp, Arabidopsis thaliana landsberg
  unsure (1)..(305): unsure at all n locations
atgaaggagtggctgagagtaaccnnnnnnnnnnnnnnnnnnnnnnnccatgggaggatcaataatgttccatcgtaagcgtaactcaagtcgaatcccgcagcactagagcctttcacaatatgggatagggaagttccacgtcactagtgtgacgagaagatgattagtaactgcacatagcaaaaagcgtgcgcgtaatccatattggtggtaagtccaaggggcctcagcgtagctccgtccgttagaagaagagtacttaaagcagtggaagaggtgagcgagtcgcttcagcaccgcag

SEQ ID NO: 49986 - DNA, 2314 bp, Arabidopsis thaliana landsberg
cagagacgtctcttctcttatgcgaaagtgtgaatcttttaaagctttttgtttcaacatcgataaatgaagtttcttttattgaatttatagaaatttgcacactttaccttgacattaaagcaacaagctttgcaaccaaataaaatctcaaaaacccagaaagcgagtggagaagagagagctgatatgctacaatagaaatggcgagtggatgtgctctacatggtggttgtcccagcgattacgtcgccgtcgcaatttcagtcatctgcttcttcgtgtatgtgttcgagcttaaacatcccatttttgggttttatttttgaagatctagatttttcatttactgggtttgcttgttgactcttgacttgagtcaaaatctcgaattttgtgtctttaatcgtttaaaattttcatacgatgtctctctttgctattttaactctttgtattgtaagtgtttgatgttatgtatcaaaagatctgtcttttgtttcgtttcagtttcttttagctgggaattagatggtttcagtatcttgatagcaagattcatatattatgtcggaatcgattattgaacttagatttgaagttcaaaagcttgatttaatggactaattgagtggatttgtatcatgagttaacttccaagtagttcaatttctctattaagttgattctatctgatggatttcactttgtttatttaggctgttatcgcgctcagtgttaccgtgtttgattcataaggctcctcgtactaacagtagcagtttctggatccctgttattcaagttatctccagcttcaaccttctcttctcaattatggttagactacttgacttgatgattccgttgctcttaagaatcacttcatttgttgagtttctacactaatagactgttttatatttaattttcagatgtcagttaatttgcttcgattcaggacgaaacattggtggcgatattgctatctttgggcaggtttgtttggaaaccatgattcctcatcttcgtaaacaaattgacagttatatcaataagtcttgtataatttggtttcagtgtggattgaaggaccacttgggtttggtttgttgatgagctgccgtataactcaggcatttcaactatacttcatatttgtcaagtgaggttcaatgttgatcaaaatgtttttggattccaattctatctctattggtgtaattgagtttaatgctgtttggttgttacatattctttgcaatgtaggaaacgtctacctccggtaaaatcatacattttcctcccccttgttttgttgccatggatcttcggagctgcaagtaagaattgttctgaacgttatatgtagtgagcagttcttggtttctcttgttttggataataataactcaaagcttttgattttgcatttagttatccacgcaacaaagcctctcaacgataaatgccacatgggtcttcaatggactttcccagttgcaggccttcatgctctctatgtccttgctttaattgcattcacaagagcagttcgacatgtagagtttcgttttgacgagcttagagatctctggaaaggaattctcgtctcagccacttcaatcgttatatgggtaacagcgtttgtgttgaatgagattcatgaagaaatctcttggcttcaggttgcttcaagatttgtgcttttagtcacggtatgaagctaataccaggactgttctttatatttgcagttggaatacctttttaacagacttctgagttgattcttctttcagggtgggattctcgtcgttgtcttcttttccatctcgagtaaccaacctcttctttcacaaatcagcttgaagaaaagacaaaactttgagtttcaaagaatgggtcaagctctaggcattcccgatagcggattattatttcggaaggaggagtttcgacctgttgacccaaacgagccactcgatatgcttcttctcaataaaagatttcgccattcgtttatggaatttgctgataggtactccattcaatacctgacctcatatatatcccggtttcaccatttatttaaactaattcgttatatgctggtagctgctacgctggagaaacattgcatttttttgaagaggtgtatgaacatggtaaaatcccggaagatgattcgataagaagaatctacatggctcgacatatcatggagaagttcatcgtcgcaggttaattacatatccatcttccctcttctttgtagacctgtctcgtgtgttctctctataaatctaactag

SEQ ID NO: 49987 - DNA, 800 bp, Arabidopsis thaliana landsberg
  unsure (1)..(800): unsure at all n locations
ttgtgttgcgtttatgctagtgcactctaagcggatactacgacggatgttaggagaagaggaggtaccaccaccgccggcgaatagcataagagaagttcgccgtgagcgacggacacgacggatccacgattccaaaaacggcaagctgtgtggatgaaacgacgtcggataaggaacggcttgttcttgccacggccagtaacgagattcgagagttaacgccgttagattgaaaaactcacggcgttctagaaacgacgttccccaaatcggagggtcaacggtcaacggctgagagaaatcccaagcgggtcgagccataacgaggaaatgatcatgaccggagcgacgagaccagatctcgggttgatcacgggtcaaaaactcgagaagatccgacccatgatcagcgcttgagtttaaatcgggtccgtagagataacggagagaatcgatgccggcgtagtaagggaggtagattgcggaggcgagattcgggtcgggtgtgagacatggatattcgagaatccgacggtggaaaatgagttcgagaagtaacgggtcggttcgataccagcttcgggtacgggtatgggtttttgggccgagtccgtgattggctaagtaagggcaaagatcgtcggtgattgggtaacgattacaagttgagagaagatcgagattgaatcgtgatgggagtgttcggatgtgaatccaacggttggtgcattctgaatcgacggctgagatttgctgagattgaaccttaggctcgatngagaagaagaagaagaaga

SEQ ID NO: 49988 - DNA, 494 bp, Arabidopsis thaliana landsberg
  unsure (1)..(494): unsure at all n locations
attgatttgatgaaagaacaaggcccaaagaccaaacaaaaataaaaatgaaagaagaagagatagtgggagattcagctttacaaagaagaggaagggtgataaagagagatatagggggagagaaaaagttcttttaagctttctgcaacaaaggcttttcaaaactttttcttaggctcttcaaagtttctcttatgttaatatgatgaaagctttttaattttcttgagtctctctctctctagctctctctttgggtatatattttgactcttcttcaaaaacctatttctgtctcatacacttgagagttgagagcaaataaggggtctttgatgtctatattgcttctacttataaagctcattgcactatgccatcattgcgtaaaatgtatacatacactcgtgtagctagagagagagagagagaaggnnggtgtatttatttaagatttaagatggnggatttttaggattttttcttttttt

SEQ ID NO: 49989 - DNA, 428 bp, Arabidopsis thaliana landsberg
ctggagctccttgaattgattttggtcaatctcttactcatatcatgtatttatttgcccaaaaagatcaagtacttccacacaattgattttggatatactatatgactttcctcattacctaagaccctttttacaatccaataatatatccaaaaataacttattagtcgactgatattgccagctttgtggaagtttttggtcaatcacagtgtttagtctgtgattgagaagttgacgacgaatatgatctttcttgtctcactcaggttgtggtttggccctgtgagtcagctaaactgctaaacccaaagaacttgattcttcaagatccaaaaaaaaactaactccttagtatcatcatttaaacatttatcaggacaactactaacctcttatgcatatcgagcagactcaggaatcta

SEQ ID NO: 49990 - DNA, 157 bp, Arabidopsis thaliana landsberg
  unsure (1)..(157): unsure at all n locations
tgaagatataatactgttacannnnnnnnnnnnnnnnnnnnnnnnnnnnnnnnnnnggtattttgacatcgtacaaggatatttgattgactaatgtcagcatattgatcgattaatgtacttagactaccgccagcagaccgatgagttagtagtg

SEQ ID NO: 49991 - DNA, 370 bp, Arabidopsis thaliana landsberg
aaggtacgaagggagcggaagcaaggagcgaacaggcgataacaaggtgagacgtaaggacgagagagggaagctgaacgacaatggtgaacgaggaagggaagaggaaaacatgagagtatgagtcgcggggggagtttgatccgggcaaagaacgagcggtggagggataattaacagaggaaagcaagcaggggaaaagtgaggaaaggaaacgacggaagaaccccaccctagggaatgccctaggggagggaacaacaggtggaaacgactgttgaaaactggaacgcggaagaggacagagaagaactgcaacgaggaggggctactggacgtcagacaggaccagccaggagagcggaaaaag

SEQ ID NO: 49992 - DNA, 995 bp, Arabidopsis thaliana landsberg
ttggaaattttcagatttttcatgagaaaagaaaagtaaacacatacctaagtttagctttagaaagctcttttaacaacgagcgtagtgatgccctaatccagccaaagccgcaactctagacgaaatctcaccggtggtagctgtagctgtagcggcggcagtagcagtggcaaaaactcgattggcatcagatctaacaccagtgatccctaacttagcagttgattccgtcgagaccggaggctgggagaagctattaacggcacataattcgcgggaccaaggaatcagtctagggtttggtaacgaagaagaaacagagattcttgaagagaaacgagaaacaacagatcttcgccacatcgttaagccgtcagaattttctacgcgttggaggagaacgagagaaacttcttcatcatatgaacagattggtttcagattacgacgagtcacggtgactccttcacttttacaggaaatgataattaaaattaatatatgggtcaatcaaatatatttcagagaattcaggggtacttgtataattaaataaaagtatcaacatgttgggccatggttgtttttctttgaccaataaaagtctttactaaccacacagattaaggcccaatatatgttcaagacgtgaaaatcgactattttgggttggagggatctctaaacggtctaatggtttagaccgctcaaattttaattgtaaagttttcatggttttgaaaatcaagccaaatcggttaaatattcgaccggttctcgtcaaaattaaactggttttgtacacatttgttcaaaaggtattaagctgaaggagtaataactaataagaacctcatcgttttagacaaaacaaaccacagtttgggtaataacaagcctcaataatccttaaccgaatcaaacaaaactggcgggaaacgattacaactaaaccgttaattgaatctttaagaaggagatgttcatcaatg

SEQ ID NO: 49993 - DNA, 379 bp, Arabidopsis thaliana landsberg
ttttgtttaaaaggcaatatttaacccaaaaacttattacataattattgaaattgataaattttgtttatgtagtggagacctagtggtaaatctagttactagagaagaattcttttcgtagttagataagctgtccttgtcgcttgcatagttgcatattaaaagaccgatgactttgttgtgtactcattaaccaattaattgggtttcgtatattaattagtaaaagacaagtaatgagtacttaaaagacaaatttaaaatgcagaacaaagatggagacacgattaagagaaggtaggtcttcgtcatttagacggcttcttgattctggtatgcatttttctttaaaatttccaacaaaaaatgtaatcta

SEQ ID NO: 49994 - DNA, 376 bp, Arabidopsis thaliana landsberg
  unsure (1)..(376): unsure at all n locations
tatcttgaaaaactttgttacagatagtttactgccaattaagcatgcgaaactttctacagtttacacagagcctgactcataatgtgatgctattgtctaacgtctcatactaggctaatggcattcacttctaactatgatagtggtatcttgtgcgttcattaagagagtggacaacagggagtttgagagacttacagggctgccgccttatcagagtgcaggcgcgttggcactctgcttaccatnnnnnnnnnnnnnnnnnnnagatgatgaagtgtatctattaacttcgaggactatgtacatactcacttattcacataagtcatctggagataaacctttcggaaccacccctcagcccgaattc

SEQ ID NO: 49995 - DNA, 2619 bp, Arabidopsis thaliana landsberg
agctttcaacaagctccgggaaacaattttcttcctcctattccacattcaatttctcaaattaatgatctactcactactcccagcaacaacaaaataaaatcaagtgattcaaacatagattacaaagaagattaatcaatcatgaacctcttatcatcttccgtttcggatttcttcttcttcggcaagtaattctgctccgtctgatcgcctaccgccatcgccgatcaaatccagagttccgcgaattaggattttgtggaacgcaaacccagagtgaaagatgtacgacatgaaatcgaacccaaagctctctctcactcctctctaccttcctctcttgatactggctgggtagctcaaccaacaacaactgtgttgaattgtgaaaagtctagtaaatgtcttactgaattaaacaagattagtttttaaatttttttatcagacatattgctaaaaaatacacatatgtttttttaacgggctttaaggccaaacgggcttccaattatataatagtccatgtaatctgttttgtactttttgtttgcttcatttttgcaaatggttacaatttgttaagttcgatatgaaaattaaaaaattggttacgtgtactttgccctaaaagaaggctagttgtgagctttcaatcttaaataatctaatgttattggcctcaaagtaaaaaaccagaccggatccaaactattttggaattatgttgtatttttaatataggtgtacatgaggtacctcaatcgattgtggatgaacattcttgggtctataatttgtacaacaaatgaaacgaaaatttgctgatgggttggtagttgatcgttgatcaactatgtgtgactattgacaatttcttctatgcatgtgagaaccaattcactctattctgttttttcctagcattcagaatccatataaggaaaaaggccgagcaaagaaaatccaaaatacacaaaaattgaaacataattggagacagatagttgcaaataggtcaacttcttttaatattggtttgcagaagcagtgaacagatagtgacagaagagggaatactatactgtattaattttggtagctaatttcttctcttgcaaatatagtttgcttcaatagtacgaaattgtaacctttaagaaatcaagcattgtaactttcattaaatctcgcacttaccaataatccataggacatgtttttcatattagcatttaatgccatttaagcatatcatatgttttgttaattagataggccaatgtggtttccgagtataacacagagaaaataacttgaaaatacaaatatgaatacttcgagcttgtgaatccgaaaatctaaatgtgaatacagaaaccagcatgtatgtatggaagctttattttcttcaaaatagtaatcaatcacatagtttatagtatatgtactatgttgttcttatgtgaactatggaaaatgaggaaagtggcattaatgcgagtcatgtgaaagtgcaagtggttttcataaatgttatatatccgaacaattaccaataatttagtagaacgatacgaaccgcgtgaagcagtcaacatacaaaacacccacatgaaaatgtgagccccattcccatactcccatagaaaatggtttaagattagggtattggattcaggactcgagcaagacgaactgctatttgatgactacattactgtgctaattagattatgtggttacaaaacttgaaacaataatataggtcgacgaaagaaaatactactagtaatagttaaaaacagctgccacaactcaaatttcatactaatagaagttgtcaatatttattaatctggcgacaatatatctggagtaacaaatggcataggacaaactctgcacgttgctccacaaagaagaccagcatttcagcatttaatcaaaaaaatcgagttatttaagtgctcgtgtgcttctaaatatttaatgatccattaattaataggttgccaaattcctttctatacgattttaccatttcatttgtttaaatacactatatgacctgagttttgttgctaataacaaggctcattaggttttgggtatatagtacatatcacctttttatcttttttgtattggttacttctgtcagactgtcagtagtagtctcaatggtaagttttcttaagaacatagtaatttttttagtggatttagtaagtaatatactaatatttatcgaaattatagtgtatgataatacatacttgtgaaactaatttgtgttttgacaccaaattgattaggaatttaggatgttctttcctcagatttaccccccctttttttttttttgccttttgacgtcaatttgtgttacccagttatgggttgttgttacttattactgttatctctcggtttgtgagaatttcttctccaaaattagattgtcaaattctgtcaataaaaaaaaaaaaagagtacatgttttcttagtattgattttttcatcaaaatatgatttcgcatgcaaagattttaggaaatatatatccacctgatgtgggaatcaaaatcatataacaaacttttcttttacta

SEQ ID NO: 49996 - DNA, 314 bp, Arabidopsis thaliana landsberg
cctgttctcttaggcgaaaacatggtcattccagattcctgagagcgtgagtcctcagctcgcaagtcgacacttcatcggtagacgcaaggacagagcttcgaggcatggcgtgcctactggtgtgagctttcccgcgtcagttgggcggcgcccaatgcccacgttgcagtaccttcgcgggcagttacgggcgttgcgatgtatcgccgaacgcgcgtggattggcggcgccagtgttgcgagtgactttaggcataactgggaccagtgagtggagtcattgctgatagacgtttgaggtgtggtaccga

SEQ ID NO: 49997 - DNA, 912 bp, Arabidopsis thaliana landsberg
tttattagctacaaattcatttaaataattttaaatcttatagaaaaggatatttgaataaagcctatactaatccgaattttcaagacactggtttttgcattaacgttacgagcttaacgttaagtgagccgcaccgagccaagcctaagtcctctagctggagctttaacatggaggactacaatacaatgttaacgtcagatccaacggctgagagcgattgaacacgcttctgtgatgtgaagggcttaatcttttctatgctgacttcatcatcatatcttctttttttgtagtaccaaaaaggctaaaacgaaaacgatttagagaaatgacaacaataataaaaagtggggataatttttgatttctgatagaaagaaagagaaacaaagaaaggcgggaccgatccgccattaatgctaccacccaactacaaggcttttctcacacactctcttctctcaatctcttggctcagaacaaagaagataaaaaaaaaaggtgagtaagaatttgtctttaattatttcttcatgtgttagttgttaggttacttaaatcggcaaaagagatttgatgaacttggtcatatgctttaaagtgtgcatacatttttggggttgttactagttgtcaaatcttttcctttaaaccaatttgatttccttctcatcttttccagcttccattgattaaaagtttctacctttttcttatcttcaagtgtgatatattgtgagaagattgcagaagcgtgtccaacttggttccctctctctctgaaattactcaatcatggggatttgcttgagtgctcaggtcaaagctgagagctcaggtaaacacattacttcaaatgctttttcctatcacaaactatgagccttctcgtaggagtctttggct

SEQ ID NO: 49998 - DNA, 708 bp, Arabidopsis thaliana landsberg
tggtgctggacccatttagtagttcctcactaaaatggcttactattttagcactctatttatgtgtagattattaaacttctccgactataattgttagcaacatttttattattagtttggtttctttaaaatatattacagtctgttggtccacaatttcttcatatcaaaatatgctatataaatcaattttcgtgtggatattcgaattcgtaatttaaaaagaaaattcttgaaatgtaattataaataatttatttataacaaaaaagaatatttgcaaagaaaaaccggcaaagaatgaatcaatataaggaaaagatcatgagagctatacccatttatgatattatgcatgtttcagattgtcttgtcaatcatgcggatgacgagatgattaggaggatgagtatatttgtttctgatggtttccatacgtaatcaaaatattacatagtttactactttactttttcttactatttaacttgtttctaattttcaatgttcaatcacaagtcgatcgatgactaaaaacttttcaaattattctttcatacatttatccggagtattcttaagttctctaaaatttacaagtcggtagacgaccattcaagtacaaaataaatcgaaaatttatgatttttatcaactaaataaaatggttcaaattacgattaatcaataagattatatcataaa

SEQ ID NO: 49999 - DNA, 995 bp, Arabidopsis thaliana landsberg
taacaaccttcatagatcaatcaagtcacatcaaccactaccatatctaacatttaatcaaataccaaagaagcagggatatcactcaaacactatcatagcaaaacaaagcaagtggctctctcattcaatgaaaacaccaattcgtcaacaagaacaaaaattctcagtgaccacacagatctaatcatagatgctaataaatcgaagaagaaacgcaccagataaatcttgctcccttggctacaaaatttgagataatccttcgctgaacacatagcttccttcaaattcatcaaagtcttcaacgtatcttcgctgatcggttcgttactttctctaatttcctcaaacataggaacaagcagctttaatctcctcgctagattataacaaagcttcttcactgttatacgataatcagaaatcgcagcaatctcgttaactacatcgattaagctctgtgcagcagaagctttctcttcctccattgaattgattcttttctgtttaaaaaatcacgacttacggatccgttttttctccggagaagatggagatctttcccgattgagactccagtggcgagattgagcttaaaggaagaagagaaccatttgcagaaagtgcgaaagagagagatttctgagaaagagagattgtgtgagagagagaagacgaggacttttcgaaaacggcgtcgtttagctgacggctttagcttattgcaacttgtacgattctctcggcttaagaactaaaccggaacgaaggtaaattcgaccacgaagccgaccgggaccggttacgattgtgtttgttttattttttacattaatatattatattatcatttaaatgatttctctataaaattactaattttcttgtgaaattttgaatatttttcaactattatattttcacggattgaatatacgaatttttacggaattaggggtcacttttttgctggagttggtgacattttgggg

SEQ ID NO: 50000 - DNA, 367 bp, Arabidopsis thaliana landsberg
gcttggcctcttccaggagccagtattcgatgtcgaaggcctcctgctcgggcaggccctgataggtgtcgacgccggacgcgcgcatgacgttgatggcgttgacgtagaactccgccgcgatgcgcgccgtcgccttgtccttggcaaaggacatcattccgacgcacggcacgagatagatcacggcgttggggtcgcggatcgccgggctgtcgtcgtggcggcacgatcgtaataggcgcggtaagcctcgcgataggtctcgaccgccgcatccagcccggcgaccagcgctgtcgaggtcgccgtctgtaggacagcacgagctggaccgatctttgtgcgcagaacatggctcggggca

SEQ ID NO: 50001 - DNA, 572 bp, Arabidopsis thaliana landsberg
cgggcaaactgaaatggagaatgcttgaatgttctgtcgatcatttcttttattatcatagctcgatttgcatcagcggggttttgttttacttagctatgaagagtgagtctaaagaatatatgacagtttcctttcatatgaaggatgagaatttcatgtttataccgaaccaacatctgttgtcaacattaataaattacaagggacgcttaggaggaattcgtcataaatcatttggctttatggatggtggagatgtaggctttgagttgtggattcttgatgttataaatcagaaatggataaggtctattcacgtattgccacctatgtggaaggatgtcgttgcggagactagagtttactttgttgggataatcggtagctgtgaacgttgtgttttctccattcgtcaagtccgaccctttctacatctttcacttaaatatgaagagcaactctatcacatgagttgacatcaagggactggacctcttgaggtcaagcgtatacacatttgtaaccatatcagatgtaatctattatgagtttttcttttttacgcttat

SEQ ID NO: 50002 - DNA, 1209 bp, Arabidopsis thaliana landsberg
gaaatttgacgcagtcaaatacctatgttgtcaaacattttttgttgttgacatatgtatcttcttttctttgatctgtgatccgtgggttatacattttttttcttctccactgaggtttttataaatttttccagttttgcatggctagaacttgtcagccacagaagcttcatgcccaaactacttacagtaaatggccagaagggttggccatatgttcagcgcctgctggtggacttgcttcagtttcttgagccatttttaagaaatgctgaactcggaggaccggtttgtgcctttttctcttctgtaattgttttgcattggacactaaaggatatagtcgatggtaacttaaagcggtctcttttttggtgtgtttattaattgcgtaggttcatttcctatacaaagggacattgagagtattactggttctgcttcatgatttcccagagttcctatgtgattatcattttactttctgtgaatgtgattccttcaagttgcatacaaatgcggaatattatcctcagttcttttccacggaacatgaggcttcctgatccttctaccccaaatttaaaggtacgagatgatagtggagattccagcatgttcaacatattttaaagaaaatatattccttgtaggctgaattatcgtgttcattgcagattgatttgttacctgagatagtagaagctccctgtatcctttctgaggttgatgctgcgctaaaggcaaagcaaatgaagaatgacgtggatgagtatcttacggtaatgggaacacctgattcttcaatttacttatattcactttggtattcttgagattatatcaagagatactcatataatttttctgcagtcgaggcagcaaaattcaactttcctaagtgagttgaagacaaagttacttctatcgtccagcgaggctagttcagctggaacccgttacagtgtaccattgatcaactcgcttgtgctatatactggaatgcaggtatgggtctaatttctatacagccttttcttttgatttctagtttattatatatatatatatgcaaataaccgacattgcgataacaggctattcagcagcttcaggccggtgagacacaggctcaaaatgttgtggccttgcagatgttcaagtatttaagtatggaacttgatacggaagggcggtatactgttc

SEQ ID NO: 50003 - DNA, 507 bp, Arabidopsis thaliana landsberg
acatcgtatcgaagaatcagagatttgagattgtgagccctaatccctagggagaaaattatcttatagattccgttaaattttaggaagatgatttggctctttgtaatattttaagaaaaatctccaatagtactcatacttctgtatatttacgtttttaccccatctattttagatgtttcattaacgggtcccgtttccttgtattctcaaattgtcattcaggtccaaaaggtacatttactattttgtccatcacaaaggaaatctcattgcccttattgaaaaagatactaacatcattgtgtatatgttttcatggcaagagcacgacggagccagaggtgatcctattctcaagatctgcgtgagcatcagcgactcgagacaacgggtacttgtgattcacacgagcctttaagatgccggatgtaacattagcgaaaaccttttctgcacatttcaagagcttgtcgcgagtttcattgtaatgcatcatggaag

SEQ ID NO: 50004 - DNA, 592 bp, Arabidopsis thaliana landsberg
ctaggatctgcagaaaaagttttggctgagttcattatcgatctaggtcgtcactctgagacagtcgatgaattcgataagaatcttaaggaagcaggtgcagagatgccggattacttcgtccggtcgttgttaactacaatccacggtatttatcctccgaagcctaagtcggagaagaagaaagaggaaggtgatgatcagaaattcaaaggcttagcgattaaggatactaaggataaagttaaggagctcgagaaagagattgagagagaagctgaggagcgacggagagaagaggatcgaaatagagatagagatcggagagaatccggtagggatagagacagagatagaaatcgtgatcgtgatgatagaagggatcgacatagggatagagagaggaatcgtggagatgaagaaggtgaagatagaagaagtgataggaggcatagagaaagaggacgtggtgatggtggtgaaggggaagataggcgtagagataggcgtgcgaaggatgagtatgtggaggaagataaaggcggtgcgaatgagccggagttgtatcaggtatataaagggagagttacta

SEQ ID NO: 50005 - DNA, 828 bp, Arabidopsis thaliana landsberg
ctgcgattgatcaaggttcttgttaaaaggcgtaaaggacttaacatccttcttagacactgatggttgtctctcaccaaacaagacaggcactaaatcagaagcaggtcctcttaacacacctttactcagctgtatcaacgtatctttcatcctacgatacgtcacctcattcgcaagtttctccaacctaagagacgtgtttaacccttcttcaggtacctcatcaaacacaacagtaatcgaagaatcctttaaccggtaaacaactccttgcgcaagaggagacgaaccaagatcagatttgttgagtttcaaaacaacaacatcatggttaccaaacttgtgagcaggaagcacatctcctttgttggattgaaactcaataagagatttacccattagacctgtttgaacatcaacacatttcaaattgagaatcgttgtgcctttcttctgagcagtttcaatgttccttgaagcaccggaggttaaagacattgagatctcagcttctttctccatgtctataagtggagccattgttgacacaaaagcttcaagagacatcttcctcgccatttgcaagcgttaatttctctgaaagtgaaaatacatgatttcaattgtaatgagtttagtacacatttgagcgatactatacaaaacaacaactattgagattctaaattacgaaaccgaagcgaaactcagaggaatccgaattgatattaatctagccggagagataaatgatgtcgtaatgattctacttaccagaagaaggatttgttcttctcggttgagattgaaagatgaagaacaaac

SEQ ID NO: 50006 - DNA, 713 bp, Arabidopsis thaliana landsberg
tatccccttctccttcaattagtagtctgacagaggagaaaacttggattgttgatggaaaagctgataatatttctgcactcccgccaaagccacaattacctccatcctcccctattttggatttagacggtcttcctgtacttgatgtctttactgcttactcttgtctgaggtccttcagtactttgctgtttttgagtccttttgagctgaaggattttgtggaagcattgaggtgcatgtctcctagtctattatttgatagcatccatgtttctgtcttgcaaatattaagaaaacatttgaaacaactcgctgctgaaggtgacctatctgcgtctgcttgtctgaggtatactttttatttttctttctttagtactttagttttactgctgttttatggatataaagcttctcctgttttggttctgatgctttgctggtggtatcttgaatgcaggagtcttgattgggatacgttggatgtggttacatatcccctttttgtggttgaatacctactatgttctgggtccaaagacaaccctggattggatcttactcggctgaactttttcagaaacgattatttcagacaacccgtgaatctgaaaattgagatacttagtcgtttgtgcgatgatatgacagatgctgaaatccggagggcagagcttaataaaagatcttttgcagctgagtttgaa

SEQ ID NO: 50007 - DNA, 615 bp, Arabidopsis thaliana landsberg
tcgacaaagatcttcatgttcatgagatcacgttttcgatgatcattaagcactaggattccttctaggatgagggcatcaccaggattaacctgaagtaggacattgtaattagtgttgctaatcaataactaatggtgttttctgagtctctgcaagcaaaaactaatagtaccggacttgatgattcaatgctctgatggattctgaaatcgtaactcggaatgttcactggttgtccagatcgtaacttctccatacatgaaagtaaaacctcagtgttgaatgcatcttgtatcaaaaacaaaacaaagattcttaacaacaaatttgaatcgttcgttagatcaaatcatcataattgattttcctcaccaggatgatcgaaattatattcatgaaccttgttcaatttctccttagtaagcgagtggtaaaacgaatcctgcaattattgagtcgtcttacgtacatatctcacatcgattttgatgaaaaaacagattatgagtttaataattacttggttaacaaggacaacaagaagaacgtgtaactgagacatgatcatattgcaaaccgtcgtcatcccggaggcggttcataccggcaaca

SEQ ID NO: 50008 - DNA, 113 bp, Arabidopsis thaliana landsberg
aacaggaggctccagctggaggaaggatgtgggcgtgggagaaggggcaggcaaccctaaagtgggaagagaagcaaatctgtgagaaagtgcaaacgagcgacaagcttcct

SEQ ID NO: 50009 - DNA, 1304 bp, Arabidopsis thaliana landsberg
tgcgagaatgggctgctaataaatgctaattcgagaacctatcgattcgcgtcatgcagtccaagtgtatgcggacattcctcacacaaatttgtaatgaactacggaagatagaaacattactaccgatgaacgataagtttaaacaaatttcttcgaagagtaagagaaacacataacgatgactactaaacattcaaacaaataggtcgaatcaatacatccaaaattctcttgtaagtcgaagaatcacaagctaagatcatcagtgtaagataatcacgattcatagaatcatagagaataatcactcgatcttcccaggaaaatgcacaaatcacagaggttcattagcgaaacaaaatcacaagtagagaacattcgtccagagtatattaccatcgtgatctcttgctcctggtgatgcaatccaaaggatttcaaacactgctacagctctctctcactctcttccctcactatcgtctcctctctttatcaaattcgaaatgagagaattgtagaagaagccttgaaaacttaagcgggttattatccctcgctttctgtttcattttttattccaattaatttgaatttaaccttaaaacgacacggagtccaattttatggtaccaaaacggcatgatgtttgttaaagcagcgaagtcaacgtatatggttgactattcatgagtagtcttatcaggcgaaagtgatgaacataggagtaaagtgattattaaccaaaggaaaaagtgtcataaaaagatacaaaaattacaaaagataaattatgtgaagaacactcaaattgcagataacattaacgacggggattataaaagtttttcgctccgaattaatctgattcagatccttatatacatcgtctgttcgtgtctatcaatgcatacatgtctctgctcggagaggtgaataacctgcagttaaaccaagccaattgcaaaactagttaaattacaaatccatagtctgtaagcaaattgattgattttgctttgattatagatagaagagaccttagagggccatctcagcctgtaatgcagcgagttcttcttcctcagcagtccgcttctggggaacaggacgagccggttgacgccctgcaggcactggaactgaaggcaatggaggagctgttgttgccggctgtagaagttgcgattcaagctcttcactttctagttcatcaagctctgctgcaagctcatcctatcaaagagaagtttttcttagacaaaagtcattattagttgaaaaatatatgatcatttggg

SEQ ID NO: 50010 - DNA, 209 bp, Arabidopsis thaliana landsberg
cgtgcctgcttggcaccttgccttcgcgagagaacggcgcagggcgtcctgctcttttttccggatcgcaaggccactgaaggtgatgacctttaagcctttggtcggcatgtctcggtagcttccggacaacgcgtagtttcccagcccgtcaacctgaggaatgcgggatggcataacgagaccatcctcgagcatatttccaaact

SEQ ID NO: 50011 - DNA, 667 bp, Arabidopsis thaliana landsberg
cgaatgggttttagatttctaaatccgtaaaaaccgagtctaaacccgaccaaaatactcgaacgtcttggccatcattgctcaatactatgcgtgtccaatgcaatgtacctcaagccaaagatatccaaactctacggttcctttatgttaacattataaatttataaccattcgggcaatccgcactcattaccctaccatattacttattataatgaaattatcacataccgggcatttattccactaatgtggttcgggtaacattgttaagaaagccaaaacattcgaaaataagattttggtgagaaagttctacaatatattacggcatttatattcttgtcaatgtgtctcttctcttgtgtcctacatgcccatttgtatttttttctgtatatgtgggtttaagcccaaaactctaatgattttttcagcccaaaggtgaacatgtacatacaactttcttcaaatgtacataatttaataaattaggtagaattagaaatttttagcgtaaatttgatagaggttaaaaataaaaagtgatccaaattgagcgtttataatacaaatgaattgtcacatacatgataaaaaatgtaaaatcacgtacataaaaagtgtgttacacaaaagttattgcaacggtatctaatttgac

SEQ ID NO: 50012 - DNA, 957 bp, Arabidopsis thaliana landsberg
aaaaagcaaactttataaccaggacacaacggacggttatgtccgtattgatgcagaacgtaattcaggcactgttggataaaactaaatctctcccctttttttttccgtcagccacgaaaccgatctctctctctcttcctcttaaaatctttttttttttttgtcttctcctttcctttcagattccgtgttgttttgcttcaacaatcacaaacttctcgccgtttttatcccgatccgcagcaaaccaaagctgcttcctttactgaagaagtctcacagtatcatgcacatacatatattcacactctctccttctttatctctctctatatatcaaaatatagagagactttctcttagttcagatcctggagacctgtcatttccacccacagtaacttcagttgaatctccctatttttctattcatttaattaaatgttttctaaaattgttgttttttgttttatcatgtcatcgctaaaaaggaaactcaaatatattaaatgcgctaaaataaaacaaattgtattcaaaggcaaacgaagggtcacgcggcgttttgggaattgcttatgaactaattacattttattatgtaaaaaaaaaacgtacggtgcatttaaaggagagggcaaatctcagccgtccgatcaagacgatagtaataaataagcttatgactttactctatatccctaaattgccctttttactgatgaccccgttgccgttagcacttgacggtgccgttacccacatcgtcttgtgtctggatcgtggcaggcaaacgtgtcggcttctctattaaacccggccacattttcttttttccgttattttttttttttgtgtaacatcagatagattgttttttccgttacagatttaatttttatttaacactgtggaacgtgagttaattcacattatgccattgatcgttttttt

SEQ ID NO: 50013 - DNA, 627 bp, Arabidopsis thaliana landsberg
tgtatacatgaaaaaggagagggtacttggaataggaagcacagtttcagaaccagaattgaaaggtcaaagaaaaaggctttgtggtgaccagaatgtacatatgtggatactcgcagtatgaaccgttagtttccaaacccacccacatttacttctttttttctatagagtatcaaaataaacttagaggagtccttaaacttaatctccaagttcaggttttttttcttattttcctgagcttagctaatcacatcacaaattcagcaaatgaggtagatgaaataagagctgagagtgtaaaatataccttaaaccccgtcaaggtgccttgtcaaattccaaggttttgcaaaattgcaaattctgaatttgtactttatgtcttaaatgggctgaagactgacgcccatctctatttgggccgcaacataatgaaatataaatatgatttagaaaaaacacgctttactcttctgtcaaaaaatttaattgcatgcaagacgcgagtctcgctctggcggctttccgttgctcaaggctgcacgtatcatagtctatgaccttagctggcgcacgagggaatatacctggtcgtgcttgtccacacgcatagtttgattg

SEQ ID NO: 50014 - DNA, 623 bp, Arabidopsis thaliana landsberg
  unsure (1)..(623): unsure at all n locations
tcagtacttaacaaaggaagcggcaaaatacaagttttattatagtaagagaaaagaaaagaacggaaagaggtcgagaaacacggaaagagcgcgtggcgagtcatctggaaacttctccgcgtacagagaccgcagtcgccaagggcgatcgccgacgccgatcgggcaggtacacacagcacctacctgctacctcaccaggtaacacgggcccagaagaacccgctcgttttaggcggaggggcaggcttctctgtttttttttcccttttcgtcccacctagagcgtcgcggctaattatttgctagtaattagccggtacaacaattagataggatatatttagagttttagctaatagatattagcaagttcaatggttaatgggcaaataatttaccagcctnnnnnnnnnnnnnnnnnnatttattagtcaatttgtttggagccaaaatgctagaattagccaataaactgtttgccaaacggatcgaaacaggacctagatatggtagtgtggatccgcggagatttggtatgtagttatccattaactaatacccactgaatttgaggatnnnnnnnnnnnnnnnnnnnggcatatggatantttgtagta

SEQ ID NO: 50015 - DNA, 646 bp, Arabidopsis thaliana landsberg
  unsure (1)..(646): unsure at all n locations
aatcgctctttgcgtatttgtgtctagaatagatagatttagcagaaaaagatgctaacgtctagtagctagggggcccggtgcggccgcaccctcaggcaacccccagaaacagccctgtatataagaacccaaagaaacaaatatattccaaaacaggcacccaaaactctaaaaacactcaaagcggtgaattacccaggagagcataacaatgttgctccacaagcggcactactactcccttgcaccgctgggtggagctcgatgtcagtacggatgagatggaaaactgatgagagagaaaatagttgttcatattttccataatcctgacccttccatcaggcagtgcataagtactacttgcttacaagctgccaaaccaggcccagctattctcgcgcacgcaggcgcccaacaggtcactttcttcggtccggcccatatacacgatcgctcagatgatgccacgaggcggacggacccgccatcagccaccactagggatggcaatgggtacgggtatgggtaaataaccgcggataattatccattggatatgggtatggtggaatttggtatctgcgggtaaggttatggatataataaggtatctgcggataatttttcngcgggtatggat

SEQ ID NO: 50016 - DNA, 313 bp, Arabidopsis thaliana landsberg
cttattattcgaaatcgcacgtcgatgagaacgataaaacacattgactccacccgagattgtaggaagtatgtcaacatgatcccctccctctgcaagatgcgattgcgctcggtatacacgtatttacccaacgagccagacgacacagtggcatacaccgtcgtcatcatacagagcaatgatgcatgaagacccctgcacagtgctctaactcactctgtagcctaccaccatcatctgcacgacttgctgcaaaccggatccgctcatcgacagtgtccgacacggtccaaaatctacggctcatcat

SEQ ID NO: 50017 - DNA, 354 bp, Arabidopsis thaliana landsberg
gcccacaaaaagatttttgtcacttaataatattcaaccagttcaaaaacacatgcagaaaaacgagttgctcaaggttaaatcctcataaaacgactaaggtatatttcgactcaattttttttgataatgtattgaagttcatttgtcatatatatacatacacaataaaaaatacataatttttattttattaaacaaattattacataattttatatgatctatctatctactacgctaataaaaatccacgtgtcataatttcatgtaatatattgtcagtttaataatatctagtaacataactttaaatataatcttatctatagaaaagatagtattatttattaa

SEQ ID NO: 50018 - DNA, 968 bp, Arabidopsis thaliana landsberg
ggccgaagctatacgggccggtgggattgatacccaacgtctagtaccaacggtaactgagcacaaactggatcaacattactaagaacgcaatccgcttctgtaacgaacccaactaaaccattaaccgattttgtttagtccttgaatttgagttaccttagtttatgccaaaccctctgcccaaatcttggtctttcaacacaatagatagacagagccagtctcacagttgtctgtctctctttggttttcatcctctatgctctttatacttatgtaattaacttgtggtacaaggtttttgacttgaataaattcgagcttcttctcagaaggtctaacatattcaattctcctataaggctaaaacacagtgttggaccatcttagtgatactaagcatccaagattcaaagttgttaaatagagatcaagaatgtttcatccgtttcacttcacattaaccaataataataaaaaaatcaatacaaaactcatttttaatctaccccattagcaccattttaaaagccataaggacggtgatgacacaactcccacaaatccaccatccgatttgataatcccaaataagaattatgaggtttgttcagtgatccctaagacatcaacacctggaacttatgttgttggtaagaacactacctccctcactcaactcaagtgcttattccactatctcttcagtgcctcaaatttccacacaattttccgctatataaaccaaacattcactaattgaattcaaacacacaactaacaaacaaaaaaacacaaatcttggttcatttaaaatctctccaagaaacaaaatggcagcttccatgaaatttctctgcattcttggtctgattctcctcatcggaacagaagttaacggtgcaggggagtgtggtagatcttcgccagacaatgaggcgatgaagctggctccatgtgctggt

SEQ ID NO: 50019 - DNA, 788 bp, Arabidopsis thaliana landsberg
aaaacttgtgcttttgtcatgtcaaatttggttggcttttccaggaaaaatttcaatttatcttgatcaagaataccaaaaagcgcagtctttctgcagaacgggtaattgaatttgttatattaagcgaaataaataaataaacttcgattgatgttgtttctctgaaatatgcagatttttggattattcgatatgagaaacgatggggctatagattttggagagtttgtacacacactcaacatttttcacccaaactcatcaccaagagataaggccatatgtatgcttcatcacttctaatgtgtttattcatttattccatgttattattattttctatatagctagagatcaatgttattaactatgaccacaaatacatctgatcacttgtttaaaattaaacagttgcatttagattatacgatactcgtgagactggattcattgaaccggaggaggtacgtatgtaaactttgtctcaaaaaaaagaaaaagtcatgattaattatatttgacggttttcctcgacttggagaaatctataggtgaaagagatgataatagacgttctagaggaatcagaacttatgctatccgagagtatcattgattctatcgtgtctaaggtgtgtataacgcttaagtttatgagcttgaattaacaatatagtgattttacctactaattttggtcacttaaatttggcaaagacattttaaaggcccatggaaaaaagaaggataataatttggagaatggaaaatttgttccccccatc

SEQ ID NO: 50020 - DNA, 656 bp, Arabidopsis thaliana landsberg
  unsure (1)..(656): unsure at all n locations
catgctcaaaacaaaatgttctaaaggaaggaatggatgtgtttacattgagcctctactaggtagggcccactatccaatagccatgtaactctctcatccggagcctctactaggtagggcccacaatccaatagccatgtaactctctcatccagagcctctactaggtagggcccactatccaatagcatgtaactctctcatcccttaagctataaaatggaggggtagagcaacatagaaaatgctttagacatgaactttgaaccttggggatttgattcgcttcactttgtggggctttggttcaatcctattcagtctagactccactaaaagtaggatagacaaaggtggactagagatcaattattattgaattcccaccaaaatcaagaagggaaaggagagctagttggtcatctggtattgttgatatcagagcatgtaatccgttttgtgttccaaattcaccatacacaaagaagatatagggtattatacatttgtggcttgaactctataaatctccatattctagtagatcagcccgtacctacatttttggtccttggagagaacatagactataccctttttcnttgcgcttttcataataagaatgatantttctaaattttgaaaaaatgata

SEQ ID NO: 50021 - DNA, 788 bp, Arabidopsis thaliana landsberg
  unsure (1)..(788): unsure at all n locations
aaaacataacatcatgtcacatgatttttttttaatagaataccagtacggcgttcgacaatatcgatacacagagtcgttttcctaacgaacctaacgcatgacacagaactagttgaatttgtaagataaaaactggtttgacatgtatcggtatcgaactcaaatacgagaaattacctctggttcgggttttttcattatcaaactaatatgctacaaagtgagaaagtcaggctcagaaggaggtatgaagcacaaagcccacttggaatctccgaagattattgggccttaaataaggccagaaaatataattgaatgataaaaggaaacttttcttacatttttggcaaaatacgttccttttattattggtgtattttaatttagtttaattacttcacagcaattggctgtttttctccagaagaacactaaagacaaaaattaaaccctcacactcacagagaccggagaagaagcagagagaaagagagagagagagattcaccggtgataacattgaagcagaaagattctccggtgataacattgaagctgaggagcaatgtatccgactggtcaacaggttggttgaaaaaaactcagttcaattgcaaaatggaactagattagttgggaaaaaacgaacgaactttagtctatgatctctcttaaacgatgaagtctctctgaatttttctgtgaatctggagaaaagactcgtgctttattggttattgatgtatctactctcgacattntgtttcttttttattgcatgc

SEQ ID NO: 50022 - DNA, 417 bp, Arabidopsis thaliana landsberg
  unsure (1)..(417): unsure at all n locations
acggattttacggcggcacactatcgtttgacgtcaaaatttttgccggctnncgccgagtgacttggcagcaaccacggccgttgtagagaatttgcaacacagccgatcagtgcgcatcgtggagccctgggtttaagctcagcacaactgtgtggaattcaatggcagtgcagctggtggatggcgaatttgacgatgtatcgctgcgaaacgggtattggcaaaggcgnntcgcttaccgtttttcgnncaatcccggggnggggggaaagancttgggcnccaggncaaaccttgggccagggccggacctgcgnacccgggtttttgggaccaaatggttcgtttctgggcagcgcttgtcactcccggtgaggaggcggtgatttggatggctgaaggggtttggggggg

SEQ ID NO: 50023 - DNA, 1294 bp, Arabidopsis thaliana landsberg
ctgtggtttctcttttaaagagtttttttttttaattgttttacggattttttctcttgtatgaatgtagctcttggtgatggaatgtttgagatagagaagcctatggtgtttacttatgaagaaattcgtgcggctacggatgagttttcggattctaatcttcttggtcatggaaactatggttctgtatactttggtctacttagagaacaggtttgtttttcatttccttgttttgtgttgtcgtaatggctttacttgatgtcatatttggtttaacttatcacaggaagttgctgtcaaaaggatgactgctacaaaaactaaagagtttgcagcagagatgaaagtgctttgcaaagttcatcattccaatctggtaaattccctttgtgtgtatatcttttttattagtctaaaatcattcgagattatgactcttatgtttgcttttcgtcttgtcaaaggtagaattgattggttacgctgcaaccgttgacgagcttttcgtagtttatgaatatgtccgaaagggaatgctgaaaagccatttgcatgatcctcagagcaaaggtaaagagactaatattaatacccgacaagaactaacaagaagatgatataaatgatatatttcttgatgttattgaaggaaataccccactttcttggataatgaggaatcagattgcacttgacgcagcaagaggcttggaatatattcatgagcatactaaaactcattatgttcaccgagatatcaagacaagcattattttgctcgacgaggcattcagggctaaggtctaaatcagaacatatgaaatccattacaagatctgattcttatagaggagaacatggttgatcttatctttgcattgtgtttagatatcggattttggacttgcaaaactcgttgagaaaactggagagggagaaatatcagtaactaaagtagttggtacatatggttatcttgcaccagagtaagcatttgaacacttgaagaagctacattgagttttaatacaagaatactttagtgaattcttatctgggacttttctgtcttttcttttgcagatatctaagcgacggtcttgccacctcgaaaagtgatatttacgcctttggtgttgatcttttcgaaattatatccggaagagaagctgttataagaacggaggcgattggaactaagaatccagaaagacgtccattggcatctattgtaagatcttggagtttgtttataaagattgaaccattacacttctttctttgatgc

SEQ ID NO: 50024 - DNA, 544 bp, Arabidopsis thaliana landsberg
tgcaattataatcattgtttaatcaaattagtttgactattgagctttgttcttcttatgttcttggcaatgtgtagagctgccgataccagaaggcaagaagaagaagaaatattgggtattctgagctctctttctgctgatggaggcacaaagttgaagaagtctgcatatcgatatgtttattctttttatctaacttagaataattagttgtagagagcaatattgctcttgtatatactgaacataatctcattagccatagtctgctcattcttttcaataaaagttgtattgatcttataaataagaggtttacattacatttgggggaatcatctgaagaaggatggctacaattcttgcttacctaccaaagcctcaatgtgtgtacccttacttacaaaacagataaaaacaagaccaatcttcgataaagagaatagtcacataactgaacattcctatgagggacccaaaaaaactaagaacaatctgaggaaaaagagcagagtcttgaaaccttcaattcaagtgattg

SEQ ID NO: 50025 - DNA, 1567 bp, Arabidopsis thaliana landsberg
aggaacatacaagaagcatccatttttcaggggcacaaatactatatacgatccaagatacgaaagcttcggtttatgtattgatccacacttgagaaagtatgctatgacgctataacaggtaattcgttcctttaaaaccaaaaattgtttgttgatagatttagtgagttttagttgattttaagactataatattaatggttgttcaaaaaaactataatattaatttgtgatttgttaatttttgaactacaggttgctgcagatctatcctcaaaccttaaataagtgagcttatgatgcttaatggtgcatgatgctccatcttcttttcttgttttctctcttatggtacctgtgatttctcgtggcaacgttatgtggacaccttgttttacaggttatcttgtactttttctttttcttttcctccattgctataacatttttgagccaatgtaatatcataggctcatagcaactcatattctgatttcttttcatttcaattacctcttaagacttgagttacaaactgcacaatctgaaatattattatttgctatgataataagcagaaaataaattgagacttgtttaaagaaataagcctctagctagtcaaacaggttttcaaatccaaataaaaatcaacatttctgatctcactatgacctatattttatatactggttgaaaaaaaacgaatccataatggttctaaacattttatcagaaatttattgagcaagcagagttttttaaaacattgtacacaaaaaccataatttgaaagagaagtcgtagaagcttaggtacatacccatttgtgagatatctcgtttatttttgtcttataacatgcattctcttgccatcagggctcgacgacgccttgcgattcacctaatatcattttggattttggttcgaactcgaattactcctgcgtaagagtaaatcatagctgacaggcaaaaaaaaaaatcaattataatttaaaataattaaaccataaataaaaagaaggttgaattaaattgaccttggctgatttgaatgatgggccgaattagctatcatatgggcttgattgggctcgggctcaggtccccaatcctcgacgatgtcatttagaaggatcccttccatgctttgttggttactttgtgcctcgcagggctttctcaacaaatgttcctgcatttatcaaattactcctatcaatattccctctcttacattgcaattacataacagacattgtgttaatatgcatcacccttctctggacgacacgtgtcaacgtattgatgaggttagcttcacatgcttcaatctcctccattgatgttagcctcattggatctggttcgaatttcctatgtatattttataatcttaaatatacatattgattataaaagcgtattgattaaaatggactaattgaaggaaaatacctgagctcttcctctgatattctgaagctgttgtggtaatctaccaaacttcttgctccagttcccttaaaaaactttaaatttaattagaaaaaatcctt

SEQ ID NO: 50026 - DNA, 188 bp, Arabidopsis thaliana landsberg
gtcggtgtggttgcgaaactttcgacgattcttgcctgcatctgctcccaaccgagaagcggatatcttcctcgttccccacgattccacgacaagggatcatcgttaaagcacgcacgatgtgcacttagcttctgatccaccaagaagtctatgatctaacagcactgatcgactcgaagaaccca

SEQ ID NO: 50027 - DNA, 1185 bp, Arabidopsis thaliana landsberg
gtccgagcgcttaaaaataccaacagacaatttgaattttagttttgttttgttctgaaaattaaatatatatatctaattcaatatggtagtgtatgcttgttgtgttggatacttttaaatttcatatgattatatctatatatttattgaaattgatactctttaaactagttccattgtaatcaatttcataatcaaactcaatattgatactcattaaaacaatttcattatggagtttgatactctatttaaaatcaagattcataacaagatcaataattcaatagaagtatattaattataaaaataacgagaacaataattcacggaagccataatatataattaattagtaaaaacaaaaaaaaatcacgcacataagaagagaaaaaacttttagcaaaaaaagaagagaaacaatttagctctccccaactcatggtaacgattatgtgttaagacacgatcctctgttttgggagtctaaattttcgatgatctatagatgtttaaataaagtttactagcatttcattaataaataactaatctatagagaatgtaataattaagttgagttacaaagacatatagaatgtagcaagttacattgtggactatatactttgagccctttttgttcttggtctcagacaaaaaaagtatacaacacaaatcaaaataatgataaccacaattgctacgatgattccgacacagatttcaacatccactgatcctactttcttgctcttatgtttcttcttccaacctgaaattttttgaagttttttttaatatcaaatttagtatatactaaaagcttaagagaatctcttatcaacgtaaattaaaccaaagcaactttctttagttaagagaaccttttttacttttgcttgatgatctcttagaaactacagtattcgtaaccacttttgagccatcaagtagagcttgaggatttggagttcttacttcagcttcaacaacggtcataggcgatccatgatcactcgtagccataacataagattcatcttcatgtctaaacaaaaagaaaagaatacaatatgtatgtatttagttgcaaccaaaatgaaacaactgaaatataggattatgaggtgttaatacctaaagacatcatatattgttgaaagagaatatccggaagtt

SEQ ID NO: 50028 - DNA, 923 bp, Arabidopsis thaliana landsberg
  unsure (1)..(923): unsure at all n locations
gtgcacattaattggtttcacgaaatgtgaaatccatatatgattaatgaacaataaaaggcggaaaaaattaatagtgatgccgctgattaacaaaagcatgactaattataacttatcgacctacagatgtaattttagatttatgacatctatctctttgatataaacttaacaaaaaaatctctttgatataaaactacacagatttttttttaaaaattaattgctacaatgtaacaaaagttaaacttttagggtaaatttgatagatacttattgaactttaaatttaaattgcttttagtaaatacacataaaaatctgtaaattaattttctcttggtttaatttaattatttttagtgcgaaacttttatttccaattacaactgatagacatgtctttaatttattaaaaatattattacactttttttttttatctcattgctacaaaaagataaattgaaaatggagtgatttgtttcaatgtttatatatataaagacgcccatacctacatacaacattacaactcaaagccattcgtattggttaagcttgtactcgtagttatagcaaattttctggttcgttactttaaactcttttcataattttgtcaatgtaaggttgatcttaattattttgctcaaacaatgtttgtcaacactaaagccaacgtaaagttgattgttatcatgttctcgtgctctgcatggatgcacgcttttttagttcaagtaattgttaatgaagatccttgatgcaaaattatgattttttttcacaaagattttaagttaatttaaaagaaaagtgctatagtatttgataatagaaaaaatcaataactaattttgtttaatgcaaaaaataataacaattcacactcntaaatagtttgtaaataagcttga

SEQ ID NO: 50029 - DNA, 358 bp, Arabidopsis thaliana landsberg
actatcaatcatgcataggtttgtgtctatagtctatacaattcacctgcgtatctaattcaatcgcctttacaagtttaacaatccccactaccacctatcagaaactaatgttggatgtggggacgctgtttgattaacgacaaccagcgctatcatcttaaatgcgaccacattttatactggtgtaggttgaacttaggacaggaatattttcacacggagtgcgatattctatcacatgagccgtgttattgtaggacgccttcaagagttacgtgagattgcattgctatatatagatttttcaagaggatttgcaggaaaacgaggggtttttaaatacccatttgctttt

SEQ ID NO: 50030 - DNA, 522 bp, Arabidopsis thaliana landsberg
  unsure (1)..(522): unsure at all n locations
ggcagcgggcagccggtccgcggtcgcggatcttaacggaatccaatgcggttgcgaggtttttttgacgtccgcaaacaaggacgggtcccgggggcacgcgcacgcacgcacccgagtcgcaggattttctactgctctgctgactgctactgccttctctccccttcctttcgttcgcttcccttcccttcccttcctccggtagctcccgctcccgctttcctcctcctcctcctcctgctcgcggggaagtccagcggagtcgccctcgccggagtgcggcccggcccggcccggcggcgccaccatcggcccggaggaggcacgtttgcgcgcccgccgcggagggtcgaggcccggatcgacgtggcgcggagcgggctgtaatccccgcggtggctgctctgcttctggagacgcggggccgcntgtggacctcccgtgcgcgcttcggttctgacaacccgcgcctgctttccttgccctcggcctcgggtcggcggcctctgtcggtgctca

SEQ ID NO: 50031 - DNA, 598 bp, Arabidopsis thaliana landsberg
gatctattaaaatagttgtacacttcatgccgttcaactattctgatttaagtgcaaaaatattcccatttatgttcccgaatataaagatttcaatgggccaacgaatatctaacttggaaaataaatgttcgatctgtctttgcgaaagtccatggtgactctatgaactacttgatcatgcatttattataatttctcaatgctatgaaaaaccacgtgtttgtgtcctaaatatatttttatttttttagaataagcaacagagaatatcccgatcgagagactcttgaaagtactaaatagcgacgtaaaatgacttatacaatacatttttttttaatttaatcgtaaatatataaaccgtacaatttaatctccacaacatataattaaaacacaccaaaaatcttttaaatgactatcatttatacaagtcttaccgtatcgttttgcttgttgtcactcatgtcgatagaacagagattaattaaatagcaaatggcacaaacgaattttatgaatcgtgactcgtgagtttatgttatgttaggagaagaagtttaagacattgggtgactggatagagaatatgttc

SEQ ID NO: 50032 - DNA, 600 bp, Arabidopsis thaliana landsberg
attcttcagctgtagaaggcatcaacttcggctttcctgcagaagtccccgaactgcatccaatattaactcaaagaaattactaataagtatatcgaaaattcttaacagaacagtatataacgatagtttttgtagaatttggtgaaaaaatatgtttacctagtgaggagttctgtgatgggctgagcagagacgatatcagatgattctccatcagcgattcgttgaatgaaaggctttacgtcgtcataattcaccacagggactttgtttttgaagctttgttgattcttgtcggcttctccgtccagaaatgctcggagatattgagttccagagttttgagagagtatttggtgaagaacttgttgttggatagcctctgcatttgttgtcagatcctcgagaagcttgagaccagcctctgtatcatttgggtcgtaacttggtatcattgtctgaaagcagacacaaacaaagctttaagtttgtgttgcaatgatgaggtaccttcaacagaaatagagaaagaagagttttattttatttttgttgtttagagaatcacttcttctctgttcttgaaggttggttttt

SEQ ID NO: 50033 - DNA, 497 bp, Arabidopsis thaliana landsberg
tggacacatgaggaagctggctacggacgagagaagatcaaggtccatatagtgagatgagagccaataagcctacatgctctatatgtgccacgaaaaaagtaagacatgagcgtaaaacgacaagtgcttatgggaccatatgaagcgagggctgaagatatacatatctctagctaagcgagtgcctataaagccaagaaagggccaatatgtgaccaatatgctggagaacatggacattgagggatgagaggtcgcttgctactataacatgtcaagacatcggtgttgtaacaaatgaccacagagacctgttcagagagcagtaaaatcaaatcatatggacatgaggaagggacggacttacacatgttagtatggtagcaagggtgggctggcctgcctctatatcactaagttgaagttagaagagaaggagacacatgatgtatgacaaaggataacatatgctaaagggagtagagatgttgaga

SEQ ID NO: 50034 - DNA, 954 bp, Arabidopsis thaliana landsberg
agatctctccttcatactggttcttgaatctgcctatacccataaccccatttagattttagaccaggaacaaagaaagaaaccaattggaacggtgttagctaaagagagtttatataatattcttaggaaaccctaatggctagagagagagagaaagagagatcagatccataaaccatgagaagcaaaagaatggacaggactagatgaattcatcaaacactttgcttaagaagaaagaacacagattcacagcttttacctttctgtgagttggaggatcttggattacgttattcaatctcagcacccactttattaaatttgtgagaagataaaaaaggtttttctggtagctgtttactccctaatgtgtgagtgagagagaaagagagagagagatggtgactgtgtttgtgttcaagattggaaaaaagagtctgctttttttagctaaacagtgatctatacttatcaatgggccatatgttttgtatcccttttgattatgtctttttcccaaactataatcattaaaaataacacataaacacactttgtgttttgtctgactgagctgccagacgaagagactgctacagttgtgatttaataatttacctaaccttctaattcaattagtctgtcatggaataatgtggaattgtaactttattcagtagcgggtttcctagttttactgttttagtctagttttgaataacttcccatctaaaaacaaaataaaaataaatgacgtgaaatactacttcggataagttaatagatttatatatggctaggtcaaataaaatgatacaaaagttaccccctttcaaaaatgtaacatgataaaattaaaaacataattggaaaatgaaagaaaatcccatacccaagggaccttctaccaattcttatgggaaggaaagcttgggtacttttttttat

SEQ ID NO: 50035 - DNA, 572 bp, Arabidopsis thaliana landsberg
ggctgtgtaaaatactgttttgcatttgagactgcaatgtttatatagtgtagtagtttgaaatagggagtgaaactcagtgagcgtggtgacatagtcttactccgccgcgacagcgacaaccagtgtcggcggtgctttcatccaacgaacatctgacagatacagagaactctacgtgtaacatactacacgacaccgcaccaaaagcattacaatcgcaagggagggctgccatcggaacaagagaaatcgccctcgaatgctacagtaaacccactacttcacgccaacacaacacaacacgtatctggcccgcacagacgagcggactcttcatatctttgctgggacagctatcgggatgatatcgaatatggcgctgctgccgtcgaccaccattcccttgaccacctccacgccagcgcgatcagccgcggacgccgttgccctcttagctccggcaacgtggtgcgaccggcggtgaccagcagggccctccgatcttggacgggctcgcagctgcgcggcgagaagctcgcgtggcgtacgcgtcgcgtaggcgtgcccga

SEQ ID NO: 50036 - DNA, 838 bp, Arabidopsis thaliana landsberg
gaattttcctctgagctatctaaatcgaaggacttggttgatccttctgatacattactagtgtctggggggtttggtgaaagaaaaccatttcctggccaaagattttcatcagaaggctggcttcgcattctacggaaagctggccttcgaactgcagcagaagccgatgtcatacttgaatgtgccaaaagggtggaatttctgggtaacgagcgtaatagatcttccgaagaagatgattttgaaacggatcttgtacattctgagaaggatatttctgttgagttatcaacattagcaggatctgtaattgaagcaatacttttaaactttgctggtttttacagcactgcattctgcaacactcttggtcagattgcttgtgtacctgctgaatcagggttcccaagtcttggtgggagaaaaggtggcaaaagagtccttacacgttacagcgaagctgttcttttacgagactggccccttgcttggagctctgtccgtattctttcaactcagagattcattccacctggattttcgtggacagcattacgcctaaaaagtcctccaattttctcaactgttcttaaacacttacaggtaagatcactcttcttctctctttgattatttgtgcgctcttgtcatggacatgtgaagaaagaggactgatcatataaacccaggtaattggacggaatggtggtgaagacactcttgctcactggcccaatgatccaaatgtgatgaccaaagatgttacatcctgtgaagttttgaagtacctggaaattgtttggaactccctcacacttcaggtatgtataggact

SEQ ID NO: 50037 - DNA, 1054 bp, Arabidopsis thaliana landsberg
gttcatcactccaaattttataacttatatacgcatttgcttgaataattctgccatacaatataattttatgtgatttgataaatatatatctaattaaattaacgtgagcttagcagagagagtattatgtgctaagctaaaaccggtttatactgttcaaaacatcaaatattgagacaagctcatatagtcactatacatgcccacatgcattaaccactcagtcagacgagttatatatggttgtcttttgaaacaaacaaaacaaacttttacaattcatagttgtgcgttattatcggaacacaattatttggaaaacaaaaattatgaactcatgaagctaaatgggactgaactttaggcctacttcatattttacgataaggatgatgacgacgacttcgtggctaaaaaatagcaattaggatatgggtcgtgatcaaaaatcccaccaaactaaaaatatatcaaactaaatcaagtacctactacatgcatgattatctctttaacctaaccttaattaaagttagtttagatattgacaagaaactgtttaaaatgctttgctaagaaagtgggaacacaagatttgagagtatttttgttaaagtcacaacattttaaccttaaattacacttgcaacttgagacgatacttaatcactttttaagttaatttaatcataagcagacaaaaacatgcctttcaactctcaagtagtggtgttagccggaatccaattcgtctagagtaaagaatgaagatacaattataattgtttaacttacctcatctatataacaagattatcatttctcattccagctattaaattaaacccttttttttcacaactggtatatcaattttgtgattaatctagttaccattcatacaactagctttgcctattcataacatttaacatgagtttaagtggatttttacactttaaatttccccccatttttttttttttttaaggagggatccgaataagaagttaaattgccatgtattttggtgataccaccaaaaacaaaa

SEQ ID NO: 50038 - DNA, 595 bp, Arabidopsis thaliana landsberg
  unsure (1)..(595): unsure at all n locations
ctgtttactttttttatagagtttttatcataattttgcatatnnnnnnnnnnnnnnnnnnnnnnnnnnnnnnnnnnnnnnnnnnnnnnnnnnnnnnnnnnnnnnnnnnnnnnnnnnnnnnnnnnnnnnnnnnnnnnnnnnnnnnnnnnnnnnnnnnnnnnnnnnnnnnnnnnnnnnnnnnnnnnnnnnnnnnnnnnnnnnnnnnnnnnnnnnnnnnnnnnnnnnnnnnnnnnnnnnnnnnnnnnnnnnnnnnnnnnnnnnnnnnnnnnnnnnnnnnnnnnnnnnnnnnnnnnnnnnnnnnnnnnnnnnnnnnnnnnnnnnnnnnnnnnnnnnnnnnnnnnnnnnnnnnnnnnnnnnnnnnnnnnnnnnnnnnnnnnnnnnnnnnnnnnnnnnnnnnnnnnnnnnnnnnnnnnnnnnnnnnnnnnnnnnnnnnnnnnnnnnnnnnnnnnnnnnnnnnnnnaagggggggggggtttaaaacaataaccctttccccctttttaaacctttaaaaagagggggtttaaaccggggggagagcccaaaaaaatttaaaaaagggggggggggggtggtaccctgggggtttttccaa

SEQ ID NO: 50039 - DNA, 611 bp, Arabidopsis thaliana landsberg
ggatctaaccgcgcggagtcggtaggtgttctagctagcgcgaggaagagggaggctcaccgcgcgatccgcgtctatgttgcaacggcaggcgacaggatgacgagctcggtcatggggctgcgaaagaacgtggctgacggcgtgccccacactccagtctcacgggagcacacccctgcgtgcgactaacggctccaatgtgcgcgcgattgacccggccccattgcgcgcgacgtgcgggctgttgcgaggaggaaggaggaggcgaacctgactagtgggtttggtgtcgcagtcaaagggcatgcgtgcaagcgctggcgagcgccacagagaggttgcaggtgaggcccacctgccagtgcgcaccggtggcgcaggaatccggcggctagggtttggtacggcaatgggccagcgcagaagaagttctgatgggccaaatgtgtagaccgaggcccatttaggttttcttctctttttatctttttcctttaatttctagaattccaacttgaatccaatttgaaatgtgaatttatattcatttgaaatgtacaaattgaacccaataatatggatggtttactattttttctatatgtata

SEQ ID NO: 50040 - DNA, 770 bp, Arabidopsis thaliana landsberg
  unsure (1)..(770): unsure at all n locations
ctgctgctcttaaaagcacaataccaagacgcagtggataatgattatgaagaagtgttactaccttggcaacttggagaacagactcaccaaggcttttgaatttctgcacacaatgccgaacctcatgtgcttctgataaatgggagttatttgtcaatcctgcaatctgtgaagtgaaatgaaaatgctctggagatctctaatcaataactttgaaaacttaaacaaatagcatgaaaaagtacctgaaaagtcgctccattgtggatgatgtcatgagcagtaggcgcatcaagatatttgtgcaaaggcataagcatcttctacatgtcatatgggttatcgtcctcaatgatcactacctccttcaatttccgtgcatctcgctaagaaaagccaagcatgagtaaaaaaagcttcagcccaagttttttgtgttcttatcatgttctagcttaaaagccaaaaaaagacgaatgggataggtcgacatacccgagcaaacaagtcttctctcatccatggaactaggtatttccatggccatatgtctagtgtgcttattacattactcttgcgtatgcggctagacatccttgacgcagaagttaaattgggatgcaccaaaaacctagctgctacctctacggaaaattcataagtgcttaacacacgcgcaatagccccccgaactattgtcatcaccgaaaatctcataaccttggaagctnttgccatcaaactataatcatcatgggtggctggca

SEQ ID NO: 50041 - DNA, 379 bp, Arabidopsis thaliana landsberg
gacggcgccgtcgtggacgagaggtcctcgccctcgagcacgagcagctgctcgccaggggcgaggtgtggagccgccgccagtccttggcgatcttctgctagcttcacgacggtgcggccgggttggacgcggatcctgccgccctgcatggtggagagatcaatcgtcgtcgatcggaggagaattagcacgacggcgccgtcgtggacgaggtcctcgcggcgggtgtggagccgcgccagtccttggcgatcttctgctagcttcacgacggtgcggccgggttggacgcggatcctgccgccctgcatggtggagagatcaatcgtcgtcgatcggaggagaattagcacgacggcgccgtcgtggacgaggt

SEQ ID NO: 50042 - DNA, 617 bp, Arabidopsis thaliana landsberg
  unsure (1)..(617): unsure at all n locations
actgagacaaaggaaatgctgcttgaagtcatcaccgagttctttagagttggttctaacaagaggttgcaaaagactaattcctttggtaccaacttttgcactatggattatatagacttagagggatctcaccaagaagccctagtaactttcgatctgtaaaaatggtgaggaaacaaacatatatccatgcttcaaaagcgtctacaagagaacctcaatggcaaagagaagttgatgtcaatgtcatttaccatattatgttacctattagtactttattagtcaagctattcaacactagttgttgctagagatgtttagaacaaagataatgatctgatgcgatggtatagtattcaaatctcgaataaagaaaatgtcgtttctcatattgcttttgcaaatgttttcactattcaatatgatattaccatgctcatccattctcattcatggagaatcaattgcaggctcataagaagttgnnnnnnnnnnnnnnnnnnnnnaatgaattcatgttatatcgtatgaaatatttagattaaaggcatgtacaacaccgtgacaattaagagactatgtgatcaaccttgagccctaaattataaatg

SEQ ID NO: 50043 - DNA, 761 bp, Arabidopsis thaliana landsberg
aaacctccttcttagaacccattgagggggcctcggcccgggaaggggagagtggccgagtggtcaaaagcggcagactgtaaatctgttgaagtttttctacgtaggttcgaatcctgcctctcccacttgttgtagttttagcttgtatatgtgaaaaaacgagattttctttcatagaataactctttcacataagaaagtggaggcaggcttggggggatacgatctaaaatgattccacatgaaagaggaccgggcaatcgccctcttttttaatgaagaagcgggctagtccccgaaaatgcccgttaatcaagcaagttggggaaaaaatcttacctattagacggaacacgaagaggtgaactgccggaacaggaggacttaaagctgaggaaacaggaagggcagctaagggaacttgcttcggtaggagtgtgctgaagttggcttcaaacaaagagaaagaaagtagtgtgctgaaggaaagaagaaagagagaaggttaagaagaggatactggcttcgtaagtaaagtatctgaagatgagatagatcggagaggtgagttaccagcgaaactattcactctgatgtccatttcctgccttttctttgtgccgatagaggatttaatatgtagattcctttccttattccctttctggtaaccataacacgtccctgcttttttctgtcgttgactgctagagcaagaggggacgacctttcctaccttatgatagactgaactgcta

SEQ ID NO: 50044 - DNA, 939 bp, Arabidopsis thaliana landsberg
acagcattcctctttggtttctatagaaacttctttggttgacatgtatgctaaatgtggagatataaacaaagcaaagaaggttttcggaggtaagctatacagcgagttgcctctctacaatgccatgatctcggcgtatgcattatatggtaacttaaaagaagcaatcgctctatacagaagcttagaaggtgtaggtcttaaaccagacaacatcacaatcacaaatgtcttatcagcatgtaaccacgcaggggatattaaccaggctatcgagattttcactgatatcgtttcaaagcgtagtatgaaaccatgcttggaacattatggacttatggtagatcttcttgcatcagctggagaaacagaaaaagctttaaggttaatcgaggaaatgccattcaagccagatgcacgaatgatccaatctttggttgcttcttgcaacaaacagcgtaagactgagcttgtggactacttatcaaggaaattgcttgaatccgagcctgaaaactccggtaactatgtgacgatatcgaatgcttatgcggttgaaggaagttgggatgaagttgtgaagatgagagagatgatgaaagctaagggtttgaagaaaaaacctggatgtagttggatacagattacaggagaagaaggagtccatgtgtttgttgccaatgataagacacatactaggatcaatgagatacaaatgatgttagcattgttattatatgatatgggtacaggttccaaatgataattatgtgtatgaaatattataaatttgatcatgtatatttagactctcaagaattgagaagctttgtgattactgttgtttaattataaaacacaacaaccatcgtatcttaagtgacatgggacaacaaaccgttgcgtcagatctttaaacaactagttttactcagt

SEQ ID NO: 50045 - DNA, 860 bp, Arabidopsis thaliana landsberg
acacatccgtattgtaatttattttactatcatctgttaattagcattggttattacatgtcatgaaaagaacagactaaagaacatgatgaaactgtgtaaatgactatcttttcaccattttaatcctgttaaacgatgtgagattgattattgtctgagaaagagaatgcaatctttactattgtagtcaataattttcttaaaaatacatatcaaaagtatcttccatgacataaaatattattgtccaaaagaaaaaaattagtactactctattttaaatttgtaccatatttgacttaagatgacgtggctacaagttgcgggctcatgtgactataagccaggtaggattcctcgtgaatgtggaccctaaagtacatcagtttccgttttttggtcaataacgccatttaaggaaatcttaagcctaacaaaatgaccattttaatatgaaaattgaaaaaattactatcttcactagtaatatttatttttcccaatttatttagaaaactaaatttgacattatatttctacatttagtatactttacattgaaaatacatgatacgattaattttgacattattgtctttttactatctatatttcagttagatagattattaagtttatctaaacatattgatgttggttttttaattttgtaaatcaaaattgtgtgattgatgttttctctaattagattttaagccaatctctaatggttaggctttaaaactttttttttttcgattaaacaggttttataaccttataaacaatctatttttaggctttacttttagttgaagaaaaagtagagcaaattgtgcataacgttgatttttttt

SEQ ID NO: 50046 - DNA, 522 bp, Arabidopsis thaliana landsberg
accctacatttttataaatggtaaataaaccctattattaataaacttaacttaaattcatctattccgttatattaaaacatcaataaatataaacaatttgatttacgattttttctctaaaattctaatttacaatctttttctaaattgaaaatttttagtcatgatgtaaaaacataattaatgaattttattcagttttgttacaacaattcatcaacgtggaataaaaacaattgttacgagtgaaataatttttttttatacataacataatatgaatttatgttaataatgtttatttgtttgatcacacaaatttattaacgtgataccaaaccatattttataatacttggaaaagtacatgaattttcacatcgaaatattttgatcggaaaaataaactaaataattagttattaactagctaatattgtatatatatatatatatatatatatattacaatatattcaaaatttaattaagatatatgtacttaatcattatataact

SEQ ID NO: 50047 - DNA, 797 bp, Arabidopsis thaliana landsberg
tggtaacaagctgggaaaccataatttaacccatcacattgacatattattcaacgcacctgatcatatgtaatggtagctttgtcaaaccgtttacgagcttcctgcgtgagagaaaataaaggtgggatataagtcgaagcaattcagataaaatgctgaacataagaataacatgcaagaatttgaaaagattatcagagtgattttgctataatacttggtatgggaactaaaaataccttaacttcgtggacatcaccattcacaaattgaagcaaccgatcactcagcatgtgttctacctgaaaagtgttgacaagacatcatagtttagctatgcatcacttgaatatcatgatatcaacatacagatacagcgagaacataagtcagataaatttgaaggaaattagttctaggaatacgtaggcaatggttttcagtacctgagaacgaagtacttccttgtatgtcccgatttctcgtagagcaatagtgaattttgtcattacaggacctgagcaaataacttagttccttgagaaatgactccaagaaagataaaaaggaggaacaaagagaaaaaatgactcgagtaaagacctccaaaagcaacacaaacaggatcattatggcctcctccgaaagattcaagtgcatttacaaagccaatatctgcatcatacccttctccaagcccctccctaaataaccgaaatatagaatctggtgagtgagagatgtgatgctgctaaatttattcagtcagcggagggggcttacgtgtattttct

SEQ ID NO: 50048 - DNA, 1026 bp, Arabidopsis thaliana landsberg
ttttttgccattgcagagttgctcattatttccgttccgacacttaatcaagtaaattctgattgttatttgttagtttctgcatccagatggtgatattcataacaatcaagtacattattaacttgttttttttgataaaaaaataattgactagagtagtttgaaaatgactaattatttatggtgtgacattggcttattcgacatagtgtggggactggggagggatctctattatgaggattcgaccatttgtcttgctggtgagtgtttccatacgaaaacgattttcgacaagctaatgtagacctaattcagttcatgtttcattctttttattttggtatgttaaatcgaatcctaaactaacatatcctttcaaagtagttgaatttggctttaactttccagtttgtctgacaagtatatttcactcaagctaagtcaagtgtaatcatatttttggtgagataatatttcttatagttgagacgaaaacctatatatagttgagacgatgattgttttctaattagttgaaagttgaaaccacttcttttcacaaaaataacccaatgcacttatttgaatctttagaatgatatacatcgaatatctatgattggaaataaaagtcagtgtaagaacttgaaaggtgtttttaacaagaaaaaaaaaaagaacttgaaagtgaaaaacattaataataagaggaaaaaaggtgaaaacattaaagtgcccatagaaaagttgaaaaacattattaaataccaaagaaaaaaagtgaaaaaattataaaattataaactcagaattaggttgtgaattcagattaccccaaatgcacacatttctcgttttactggatattgtcggtcctgtggaggagatagatagaagagttcccccgtgaagttaaaagaaattttcgtcctttggggacggtccaaaaaaacctagcccacaacgcttccggacaaaacgtttttttttttttttttttacccaaaaatggatttaaat

SEQ ID NO: 50049 - DNA, 1031 bp, Arabidopsis thaliana landsberg
ctttacatataattgttagtatttataaactattatatataaagttgttagttgaacttttagcgaatgttaggtagcttgatacttagtggcagatcattagtcaaagattaataaagaattaaagactataaaacaaataattatttacattttgattagtacgtaagtcaagatccctctcaatgcttctcacaaaatgactataagaaaaagccaaaggtaccaaagtcattatttagtctcatatgtttgtaaggtgaatctttatttttttttgtataataaggttatgacttatgaatcgaactaaagctattaaaaaaaatattgctcggaacaaaatgtctagtttcttgaattgttgaattataatgggatattttttggagaattaaggatttgttagttttagaagaacttagggatgaatggtttagcctttggaaagtcgacaattgaaccagttcggtggtctggagtatagctccgagtcgagctatcctataaggagaattttaaaaaactatcgctggtcgaggacttttatagttgaggacatgagtccgttgcaacaaacaaatgatatcatcaaacaataacatattaacatggtacgtgaacagatgattctccataagaataaatggaggagtgtctttctaaatatttactgacgctacaaaattacaaaacttgctgaaagctttggaataaagataaataaacatagtttgtttaaagtcatagaaaaattaatatgtgacgactcggccgtatatttgagttagcttagtaagaaaaaatgaaagatattatatatagccatttaaaaaaaagagatgagatgcttacgggagaactttaagttgattgcttgaagaccgaacccatatgttaagctaaaattagatgttttgatgaaacatatatcgggtacttcatgcttcatgcttgagcgtttgaatgcatgaaagctagactcgttcggcctaaagtgcggactagccgatcttggaatttttttaaaa

SEQ ID NO: 50050 - DNA, 1061 bp, Arabidopsis thaliana landsberg
ctgaaaactatgcttgaatctatataaagcaactggctataataagaatgcccttaatcaggcctctgcatgtaccttttttatttaatcgaagatacctttttcgatgccttcccctcattttatgatttaagttatatgttgagctcgttagtctttgttttgagatttccaagtttggttaggttctacctatatctatttgtatgcagagtgaatgatcatatctaaaatggaacattgttgggaagatgtaggtggatttcttttcagtttgttttgccctatggtttttgaaagtccccggatgatttcagtcaaagcaatttggtccatctcttcactttctttattaataagtaatcacaaacatggtacactgatttatttgaattcattcagagtagatatgcagttcaaagaagttttgaactttttatacgaaagcattaagtaataagagcgaacactacacacaacaaaagaagactttcaagcatgttcaccggattgcgggggaaggctgctcggcttcgctcgcccgtagttccgcatccacaaaaccacatacaaaagaacaccagcaacaaagcctatggcagcatttgatcccaaagagactgatgtgcacataagcattacaaatgcatctccctttgtattcatatctctagccgccattgcaagctctacccctgcaaatagtagcaatgccccgagcacaccaaccggaaacttctccaatatacccaccaatgaacctcccaagaccaaccctagcaccagtttagctactcccaacagtgccacacacccaccactcctcccaccaaacttatactgcccggctaaaccaccagctccatgacaagtaggcattgctccaaaccaacatcccaccatattcatcagcccaacagtcatggaaaccgatgcagccgagaactccttctcggggaacagatcatacgacagcttacacacagccacaacagaattaagaacagaaagaggtaactgcgggaccgtccctttcaaaaacccgtttctccatgcttttc

SEQ ID NO: 50051 - DNA, 604 bp, Arabidopsis thaliana landsberg
tatgtgagagtttaatactctttacatgagacaaataaaaggtatggaggctcccacacacgcgcgcccgctcacgtttcacattttttcacgttatttatcgcgtgacttgtgacgatgcgagatcagtttgtgacgtgttctttttgccttttatttatttggtcatcgaataccacacctaatttgccacgtcaatcgaaagtaatagcgtacacattatctgctaataaatctgatttttatgttttatattgtattatcaaattaatcttagacaatgttaattttgtaacaagcattgaaggcgtcgggcacgcacgttgtgaacaggaacaacgtatctttcctttgtccgatccccggccgcacgaccggccacacccaagtgattaacgaacaaagagcgagatggattagaggggctaaaattcccttctcattcaaaattgaataaggagggaattttagccactccaatctcgtacggttttgtggccccaaactagctctatgggtggtactggactaccacaggagaggattttgaaaatttaaattacccctatttaaatgtgaatagaaatagatttaatcatgttta

SEQ ID NO: 50052 - DNA, 1328 bp, Arabidopsis thaliana landsberg
  unsure (1)..(1328): unsure at all n locations
tgaccgaagaagaaccaccaagactccataaagcaaaagtttcatttgctaatcacttacttatttaattcaacaaaatattaatcattttatttgtctttaattaagtaagtgagaccacaacgaaaggtggtaataagaatcaacatgcaaatgggtttcataagtcaatcattttcaaacgcttttttatttcaaccatacattttctgtttctcttttgataggtaaataatatttgttatattttaactttttcacatttttaatgaatccattatgtgaattgatagtttaggcttataaactaaatattacttaactgaagttccctttttttaatctctaatttgcttacaatttgattaaaatatatattaactgtatgtgacaacaaaatttaataaccaatttcacttattaattatgtttttacagagaatacatcacccgaactgtttggtgttcagtaaacaaaagtttttagatttgccaagtttatagatctcattgttggttaaagagtttggtgtagagaaaacaagagtttagatttgtgtaagatctaagatttaccattggctgtacgtgtttgctgctaaagttctgttacatttttgtaactcgttttatttttctttgacattttctacggtggtcttgggaatgcgtgaatgctatacaaaatatcaaataattgatggtacgtaatttaacccttgtgacagcaccccactttacacaaattgagtatggttttgaagccactcacaaccgtatctgtcacaggttatattgtttgccaaaatgatgattttttgactgaattatttcattagatatcgaataatatattgatgtgttgatgttatatatataaccaagtatactgtatagcaattgttacgaataagaagttttacatgaaacatgttaattttcagcatatttagcaacagtgacatggtccattttgtttttgctacgcatgtaaatatcattagaaatgaacaaacaggttttacaagagttgttaacctacacaattgaatccttggcaataaaagttttaaaacaagggagacagcaataatgtctgggagaactcttgggagagatcatggtgatatggtccatgtgcctcgatcggttcatgttgcataatcgggaccgtcaagatactatatcacgccaggtgatattcgaattaatttgcatttacctaaaaatctgtcttggaatgctaaaggacaatgaaagtaaatngtgactagctattttgaccaactttgccctttatacttacataaaacacctaaaaatctgac

SEQ ID NO: 50053 - DNA, 913 bp, Arabidopsis thaliana landsberg
cctgggtcctatgtacgaagtgcatgacaagaatcaccttcccaaaatgcaggcttgctatatctcaatttcagaattactggatttctgcaggaacaagaagaatgagatgaacaactttgtacacggttacatgcaaaagataacatacgtcacatatatcatcaaagatgctaagttacagtttcccgtttttagagaggcaatggttcgccaggatgacttatttgcagacttgaagttagtccgtggtgttggccccgcttatagggcctgtcttgcagaggtggtgagaagaaaagcctctatgaagctttacatgggcatggctgggcaattggcagagaagcttgctatgaagagggaaacagaggtcaggaaacgtgaggagtttcttaaaacccgtggcccctttgtacctcgtgacgtgttggcttcaatgggtttatacgatactcctactcagtgtgatgtcaatgttgctccgtatgatactagtttgctcaatattgaaatctcagatgttgatcgatatgctcctgagtttctagttgggttacattcgaagattgcatccttaaagagttcactgaccatgtctggtgatagctcgctttccgctgagcctgaggagataggtatagacacttttgacaaagacaattttgatgatatcctagcagcctctgaattaatagagatagctggaaccagcaagatggaagttgagaatgcaaaactaaaagctgaccttgcttctgcaatctctcggatctgttcattaggcccacaatttgaatatgaggtactggatgaaagtgaagtagaaaatgtgttgaaaaatgctgcagataaaacagcagaggcattgcaagccaaagatgagtttgagaaacatcttctacttatgctc

SEQ ID NO: 50054 - DNA, 981 bp, Arabidopsis thaliana landsberg
  unsure (1)..(981): unsure at all n locations
gctctcagtagcattatatgtttagaagtataatttgcccaacaaatatattccatttcaagttcattgagaattattctcataacatgcaaaagaagctcaaaactgaccacactagaatccaaaatcgccaaagaattgatagagtcagtctcatcatagcttacacgagaatataaacttgactagataaagaatattcactttttcagctgttaaaagctctctagtgaatatattggacatacgtacttgattgtagtagatagacgtgttctttcacatgtgtacaccatgcaaaatagaaacattgccgttttataaattaaaaaaaaaaccattaaaagaaatcattccaaacccgaccttagcaataactatgttgatatgaaagctaataaataagttagagaaaaaaactaatgtaagtcacgaggatctcactcgccacccaacggaatgaaatcagcggcgcatttatcttaaaagactcgcaatgctcacgagtttcgcgacgccagccattactgagtggcatacccctgtaattaccacgacaataacgagggtaatcttggtataaacatgttttcttgaagtttattttatttttttaagtcactccaatcaattttgcctttgaaaaaaagaaagccatttgtctgcattggggactcatcacttatatatatgcgttactctcccttttttaagtgttttttttcttttgttcctttccaattatttttagcaataatcataatgataattgtaatattttaacacaataatagcgaataaataatatatacatggaagcgcgtgggttcaaaccgtcaaattatgatgacgtgcaaaatctcggggaaatgatgaaactgtaaagatacgacggtgcngagagagagagaagagagagattgagaacggtctatcatataaagcattgctcttatatctctcatcttctctcatatcatt

SEQ ID NO: 50055 - DNA, 798 bp, Arabidopsis thaliana landsberg
gggatgtctaataagaatgaaaatctgaccaaatcagattgaaccttattaaaaaatattttgttttacctaatcagtccaatatcctttaaagcggagttagtctaccgccccaataaacctaatttatttaatcaacttttttttttccttttaattcggttaaatggtttctaatccgtggaatatgtaaaatcacattgccttagttagagaaaagacctagtttttattttttcaatgacatttttctcgagattaagaatcttaaccaaatgaaccaatttcagtagatatccaataacaatcaatattacttgtattgtaacattgattactagtttcaaactatttgcttattgcaatatcaaacatgtgaatatgggtcaaagatcgtgggtttgaaagtgaaaatctgttggtcgtaattaatgtgtgaactcgatgatcttaggataaaagtccaaattatattgacacagagtttacttctgatattattaattatgagagaatataaagacatgagatgttcccgagatagcacgagtgtgaatgttttgtggttgcactttgcaattgcatcagttcggtctttcaaaccgtctcttgtcttctgtttcttcgctgttctctcttcttcaaacatttttatctatctatgcaccacactatattaatacaactaattgatattctgttgaccaaattttcttttttccttttcattttctcttacaaatgtttggtatcatagtacacacttatagtaggatatacgtctttatatatgtatag

SEQ ID NO: 50056 - DNA, 883 bp, Arabidopsis thaliana landsberg
aaaccattattccggattactccttaatcgagactccacttagcattttgaccaaattgtcaagactgtgcaagtgtgacaggtcttctggaatctttacatcaaatacgatgatattagctgcatccagaatgataaaagcctggacaagtgatgcttatgcttgtagtacaccatgtaaagacctatgctatgaattgtaggcattcgcagtgtctccattgcaatctatttaggtactctgaatgtaacaacagcaattacattcttttggaacttgtgtttgggttgtccgaaaaggggatgtagaagaagagcacagattcttttctgtatattttggtcctgtaagaatacagactctcttcttcatcaatgttaatctttgttgtatatgtttatgaggtaccaattcctacatttcttagactggatttgcgttggtagatttgcagatatgttagagatagatcaaggatacaagatgagcataaattccttctgcaatattcaaagtcttaaagggaatcaagagaaacatattattcatttattaccattggcctccttcaaaccaaaagacataaacaaaagaaaccttgacaatgtctcgaaaagggagcctcacaaatcaaagacaatccaaggaggcttttatgttaaatgctatagacatacaagcaacctatcctttggctatgcagcttcttcctcttgtctctaccaaaagtaaagctgctttacgcagttcagactccaacaacaaaatattacatccacagatttaacttacacatttgccagatgactactaggcattaggcaacagtatctgacagagagactcaatatgtgcgatgtgatcagaaaggagtttaggctt

SEQ ID NO: 50057 - DNA, 1225 bp, Arabidopsis thaliana landsberg
  unsure (1)..(1225): unsure at all n locations
ggaatacccagaataaaataagatgttgaatatgtatttaaatacatgaaatacccttaaaatgaaaatagttaaagtattgaataagaaaaaaatatagaattgtcttccatattagttgatgatttttcttatttatttctatctttcaactcttttctattttgttatcagatttcttttattctcagttatctattatttttaaaatttggtatttagtttatgactaacaaatttttttctcgcaaaataatatacaaaatctctaattctttttaaaatataattaatgaagattttaccatattttatttatatataatttccataatctaagattatattttgaaaaacttgtcccgtaaatagtaggggcattatctaattttgtatatagtaggggataattcgggataccacatttgacaattgagttaatttcatttatagttttgttagtatgggaaataattatgtaattttgtatctgacattgtaaaagaaacatgaacggtactatctcgagatatgttttgttcgtatgcaaacagaaaatgtattttcagtaagaatataaaaaaacaataacttggaggttgtagtaaccaatatgaaagtttttattatgaatatagattgtgttgtattattgatgattacaagagctcttttatatacacgtttctacagagtacttatagagaaagatattattctatacgagatattaacgagagtgattggaggagtaatcaaaggaattgatatatatgattctccttaatagtttttacaaaggtaaatcatgcttcatgctaatgtaatttctttgttgatcacattatttctaaccatatactgattctaagaatatagtggtttcatagaaagattagaatagcttaccaatttcaagataggtgttaaaactttgatatcaagttgattcagtaaacattaaccgtcgcaacctagtagctggaactaaattgattatttctcccatgaaaccttgaagttgtatccgaggtttggacagatttggatcatccgaagaacatgttgcatgatggagcataagccatggcatggaccagctgcggaacggatggctgaagctagggttgtaaaatttcaatgatcagaattcagaaattgcagaattttgatggagatcctgagaactctttccttcttatataanngccaaaaaattcttttg

SEQ ID NO: 50058 - DNA, 640 bp, Arabidopsis thaliana landsberg
agaacctagttcgtgcacatactatgtgggacactgtcgatgacacgtaagatacatgttgttcacgcgtctacgaggaacacacaaaaagtaacctactttgcgtacgtgtcgtgatctgagcgatggatgttgtctgttgcattttacggctgcgatcttccaacttaaaacagagagagaagtgatagttgtgtctgtttgatgatgatgtggtgtagtcaaaaagaaaatcttcgctcgtacggaccgtctgatttggattggacggctgatatttgagattgagaactgactctgtgattttctttctagaccataaccctccttcccgtttcttctcttcctgtttttttttttataaaccggccggtttgttttcaccgaatttgaataccggtcttcatatgttcacttcaaacacaactcgagcagggtacacatatttccggtaagttgtaaccaattctgatatcaaatattatcaacttattgtgtctcatttgttaccaagagctaagaaagtatagataattcgcaaactgttgtaaataatttttgttaaattacatattaaccagcaagatatcacgagggtatttgttttctacaaataatgatttttaaaatttatgattag

SEQ ID NO: 50059 - DNA, 926 bp, Arabidopsis thaliana landsberg
aaaagttacaatttagagatttgaggatttatgtacctgttcaaagaaatcgccaagtttaataatttgtgtattctgttaggtaggaatacaacgagcatgtgcataattaaaatataaaataaacctaaacttaacggcggtcattgcctccaatgagtatatgcatgttatgtggtcggagtttttaatgtccaaactgggtttattttttgacatcaacatgcactttttatagtacaattaagtttggtgcaggcgcagcaagcaagccacacccgtacattactgcgtacaaacaagaagcggtcaatttttcgagaaagacgatccatacgttctgtgtaaataaaaaaataatcagatttaacatacattttgtggaaaacaattcttcttatatgaaaacaccgtagaatgtaaagccagaggagatttaccaaggtggcttcgttgagatatttgaagattgttccacttgtgccttctaaaacgttagtgatctattatatacgttacctcgctaacaacatgttcatatataacacacaaaaagttatttatgtttttttatgttagaaaagagaaaaatattttatagcgttgacaaaaaatttaaccaaaagaaattaaagtgtcataccacttggtttttggagtctgattctcacgcgctcttacacgcgtacgtgacaagtaaattcacaacccatttacggggtggaagtgacgacactctctcacggtcaaacacattctcctgtccgaaaagtgaaaactaacacaaaacgtcaccggttttccttgactcagtcctctagcacgaggtccacgagcaacgtttctcgtttgccttattcatcatctctctctatctctctcttcacactgccaaactccaaacaaaaagtaaaatgttcgcagca

SEQ ID NO: 50060 - DNA, 333 bp, Arabidopsis thaliana landsberg
  unsure (1)..(333): unsure at all n locations
ggaatactgagtcttccagtgcataatcaagtccatactccgacatcttgnnnnnnnnnnnnnnnnnnnnnnnnnnnnnnnnnnnnnnnnnnnnnnnnnnnnnnnnnnnnnnnnnnnnnaattcggtgtctaccatgatattcgaccagtccgtcccctgattcgatcgaatggatgtcccgtatggtctctaacacctggtctagtggctgtctgcatcactcagttcagtgactcaacaatcggatctatcgatccgttgctgtacttcatcatatactcgtcaatggagtcgagtagtgattgatgtcaatttccgtctcttgaaattag

SEQ ID NO: 50061 - DNA, 131 bp, Arabidopsis thaliana landsberg
tattcaaggaaccagggaaagaccaacacaactttcttgacttcctaagcttttaaacccattccttttaacgggaaaagcttactaaccttacaactctggaagggaatacttttttcacaacttgactt

SEQ ID NO: 50062 - DNA, 558 bp, Arabidopsis thaliana landsberg
tgtgcgtctctctctctctcactctgtgtgtgagggagagagaggagtagtggttttttttttgttctggctcctattgtgaaggggggcgcggcgggttgatgtgggtgcaaaacgccacaatgaattgctggggcctcgttgcgtctaaaaggattctctatgtctggctacgcagcagccagattcgaaacaattgccttcctcagctggtccaaagagtttcttttttactttgtcaccgtagtccatcaaccagcagagctagctcttccgcatgcgcaagtaattctaattgaaatagacaagtattagaacgtaattcatgcatggatacgtacaagacaatgtagctaattatatgtgagtaatttaatccatgagcttgaactttgctaagccctcccaaccagatcaccccacacccatataacctccactagatccatcaaacaaattgcacacaaacttaacacattataaaaaacggttcagaccgctagataattctctctcccttactcactcaaattcaatagacaatattatttgtaccac

SEQ ID NO: 50063 - DNA, 2290 bp, Arabidopsis thaliana landsberg
tgggaaaacatcgtctataattctattagatatgttcaaataagctctacaaatttctggttcagtttaaatccggttcggtttaatggagatttggttccgatttccgacatttcgatataacttcaaatccggtccggttttattgccagtgtcgtttgtagataagatacattcacaaagacaaaatcactcactcgctcaagagctcctccatggctgctgctacttccttcacttgctcacttccttttactccactatccaaatcccttaaacccattcgttccccaattctacgctcagactatggaactagcagaagctttgttataagatccatgacggttcaagaagatgacaagagaacaagcgatgaatcaatgagtattgacaatttacgaggattcgtcgatcttaatgtcggaaaatggactggctcctttcatgtatagtcacccataaaccctaaagtttgctcctttttgttagatttatgctaaagactctctctttttgattttgtttttgtttttgcagcaatttgatggtaatgggaatttgttacataagattgatacacgtctttcagctagttcttatggagaagatgagctccttagtcttaatcaatcgtatgtttctgagaatctgtgtttctgcttcaatgggaataactgtttttggaacatggattgtgtgtaatttaggattcaattatctttaggaatcagttgatagagaatttggcaataggaagtatataaagtcttgaactttatatgattattctatgaatttggagcaaatttgaagtttatcttgtttactatttggaacaaatggatattatttagcatacctgaagatttttcttgtacactatatgttgattttgtgtgaagcaatggtttttgctctgtacaactagtttactaatctgtattgtgtttgtactatagaaaagtttgtgaattttcaatgatgtgtaagaaattgtgtgtcctcacgaagtttattcatatatctattgatgctcattggtattgttgtttcctatataatgtatccagaagcaatggtttttgctctgcattaccagtctttgtgtttgtattgtttaggttatatataaagcagcctacatcagctacttcagtttccgaagaggaggaagaggaaccggaatgggtagagtacaaaattaaagaaaccaatatgttcactgtggacaagtatcagcaggtgagagtagctctgtttatctcaattagtcaagatactaagtttgagttttgtggtttgtctcttaagtatttgatgactatcttgatatccatcatcagtagtctgcagattggatttttcccaaaggagagagcgttttcgctgaggtaccaaaccgctggaatgttggatacgacgttaaggcagggcgtgctcggggaggatgacactggagaagaatcaccaaggttggtttctcatgtctattggctccttcttatgtataaacattttaatgctccatgaagcttataacaatttgttttcagaaatcttaaacttccatctcggcgtccgtctttagtatgtgagaactgtttgtattctaaggagatagatagaagggctagagcctttcacatcatggatcctaaaggtgttcttgaaatgcttattgttttcctcgaggaaagagggttagagaatctcgctcatccagtcctcgataacgctcaggtagtttgttgttattgattcatgctcataaagcattttactgccataccaatatatgttcccctttgttacagaacgatgcagaaaggataaacccatttctcggtacttggaaaggtcgttcggtaacaaaacgaagcggtgtctatggagcaacactatcagaagccgatactgttgctgttcttgaaatgaatgacaaaggtcaagtagtccaggtatataatactgttcaacaatcccacatagccttttattaacttctgtttatatgagaatgcctctgaactcgatgtgaatcaggatatttcgtcaacatcggatgagaaaaaagtaacaacaaatgtgcactgggaagggaaaatgtcgaaagacttggttacattcgcggaaggataccaaatgactctgttaccaggaggtatgtacatgggatgtccttgcgacgtatcaaagtgtgttgctgatttaaagtctttccacttagaattctgctggcttgaatcgccgagctcaagacaaagactcatccgcacatatgaccatg

SEQ ID NO: 50064 - DNA, 630 bp, Arabidopsis thaliana landsberg
  unsure (1)..(630): unsure at all n locations
ttcgtaccagtctcaggcgccacgcctgactcctcccctccgagcgaggcagtgacctagccgcctcactcccgactcccagcgaccctgcctccccctctctccccactggcgtctctccctcttcttctctctctccagctggctccctctctcctgtgccagctgctgctggaggagcctctggagccgctgcggcgccgatgctggaggagccacaacgccactgttggaggagccgctgctggagccaccactggcctctcccactcgccttaggtgcaggcgtaaggcgagcaggacgccttacgtcgccggcgcgcnnnnnnnnnnnnnnnnnnnnnnnnnnnnnnnggggatgggacacttaacaactatggttgtattactgcctggtttttagattttatatatttttaagctgcgtagtcctgatgactcatgagtaacatgtgcatcactatatagcaaacctagtccgatcttcatcatgtcattttaccttgttatacttagttttgagatgtgtggcaaaactcgaattagtaccgttggccatttttgcataattacatgagcataatgtatggagtttagaatggatagtttatagcaggctaggggaagata

SEQ ID NO: 50065 - DNA, 623 bp, Arabidopsis thaliana landsberg
aatccccatcattcaaaggcagaaggacaagagatacgaatcacgtttccaagtatggcttcatagctgattctttttaaaattttctagttataaactttctgatgcacaagctgtaacaacgttattttttcttttaagtataatttaacattctattttaaaaaaataaaaagtacgaaagtttaaacatacatacaaatagtttcgctttattgtaagatatttgatgtattagatatataaatatttgatttcacgaaatccagaatctagatggtggatgaatttcaatctatagtgtaccatgttatcaaaaaagaaaaacaaaaaaacagtatatgttccacaaatttagtcattttgtaattgccatagttgatattcctacattagtgaacaaatatgattagtcaattgaaaattgaacaaagcaaattaaacgtgaattctaaagcactagacacaaagcttcgtttgagtcgacccatttagtgtaatgactaactataaaattgacacgcgtaattaagtgatcatgcccattggctcccacaattccaccactttaaacagcatccataatctacaagttttttttattgatcatttacatatgcaaa

SEQ ID NO: 50066 - DNA, 898 bp, Arabidopsis thaliana landsberg
gttttatacctgttgaggacaacaagacttcatcgcctccaggatgatcatccatgaatggagtcacatcatacacctaaagaacgcaacaatcacagatcataaccaagtagtagacacaaactctgtttctctagtgtgaattaacatagaatcaactaaatctacgaggggctcgattaaagcttctaacagtaacaatccaactctacaactttaaaatcgaagctttgacacaaatcaatggcggaagagaactaagttcgtcaaaaaacagagatgttctcaaacaaagagacaagatctaaccttgccggaaataataagccaacaatccttagttttgttgtgctttgaaacttcttcaaaacttagaaccttcctgatctgaagacatcttcactcaaactgcaaaacaagaacacatcaaagctacttaatcaaaatttctgataatacagagtactagatacagattcaaatcgaaatcatcagaacgatgatgaatgaacgaatatactaattcccttatcgatttttggaaaaagatgggatctttaccctttcagattcagaattttcgatagctccgaagctcagaaatcagcagaagacggaagaaatagaggttcctcacctacttaattgtgttcaatataaacgaaaatacgaaactaccctcgatattttgcttagggtttggatgagcaggggtagttttggtcaagttgggctttgactttaaacaaatcaaattgggctttgtgcaaatcaaattaaaatttggtttccatttttgacgagattttattttggtccacgtttcgtactttgaaaaatacaaatatgacgtgtaaaaaataaacaaaaaaaaaaacagacacataaagtgtgatct

SEQ ID NO: 50067 - DNA, 423 bp, Arabidopsis thaliana landsberg
tcacatatgtacaaaatatatgtaaacttctcagttctgtctgaatcgctgaaattttcgctaaatgtgcaattaatttcccgatcgcttgaagttaacagttacgacgagaaactgacgtcactttttaattattgtaaagaatgaaaaagagtgttcgtatagggtaattgtattattgtaaaaaactatgtatccagacacaataaatacaccgacaacatttattttcactcactttgatcactgtacggaaataaggaaaaccatttaattggatggaaaattggtccggattggggaccacgtaagcccacccctttaatttccaaaattaccgaaaaatccccaaagggataggtttacaaggtaattaaaattccaaaattaaaccccagaggtattaacgccgcagggaaaaaa

SEQ ID NO: 50068 - DNA, 643 bp, Arabidopsis thaliana landsberg
cccctctagttccctagcttgattttagttcatgcattatacacgatcgtgtgtatgtattatgaatttaaacaagaacattacaagatcttaaaaaaaggacaaaagtatgaataattaaggggactaacctctatctaagtcgacgacccctgatagaaagaaagaaggtattgaccctataacatccttaagagacctacctatttatttatttattatataagtcttcttctctttgtcactctccacacagctaaagcgagtctttgcatgggagctatgatgtcatgggtgacgcgatcaacgttttctttttcccacatacttgatcttataaccgttgtcgctcggggaatcttcaaagtctctaattctatccaccatgtctattaggcccattacccaacctgtaatgagtagtcctcttttcttaatatggccccatagtttctttattcatagtgggccgaatcatatgatctttgtaaattgtagggctatagccggactaaaccgcatttagttacagttgtcttgttaatgtaagaacatatggatgtccatgtgggggaactccaatttgtttggtaacgaagataatcggatttgcccatctaattatcattttcacataaatggg

SEQ ID NO: 50069 - DNA, 707 bp, Arabidopsis thaliana landsberg
gaatatgcaaatgtaattatataattgggcaatataagttatgataagtataactggcgtctttgggttcaaatgttattttgtagctccatttacaagcttcgaattctagctccatttcctctcattctacaatctatacgtaaggagtattattttgtagctccatttacaaacttcgaatactagctccatttcatctcattctacaatctatacgtaaggaatatggaaattaaacatgtcttttataactggaaagtacgtaaggaatacgaactcagtgctttcacaatctccacattggacttatgtctaacagggtgattcaaactatttttgagaatttgtatatatgtatatataaaaagtgaggtattcctgttatttaactttatacaattataagaactaatcatgattgaaattgctgtcaaatgatttgaagcctatatcatgcttttttaggatcaatcacttgaacattaagagttggtaagaaagtatgaaacattaatgaatataaagtatatagcatggtcaacattttcacaagcatttcattttttaataacattcattatgttattaatacttattctcccaacgccgaggaagatttcattttagcaacacttttttctaaaaccaacggaaatcactagtaattagtattatagtatagattatgggatgaattggtgttt

SEQ ID NO: 50070 - DNA, 908 bp, Arabidopsis thaliana landsberg
ggtctggtaaaaatgttgatttccggaacaagttaagaatatctctttcggcgtatggtttctgccactctgccagtctggcagcagttaatgtccctctccgattttctgggcaacgttgagtcgccagagagtgattttattgagatgttctgaatatttagagaataatacaactaaatgtcgaatacggcccaatttcagtcatgttttatatttaaagcccactaacttttccgcaaattacttggacctattactattagtactacgaatgttcccaatattttggctctatagaaaatggtggagtgattttggtaatgcatcttctcaacatacttaacgacacatttgacagcatccgatcctcaacggaaccatcatcgataattctctgtcttattccacgaggcttgatctgtgctactgatggatgagaatccacatgggtcaagggcgtcacaagtagcactacggtccttctcattggccacattcgtacatttttcaaggaaaaacttcacattcaagccaaattccgatctcattttggatggaacccttgcataccacggttcatgtttttgacattctaccttcatattcccattaactagttgaattcttttcatgcattgttataatgaacttatctcggatctaatcaatcatattcgggtctttggttgcttatgctttaaccgaatgtgtcttataatcatagaggttttttctgccaattaaagtggtaatttccgtgaccataacagatttaatgatgaggagaaccccactcgacaacttaataaagcttttcttgtccacaatcacagaaattatttaatgaggatgagaaatagaaaaacagggagattctcgagattttttaaagagagtgacttttg

SEQ ID NO: 50071 - DNA, 739 bp, Arabidopsis thaliana landsberg
tttgtaatatgaggcttgaaatatctgataagtaccctaatagccacattacatttcatgacattggggtaattaataatttgaatataatttttttaatcctaaatagaatatgaggaatattccttcaaaagaggatttaattagaactttgtcacaattggaaacacattcctatatgaaacggaaatgtgtagatggaatcgagacaggacagaacgtttgtccatcctaaagagcatttaccaataaacaaaaatctaccttcatatatattcatgtcgaagtttttcaagtttaaccttacctcattgtcccatgcgcaaaaagtttctgctccttttgttgtcgttttatgatgtaatgaaacttgttgaacctctgcctataaattcttgtcaagtttcacatcaatgttttggcatttcattaactcacgattactgtaacgtctaaaagctaacaaaaatccgtttgtgtatggtataaactctacaaacttgaaagactaaattttaacacaaaaataaaataaaattattgcatttacatatatactttttttttttaacacgagcatttacatatacaattgtataaaaatgccaacaaaaatatcgaaaagctgtttttattgacatctaatgcaatccaagaaatggctgccaaaactacgtcaaatttcatgttttttttcaatatataataaattttgtcaatcggtcatatcacagaaaaa

SEQ ID NO: 50072 - DNA, 1270 bp, Arabidopsis thaliana landsberg
aaataatatacatctgaatgatgatctgtattatggacaaatcaacagtgggtcctattatgtatgcacaaatgaagaattcctttatcgcctcgtaaagtatggcctgtagcagactcccactctatgcactcagggtgataatattctcggtaccatcttttttcctttatgacagacttgttttaggtcgttcgcatcaaatgtaacgcctctcaaaagattgaccccagtgtagatgtagtgatccttactggccatatccatgtccttcgctaatcatctcgatttgattcggctctaatttacagcaaacgtttttgtcttttcagatagaaaataaatcttttcatctgtgattaaataataatgaagtgacaagtggtatttcatgaacgtcaaatcaatatcattggcaacatttgaagcatatgtatatattctgttttgtgaattttcggtttatgacaattttaatttctttgtgaagtttcggtttatgaaaattttgaattcttaaggtttttttataaaatgatattttagtcttgggtgttttagtccatttagttatttttaattaaaaaaaatggtgtgtggcttttgtaacaaacccatctaaaaaatagcccatagaatgaaagctagctctaactgaaccaagcccaatagactaagaactaaaagactaaaacagtacaaactatgacgaacgaattacaaggttgcatttgcataaggctatctttaggttctctaacgaatttttaataattataggttcaagattgtgacagcatgtggagcagagtagctatatataacatatatactataaagtagtacatgtatgataaggagtgtattgatacatgcacaactttatagttactatttagtttgttttcttaaatcaaacgtatatattcataccatcaccagtattagtctattaaagttgtacatatggtccaacgtttcatttaccaccaatctacaataataattacaaagtaaaatgtctagggcgtcattctaatctacttagaggtccgatatatgtcctaatcctacaaactttaaacaagtttaaggattctcattccactctttgttgggtgtcaaaagtttgtggacgacaataattttgagccatcgtctgaagagttagttactactcattgttggtagtataggtatatctttttttttttttttctcgaatgattgaaaccatctttcttttctacatttcccttaaaagaaaaaa

SEQ ID NO: 50073 - DNA, 506 bp, Arabidopsis thaliana landsberg
gctgcggtttgatttttgtttacggattgtgggattgtgacaggttcgagatatagatgggttaaacgagcagctaggggaggattcacggtgcttagagcatctacagcttcagctgctacaagagagaagcaagagaacagagattgaaagagagaacacaatgttgaaagagcaagttgatatgcttgtgaacatgatacaagaagatgaagaagaaggagctgaagaaccctaagctagttctcatcaaatttatgtctcacctataatagctgcgttctgttttttatattcttttgtagatttgtctcgtccacaaaaaagaagaaaagaaagaagcttaaccatctattatttggttaagctactgttgttcccttgtgtgatagaacaaaacataatcaagaacattatatattctaagttatgagttctcctgcaagatttgaacctggcatttgattgaatcgattatcttcactgaagctcttaggaggaaaaag

SEQ ID NO: 50074 - DNA, 652 bp, Arabidopsis thaliana landsberg
gattttacttcaaacgcagactgttattgatactggaatcgatgcgaacacttatgaccttcctagtgacttactttccatccagctggtagaaggaattgattcactagactcagactactttgctcttcgatacctttcctcgcaagcaattcaggaatatattcctagttatgctactaatacaggaactcctgtcttttatgctaggggcgctacagagggcaaattagttgtctacccaattcctgacgctgctctgactggtggcctgcgcctcacttacagtcgctatagcacagacattacctcgatcaatgacgctattgatcttcctgaatattaccaccaactcgttgttgaatattgtcttatgaaggcatacgaaatggacgagaattgggaggccgcggatcgcaaagcacagtatgtacaaagtacggctgactttaataacaaccgtgaaggttggttcggtcatgacaaataccctagcgtcactactgtagcggaggactacgaatgaccagacctattttgggacggcttggtccttttacaggcggaatgaatacttcttccgccccttctgctattggtgacaacgaattagtagattgcgtcaactttgaggtagacattgatgggtctc

SEQ ID NO: 50075 - DNA, 455 bp, Arabidopsis thaliana landsberg
aaaatgtggccctccttctagaaaggcttagtttctataagcttacataactagaaacctcctgtggggcttttgtcaactacagataaaatttcatatgcacttttaggtatgagcattaccaaaagaaatggtgactgttcatttgtttttattcctcccaaatggcagaaaccaaaagtacaagtgacaaaaggaaaggggtttaccatagaattgtatcataacgattgtcgtcaagatttcgggtttgaacaaaattctctttctgaaacgacacaatctgagacaagtctttagtttctgcactatctgcctttgcctcgccattggagagagaaacagatggctccttcgatccatgtactccatcggcaccctcagaactagatttcttttcactaggcttagtagaattctgcattctgacaaactttctaagatgccagtgagca

SEQ ID NO: 50076 - DNA, 810 bp, Arabidopsis thaliana landsberg
cgttccatgatcagcccaaatttgcagaaattatttcgaatgaatccaaaccctagatcctactttccactaattaacttgcgaatttcaaaattgggatggtagtgatacaatcggaagctttttactccgagagttcgtctctccgatgattactcctccgcaatttacctcggagtcttagggctccacggttgcgcaagtccaataaatactagaaaatgagggaaaaaaaaatctaatgcccaatgaaaaattgaatatttaagaattaattttgtttaatgatttttctttgaagcgagtgtgtgtgtgagtgagtgaaccaataagattcgaattatgtttgacttaataatgaatgtcaacacatgcatatcttaaggctgaaattgggcttagtcctgggcctgtttttttttgttttgctatttctcatattttcctacaaaaagttgccgccaaccaatttcatttataaataatctcacaagagacggaagaaaatgggtgacctctagacctctagtctaatcaacttagaacacaggccagtagatctgcaaatccttctcatcaccacatcacattgtcttcttccctagactaatcttctaatactcaaaatctctgtgtattctaagcttaatttgagtatatatatatatatggctttatcttgttctgaactgaaactcacgttttttagattggactttgctccttctagctgtgcttataaaacttgcatcatcatgagaaatcttaagataagttaagaacgggcttataaacttgaaaaaagccgaa

SEQ ID NO: 50077 - DNA, 1163 bp, Arabidopsis thaliana landsberg
aagattgaggaagagtgtggttgccacacgaagagcaccatccttcaccatcatcacccacgtatcaccactcttgtacatacaccaccactcgattcatactctctctaaatattatttttatgataacaactttataacaacataatatactctagatatatacatcatatgtaaatcagtatatcacccaatgaacatgcatacgtactcgcctacgtacatatatactcaccttgccacaatgattaacattgttaaaactaaaataatatgcatggtaaataattagcatgtgccctagcactgtcagcacttcctctaagccggacctgctgcgctagtgcgatataatgcctttcattttatattatcgattgatttaatagccgtgaaatccttaagtgttagtattatcatttgattgaggaaaggtttcatcaactttattttatctttaaaaaccaaaaaataggatcatgacttgtgtatggaacaacctgtagtggaggcttaagatttgacggttcatgctttccatttcaaggcttcctcttttaatgtaattactacgtgttgtctcgttttgtcttccattatcacgaaaagaaaaaagaaaaaaaattcttgaatcaattgaaataaaataaattttcgttgagtttgtaaacaaatcatttttttgttgaggaaaattatttattaaattcttacttctggacagccataaaaatcaatggaagattaaaaattgaactagaatcgcaaattatagactatctctgtccctgacttttttgtcaaactcacacaaaaatatgtaggcctcaaaataatgggccgataaaccaaggctcaaaaatgggccgataaatcaaaactctttccattgagcccatttacccattcttggaagttcgtttagccattgagcccattcaatactaaaagtgattggcgtttggtccgccattccagtaaattaagcagaaactcacatcaattcgagacatttatatatctcgataattcagtattaaaatcttagatcagatttcaaccaaaatgaaattcttagatccagatggttggttcttgggctggtaccttggttattggaattgagcccgtttaaaactgggttgttttgagtgttacaggct

SEQ ID NO: 50078 - DNA, 365 bp, Arabidopsis thaliana landsberg
aaaatatatttatatagtatatttagaaatttttttattatacatccggaaaaaaccatacttattttttaataataaaaataaggtttaagattttttagaattgtttagatggtcaaagccagagtcaactactcaacataccagaattgtatgtctaatagtgttaaccacataacaatggataaatacatatatattgtcatgcaatacatctactataaatatctgaagatactatcaatatattttaagcaaaaaagaatcgtaccattactcgaaccagacataagaaatttcctttttttataaataaaattacacagatgggctctattatcaagagtagtaaacatgacaattgt

SEQ ID NO: 50079 - DNA, 614 bp, Arabidopsis thaliana landsberg
  unsure (1)..(614): unsure at all n locations
tgttgtaagatgccatccataccttttcctccggcatggtgcgttgatgtcgaaagtacgactcgcannnnnnnnnnnnnnnnnnnnnnnnnnnnnnnnnnnnnnnnnnnnnnnnnnnnnnnntctggaacttcggcgggtgatccgtgcggggctgcccatcttggtggccgccgtagtcggtcgcggagcgctattctcctgcatgatcaccttgtcggactgcatcttggacatgttggtggacagggtctggagcatctgcatgacgtcggccatggagggttgagcgccgtcacccatggtgatgaacctggacgtagcggtggacggggaggttggggctggtggtggtggtgcggctgaagggctgggggtggtggttggggatcgcgacttcctgataccaggttgtcaagggcgtcgggccgagggtaggaggacgcggctcgaagtcgtagccgcgtccgtgttgccgacgggttatgccccaggaacggcggtcttcgtcaacgggttatgccccggttgccgagtagagagaggtaggagacggagataaaactttcttgtcctcctcatgggtgcttacagggggggtatataaggccata

SEQ ID NO: 50080 - DNA, 622 bp, Arabidopsis thaliana landsberg
cgttttcgtcttcctcgtctctcatttcgttcttcgtctctatttgtatgaaaatcggccttcaagctagatcttggtatttcacattgagtttcgtggcgtatattcgatttattcctgggtcaattggtctcgagtacattgcaaatagaagccactgtcccggagatcactctaagctcctttgcttccatacttaggttctcgatctagcagtggctttaaacgagtttccatagatctatcgttttggtgactttgatagcggacactagctttttgattcgtttgtttgacttaatttgaatttatgttactgtgttggaattgagctctttagcccaatctatatgttctatcaaacagttttggagtgaatgggagcttaacatgaagctgatcttatcttctctaggtctaggttggtgagtggtgactattcaatgtgtgattcattcactggcttatgtgcttgtttttagttttttggtagtgaatgtgttctgtgttcagcagccttttactagagagtctctccgttgacttttgtactcaaatattgctcgtttgtctgaagttgactgcatttgaccaccattgacggatggaatcttgaggtagc

SEQ ID NO: 50081 - DNA, 796 bp, Arabidopsis thaliana landsberg
ctttttaatgtaaataatttattagtttcatagtcatgtattaatacatgatgtagcgtggatgaataaatgggcaggtcaccttttttacttttctgaaatatacattctcatatcctcaaggtattttaatggaattgcgacaaaagaagaagaagaagaagatggtgtacaatgtacatgttttatgaactatataaagcaattggaatatgcatgttctttttaatgaaacatgtttccggagtttaagatggatttcataaaaatcaacataattttgttaatagtccaaataatataatttttttattttttttttgttaaagcaaatttgtcacatttttttatataaaatttgtgatgtcaaaagagaagacaaatgtaaaattgtgttgtgggttgttacagtatgtagttggtatctttattaaacctaccaaaacgagacaatttgtaacattgagggagcatgtgatagtacattgggtattatactattaagctaacatgagtaatgatgtttttttggtttttttttctcttctatgtattttgattttgtaccaatattattaatacagaatggggacaaaaaggagacgtggagtctcgcgttacgttaccactctctcaaatgcggcaatttggcagccacacacacatggacagcgttagcgtactgtagataaataatccgtactcgtgctaacgtacgcttcaaatagttaagggtgataactttcaccgttgtctcggcaccacttgctcgaatattgacaccattttcttcccc

SEQ ID NO: 50082 - DNA, 632 bp, Arabidopsis thaliana landsberg
tacagttcatgtaaacttttcttttctaattacggaaatatccttgtcatatggtttgtaatgatccacggatccagggaggtatgcaacagtgtgatcatgtctactctatggtgcttttctttttttggcaaaatcttttgcttttgatgcatccactgaggtggagattggattatggtttatccagttagatgcttatcttttcaagcaacaatagattccccacaagtttcaggctctaaagaaacggaaagcaagaaaaacaaacaaaaagaggatcgtctttgagatacttttctgcttgtgtgacctggagtctagagagcaagtaagtgatccaacacagttcttactttagcttttacactttgtcaaaaccattttcaagtttttttatctaaatgtgagagttgttggtcttgactgttaagagtctttgtagttgttgttgcattgaacacgagaaagagaatccatgttcattgcattttcaactttccaaaaatacaaaaatttagcagatttaaacaggaaagcatgattgtgacaccagatttggaaatccacaaaaatgaagaatctttggcagattcgtgataaggccatgtgtcagttgaattagcaaaatt

SEQ ID NO: 50083 - DNA, 1074 bp, Arabidopsis thaliana landsberg
tacttatatttagatttttacgtcgtaaattatatgaagtgaagcatcaatacaccaactaatttgtagattatttagtttggaaacttaacccatttgaccaaaatagaaagaaaacttaccccttatacatgatttacatatagtggatttggttctaaaagtctaaaagatacagacaaattgcaagtggttggtacgtacaaacggaaattagctctttatgaaagttataactctttggtccaatcatatatgttcttctatgagtgttcgtatactcatgctacactccaaaattgtagctacttcttgtctgaaaccagacttgccatttctgtcgtctttaaatcgaaaataagtgtatacttttccatgtatttttgttattcacaatgacattgttgacatattataataagaagagattaatttaagacattccttaatttaataaaaaaaaaagttaagataatagtcaatctcctttgacgaccaaagactggtgagggactctcttaatgtcaacaaaggtagagtagtctctggtcataggctgtttccatggctctccatccatttgcataaacgcatctttccagtctcctcctcttatctccagccttatcgctgccgcctgttcgttaaaacccaagtttttgcacattagctaccacgatttgccaaagacatatatcatccatatttatgtagtgtaattgtaaatgttagatatgtaaatggggtttggagaagttcactaaactaaaatacttgttaattattgatgatataatactagtttggtagatcgaccctattttgtcaaaaaaaaaaacggtttggtttgtttgaattgaagtacctgtgcaatgtgtttggcatatataagctcaaccataacaaaggaagcatgccatccttgctttaacccaaagatctcaagtagtccatcatcggcttgtgcctccacaaaacctctctgttcctacaacacaagcaaccgataataagaaggataattgatcagtttatttgggaaggacaaaaaaatgagctaagctttactttttt

SEQ ID NO: 50084 - DNA, 625 bp, Arabidopsis thaliana landsberg
ggtcggttgacccctacttttggtttcgctatggaattataaataaataaaagagaactaaacatgtattcattccatttcattatgtgagcctgaattgtgtgacatgatcagaataccaccacaaaataaaatacgaaactcatcacaatcctaaagctttgattgatacaataagacgcggctaatttaggaatcaaatcgaatcatccacagattggagattatacgataaatcacagataatgggaacttcaacgctcaaaaatggattggttttgtaaactattacattgctctcgagggatattttatttagggtattttgaatttttatgaatcaaatttatttcctacccggccatgacacataaatcaaagataaatatctaatttttattaaatagatttagttctcaagattcagtaactcatacatataaaggaaacttatcaatgagtacatgaacaatcatgtccacttgcttgatttatacaaacgcaattaggatagtaaggatccttagtttcatctttgcactgatgaggaccccgagcaacaattggactacaatatgttcccggaaagtattcaacaagtacaggtgaacgatatggacctccc

SEQ ID NO: 50085 - DNA, 624 bp, Arabidopsis thaliana landsberg
aatcgcaaatcactcgatctctatcctagattaaatgtaacagattcatataaaaacacactaatacgtgcaccatcaaattatgttttccccctgtatatttgattatttaaacatgtagatgttagcacatttttctatgaaaactatcagagttagataacttgtcataaagctaaagtgacctacgatactaaatggagggagtggtacgactgatctgaaatttaaatatattcccagctaaggtgcgcacctggttctgattcttctgagaggccaagttgatgccctcgtttgtagatctagaggcttggtcaattcctccctgcatattcggattcggacattaccaagaagaattgcacatggacatggtggggcgaaatttcacatctcaatcatcattgcttcgattcccagcttacgatcgttgacctgcctgcctagctgcctcgccaactacaacgtgttccaaaagggttaagagagaggagcaaactgatttcattgctacgtatacggtttttatgtatcgtacatgtagatgttgcttaaataagatgtatatttaacacgattatattttttttaataatgatatgtgtgtatatatgataatac

SEQ ID NO: 50086 - DNA, 570 bp, Arabidopsis thaliana landsberg
tcttatgatcaaaaagaggccctatggtctggatatgttatagagtctcgcttacgcccacatgacaaatggattaagttgggagccttctccttctaaaggtacacaaaatactaacttaacaactattctctagcctgttttttagtatcataggtgtaataccgaagaccatcttcggaggaaacagtcatagaggtgagaatgaaaggtgttagcttcagatgaatgaagcaggacgaagctacgagaaatcttcagaccttggtcaccaaaacagcaataggaaaagacatcgttaccctcaatttgtttagtagtccaactttataggcttaagggcacggttgtaatttcatataagctgtatctcgcgcctataaatagagaaaacaatgtcatgcattaaggacacccttttttgtaatcaagaaagagctagcagctccatcttcgaagttatattcctccttcctataatctggtggaccgaagtatataatcttttgtttaaaaaaacaagctgaaggaagtaatctttgtgaggcaaattactgcttgttttatttt

SEQ ID NO: 50087 - DNA, 800 bp, Arabidopsis thaliana landsberg
ctttaccatctctaaacgccacaagatctctgaaagtctgaatttttttgtggatctccagtagccacggcttaaacgttgcgggatgctcgaactcaatgctggttgaaagacctttcatacttgtgtaccaatccagactcggattattgcatcaacgccatcactttcgttttcctcgccttaatcgatttcccttctttcacaacgtagcgtaagtaagaaccaggcacaacatcccaatttcttctatgaaaagtaagcctacagattttcttccctttaacacatctaaagatctcccaccacatcttcacaccttcatactcctcttctatcttaacatcgtctcgtttcaaatccaaagacatgttctctttaacctgattccctttgagattcttcacttcagagttaacttttgcaccaaggtaggtcttcacagctgcaaaagcgtagttgtatctatacccttcgatttcacggaatctgatgtaagcgtaaggtgagaagaattcgaggatcttgtctgagagcctcttgaaaattggtattcgttggattgcattgaagagaagttgctgaatctgtcgagggaagtatctcttgagagttgaccagacgaagaacagacccgccacgtttgatccaatccttgttaggttttctgcaaacatcggcttcacgatcgatctcattaagatttcaataactggtttctctgtttttaatggatatgaaagattccgccccacagaaaaaggaatttgaaaggggttttggatctttctctcgaattg

SEQ ID NO: 50088 - DNA, 873 bp, Arabidopsis thaliana landsberg
ggcaaagagccgtttcaccttaccatatattataagttcgtaaatgttgaaatgttccttttgataattctaatggtcgtatcatctagaaactaattattttacactatatcgatcatattttcttgattaatgtgaataatacctaagcgagtttgtgccttccttttttgaaatggtcctaccatgcatatgtcttaaacttcttactttttaactcatatggggaagaaaatgtagtttcatccggtaccaaatccgtgaccatctcttatgtgagctccacgtctctcgcccactacttgtttataggtgacatctgtgtccgaaagccgatttttatcttcgagaagatactatgctaataatcatccgtcgtttatatgctttatcttaatttaaacgatactgcaaatcaacttataagaaatcattcatctttaaaattttaatccatttaagcaagcgtgctacatgcatcgttacaaaacttctatttgtcgttcgtaagtgtaaatatataattggtgaaaactcaggcaatatgggagtgaaaccagacttttatgactttgacatgttttcatgtcgtcttcaagaagagtctcctaattgcatcatgacgattgacgacaagaaagagtgttcggttctagctagcatcataaatgagagttataatttttggtgttgacaaacacgaccgggacatagatcaggagatatagtttgtcttcaaagaaaacaaaatctagaaataatgatagtctttgtagataggattcgagtttataagaaaaaattagatctgcgttgaaattatatagtgttttcatttgatcgaatctcatgtttttttgtctttcgttttca

SEQ ID NO: 50089 - DNA, 592 bp, Arabidopsis thaliana landsberg
ttgtgttcgcggcaaggtgaggaagttgctaggctaactcaattgcttgctgggctaaccgagagggagagagaagagggggatggactcaccggagagggggaagatggcggcgcttcgcggcttgggctcgggcgaggggaggagggtggtggtcgaggctggtgcgaggaagaaggggctcggggcgagctttttataggcgcgcgggggcgaggggagcggtggagctccctgactccggcgagcttcccggtgccgccattaatggcgcacagcggcctgaggggacgctacggcggggcagtactggcgaggacgctggtcaaggggaggaggacggagcggtgccaaacttccctgtgcggcgaggagacggcgatgaagagacggcggtgaaggacggcggtgaagggacggcggggcgtcgtatgcggggaggatgacgaagcggctgaccggtggggccggtctgccagtgagagaggtcccgcccggagagaggggcggggcgctgacgggcggggtcgggctgtcagcgggcaggagtggcgcgcggtttgggcgcatgggccggaaagagaggggaggg

SEQ ID NO: 50090 - DNA, 436 bp, Arabidopsis thaliana landsberg
gtaaccctcacaatctctaaatatcgtaatcctcttaaacctcaccgacaattcaacaaatcctgcctgaggtttgatcatcttcctcggaacaccaaaaatcagctccgttgcttatctgcgaaatcgacgccatcgaaaccagaccctgcatcccctcaaggtctctctttctcttatccataaatcggggttaataaagtttgtatcttttgtaacaaataattgattgggttgagttcagatggggaagagctggagagtgtgggagtcaaagcagctttagcaatgctgagattctacaagagtaattcatcatctgattctgattttagggtttgtacgagtgtttttccggtggttaactagcgttttccggtgaaaaacaggagagatatcgccggtgttacctagaagctgccgttacgttccgact

SEQ ID NO: 50091 - DNA, 588 bp, Arabidopsis thaliana landsberg
aagttttgtgaggatcaagtctgaccctaatgattatcttcagaagtacccttatcagcttgttcaggtgacaggtaatttcctgaaagtcttttatctgtgattgtcagtgttcgtgatttctatggacaatataatcacatctcttaaattttgtctctttgcttaaaaatctctggtctgttgtagaaagttgagctctctctgtgcttttgttttctctgttatataggcgtgaagaaggaacatgggactgatgattttcttcttcaggttacaaattatgtgaaagatgtttctatatctgtgctatctgatgataatttctcccaggtaatatacttagaagttagaaataatgttcatacctcaattttttgcttatgatcgatgcaaagtcaggtacccatgtagtttaagaaccggcaattgggattctgttctagttatataacacatactatctttcactattactatgtttgacaaacgcccccattttaacctatataatctgtcgtttatcatagattgatgtaaactttttcaggaggaatgtgaacatttacatcagagaataaagacgga

SEQ ID NO: 50092 - DNA, 842 bp, Arabidopsis thaliana landsberg
atctttttgacctccaagtaaccgatcactggaagcaaaacaacattaaatttgaatgagaatacaaccaagtaaggccctcctcctaatcaatcatcagacataaccaaacaacaaacaagcttacggtgttcacaaagatgccaataaaatctctttggcattttcaaacaaaatactaacactttaagttataaatgagagcagtgaaccaaaacgcaatttaagacgaattcgttttgaaggtttgaaaattcgccaaactgataaaagaacaaaatttgaagaatttaaaaccttcaggatctagggtttgaaagaatggatcgatctctttaggcaaagaagagaactcttttaagattttgactctgatcacagcaaccctcttcctccaatccgccggaattctcttccgatccaccaaccattcttcaaattcaacaaaattgaaatcaaattaagacaataatcaccaacgcagattcgaatccaacgaagaaaacgaaaaaaaaaaacccaaagagatataaaaatttaaaattccgtgtactcgtaattgatagttctgcattacctccgagacgagagaaggtgatatcgattggaagattttgaacatcatcttgtgacggcattttcttccggttaacctttcacgctttctgggaaattttatctccgaagtctcacacagtttaacgttttggagtctcaagagtttgctacagaagaacgcataatttcattggtctcatcaaatatctcgaatccggttattgaactaaccgaaccaattactccggtccgcggcagattaaaattgtttattggttttatat

SEQ ID NO: 50093 - DNA, 604 bp, Arabidopsis thaliana landsberg
aggtcactctagagagtacctttgtatatgtattgtattatttgtatattttctaaagcaagattttttgtcaagtttattcattatttctgacaaatatgtgatgctgacaagcaattgaaaaaaaaaaatcttgcttcagaaaattttgaatgcttttagattcactatatttctgctggtgaaaaattccattaaagtttcactcattttttgttataaaggtaatgtttttctttttttagtatatagattgattatttcaaatacaaactaagtgatgttgatatatgttatatagtatatctatgtaattatttgttagttataattgtgaattttagatataagaaataagctaaatggtgttttttaattaacttgaatagtatgaactcatatttagtgaaaatgggaatagctctcaaaataagcataacatgctgcttttttaaatagaacatatttgctaaagaaagatgcatgcaggaactacataaaaacgagatcatgtaaacagaaatgcttcattagtggaaagacagaaaattaactacagcataagaatattacattataagttaaaaagttgtaatatcatatt

SEQ ID NO: 50094 - DNA, 715 bp, Arabidopsis thaliana landsberg
agatcaaatcacaaatcatacacatctcagttgagatgaaaaacaaaacaaatcacatatgaaaccggagaaaaatttacatatttatcatgtatgtatatagtgttcatcttaatcgaagaattcccatttgaatcgcggagggaccggtttaaccgtttcagccgccttggccgtcgatgcggaatcaaacatttcccattttgaagctacaaccgccggagtacctgatgaggatgatgcattggaattcctaggctcctcctcctcttcctccacaaacgataacaaatcgcgttgctcaaatcgcgtttgcgtttgcggtttgtggcggacggacttgttgacttcaacttttttggcagagtttttgactttcaagaggtcgagtgcctcaacgtacttctgaactctttgcacctaccaaaatcaaatcatgaaataaacaaacttaaccaatcaaaattagagatttgaaatgtaatttagctaatctaattttatacctgcatcttcctcatcaatttgacatcaccatcagcaataatagcatcaagtctcaataactgattcatcaacatctctatcagattcacaagactcttctcttcaacattaccctcttttatttaatccccgctttaaacgccggacccctgataatatttttcataaaccttttaaaattcaaaagatattcccgactttttgagaa

SEQ ID NO: 50095 - DNA, 142 bp, Arabidopsis thaliana landsberg
ggaaaaaaccgcggctgcgatcgtattcaaccaaacctacgcacacatagttttcaaagcccaaaaaggacttcatggccggttgaagcaaaccgactactgaacccgggcgcagataatctccaccacatacacagaaacg

SEQ ID NO: 50096 - DNA, 240 bp, Arabidopsis thaliana landsberg
tgctattaaacttgcaaacaatcctatgcaatactctagaactaaacatatcgatattagacatcatttcttgagagaccatgaagccaaaggagatatcgaattagtccgcgtgagcaccggcgatcacttagccgatatattcggttaacatcccggatgcgagacggtgtcggttgctagcagacgttaactgagtcccttggagtctggaaacgcgtcgtgaggagttatccttgc

SEQ ID NO: 50097 - DNA, 1118 bp, Arabidopsis thaliana landsberg
gcataccccctgttaggcttataaagttatggaccctaaatgggcccaaatgtatttagaattcagtttctatcctctccgtttaaagcccaaattgtgatcaatgacctgtaccaacactgacataataagtaaatggtataatcaataatgtgatcaaagcaatgggaccaaccttatttgtaatagtatgaaataacacggaaagaaaagggtggactcaggagcatacaatacaacatccacatgtttcaacgcggcccctttcatatcatccatacaattctcccctgacattttcaaattccacactaaaaatcaattggtgttgtggtcagtaatttgtcatgttcgtacgtaaactttattttaaataattatttatagcgttaccaactttttgatattattataaacgaagaaaaccacggcccctttgtaaagaaatgagtgaccaagtatgtcaaatcatttccataacattatttacagaacacacatggaatggagaacatgagaagaaacaataccggcaaataccactggctcttatgaggaaagataaataaaatcgagccaatgttatattgaaaaaaatgtcggcatcggcatgtgagttatttttatcatactcaaaaacattcagatagtagaacgagagaaaagtcacataataaagacaactcttctaaataatactaatatcaagtttgcagtatatccaaaaacaaaacaaacttttttcttcttacatgaaaatgaggaggtagactcatgtaacataactcttaccaatagaggaagaagaaaaagttagcgagagtcggatacttgtgagaaattacaacaaatgccggaggatttatgcacatcttggagcatctgataagaggaaaaaattatgttcgctctcacatttctaaatccaaatccaacacttccatctccattgatccttgccaagtctactcctgaatcagcgttgagcagaacaagcagagctttttgatcttctaactcttatccttggagaccgaaccttagattttatggctttaagctcaagtcagctacagtttccgaaaatgtggaaggaggagatttggaatctggaagtt

SEQ ID NO: 50098 - DNA, 575 bp, Arabidopsis thaliana landsberg
  unsure (1)..(575): unsure at all n locations
tgaaaatggttattgaactgaaatcatcggttttgtgaattaaacataatcatattgtggagaagttggtcagctcatgctaaaatatgtagctagaattatcatggatacccaagggatgttggannnnnnnnnnnnnnnnnnnnnnnnnnnnnnnnnnnnnnnnnnnnattataccacaaagtaaatggcacagttgcgaacactttaccttccttttcagtgaggtgagaggatttaaacagcttcgcaagtgggcctgaagataaatccttcaaacccctcaagagaccttcccctggaccgccatcaggacccaggataccaaatcgatgcagtaaagactcagtgtaagaaattccacccccaagacgaacaccagataccttagctgatacattcaagctatggcactccatatcctggatatcatatggcattacatgagtgatgtttatatcaaggaactgaggttctttaacctggtgtttgctcctatgataacccaaaagaaagctctcatcttggggtgccatttctatcactaaaatgctgtgttcacagtcactgcagtg

SEQ ID NO: 50099 - DNA, 348 bp, Arabidopsis thaliana landsberg
gcgagcaccgagccgtcggcgaccagtcgcagaatcagacgcgcgagattgggacgcgcgacgatcacgtcgatccaggtgccgactgcgcgctcgatgcgctcggcaattccgacgctcgccggcgccagaacggcttcaagccgcgtcgccagttcgctgaaggcatcgaccagcatcgcgtcgaacagcacctgcttgtcgcggtagtaatagaacaggccggcgcgcgtcagtccgaccacgctggcgatttcatcgagccgggtcgcggcaaaaccttggcgggcaaacaaagcctgcgcatcagcaaggatggacgtccgcgtgcagggggatgtggttcct

SEQ ID NO: 50100 - DNA, 595 bp, Arabidopsis thaliana landsberg
  unsure (1)..(595): unsure at all n locations
tatgtttttcgggcaataaaagaacccaaagttaaaagatctgtttcagaacagagatgtgtattgtagctgttaagtctatcggcgattgaccgtgaacgaagcatgctctacacactaatctgtaatagaatatgaaaaaaattaaaaggcataaaattgaaagcataagataaaaccaagggcgaaaatgttggaatccaccagttagcccaacggagaactgggcccttgacctcgtgtcctgatcgggggtgtctacaccaagacgaggttggtgggcccttgatgcacaacctataaatagagaggtggaagttgacggctcgacaagaggttcacagtcaccgtatcgtctacagttccccacctcacaccctagactgatctagagggaggctgtcagcaacgggaagtacatcgtcgtcgacgtcgagctcgcttccccgaccgttgcttccctagcgtagatctttaccgacgaacgtgatgacattgatttgtatctagtgttaggtttcttggggatacaannnnnnnnnnnnnnnnnnacaccagtccacacgatgtgtgtgcggcgctacttgtgttatat

SEQ ID NO: 50101 - DNA, 1442 bp, Arabidopsis thaliana landsberg
gaggtgatatgtgacctcgccaacatgaatagtaacatcgctgtcaagatctgtaacggcgtacctgcaaggtagaaatcaatggccagattaaacattgaaactaagaacataatcagctcaacgagaactcttacatattaattagacattactcttttcttaaacatttcagatgttatgtttacattcaaaaccatataagcacatgcatgtttatcaagtttaacgcacaagctaagaaaaggccaattcttgcctaaaattcacttacaaaacacgacaaaggaaacaaagattcttagcctagtttagaatatccagaggtcaaaacttggaagagatgtcttagatatttagagaaacaaagcattagcaacagaagttaagagagattcttcactttctaaattagaagaaaactgagcatcatcatcattcccttttgctttccactctttgctcttacaaatcaggaccacaaaacaacaacacataaacaaagacagatcatctaatggatggaccactcctgaaactcatataccccatttcttgtaacttttctagtatttcccgcaaaaaaaatatgatgagagaaaccaatcacaataatggtgatgatgatgacaaacttatcctggttttctatctctaagatcaaaaccagagtattttaactggcaagtaacagtgtttaagcaaatattgaccaagtttagctatctctgttcatatagagcaaatgaaaattttgcagggaagtcactgaaatctgtttttaatagcttgtgttaaaaaagataggaaccaagagaagatgggacatatgtttctagaaatcatacaagaactaaacagaggcaatacatgtggagataaatgaatagaaaagagaagagagaacagaacaaaaacacagagaacagaaatagtagaagattcatttgacccatcaaattaaaaaataagataaaaacaaaataaaattatgcttacttgacgaatttgccatcagattcaaatgtatcgggcttagaccctagcttcatgaacttcatatttcttcgtcttgtttaccaaaaggaagacacttttgtttgaccctgaagcagctttaagaagcttctactctctctctttttagaagaaccgatcaaatcacagaagaaccagagaagtgagaagaggagaaaaaggcagaaaatgtttgttagttaataaaagaagaggttggtgttggaagagggagagaccattaatggaaaagggatgaatgaaaggagacaagagaaaccaaacccatgttttgcctcactatccttttgcaagaaaccaaacactcctcggactacgggatctttttacctctcatctcaactaaccattactaacagcatttattggtctttcaactccacacagaagagaagaagaagaac

SEQ ID NO: 50102 - DNA, 1621 bp, Arabidopsis thaliana landsberg
  unsure (1)..(1621): unsure at all n locations
tatccctttcatcatgtagcgtactcccatgttagacgttggattctcggctctaaatgtgacctcaaaattactaggatttacggtcaatctctcgaccgcgaaaacaggaagagtggggttgaaagcgaaatggaggatgagaatgattgcaccgagtaagaatccgaaaatgaccaagataatgaagaaccacaaaagacgtttagaacaccctttctttttgtttttctccgggttcttgctgcgtttctcgacgtattttgcatgttccggaggaggggtccaatagacttgatctctcgggacttggacaacgtacgtctctaactcagggattgaatccggaggaggaagaggcggagaagatgtcgttgggagtggagacagattaagagaatgattacgccaatggtgtgaaccgtgcgatggaggatctaaagatggcaatgcggggaggctagaggttggacggtgccaaacggacggaggatcatcgggtttgtcatcgtcagagtcaggggcggtggcggaaggaggacgccgtggcccctccatcggagaaaggtgggagttacgagatgtgtggtggagattggtctacagagaagacgaaagagagagaattaagagaggatgcgaaaattagggtttgcatgggaaaagtaagtggttgttgttgcatgactcaaacttttggttggttttgagaagattttgctatttagagttagccagctcaccttaaatttccctttttctgttatttagaaaactatattacagaactcatataatatagtattatggcatttgatgatgatcaacgaagttgttactttttgtttacaagatatcgattttctaacataaattatatatgcatataagacatacatgagtaaaatcttaaaaaggttagcacatattggtaatgtttatcatgaacgagtcttattttattttgtacgtttcgaactaaaaccatttttgggtggtatttctggaccaaattttcattaaagtgttttttatttcaattctcttgcaacttctgtttctttagaaagcgaaaaatgcatatatacgaatatacgttgggattgacatgaacggaatgtatgtatttacacacattaatccgcagcaaccggccattcaaaattatgtttgtgggccttgttgctgcttcgctgacaatactatccaaaatttatttcatttttctttctttgaaaaacacacaatcacttaattttcatttataaatcaaacatatgtacatgaaaatatcaaggaaattaaaggaaatcttaccttcatatggtcgaaagttttctttcaaaaagcaaaaacaaaaattaatgtttctctaattcttcccggccccaatccacgtgaaacatgttatgttgcgagcattacactggaaactgttacattacattctaattggcgaaaaatgaagtgcatttgtattgtatctcacgaagatttgcgtttgtgacaaaaaaaaatatgcaaatttttttcgaaatctgacaacccatgccgacctgtccgccgagttaacgacgtgcttataggatccttaagnatttttattcttatttcttactca

SEQ ID NO: 50103 - DNA, 460 bp, Arabidopsis thaliana landsberg
tcccaagtaaatagactatgcgccctgttacaaacgacacacaatgaggagcctattcttagtctcttctcatagaattatcgatctcgaaaacttcgcagaagaaagagcaagaagtcacaagaactacaagagaacgagagaaaatcaggatctctcatgattctttttcaaccagcaacaaagatttctgactatcaattgtttgataaatggcagaacaacgacacgaagacaaagcaaaagtgaattatatcctcatgcgcatcgtgaacgtaactcatcgacgaagaggtccagctacaaagttacaagccattatgtaaaactactgatcggttgcggccgatgattcaacgatatggatgctagacgagcgtcgagatagatcccaaaggcgatagttctgtgataccacgcgcaagcacagtcaatagcaatcatcctgcgagtagtggtg

SEQ ID NO: 50104 - DNA, 559 bp, Arabidopsis thaliana landsberg
tgccgatccgggagggcagcgggatccgtcgctggtgacggcgggactgccgactgtcgcgatccgggtgccggcccatccggcgatgcaggccatgttgcgcgccaccgggcggccgctggcggaccctccgccaatgccagcggatctatcagcccgacccgcgccgaccatgtgctgcgcaccatggatggacggatcccgatggtgatcgatgccgggccgaccgcgcgcggtagtcgaatcgacgatcatcgcctgtgtcgatggacaggtgcggcaactgcgtcccggaccgatcccgcgcgaggccatcgccgacctgctgggcgtcgtggtcgggggcgccggggcggggatctgaggcgccgggacagcttgccagccattatgcgccgtcgaagccggtgcggctgaacgcgaccgaacggcggcccggcgaatggctgatcggtttcggcgcggtcgagggggacgataccttgtcggacagcggcgatccggtggaggcggctgccggctgttcgatgcgctgatgtcgcgatacgcagcagtgcgc

SEQ ID NO: 50105 - DNA, 452 bp, Arabidopsis thaliana landsberg
taggtaaaccctaccaatacatttaggatatcaataactgtcatcaactcacatctcacatataaccataacgattaccaaatcgccacacttgactgagcaaagagatgcgcacatgaagtctgtcaatgggaccgctgcgaacataaatgactctcctgagtttagtgatacgctctcaggcaacagaccatgtggctcgggcatgacccaccgccgctagtccgaatgcaggacgcatctagctagactaatcatagtcctctcacatatggtggtacccatgaccgaccaactaacatattcctgcactcaaagttgagaatcaggtcgtacacagagtggcgtagtcgtggcatgtaatggttcgcctaacatccgattgagagttctgctgcagtcctagcggaaccaatatcggctgcattagctagatccgagagtgtaaacag

SEQ ID NO: 50106 - DNA, 690 bp, Arabidopsis thaliana landsberg
cgtcagtatatatatctctctctccctctcgaaatgaatacatataattataattaacaaaatgatgttagttaggtggttatccccgcggtgatcaacacaaaagatcgattattactatacaactcgtgaaaattaacactacaagaacacttcataaattttaagttaactgtaggtatgtgatgaaatgatttttttcaggcattattcattttatagtttccttctttatgtttttatcgtatcattttctaagaacgtgattatagattctttttatttattttttcgttttgtacaaacagtcgacgaccgactatatttataagtaaatatgctttgatacagatatataaattatctatattagtcatatggtgattatatgttttaggacattggattgatgataaggttagacgtcaaagataaggaatgaatttatatttctttttgccaagagagacaaacagtttattaaaattttaggttttgacttgactcataattgatattatccaacaacttgatgcaacaatctgtgccatttcttaagttcctatttgacatcaatgtatataataatcagctttaacaagtcaaatgtaccttataaattaatttagtacataaatattttaaacagttattatctattgacaatttgggatttgtttttcgtttgat

SEQ ID NO: 50107 - DNA, 706 bp, Arabidopsis thaliana landsberg
gcctgtctctcttggcctcccgagacttcatatcctgtgtttttgtgatttctcgtcttctagatcacgttttggcatattgaatttattatataagaataagattcgactgttgtatttttaataagtatggctttgttatattacacgtaagaattgaaaacattacttgatcaaagaaataaaagattttatgtgtggtgactgataatgttgttgaggaagatcagagtcattaatgcagactcagtgaccactggacaatcttgtataaagaaagacattacagagttatattcaaaaacgtggaaaagtatgcattaccttcttgagatggaaatcttaacaaaaacaagcttttaaaattgagtgcatgtccaagtcatttttagatttggtgtttagtgcttcaatatttcacaatatcctaaaaactcataaaaagatttcagagatagaccaagaaaagttatttgagtctctaagaagggattgaccattattcttaattatactatttgatgtttcaactcacttccaatatgaaagtcttaaacataatcatattatagatattaacctgtgaataaaatgccaatcatccaactctcaaaaatataaatgggccgagaatgggctcacacagtaagggagagtaacgagagaggcttgaaggagaataaatgttacttcaccaaccggacct

SEQ ID NO: 50108 - DNA, 934 bp, Arabidopsis thaliana landsberg
agagtcattactccctaatgcatatggttccttaacaacccatttgcttgtgactcccacgtaggtcactaaactccctttgatcgactttctgaatgctccattatagtgtcattaaagtttagttccattgagtaaagccatgtaccctccaagaagattcgaagtcacacagtcacacatgccttccagatgatccaaccagtatttgttacgtttttcgttggattctcaaaacagtacaagacaacattcaattcccgacgtctataaatgtcgttaatccattgttaaataatttaacaacgaagtaaccacaatcaattaagcatcgttagttgtttaactaaactagtttttcgtacttaagagtcgttcgtagttaaagacgtttaacccgtcgttaaattaatgatgcacgtatataagttttaccaacgtttatgtcaatgttaatttaccacattttggcgtcgcaaaatgacaattaaataaatcattgcaaattcataaagttttgcttaatgatatctactatttagcgacatatatgtttttttatagctaccacttatttttgttttcaaggacaacccctaacaacactctgtatgactgtatgtgattctgtaagatctcatatcaaacttttttttttacatgtgatgaagtctattatcaaaatggaacaattatttacaattggttgggggcaaggagcttttatggccaaataaatgtaatcaccttagagaattagtacaaagaaatttgagtttactaagtgtgggaaaaccattaagagagcagatgtctacagaccttttcgatatcatctagctagagaggaatgtctctgatgcttatgccaatctgccgaaagaccgctgtagaagttactgagacattgttgtgcaacctaatgtttctttct

SEQ ID NO: 50109 - DNA, 931 bp, Arabidopsis thaliana landsberg
gtttttctaaaaactaagcgtagtctagaaattcaactactttattttatcagcatgattaatattattaattagtttggaacattttataacacgtccagcgtagaacaaaatcaacatatatgattgtatttgaaagaataaataaaaaaaaaacctaattacgatcgatctcgcattttgatttgtgtgaatttggatcgctgattaattagttatagccttataggtatgatgcaagatgtgtagagttccacctacccttcttctatacttagaaaagtccactattttttaaaaagtcaaccacgtgtttttgatattttgtgcttctatttattttgaaaagtatgtctatttattacgttttgaatttgttagatcttgaagatgatgagaggataatatatatttgttcaacaaaacagtagaagtgacaaagtatataatatatataccatatattgagtatgttgggacaaaaaaactagtaattcatattatagtaagttacggattacgtgggaactaaaattgataagaaagatggtttatggtaacacatcatgaaatagtatgatattttgtcgaaaagtggaatctacagagcccgcttaagtttttaatttttattttgttttttgttttaaaacttttgattatgaaaatatatgaacgattatctataatatgtattaaacatgttacagtatacacatatggattcatcagctggatatatacgtgaatccaagtttctgacaacttaagatgctctaagaccagctattatcaaacaagttattatatatttcgtttaaacaatttgtttacattgatcggaagttataagaaattaaatcctcataaaatacatattttctatatatggacgtaatacacatatattaatctgagtttctaccatata

SEQ ID NO: 50110 - DNA, 1099 bp, Arabidopsis thaliana landsberg
taaacccatgggtgagattgtgagactcttagtgaattgagagaattttagagagagaacaaaattgtgttagagaaacatattaaccaaaaagacatttgaaccataaatacaagtgactggtttccatatgtgatagtctccagtatatgcatctaaatcaattatgaaccaaattcatcattaaaatgggcaaaaatgtgtttggtcgcgggaagacccgtctgtcatccctattctaaactttcaatacaattcgttaacaaaaacttaattctaactaattcagagtaagatagttgaaaactatacaacaaaaaatataagaaaatgatgaatttctacaattaacaaactaaaacataaactatcaaatagaaatagatgtatcatgtcatagaatgagataaatggttcactatttgattattgattttttttttgtaacacgactatttgattattgattatgtcaaaaacattaaaataataattttataaaataatacgatatataatgttttattagttttatctatccccctactataacaaaaacttatagaaatatataaacatatagaagaagaaaaaaagacagaacatatagaaacaagaaataaaattatactttcaaaaactacgaagcaaggaaaatcgaattttgaggtaacttgaaggcaacgaatagtatgaatgtggaaacgtcaacaacttaaccttacgtttacatattatattatttgaccatctctaaccatatttggattatgaaaatccaaaagggcgctcgcaaataccatagtgacccctgtggccacacctttctcagatgtctattatgctttatgaagaatgccaagggggtttctcggtaacaccaaattaatcgatagtcgccttcacttgcaaaccaagaaagatacgaaactacaccgagaaagtacaatcttatttaaataaccaaaacaaacaacttagttttgtctgacccactaggccactacttctattcgacaactttaaagttgaccatacatatacaattcctgactcaactgagaacgaccatgtacaatcacaccacgctggtcgaact

SEQ ID NO: 50111 - DNA, 1023 bp, Arabidopsis thaliana landsberg
taagcttccccagaaacacacacatgtaaatagaaaaacgaggagacaaagttagatttgtagcttaaaaccatgcaaagggtttaaaggcctcaacgtacagacaaagagttaagagatctaaaacctcttcttaagataaacaaataagcatatgcatcaaaaaccctaattctcccttttgctcgtttcgatgactagctagattttcgctccatttttaatgtaaattacataaaaaaatatatagataaaatcagtaagcggggtcaatctgagaatgctctaactacgagagagaagacataagtttggtcttttctctttcgataggtttctctagtttgggtcggtggattcctcagagacagaagagggggccactcaacatcatatctgaccttcactgctcttttcttcttcacacccatacatttgcatgttctctccttctcttctaccatcaacgactcattctctctctatctatatctgcatttattacacaatctctcttcctttagcatttataacaatcacgatacctttaaaccgccatatctttctctatctctctatatatatctacaaccgtctcggttataatctaagtcatctctttgatcgatactactcgtatggatatgttgaggagtgcttgtttctacttcctattaatagtgtttgtcatcctttcttggtctcttttatgcgattctcgccatcttggacacatggagaagaagcttagtgtaaatcttgatcttttaaataaggtaagcccttcgcttgtgatgttaagagtcatggttaatatggtgttagttttttcataacacgggcaattattttttgatcattgatattaagatgcgtatggtatatagtcttttaatttgtttatatatatgtgtgtgattttcactttttaaatgtcttttacatagatatgtagaagaattgaatgcatatttttccttttcaaaatcaaatatacctctaatttaaatttgtaggggggct

SEQ ID NO: 50112 - DNA, 1720 bp, Arabidopsis thaliana landsberg
catatggtaatattgtagcagggcaatgcctcatttaccggtattaccgcaaaccaaattatggtttggactttggatcgactactattgttggtcatatataattgtatcaatagtttaaagtaatattggtcattaatactgatcatgcatgcttctagatcagtagatcatggttacttttatgcttaaaaacagttttgatgaaaacctatatcactattttgctatttacactaccgcacctggttaagttgaatatgcatttttaaattatgtgtatgtaaacgtgtgctagttcaaagttcaaacaatgttggtatatatatgtcaggtgtcacttcttattgaacaatacgtactcgtttataccagtttgatagtcagagcaaagattatgtatgattaattcgtgttataagcttctacctttgtgattattgattttttgaagtaggcttgtaacattaattagagtaaaattcatataaggttctactacttgtaatatatatatatatatttgtacatatatattatatagtagcatcagagttgctatgacttgacctggcgatgttctggtatcgtagagatgcctcccaagtatagatagagaccacctcacatgttcatgccaatagttaatgaaaatgaccaatccatgaacatgcaaaaacacatgaggtttttctaaacatattataattgaccaaataaagagaaaaaaaaaaaacaatacatatgatcggaatcattttgggagtttgaaggaactaaacataatatgcatgtcgaagtcaacttattgcaaataattttgaaatgattctgaattggaaattcatgaagcttaattattttatctaaataagtttaatataggtttgagtgagatatcgagattaaatgataagagtctttcttcgaggagacattagaattctacacaaaaatcgaaattaatctagtccttgacaatcagttttcaattaatcaaaaacctataaaattcaactcaaaaccaatcgtatgaaacttcattataccatataatctggttacttagcttaaatctctacccggcgatgtttcatgcttgagagactaggtacataggacactaggagtactgcatatatggttacctcatgagttctcattgtaaaatcatccaataaaaaatggtttcctgcttaggtatacggtataccatcttgtatcgttaaaatttattactcagttcgttgctaacagtcaaatatgtctttccagggtaaaaaaatgtggaaatttgttccactgtaaaaacctaataatttttgacattaataattaaaagggattataatgtaatatatacaaagataggggagacagagacgaaggcccacacatctttaacaaaagaacaacaagcccgtgaccccaaaataaaactagctttcagatttattatttttcatctgacataattgcaaccgttagatttcatttctcatgtcccattctgactcagatccaaccgtccatattcctctagtgtcttcaatagttgggccccttttctttttcctctcgccgtacactctcctttcagcgccaacgccaccgtccgagccactatttttgccggcgccacccgcgatttcctcgtcagaattcccttcttcgtcgcctttcccgtagaccacggaaaggatgcttatggcgtattttt

SEQ ID NO: 50113 - DNA, 926 bp, Arabidopsis thaliana landsberg
ttgattaaagattttgtaatttgtaaacatattatatggaaattattcaatagattactaattttaataaaggattattttagaaaagcaaatatatatttctatgactaaagaaattatacaattgataactagcattgtaaaaatattttttgtaaggtaattattcaaattagtcaaagaaaaaatataaatttaaagaatatatcatttctcatagtgtttgctataaaaattaaaagtcttagaaacaaacaaatttacacgtcatttaattaattatatgaaatatattaatttattatgtaagtcttatctaaaattataaagttttttgctatgttttgcatatttttacttgatttgttttgtcaatatagtatctttgtttttgttattgttttaaaaataattgtataatagttgtagtcaaaaataatttagtaatattttcatttattttgatatttttgataatatatgatatacttattattaccactgggtattacataatttaaatttaagtatttgaaaattagaaaatatgcttttaaacaaaacttatgcgactttactcgaccgaagactgcctagtacatttttttacactggtgaaatctcacaaatgagaaataccctaaaataccactaaactaagttttttttctttctaaaactatcattattaattttttctttcaaaagtatagctccaatatttttagtccaaattcaccacaaacactaaaactgactattaaggattgataacttaaaattttgggttcagggttgatgattgttatagggcttatgatttagtttggaaggttcaaagtttaattttagtttggggtatttctaaaaacaaatttttattattggtatttttgagaaaaaaaactagtgatggacttttgaac

SEQ ID NO: 50114 - DNA, 844 bp, Arabidopsis thaliana landsberg
gggacggtctcgtattgggtagtgcgcctatggccctatacatgttacaaggtattgcgtgtggcctaccccaaagcagaagaatcatcatcagtgggtttcataaatttaatttacgtaattggtttgagagattttgttaatgatacacagtaaacgagaagattcacattgtgctttctttgtttaatatgttttttcacgcagagtatcaaattcttatttaatggagaaataccttatagtagcacacattttgcaaatttttaaaattaatattaattagtaaatgtatacaataactagtttacacttattcattatttataaaaaattaatagtaactacaattttcttaaatcaaaataaaaatttcgaaatatctaatcaccatttcgatgagaattctttatgatttttgattgaaaagttttcggttattctgatctccaaaattatgttcataattccgacctcagagctcttatttgctaattatgctatttgtgataattgtcctaaaaagagattacaatttttaaaataagttaaaatattaaaacaaccatttgtttttaacttttaaagggaaagaatacaatttatttcaaaataaattgggccttaatctgagtagctcggtccaataagagaaggccttgattagagcaggtctggtctaatcagaaaaaggtaaactcggtaacgaaatcagaattcgtcggagaagaagaagaagaaagatgacgttgaagaaggtggacgcgaatccatcaaccttggaatcgattttacaagaactgaaatcagacgaaacaagccgtagcaagatcaatttcatact

SEQ ID NO: 50115 - DNA, 358 bp, Arabidopsis thaliana landsberg
cgaaatgttgcggagagcagccacagagacgcaggactacagctgtcaggagctgaaggatgtattccaaaatagacaactaagaacacagacggcacaaaggcagacgaacactagaaaacagatccgagacccgaaaaagctgagcctcaggaatctaaaagcaagatcagaaaccaaagagaccggatacacgaccatagacaattcaacatacggactcagagattgatcaggcacgaatttctatggctcagcacctctaagtggtcaacaaacaaatcgtaaggcgattatggaaacagataccagtttatagtgtatgctgtaactacctagatttggcatattcaagaga

SEQ ID NO: 50116 - DNA, 1114 bp, Arabidopsis thaliana landsberg
tgattatatgtctagtacacgcacctccttgttgttgtatataatcgattccatagagtcaggctgatgatactcgcatgtcaaatgtagttccaagcctggagtatacttagcatttatttgactaatttcattcctatcagagtagcccatatatacctggaacagaaatcctttttaataatctctaaattccgaacataagaaacataaatttcaaaaggaacggacttgcctttcaatgtatccataatgctactgcctaaataggaaaataaggaagacatcatggtcgcagaaggaagaagaaggttgtcttagggtttttttctagcgaagaagaagaaggtaaaattgtgaacacttttacttaggcctgggataaaaaaccgaaccgaaccgaatcatcatcatcatcttctgcttcttttccgtcttcggttcttcaaatatttttagagaaacaagccgtgaagatgatttacggaagaaaggaagcaagcgtggtcgttaatagtagaggagaatgtggccaccggaaagagcttgggccaaagcaaaacgagactgagaacgaaattcacggcggcccaagatgttctcccaagacagatgtagattatatttaaaattgggccagctctcttttcttttgggctaattcacttttcgttgggccaattattatttttaattacaattgctttttgggccactttttgagcctatatatttcagaaaaaactaaaaaccgaaataccctcatccgaacggaaccgtccgaataagccgaacatttaaagtcattaaaactcttttgaaatcagaaaccattaacaccccctaaatcgattctgctacatggctattgtggataaccaataacaccccctaaatcgattcttctacatagctattgttgataaaccaataacaccccctaaatcgattatcctacatggctattgttgataatttgggcccggagaacacggcccaaatagaatgttcaaaaaggcccattgaacccaatgtctgtcgaaatttaaccgaccatttatttattggaaggcacccatctttacccaggttttaaaaaaatttgttaaaaaaa

SEQ ID NO: 50117 - DNA, 890 bp, Arabidopsis thaliana landsberg
ttcaacagaaacaaagtttcactgtttccatctatccaatgttggtttcttgaaatttagaattggtttggtgacttggtcatgtagtatatggcctactactcttaaaagtactgggcatgtgttgggcctcgtcaaactgctgtctttctctgcattttaaattaaatacccattaacaaatcggtatatatgttctttagttctccactgtctgaactagtaattcaccataagctaaaagttttttatttattttttgttgataaagaaccgtcgtgaaaaacgaaaagtttggatttcatgttactgttggtaccgaatctgccacgttttgatgattatagttgtagaaaatgtcaaccaagcaatattattgtaaagacaatggatggaaatctaagaatttcgattggatttttatcttatcgagaattttcaacaaaaccttttggattgatcaattgaaagagacataagtggttatgtataaacttgttcacgacactccaatgtgatatgatttttttgtttgtttgtcaaattcattggttacttgtcttataggaatttttcttattttacaaaaacaaaagaaataaaagaaaagaaaattggtgcttgtttttccaaattagtatgctcattttatcactattgtatgcactattttgttatttgactttgtaaatgcatgaattaaagagtgtttaaaaatcggtatcttatactatattatttaatagcgcacggaggagaaaccaaaatatacacaaagttagagaaaaggagttatatatggattgtattttacttattctgaccactcttgttgccattttcatcggcaagattgctctcctagtcactaaacctaacaaaaaccttca

SEQ ID NO: 50118 - DNA, 595 bp, Arabidopsis thaliana landsberg
atacacagataatggaagataataggactaaaggtttttcttttgcacaacaaaaaagtaacactatcaaaccatttttgatgccttcaacgaaagagaaaaaataccattaacattataaagaatctggacacaagacaagccaaatacattttttttttggtaagtgagacaagccaaatacattttgtgtataacttatggatttttttttgtttaggttttttttttttttgtttttaattcctattaggctattacaccatatatagtttcatgcattttgtttccacgtgatagataatattttttattttgtaattttgttttcccctctcttcgtttggttctatctaagaagttgtatgtaattaatttatcatttgtggaccactaagaaaatgttattttctttttggctgtgtcgtgtttctatatttacattaatttgcacatgtttattaattcaatcgacagcaaagaaggtctttttgtgtaatttttttatttatttatgtacttttcatgtgtaacttctcactacaaaaacctttaagcaaatatatttaacaaattatactaaattggtgtgagt

SEQ ID NO: 50119 - DNA, 1130 bp, Arabidopsis thaliana landsberg
cataactaacatgatgtaggtgcaagcagacaattaataatgaaatcatttcagaagaaagatctaaccttttaagttctctgccaaacaaatgatcagaaacactcaaaacggtgagaactgaagttgcttaaacaccaaatacaaaacgccatcgtttcactccttttgattaacgcgaaacctgttgattaccatcgccatgagagccaattcccatcgaatcggagaagatacacgaataaggaatccgatcgaaacaaaagacgacaattctgaatttcaaactctttttgttaattccggtgatgaattgagcggtgtttctcatgactgtagagtagtacagttcttcttaattgcatctccaatagggttattgggcttttttgttattgggccattaagaactggcccaataaaatagaagaaatgctctatatagatataaattgaatttcacagatcgacgacaactttttgtttttattcaattgaaacccaaaaagcaaaaagttctcacttatataaccaacttttgttcctcaacaatcaaatgaaatataaaagttgtctttaaacgaaacgaataactagtaggatggtgaattgctattttgaatctaattaagccagagttcaattctcaacccaacgctgcaacgcatcttctctttagccattgcaaaattcacatactttgcaaactttagagattagtttaagattttgtatgactttccagttttttttttcttctttgttaacatgaaaatgttttagcattaacaattgatttgagtaagcaaaatatttatcttttaaaaagcagagtaactttaatcatgagatcaccataagcatggtgtgatcatcttcaatcgcctgttcagtttgattataaactaagagtctaagcttgctcagattttgtgattggtatcatcttattttaagtacctaaaagattaagacaaacaggaaacattttttttttttttcttggtcttttttaactaaatcagtcgttttagcggtatcatttcacttcgattatgatatttttgataaaatgagttcttattagaatgcaaaaaaatatgtgcctaaccacctattccactaggggt

SEQ ID NO: 50120 - DNA, 561 bp, Arabidopsis thaliana landsberg
ctgaactcaggcatctaagcacagcagctctaagacagctttctacaccagctgaggcatacctgaggtcaagcaattttgtgacgatgtgggctatggaacttcattgctccaatgggagagttgcagcaaagatacaaactaagagatgtaacattggatgcctatctccaaagtacggagaacttcaaattttatatggccgactttgtgtcagccacaattacttgagttccttttgttacggatgtagcattgtttattaagtttaaacgccgaatccaagatgatccacctgctgttgtgaatcgttttttaactgatcagtgattttgaatctggattgtgtatatgtgtagagcttatcatggcaccagattgttgaataatttctgttatttctattggttctgttttccagtgaccggaagtccactctaattcagacatcggtgacgcgctaacttgtgtgttggccttctcagttcagtcagacaattccctgtgtcagcagggaaaacgctaacttttgtagagcgcattagatgtaaagtacaccga

SEQ ID NO: 50121 - DNA, 455 bp, Arabidopsis thaliana landsberg
ctctcagatcactgagtagcagcaacccatcggcagcgatcaacgtcgctggtggaaccatcgttctaaatggttttacggcaaatagcagtgtaggtggtatcccaacttcaggtagtttgagttatacctatactttgaacaatgcccagacacatagcgctgttggaaatgatggtttacttctgagtggcattccactgattgtcacagatgcaggaagggtaaccacaacaggtagtctggttgtacaagtgattgatgatgttccgactgctgtggcagatactggtagccttagtgaaggtggtgtgctgagcgtacttgctgctgacggtgtattaacaaatgatactgctggcgcagatgggtgggtgaatactggtgcagtggttggtgtggtatcacctgatactgaaacgaacagcgctggtggcgttggaagcatgatacat

SEQ ID NO: 50122 - DNA, 279 bp, Arabidopsis thaliana landsberg
ttttcatagccttttgatcatacttacttctagtgctccacttgtccaaaggggattgaattagggtttgggcaattctccccattatatgtggatgacaaggcaaaggaatgactctaggaagggattgcaagtaccttaggatagttagatcaaaattttggagtgacgttttcccaacttcagtcgacatgtggatgattgggttacattgtggtagtcttcacgtgaaaaacatcgatttaacaccttagggtgttatcaggcctgggccgacct

SEQ ID NO: 50123 - DNA, 971 bp, Arabidopsis thaliana landsberg
tgcacctgtgcttcttatattagatctgatcatcaaattgtatcacatcaaacaaaacacaaaaaggatgaaagctaaatctactcactgctcgagaccgtagtcttgaaatggctgatacgctgcgaaaaaacaccattctttcaaacctcacaacactgatcggttacgaatccaaacaatcaagattggcttaaccagataagagataaagggaaagagaaagcgtggagaagaactaacgggaaattcgaaagtttcttcaacgtagagagaaaaattgagagatgttgagatatatctgcaacgtgatgaacaagcgtcaaattacaacataagtaaaccaaacacacggattcttcttaccaaaccggtataatgaaccaattgattaccatttagaaaaccaaacgaacaggttatgttcgggttcggttgagattggttagttccgtcggtccgtgacacgcaagattcgaagcagccgtaacgattctaatgcctaaaaaaacggtcattaataaataaagaacaaatggtatgtagcttttgctgttgctaaataaaaaagtagcttcttggtaaagtccaagggtttagataaaacataattttattttgttggaaataaataaaggaaaaatgacatttcacaattgaaaaaaaaagttataaacttcgttattataatttcttggtcgaatgggcggattgatattcttcattctccattagttatcagaaatttttatattcttttgaaatactatctaatgatgtaacacatctattaacaatgatggatatagctatagctagttaatattaaaacattggatatcatattatgtgacactattgatcgttatgtcatccaacaaataaactgatatttcaatgaatgagattggagaatatcacatatatccattacagctcattataatgatattaccatatcattttaatgt

SEQ ID NO: 50124 - DNA, 568 bp, Arabidopsis thaliana landsberg
accccggaggtcctgcaaattcaccaaaaacaaagcattatcaacattccatccaagcattcacacgcaggtgtgcaccttgaaggattcacactttcaaaacaaaacacaagaaccctaaatttcaccagtaatatgccaagtatctttgcttagatcgaaaaagtctgtgttcttaaaatcaaacagaacaaaattgagaagaatctcttataaattccaataatacgaaacacaactcaagttcaagctcactgatacaacctctcagatctaaaatgacgcacccaaaagtttcgattttcaccataaatacagtaaattgaacacataaaacaatgaaaattctggatccaacgatactaaaacgaagcgtgtgcgaatttagtcgtatccgagaaataaaaaaagaggaccgatttagtgagattaccaatgaagatgaggcgtttgtcgggcttctgagaacacttgaggcggcggaggagctccgacatgagatccaccgtctgaacatcttccaaatccgccgcagcaccaccggtcgccatagctgatctagtttagc

SEQ ID NO: 50125 - DNA, 329 bp, Arabidopsis thaliana landsberg
ttttttcttttttttttttgttttttttttttttttttttattttttttttttttttttctttttttttttttttttttttttttttttgtttttttttatttttttttttttttttttttttttttttttttttttttttttttttttttttttttttttttttttttttcttttttttttttttttttttatttttgtttttttttttttttctttttttatttttttgttcttattatttttttttttttcttttatttttttttttttctttttcttatttttttttttttttttcttctttttattttttacttgttttttttt

SEQ ID NO: 50126 - DNA, 688 bp, Arabidopsis thaliana landsberg
cattatgatcatatctgtttgatgatcagtaaaccaaagtggtaatgatgatgaaatccgttggttggttgcgtcatcatcaagagagacaaagctatacttgatctctcttggtgagtgtaagaaaaagccagagcatgggtaaggggtggttggacttgatgacacggtttgagaaaacagggtttgtaatgagcgaaagccagcgtttggatacgcgtttgaatcttaaaagagttttgattggaagaaaagagaggatttgaatcaagacatcatcgatatctgccacaattgtagccgatgaagaagagaaaccaccatttctacggcttctggccgatcttggagcttttgttcttgttcttgaacaagaggacatcgctagggagtggtttaaaaagaaacttgtttagggtttattggagtgaggaagaagagagactctggtgttggattatatagagaggtaaggatgtgatgagttatgtttttttggtcaagaagattgtggaggaagctttgcttatcaattattctttgagtttcgttgacattgacctgttctcacttctgaattttgagtcgtgtctaatacaaatcttagcttataaactctgtattcttctgaaacttaaagttttttaaatattgatatctcgaaactgctatagacctggagaggatc

SEQ ID NO: 50127 - DNA, 609 bp, Arabidopsis thaliana landsberg
tggatgtccatgttactcccctagtaacctcatcaaccatgcatttatcgccatgaatctttattaccaagccaatggaagaaactattggaactgcaatttcaagaactccggactcattaccataactaatccgagtgagtttgctctttctctttaattatgctatcgaaaaacaattctctatctatatatagagagaagtggttttaaaggtaatttcatttttacctttaagtatctggttaattatattaaaggtaatttcattttttctatatgtgtaggctatggaaactgctactatgaataaacatgagcaagaaagaaaaaaaaacccatgtttcttacaagcaaacagaagagaagaggaatgtgttttcttgttgttgcaatgtttatgagttataatttaaatttccagagttcgcagattttgattaatcatatgtttattgaaatgtttgacttctggaacgtttatgttgctacaatcaaatttgataacataaaagcaaaaaaaaggtatccaacacttattcaacacttaacaaaatttgatcacaattattcgatctcattttcagtaatgactaaaccttattacgt

SEQ ID NO: 50128 - DNA, 599 bp, Arabidopsis thaliana landsberg
gtagttaacaagtcctggttttaccaaaccagtagcagcttgttttgtttttgtcccagatcgattgattggaatatgaagaaagcaaggcttgtcctcaacaatatcgtctacagggtacttggtgcccgatacgaattcttgcacagatcctacgctgctagggactataggtggactcatgtggcctggcttgagttcaaatgatatgcattctgttttcttcattttgttcatcacatcattaatagccttttgtaccctttcatcaatagtctcttcaagggtccttttcgacttctcgtgtttcctatatgacgccgcatactctggaaacacctctctccaggaaatcttagaagagatccccgagcccgtccagtgtgttcaagattgcctagtgctgcagttagtatgccattctccctccgaggcttaaattcgttcttctttctcttatctgcatattcttgaatttttgtcgaaacttcgcctaccaattctagatgcaaaagtttgccgtcctcactcaaacctgcctgacctaagatccaacgaatagctcgctcatcgatatcttttaatattggggtcaaagt

SEQ ID NO: 50129 - DNA, 888 bp, Arabidopsis thaliana landsberg
gagaagctaatctcaaacagaaaattccacattcttttgtacacctaatttggcaataataacatctatctctatcaacaagttagagatttaaacatctacgaaaaaattactaaacgttgttgaagaagaacacagggaaggaattgatttccacgacgaactaacaacactttcacgagctagagagctaagttcaaaccaataaaaccctcaaaacaaaataaaaattcctttgattaagagaagtaccagattgtgatcgaaaccctaaataggacgatgaattcaggacgatcaaattgaagaaaacaataaggcagagactcaccggcgggaagaatcgacggcgacggagagattcgatgagctaagagacgacaaggtggttcggcgaagaaagattctcgattctctagcctcctcgctcgctctctctctctctctctgctcacaagcattattccattttctcttatccccactttttcaattattttaattaaaaaaaacaatattcattctatctacaattctgtatttgtttaaaaaacatagtgtagaattcaatatgtccaacttcgcaaaagctggaattgttttttcttttcactccaatttatgcatttatcaaaacagacactcattgttgattttaaaaagattcaattgtactttttattcaacacaattataaagtttgaaaagtaagcacgagatttttattgtgaaactaaattaactctttatatcttgaatcgagatgttgacataattacctggcaaaatatcgaaaattctaaaatatatttttacataaccctgactatcttagtgtaacaatcaaatcatttaaaattggcaaatttaacaaaaagttttcgcaaa

SEQ ID NO: 50130 - DNA, 531 bp, Arabidopsis thaliana landsberg
  unsure (1)..(531): unsure at all n locations
catccttaggaggtgcacaactacaaggctatctagattgcacgactgtaatgcctgacaagatcatctctgttaagcaggatgacaagatgatcaatgatgtcaaccaaaatacatccaatgggtcatgctccagcagcaggtccttggcttcctcttgacatccattactcaagaagtcatgagtaaagttgccttctacaaaacaccccatgaggtgtggtcagaagtgcagaagatctacgcgttgtagtcaagagcctggaccgtgaacacacgaatttccctaataacgataaggtaatatgacaatggctaaatatattgccaagatgaaatatcttacagatgagatggcatttgcaaagaagactgctggtgatgaagaactcgtcttgtacattctgatgggacttgatgatgggtacaaccggtggtctttacaatggtgaccatgttgagcaggtcactatagttatagcacctcncagcttctcaactatgatgccaggatggatctacttcatggga

SEQ ID NO: 50131 - DNA, 630 bp, Arabidopsis thaliana landsberg
ccttctccctttgtagcttctgaccactcacgtacctccacgtgtcatcatctgaacactaaaccttgatcgtataaatcaccatgctccgagatcacaaacagcctgtcgcggatcacgacgctcacacccgtccacccttctttcatcccaccgctcatctctcgccacgtgccttcatcggagtcgtacacttctcccatcggtggaaacatgaacggccatgcccatccttctgttacacacatctctttcccgatcacggctgagtcatacttcgccaacaccatcggcaacttcttcacaaccgtccacgtgtcattatctggatcatacgattcaacttccgtagttgcttctccgtttccgcccacactcccaccaacggccatgattttaccgttaacattcccggagacgaagtacgttctcgggctcatcatcggagatatacacgaccaacgattcgttagagcagtgtaaacgacggcggagcggtttacatctccgccgccgagtacaaaaagcttcccctgacgtggaatcgacgcccatgagagtgcgtgaggagaccagattttggtgaaagagtttggcatgggaggtaaaacaaaccaacggccagatgca

SEQ ID NO: 50132 - DNA, 1009 bp, Arabidopsis thaliana landsberg
gtttatttcgtttattctttaatgttttttttggtttgggttaagttccggttttgtcatagattggaacagccaacacaaacctttcaaggagaatcaatgtgctacaacaaattctttttttatgaaattttatatatttatgagtagattatttgtttgtttttaaatgaacaactgataaaccctacacacagctggttgaatatgggagtatatacagtgggaaagtttgaaaggatcaaatatttttaactttctaaaataggttaaatgaatgtggttttctaaagctatttatgatgagtattcttatgaataataatattatacatatcgtgagtatataatttgaagaagatgatgaatcgatgatgagtgatgatgatagtgctaaatgaggaaatgacgagtaagaaatcaacagcttttgtttggacaaaaagctttttgtacacctagctatatggtatgacagctaataataattaatatccttaagatataattaatcgcagttgttaatcataaatagtcggaccgtttaaccacatgagtttttcctattttcaagagcaatctggttaaactacatgtaaatggcaacaaagtaagagtttatggtacggttaattagatgttcccaggtaaatagtaatactacagttcacagattaatatgagttttgcgttacactcaagtctctatctgtatagcgtttgagaaattatatatgcacgatccacaatttatgatcataaatattttgtatttaaactaacaagggaaatattgttgttcttgccataaagattgattccaccagtgaaaatacattctcaaaacataaaataacgtagcacacagtaaattttcagtgcatgagatgtgaaagtcattagtatcttaaacctcattaatcgtgatacaaactaaaagtggagacttggagtttctatgtttaaatgaaccattaattgccttttttaggagccccataataaatat

SEQ ID NO: 50133 - DNA, 623 bp, Arabidopsis thaliana landsberg
tcttcagctgcaggtctctaagagtttttcttttttgtttaatacacattgaagagctggggggtctgggggtaacaacatctttctatttgcatctcacattttcatcacagttgaccccattgaaatcccttagaactatcttactataactcttttttgttaaaggatcaactatgttactatgactctagtcttgatcaaaacttgagatcataaaccaaatctgtttttctttttgtggtaattatgttattgaattcagacatgatcaaacttgtattttttggttgttgttggttgttgatgtaattgcttatttattgacgttggaaccaaagattcaattttgtacttttcattctcaaatatgtacaacgtggttccaaaatctgagaaaaacagtttaggatcgttatgtgtgttgtttaaatgatttaagctcccaaaatttgtgattttgatgatcagtacattatgttttctgtagttgttgtaataagttgcaatgtctgaggagaatatttcacaagttgatgacaagtgttgtttggatgatgcaaacccaatggagatatctgtggaaactattcctgtagtggatgaggaagttcatggagatg

SEQ ID NO: 50134 - DNA, 1221 bp, Arabidopsis thaliana landsberg
atatttcacaagctttcttttctttcaaaacccatcatgatgtttctgaaagtttttgggtgccttggttgaataacgtctggtcgctggtcactgtgtacgggctttaaaattcccatggccatctggttttgttgctgaaacactctggagattaccattttcagttgattgttgcacatggtctaagatgtcttcatcatcgacaaaacctgaatcggtctcagtgactttattaccattacttggaaccacatatcggatatttttgtcactcacgtagaagttatctttttcacttgaactattgctattctgactttcagccatactcctccgaccctcgcgagaattgagaggcttttctggagttatagacgccgcagaaagcgttggacggtactgctcaacatatggctgcaaataaggatgcttcaaaatctcggaggcctgaacagagaatgaagaaaaatttatgattagttaatttgactccggaggctgcatgcatttaagcagacaatttctggttcatgaaaaaccatacgtttggccgatactcggggttcttccttaacattcccttgatgagtgcttttctgcaatatcataacaaaacaatacagaaaaagaagagaaaagagtcatttaaccaggcctttcaacacattatacttgatgaaatattcgatcatttacagatgcatttatcatccttttcgctgattccaaaatgttctgttctatctttttatattgctggcatgttataagtataaatcggcatactaataaataaaaaaacacaagctcatagcctaggataggtatttggataaggtgaagtgtcaaatcaagaaatacagaagagcagattaggctttttcgattagaaagagaatcttacaaagatggtgaatagcacggaggcaacggaccaattgaggagcgattaaccttgcttataagccctgccatatcctgaaatcatatataacataaaagcaaatgccataagatactttgaagagatcaaatgcaggggaaccaagaatgctccatccattaacttcagtgatatacacaagtctatatatatagctcttaacattttcttctcttctagagaaattaaccttctcttaaagaatgttacaaacgggagatattaagactatctaagtgaataagtaacttaccaaaagcttgaaagcaggtcga

SEQ ID NO: 50135 - DNA, 911 bp, Arabidopsis thaliana landsberg
aatttggtatctccacctttttgtttaacaaaaaattgcgatctatcgaaagattctaatcacataagatattctgattcattcaaaaacaagtagagtagagacataacagagaagctattacagtttttagttttcacttcagagagttccgaagaataacacgttaacaacagaaaataaatgaaacccaaagcgttgcctgacagaatctttgtgctattttaaggatgatcaattacacaacctaaatcaacagagaagtttttgaatcctttgtcaaaaggatgaaaacaggtcatctcgagccacggggttcataccttctctctgacctctcagaccttctctctgatcttctctctgggcttcttccatgaggagagtaagaccgatctcttctagaccttctttcatcacgaggtgaatagtcgcgtcttggtgacctacggtctctgtaatcatcacgatcatagtgcctccctcgactgctacggccttctcgatcttttttatcacaacaacaaaaagattacggaacagttagcaacctttcatctgtatagagagagactcaatcataactacgaggtttgaaatgttcaattaccgctgtctctggagcttttcaagccaagatagtggcctggggtgggagttctcgggcgctttctcctggactgaagaaagcacaaagtacataaagctcatgtaatggaacacaactttcaatctagaaaagccataggtatattcaaggaaacaagatgcatcctaggctggagaaacacttgactaatagttgttgatacttgataatgtcctttgactagttgagagttgggagttgaggcaatatagttgcttatgattatgtttaagctggcgattcgattgatcaagctgtgttt

SEQ ID NO: 50136 - DNA, 338 bp, Arabidopsis thaliana landsberg
tgatgtcatggtcatcgattgtagagcctgatctcgaaatgctcgttagcgatataagtccatcgttcactgatcgacgtggctcgcgattgattggttctgctcgagtttctctcggatgaggacgagtaattcatctccttttcacaaccatacgagtccatgcatcggctggtagctcaaggttctctcaccatgctttcggccaagcagtacaattgtgcgccattttgacacgacatatgtcaatacgacattgatcgtcatcgtggtcggatcggcattccgagctcagttttctcttaggcatgtgaatactatatgtgttggctatagat

SEQ ID NO: 50137 - DNA, 1036 bp, Arabidopsis thaliana landsberg
gccttgccgcgattactgtaggaggacaaccctcaggtgcatgttgtgcaaagcttacagagcaacagtcatgcctctgtggtttcgctaagaaccctgcgttcgcacagtacattagctctccaaacgctcgcaaagtgctccttgcttgcaatgttgcttatcccacttgttgaaacttatctagagattttataaataaataaacgaaaggaaataaattacattatatcaaacgttatgatacaattcaaccgtttgtgttaatgtactggcttacatggttaaataaagtttattttcttggttgttttatatatatttccgggagaaacggataaccaaatgcaaagcactcgaaaagataaaattggaatatgttaaatcgttacaaatcttgaggaattatgggttttagcttaaaacctcttaatattaaaaaagaaaaaaagaaatatgtcgaataaactaatgttcgccgaatctttgagaaaatggatgatgccttttgaaagacatttggaatatctaaaatgtatgaattactgagctcatacatctgcatgttaaaatcggcacggtatcaaatttagggtataaaaaggcacgatcgaaatcatacagttttaaaatagccttttaccccttgtctactttatcatctgttatcttatcagtaatattttctttacaaatttgtattgcatgtataatttgtaacataaaaatattatttgatcttggtaatttaattattgttctgtgaatagtctaatttctcttcgacaaaaaaaaagaatagtctaatttctaagatcctgaatttcattttttggaattaaaaaatgagaatatttgaccaaaattataaaattacgttatattcttcttgtttttcttaccaaaaatatttttctctataatttaaagaagtcaccttcgggtacctcatgtaaaattgaagatacaaagaagattagcatgacttctacacaaggatgaaaagctcaaattgagaatttgtccaactttttga

SEQ ID NO: 50138 - DNA, 2422 bp, Arabidopsis thaliana landsberg
ctttttggcctcaaactaactgaaatcaagattaagtggttttgatttagggaatttaaaaagatgattttcttttttcaccagattcatcccattcagtggagggcctagaaaatgtgtaggcgatcagtttgcattgatggaggcaattgtggcactcgcggtgtttcttcagcggttaaacgttgagctggttcctgatcagaccattagcatgaccacaggagcaaccatacacaccaccaatgtatgccaatgttctcacactcgagagattaatgagagtgtctgttttgtttagaatgattccaatttctctaatgctgatattttcaatttcagggattgtatatgaaggtgagccaaaggtaaaaaccagaatttatgttttcatgataattgattggtgtgaatggacttgtttcatagtactcttgagaaataaccacaaaaaaatgaattatggaaaatagttgtaccatcggaaatgtgaattttgaacagtgagatgctagtaccattaaagtttggtaattgtgttatcatttcaaatcaaactttcatacagcttgtgtttgttctccatttttcagtaattacgaaaatcaaaattttatttttttttgaatttctaaataatagactaaggtctaaaaccatcccattccatatggaccacacgtaacattaaccttaaaaaccatataaaaccatataaaaccaatactagtgggttctatagcgatgtgtagtttcactttcacgtacgaggaagattaaaaaaaatggagaacgaaagctcagagagtagaaacagagctcgtcttgccattatggagcttgctaacatgattagcgttcccatgtctctcaatgccgccgtgcgactaggcattgccgacgccatttggaacggcggagccaattctcctctctctgccgccgagatcctccctcgcctccacctaccatctcacactaccattggtggcgaccccgagaatcttcagcgtatacttcggatgctcaccagctacggtgtcttctccgaacaccttgttggatccattgagaggaaatactctcttacggacgtcggaaaaactcttgtaaccgactccggcggcctctcttacgctgcctacgtcctccaacatcaccaggtttatgactcattttcattttccaaattggagtgatatattaaaggactaatgatggtataataaactaatgtctaaaacttgttgtgaaaatgatatatattacaggaggcgttgatgcgagcatggccactagttcacacggcagtggtggagccggagacagagccgtacgtgaaagcaaacggcgaggcggcatacgctcagtatgggaaaagtgaggagatgaatggtctaatgcaaaaggcaatgtctggcgtatctgtaccgttcatgaaagctatattagacggctacgatgggtttaaatcagtggatattttggttgacgtaggaggtagtgcaggggattgtctgcgtatgatccttcaacaatttcctaacgtccgtgaagggattaatttcgatttacctgaagttgttgccaaagcccccaatattcctggtgagattttgtatttatgatatattgtacgtacgttattttctgaaagtaaaaagctatttttagtaatgtacggagtaataatggatgatatattgtatggtttaggagtgactcacgtgggtggggatatgttccaatcagttcctagcgctgacgctatcttcatgaaggtttgttgtaacattattgtctgtcacgagaatacacctactaacatttttgctaataggacgaattctagtttctgtatatagttttaatgtttagtgatataggtataaatttataagtcccttcggacaatatgtttggtagtatatagtcttagttatcgttagatcatgcgactggtcactttcatttatttatgatcatttaaatattgattatagatttctcaaaccaaaaacttgtgatctgttagaccatggatagggatctcatgtttgttgaaagaacaacacaaacaaatacacacattttttgcttctctggtcccaaattaatatcttgtaatattgttgtttgagtgtaaagtgggtgttaacgacatggacggatgaagaatgcaagcagataatgaagaattgctacaacgcgttaccagttggaggaaagctgattgcgtgtgagccggtcttgcctaaggaaaccgatgaaagtcaccggactcgtgccttgttagaaggtgacatctttgtcatgaccatctatagaaccaaaggtaagcactccaaccgaccaagagtttatagagcttggtctctacgcgggataccctacttttcgacctttctacattgattacttc

SEQ ID NO: 50139 - DNA, 573 bp, Arabidopsis thaliana landsberg
atttgtctgagaggaatataagttatataacgtataacggttggtaaatgattaaacgttggtttattttacaaacaaattgttacaacccttatccccattcgaatttttttaaaaacttgaacggtaatgactggcggtaaaggataatttgtttatgaagtaaaccaattatactttttaatacgaattacaatttggtgtactaagtttttttctttatgaaatcaaagcattacagatataattaaccaagaaaccaaaaatagttttgtctgtaaacggatttgtacatatggcctgctatcactattcaaagtttatggttcaatgttcttataaactaaaaaaatatattctgaccaagaataatgatccaagaaaatagttaaagtctataatttctagagataagtatttacggaataatcatgtttctacatatctagttaattattgtacattcatagagtggtgaagattcttgactagaaatcgatttgaaaatcctcaccaaatcagacaacgaagaatctaacctaagaacttgattggcggtgtcttgcacttttc

SEQ ID NO: 50140 - DNA, 1051 bp, Arabidopsis thaliana landsberg
agccgtgtgaacaaaatagaaatggagaaaaccgctcaagactacaaacttgttacgcactcatgactcattttcaatttttattgtaagctctgttcgtgttcttgtcactcaatttcgtggaagttgcgttttcaacaactttataaaaagaaaaagtaacgagaagcgtccacgtggtttctacatgattttgacatatgaaataaagttttttttggtcaaacatagacaaatagtccaagagatcatatgactatttgtatgtttgtataattcaattgtatttgttctacataatatgaatagtgacttaaattatatttttatgggaaatatgaaacctatatattgataaaagctcaaaaaaattagatgattagtttaagtatggatgctatattttgaataattataattaatatttttcagaaaatacatttatagaagtatgacaacttatcacagtaattttctctatcataattcttaataaatggaaatataaagcgtttataacaaactcctctttatatattttggttttaacccactgtatatcttcaacatttctagatcaggatctgcaaaaccaaaacattaaagtaaataatagataccggtaataatacccacaattatttacaagaacataaaatatgatactaacttcggtttgcgactatattttcggttgtgaaaccacttgtagacgtctgcgtcgtcgacttcttcaccataactttgaagtttgatcgtgatttgtttgatactggttagagacgggttaaccgtaccgccgatgaaaagttcttcgagtatttgagcttgatgttgatttggtttccattctggtttaggatccgatacgactaattcataaaagggtgaattgttagatatcgtttactatttaagagaatgtaattacgtagcaaaaaaagaatgtgttattaattagtaaatgtaacaaagaagagaagaagacatttagaagtcatagtcaaatcaaacacatgtatataaatatatacgtacacatatttgatgt

SEQ ID NO: 50141 - DNA, 562 bp, Arabidopsis thaliana landsberg
  unsure (1)..(562): unsure at all n locations
cagagaaaccttttatttgtatatcatatatcagcattatttctttctttgtagatacatgagtacacgtacattctctatatatacatgttcttttgaatttcttacttttaatcaatttttccaaattaaaagtgcttcttttctacatctgatttattcgatttgcaatacccatccttatatatagagttttttttattgcttatgcagtaatatcaaataggtaattaacttttggttgggctttgttttacattcacaggccttaagtttaccccctttcgattccttaaacagtggagaatctcacaatctagatcaattcagaggtcacgttttacttattttttttttgataaaaaattatctcccccccccccgtttttttgtttccccacctaggacgaggagaattgttttttttttgtgggggcaaagaacaaaacacaccggcccaaaaacaaaatcttttttttttttttttatttttaaaaaaagggggganaaacgggccccccccccccccccaaaaaaaaaagaggggggggggggccccccc

SEQ ID NO: 50142 - DNA, 1039 bp, Arabidopsis thaliana landsberg
atacattaatttacatatatattcatcttaagaactttaccaatgtcaatgtcaatgatgtgttctaacttctaaccaatgatggttgtcaattagtgaaaaaaaaatgattgtcaattatatacatcatcggctttactacttaccaaaataagaataaaaaacaaagataatgtgttggattgcaaaatcatcacatattggtagcaacttggcacatatatacaagtaaacgagttggagaaaatgatacaaaatcatatatagcgccagatttatttcacaaaactattgtgcgaaatatatcattacaatacagaaatattttcacacattgttaaaaaaaattgatgaaaagaaacctcacatgaaaaagtcaaagaagtgacaaaaaaaagagtcgcttgttcatgtgaacttcctagatccctattaaatccgaattgtaccgagtttgctacatataaaaacttacaattatattatataatcgtatccgtcgtcaattctctccaagcagcaaacaacttggaaatgaataattacgacgagggtagatatatgttacatatataataaagtatttaatgaatgatttagaaaactaattaaagtatgtattatggaccgtcggattaattgaaactccaaagcggaatgtcagcatcttcgtagaagtattcatcgagcatcgtcgtcgagtttagttaaggagagtaattgaatggagctccattatcaaacaagaacatcccattatgatcatcataccatgaagatgttgaatccatcaaagacacatgattgtccgcaaaagatcccatcaaagattgcatcccatcatcatggtgatgatcatgatcggacggtgacgagacggctgatgaagtaggggcaaaatggttaaatgagttggcagcttgagcagctactctttggatggatttgggggacaaaagggtattttcatataggagattatcaagaagatgatgagaagaagaataagtagggaagttgagattggcttgagggcctt

SEQ ID NO: 50143 - DNA, 564 bp, Arabidopsis thaliana landsberg
ttgtgttctaccaaacatcgtagtaaggtaaggcccttttttgtctgttgttaataagggcctatttggatctgatgacctaaaacaaaagtgactaaaatttagtcactttaggagctaaagacttaaaccggaagaactaaaaatgattaaaacagtgaaaaaagctatctttttagtcacttttagcttctaaagaggagctaaaatctagtcagtttgcttctggacccaaataggccctaaatatgtatttctaacccttaattatttacattcaacatttttagagcccgtttgaatctaggtgctaaagtaaactaactaaagtttgctccttcttaagaactaaaagtaactacaagaataagtttttactattttattcaattttagcttttctgtttatatatttagctcctaaaattacgaaaatttaccttatatcctcgccttggaaattttactttatatatctagttcatatgaccacaatgtccacaaataccaaaaatactaatgtgaaaaactgcatggacgagaagtgcaggtatccaggacatg

SEQ ID NO: 50144 - DNA, 605 bp, Arabidopsis thaliana landsberg
aactcttttcttcacttgtttatcttttatatttaggaagttgtataattcaatctgatgctctttccgattcagtcaggtttaaaaacaccattaaaatgaaaatgtagaagtcacaagcaagagtgaagataaatgtttcaaagatcaaacaagttcatacttaatatactgacagacataacaacattcagcgagtataaagtcaacatcaagacaaatagcggtaaacaacttgagacactagagtggttgtaaacagtatagttgggattctgctaagaaatttggacatcctcgatcccggcatgtggttaagctcctgagatatggatccgtagccgaatgtcttgggaatagagcctagaggccgaagtggaagcacattctcaaccataggggatatgacccaagtgtctttagagatgcaacgaaggaggttggtctttggatagtatttcaacaacctcttttcattgtcatgcaagtaaacattcccatgcttagaaaccgccaccggcctaaaatgcactttccacggtaagatctctacaggaggataaatctatggagtaagccttggtccatccatcatcttttagaac

SEQ ID NO: 50145 - DNA, 1370 bp, Arabidopsis thaliana landsberg
ctgacagtgttttattgtaattttcctaagggacacagattttttttttttttgacaccatatcactaaagatacttttaaaaatgaaccatatattcgtcaagtaaaacagtatagaccagacctcattgtgccgcacaggaagttcatcatactcagaagcaccagccaagatatgcaaaaatgcctaaagggcagtgattagaaaccaaagaaaaacaaaaagaataatcaatataaactggatcagcttcttacttcaagcgatgtgtcaggacctatattagagccaaacatagacacggtcatgtagcaaaggtaatactgtgacgctattgtacccagcatcgtaggctccacactatcttcatttactttgaggcaaccactgtcttcaagatcctcaaatgtggtttgcaccaatctacacaaaaagcagcccgcatacaccaatattacaatggttctagttagagaaatcttctttatttaataactttgatatttaccttgataagtaggaacagattgtttcgtcttgagtaccttctagcccatagtaagcaggattagccatctgttacatcaaataccagattgagtcatgaactggttattctgcagtaatggaaaaatctgaaaggaaaaagagaatctggctgcagggaactgatcatgcttttagcacaatttttcaaggaaccagaatcacgttctcaagtagtatctcgctttttaataaaactgaagcatatttaccagtctacgaaacaaatacgtccatgtaagataatgcactgcatcttctttgttgcctattgttccagagacgatttccgcattgaagtgatcgtgcagcttctctttcaaactactttctacggggaatggttcgtacaagaactgcatgcagaggaagtatgatctttttgaggtaaattgttgcaacggataccaaaaattgccaaataattccaactgagcttgacctttttgtaaaagctttttttaggttcatgtacaagaataaccgctttcccatgttggtcaaactgtggtcgccctgcacgtcccatcatttgcaagatctctgtaagagggaagtcaacatatcttttggttttcccgtcgaaatattctgttccctgataggaaacattgccaaaaacaacggtattaaagagaaaagacaaatcattagaggagaaaatccaagaaagtgatcccaaacattataatagaagaggaccttcttttacctttataataactaagtgagctggtaggttcactccccatgccaaggtacttgttgagaccaaaacctgtaatggaagcatggattcatcatcaatcgtaatgtaaaagtg

SEQ ID NO: 50146 - DNA, 521 bp, Arabidopsis thaliana landsberg
aaacttgaacgtatattaatgtcgataacatagactaatttacgatgcagacagcaaaatggagattaattaggtttcagacactgatacatgtgtaacatgtgtgagcgtaagtggaggctttgtctcttcaagtcaaaatccatcgacattctacaaatttatctaggggccaacgagagtcgagaatacaaaaaagcctaaaagttcgagacagcgtcactgtcaataaacgttgcctaaatttctgtgtacgttgcatataattacgtttttgccactggcacttattagtcactttccacttatcaatcacttgcgttacttcaattttgaaaagtaaatattcaaaacgagatcaattttttcacatagtgacaatatactcagatgtagaaacaagaaaagagaaaaggatagaaaagattagttaataccgtaatggaaatatatgttctttatcaagaaaattatatgttagtaattacagtaagcaagtggagggcggtttagtcattttg

SEQ ID NO: 50147 - DNA, 586 bp, Arabidopsis thaliana landsberg
cttgcctcacattaggagaaatacttttgtttctagaaaacatctactcgaaaccctatcacactatcaattctacaaaattaccaaaagaagtaacatgcgatataaacagaaataatacaaaatcaaacacttttcacgaattttctaatccaatcatcggaaggaagaatattactgtccaaaacttaacttacaaacaaaagttacacaacacatagttaccaatcgctgtgacacacacatataaaaacagttacacagtgacataccatacttacctaagttttgacattaattttcctaatgcaaatcatgtggaggagatttgatcgttgtcaatgtcacttatgtggaaaaggtagtgaagcgcagcaatggaagtagccattggggtcatacttataacgttgtgagatgtgagcttctctgattagatatgttccccaatccttgttctcaaactctttgtgtatctctcgagcatcaaaagtatccatctttttgcttttatcctttctgtagcttgcattcatcaacgtggcgtgtaactgaaataaggaacaagcatgaatgagaagctgaa

SEQ ID NO: 50148 - DNA, 393 bp, Arabidopsis thaliana landsberg
tttttttttttttatttttttttttttttttttttcgtttttttttcttttttttttttttttttttttttttttttttttttttttttttttttttttttttttttttttttttttttttttttttttttttttttttctttttttttttttattttttttatttttttattttttatttttttttctggttgttttttgttttcttgtcatttctttttctgttttctttttatttttgtctatttttttttttttttttcttttttgttttttttttttttttttttatttttttttttttttttttaatttttttttttttttttttattttttttatttttttttttttttttttttttgtttttattttcgtttttttctttttttt

SEQ ID NO: 50149 - DNA, 1033 bp, Arabidopsis thaliana landsberg
  unsure (1)..(1033): unsure at all n locations
aattacaggcttggctgttgctttacaatcatttagattagacttgcatttgatttttaaatcaactagcattcttagctttatccaacggtgatagatcttattggatttacggttataccaaaaaaatatattggatttatgtcttcggctacattcgaattttccaagatgttcaaaaatagtgtttacaacttacaacttaggtgtataatagatatatcatctgtctttttgtttcatttatctttgactttagaatatttaaattagtgtgaaatatagttgcaaaacatatattggaatttttgaatatataacataagatcataagtcatcggttgacaaaattatccactagagtgatttttaccgattttcattcttttgactaaaggtgatgatatgcctaattttcttcattcaccaaactcttcaatttcttttcgtcaaccgatattcaatctgtttttctcgttttgagagtgtttgattttgaaactaatgcgataaataattataactaaaatagtggatccggccgtagcatctaatttgcctttatgaagtacccttgacgtttccctcacgtgcccttctttccctcactgatttaaatttggtcaatattgagtgttacataaaggcaacattatcaccttataaacctataggtataataattaagttagaattgttcatatgtgtatcatattatgtaaactttaaaaatgtgattatttgttaaaatttatttacaactaattctttaatcacttgaaaattcattaagaactttggtaattacgatgtagaatataaaacanataaaaataaatatatgacaggagtttaacacccaaaaaaaaaagagtttagaatttatatgcacatgatatacatgtgtctataacttccgaaaataccaagacatagacatagaggagtttggaagcttctgtgcattcactaagaatggatgatatctattgtcagtttgcgattatcatcattcttatataacaacaatact

SEQ ID NO: 50150 - DNA, 652 bp, Arabidopsis thaliana landsberg
  unsure (1)..(652): unsure at all n locations
cattatgctcttccatcaatcacctaggccttggcttcgccggaaaactgagagcttgccggagtttcctctgccccgacggactcgaattagagctagcgataggcattccgaaagtcatggtctgtgagagattcaccatatccaccattgattgcgtctggtaagaagttgtagttgaatcactcatatcgcctctcgccgttgctcgctgccaggagtgcgagctcagaccggcgagcacgtaagccctacccgaagcctcatatacttgacggctcgccattctctcttgcatctccttcagctctgcacacagtgtgacacacaattgatctccggctcgacccgacacggactcggtcagtaacccacggcaagtctcgagaaccgacacagcttcagtcaaatcaccgcgctcggctaaaaccctagcttcagagnnnnnnnnnnnnnnnnnnnnnnnnnnnnnnngtctgtcaacttcaactgacactacaggtcttctttctgtcatcactattggcctgagaatctttacttcgccggaattattcaaattaaccgtctccctcgtcccagggtctttgtaaacgcactaaaccttaaataacgacatcacatctgaaactccatcgacaatagggatttc

SEQ ID NO: 50151 - DNA, 511 bp, Arabidopsis thaliana landsberg
attttttgactgtcttcatgagaaaatgcttttgaaattaaaaacaaagtagagaaaggtgattctttctttcttattaccggcactttttcttcagacagatatattttctgtttctaaggtttttgcgtgtgacattggaattataatgaaaatagtttagctttttgttttttttctcagacagagcttgtgcgtctcttagtgttaataacgatgtttacataaatttataacaggagttggaatttatatatctgaaaaatacacacccaaatatgaaaaactgttcattttaaaagttaaaacccaacttataacaattaatgtatccaacgagagcatgagtatatatttgagaatttgaatcgtccgatgaagatatatcgaagggtggaaaaagagaagagcacgtcaagtttggtcacaccaaagagaaatgtgtggtttgatcttatccgttagtgtcgtagaccgaaatgggacctctaagcagctgtgacatggggtt

SEQ ID NO: 50152 - DNA, 731 bp, Arabidopsis thaliana landsberg
ctccaacaaagtgtacgtaacgtaacaatcttaacgacaacctaaacaactaatagcaatcacaattccttaaagcattcgttagtgtaccatgtaaaattccttgaaccattcattattgacttatagtaccatgtaaaaaattccttaatccatatatcaagccatgtttttgtacaagaaaccaatttgacattttgaataattagattctttatttttattttttttaacttaaattttgaaataaaaattaacaatccataatgtagaacgtgatgtctctaaatttgataatgtccgaacttatttgcatggatgtttatatattacactagaactcgtattattgattattaatttaaacgaagtatcacgaatttaaactatattttcatactttgtctttcacacccgattttccgcgacaaatgcaaaatccagatactgaaaattatgcaatattaaaatttgaaaaaattgaaaaagtgaaatactaataaaattgagcgacacatttctgattccagtcttaactgttacactttcgagtgtcagatctcgtctttcttctccaactcgtctatcttcttctccgattaatctaatctctcgtcggagatttagaaatgagcacacctacaacttccggttcggcggcgaaaccgacgagaccagcacggtcgtcgagtttagcaactaggtcatgttccaatttcggttccctcact

SEQ ID NO: 50153 - DNA, 569 bp, Arabidopsis thaliana landsberg
gaagtctcgttcttgcaagactcaatcacttgggtaacaaggtttgatgatggagaaacagaaacctggttcaagttttcttcaaggtcatctagaccaccaactggagaagaaactatccgaataacttcatgcaacgccgtttccgatcggtcaactaaatggtgagagcaaaagtaacgtgtcagttttgcagtactcgttagatacgtaaacctgtttaatctgactgtggtggacatcatcttctctgaggaatttcatcaaacacttgatatgcgtatgcttcttaaaagccgccaaatataaaccatagaagggactctctcctgacttacatgtttctcagagtacttacaacttcgttgtaaattctttcagcaacatgaaattcagatttctattaaaagacctaaatttgcagatttcatgagatcgctcggctcaacaacaatatatattcatttgttggaaacattgcccgcgtgtctgaaaagggcattttagtcttttacattccatcacgcttcaaattcagaaccggataaaaccgataatcgtgagatacg

SEQ ID NO: 50154 - DNA, 1679 bp, Arabidopsis thaliana landsberg
agattgttatttgaacgtaactgttcatctctccggagagactgcaaatatatcacagtgagcactaaacgtcgtacagcagtataaagaccaaaaaaactgacaactgtaaaatcataggttaaataagattagtggtacctcctttggcggcctgcgattctcatgaagcatcctgtcagactgagttgagttatcaatcttagaaaaaaatgatggatgacgaggcctgtgcttttccatatgaatcatttcagaatccaacggatattcttttgagactgctcgacgaatttgagcaggatccatctcctcctcaacaggaaaccagccatttcttgattgcacatgtgagggtggagcttgaactggaggtctctgaggaaatgaaggttcacttggagcaggatccctagtatcttgtccatgctgcaatatgaggagtctcctcctagtatctggatctaattctgattcaggtacctcaccttcctctctagcaggagaactctgcaagcttggttctgaaggaaccaagtgtttagctattgatgtcggttgttgaggttgttgaaatggaatacttggaaaggccatagctgaaggttgtattgcttgttgcacgacttgtactggtactggaactgaaacagaagaagcagaagccatggggaactgaacgggagcagctatcctcggatctatatttgccgccggaaggacagctgaagatgcagaaattgcctcctgaataaaacggaaaaatgtatttgaatttcaacattgggcagaaaatttaaaccagaagccatgtttactggagttggcatctttaatggatcaccacaataactcagtaacaatagagcctcaaaatgtaaatcaccttcagtcttctctccacttcagtatcagccatcccgtcaaaggaaagtggatctttgttcccatttaaacccgatgtatcatcctatattgaaaaaagaatgagctactgggaaatagtttcaaaggtgagtaaaataagctcccagactgcctggaagagaaccaaaaaattatctactcccaatcactaacaagtatcacgactaacctccgacaccaaataatggctgacatcaggcggagaaggaatatcctcagcatcattctcataagaaatttcagcaatccttggtagcagactatcatcaaaatccctgtaaccaagttcaaataccatttcaccgtaagtatgtactaaggaagcacccttgatcagtagagatgtcaagaaaacaaactactattatcaaatctgacatcttacctgaaaaatccacctctgacaccacaggcaacgttcctggcaacacatagtactggtgttgcagcagcctacaagaaaaggaaacgagctatatgtgacaccatttattactgaaaagtcaagactatcacttctggtagaaattgtgcaacaaaccaggcccacaaagaccccttgcgtagaactcaccacaaagctagcttatgttaggtcttataaggcttcatttgttccattctaaatgacttgtgattcttttgattaataatattcttatcaaattcacatccctctgcacctttcataaccaatttcaactaggtaaaaattaaacttacttcagcttgaggagaataatagggagcga

SEQ ID NO: 50155 - DNA, 481 bp, Arabidopsis thaliana landsberg
taaccgccaaaatgtaacttcattcatctcgagatagctatgatacatatagtcgaagaggctaattgcctctacagagttaccattctgagaaaacccgcagagcattgagttccatgtcacaacgctcctatgcttgatttgattaaacactgtgcttgctgaatccacagatccgcttttagagtacatgtctatcaacgagttctgcacaaactcatctgaaacatctgtccttataacatgtccgtgaatctgtttccctagcggaactaaaccagcattctcgcatgctgagattgagctggccaaagtgaatgcgtctggttttattctctgtgtcaccatctgtctaaacaagcccaatgcttgaatcaccatacctctgtgtgcatatagagatataagagagttccatgcgacaatatttctatcactaaccacacgtaacactgtctcacagtcgcttagttttcccgca

SEQ ID NO: 50156 - DNA, 655 bp, Arabidopsis thaliana landsberg
ccgctgctttccagttgtacatgctttctttatttgacggttttggttgctgcgtctgtggtgttcactctttaaactttttcatgtttttcttcaaactctgaatgcacatatccatttaacaaacgacgataaatattcactcttcaaagtttttcttgttttattctcacttcaattatgagataatattgttgaccaaaagaagttgttatgatctatttttcttctttcctacagggagaccgttaaatgtattcttgaacttgggcttcgtccacaaaaacatgccaaaagagaaatgatattgttgaatagtaaaagtcatacaactttcggtttcctttttctccttccctcttatcctcttgacagtatatctacgcaaaaaattgtgtgttattatacatatagaaagaacaaaagaaagaacgaaaaggaaaatggaatgtgctcaagtcccaaaggtcaaacaaagaagtgtgaaattgaaagcgaaaggtgaggcttctttcttgatacacgtgttttgtttgtttggccaatgttcatcattcgccccttatcacaattacaccttcctctttccaaacaaagccttctttcacctacttctttctttttgtttctaacaaatattggatttttttttctt

SEQ ID NO: 50157 - DNA, 531 bp, Arabidopsis thaliana landsberg
cacgtcgatagcatcgccggccggctggcggcggaccacatacccacgctgagcaccatgcaggcggggccgccgtcgccgaacaagctcatccagacgatctcggtgcagatccctaacgtctcggggaacctcaccaccgcccagaccaacgccgtcgggacgctccgggccgacctgtcctcgctcgtgtcgggcacggacctcaaggcgggcgtgacggggacggtgcccgaggacgtcgactcggcgtcgacgggcaacagcgcgcagaagatcgtcttcataggcaccatcttgctcatcgtcgtgctgctgctcatcatcttccgcagccccatcatcgtgctgctcccgctgctcacgatcggcctggtctcctcggtcgccaacgggctcatcgacttcctgagcaaggcgctcggctggagcgccgagagcttcacgtccatcttgctcatcgtcgtgctgttcggggtgggcaccgactacatcctgttcctgctcttccgctaccgggagcggctgcgc

SEQ ID NO: 50158 - DNA, 396 bp, Arabidopsis thaliana landsberg
tcgaatcggatagctaagaatcgattaatcagagacatggtcgacgaaacctcggacacaggcgatgaagtctgtaaccctggtcgactacttcggaaccgcgatctacaattcataggacccggactataattccccgatgtagtctgcgagacctcagattcgatagaattaacccgacgatttccgatccaggtccagaaaatttctgacccggtgcaatcatcgcgaggactcgacgttgacatcgacgattccacggattcgattgacagcgctgctctatggagtgattgatgaagaaaggtacctcaatcgggagcatgctccgatcaggaatactcatcccaacacacgcgcgcgatacaggaggaaattcgactaggtggataccac

SEQ ID NO: 50159 - DNA, 316 bp, Arabidopsis thaliana landsberg
  unsure (1)..(316): unsure at all n locations
gtttgcgagaatgcagtattggtgtgtccgcttatctgattcagtagtgtcgaccgtgtgtagaccgtcaactgggtacacgtaagttccgccatgagtcgggnnnnnnnnnnnnnnnnnnnnnnnnnnnnnnnnnnnnnnnnnnnnnnnnnnnnnnnnnnnnnnnnnnnnnnnnnnnnnnnnnnnnnnnnnnnnnnnnnnnnnnnnnnnnnnnnnnnnnnnnnnnnnnnnnnnnnnnnnnnnnnnnnnnnnnnnnnnnnnnnnnnnnnnnnnnnnnnnnnnnnnnnnnnnnnnnnnnnnnnnnnnnnnnnnnnnn

SEQ ID NO: 50160 - DNA, 707 bp, Arabidopsis thaliana landsberg
ctgccatctaaggcttagaggaggcaagaacgagtacttggaagaaggcggcgacgaagggaagaaaaattgaaattttctttattttattcttctctatctttgtatttttatattttaaattttgaaaaattcggcaaaattttagctgagaaatgcaatagaaagaacaattactggtggatggttggaaacttttttaaaaaacttcaattgtatttataataaatcgataaatgtggaataaaatttcataatctcattataattgtcttttttttttctttgtaaaaattacaaatatgttgtgaaatgtggacggcgagaagaattaattaattaaatgtttttcttgataaccgcgaaaattaaatgtttctgtttgaaaaaaaaaaaatatgagaagtcaaaaattaaataaggtggggtctacggaatcgtagagtcgacgactttcgtgaggatggggcatttcggtcattgaaggagttaccgacggaactgggtgctgtagtgttttattgacttgtgtcggtggattggcgattgagtgtgggacgtatggtgagaaaaatggggcttttgtgtcctaacgtgttgttgtatgggccactcatttctcaaggcccatcacctcacctcatattgtgccgggatgttgttttaactttatgacgtgacgtgtgtattatgaaactgaagataga

SEQ ID NO: 50161 - DNA, 467 bp, Arabidopsis thaliana landsberg
  unsure (1)..(467): unsure at all n locations
cgagaagggcgtncttctggcgatgcgctaggttttcggcgatgattctgacaatgacgcccgctacgattccgaggatacctagcaaagcccaaagcccgatgtatccgaaggcgctttatccttttccgagggcatggacgacgcggacgagcaggaccggatcggtaagatggatcggggcgatgaagacacttgctacggagagcgcgattgctagattttcatccgactcgagtagcttcagcgcgcggatatagatctgggcgaggcttatcgactttagcgtaatgcgatgttatccggaacacctctgatcagacgaaccgaagaaccatgaaacccccttatgtgtgaccgatgcccgttgaatggccgagactaccggccggcctatagcattcccgacgcgataagcatcaggcaaaagggagcgtcaggcacgcaattcttgacgagccgggtct

SEQ ID NO: 50162 - DNA, 1126 bp, Arabidopsis thaliana landsberg
acactcattaattgatcactagtctatctcttttctttttttcttcatatttaaatagaatgatttaattttcgtttgtaaatccctgatccatgggtttgaattctctccagtttttagcattctattcagaacctgatcaccaaagaatgtaaaataagaatgagtgagattttcacctgaaattattcgtccatttaatgtataatttataatggtagtccagatacaagatagattagataaaataaatatgtaaatggtaaagcgaattaaaagagcccatgtggaattaaatatggaagatcgaacgcccttggtcttctctgaagtgaatttaattagtttgtctttctgtatattggattgtcgaatctaattggttggagtgtggatcactcaatcaatagttgttactttttagtccgtttattcctaataaaaataaaagataaaagtatacattgatctatatatcatatatgtataccattgatttaatttggttcattgcaaatgtatacaaaatatcgactacttatgtggtaaactttcctttgttcaattatagcgcttaggtttcaacctttctgatgtggttgttcctttatagacattttttttttttgttatattttaaggttagtgtaaattagttttccctgttggaggaatgcttttttcttttggactaagtttttggagacatttttagtcatctgccggcatatgtagtttcaacttgtatcattctcttgattcttaataaaatttagatgagcaaaaaaaactcaattatgttgcaagaacttagccatataggagattttcggatcaaagatctaaccaatttatttaagttgaatcgggttacaaaaaaaaaactaaaaaaaactaatgtgattacgtctttgttcggctatgacatctttattaattcccattaaacatcccatattttttaccttaagagttttaaaatatagtaaaaatatatgagtttagaaaaatatcgataaatgttaataatgaagtttagaaagattaacaataactctaatatattatttatatttatatttatcttagcttatgaaacttagattaatttcatggctacataaaa

SEQ ID NO: 50163 - DNA, 676 bp, Arabidopsis thaliana landsberg
cagctaactggcatatatatgtatgactgtttgtcttggaaataaaagaaattttgattttaaatgctataatcaatttatagacaaaattagctaaatgatgaatatggtcgttaaagattttggacccaaagtttgaatgtgcactgtttgatcctcattcactcttgcttaatagccatcaattcattttgtgaatataagcaaaaaagccacttgagctcttgagaagaagaagtcgtggttcggttaatcaggagacagccgagataaagaaagtcttcatgagatttaatgtgatggttaattacgtaatgaaagggtggctgataattgttcatggctgttgcatcatgtcatgatcacttgacatgtttattctaaagatttcttgttccatcacttttcatttagacttatcaagtacgtacgtagtgataaacttaatttgtaatatcttttctcatgttacaaactcggacttctgtcgtccatgagcctgatatatatttgatgaccaaggcttaggatgttgaactgatccaatcttcattctcggaggttttgctatgtgttcttcgtccagctcattgttaattacaccgagattgacataatgacatgattcaaaaatgggaacgttgttgttgttgttgttgtttctttttcaatttgc

SEQ ID NO: 50164 - DNA, 746 bp, Arabidopsis thaliana landsberg
cactttaaatacgacaaaaaatgccaccaaagtttttctttcttgttgttgttgggtccgatagtaatgatgaaccatcatgaaaactcggaaaccaaattaacatttagaactctcaataattatcatcttcaacaacctctctctctgcttggtcccaaacgtctatttcttttattttgaatctttcttgacattggcataaatggtaactatagcctaccaccataattaaagtattgaaagttgtctttttaacgtttacagaaaaaaaaagaaaagataaaggagaagaggataatcgttttcgcgagatgatatagcaatgggcttataacgacgtcaagcaaaagcctactagaaaaaagtaaaggtagttcaatgggcttataacgggccatttttatgtctacgatatcagctgaaaaaaacacaatccatttaaatgaaaagtatcactgaataaaatagtgtagttttcgccttttcggatcgattagtttggttctatctgaacggatgaatttgggatcaaagaggctaactataacaaaatagtttaagaaataattttgagtagtgaaaatgaatgtatcataatcttattatgaaatgaacaagactacttccgataaatagactactgttttgaaatattttacaaaatacatgtgcccatctgagttttagataaggttatacgtagttacatacacctgaacctcaaatctatgagacattacata

SEQ ID NO: 50165 - DNA, 786 bp, Arabidopsis thaliana landsberg
aatttcatttaaagtacttttacaagttactaagaaaaatgtcattcacttttttttttttgcatgttctgtatagaaacccaattaaaaaattgtagaagaataactggccgtaccttaaggggacaaaaacagaaatcaaaatgagaagaagataaaagtagaataatcacatgtttagtacgccaaacgtggggagtatctttgagctgattctgttgtctacaaatgattatttgattttgattcattgcatttgcctatcaattttctttaatatccagtgcctccttctaagttccaatgggtaatgtaagggtcttgctaatataataatgccgtacgttattatattattcgatttgatccttcattctgaagaaagttcaaaatattatatacatcctctttttaagtagatattgtggtcgtggtgtgaatcaaagatatgagtttgtgagtgattaggagctaaaatgtatacttaatgtttttagtagacctcctaatattagatatgaatccataatccccatgattacatgtatttggacaacattttatttcttctaatttgtagccatgcatgaccacataaccttgagttagatatgattcatatgaatcataattaatccccataataccatggttattcaaccgttttcatttctaattcgtagccatgcatgcgtgaccacatggtcatggtttagcgacatgtgattgtgaaatatgtggtcgtagtcaccaacttaacccctacctatttaatgatttaaatta

SEQ ID NO: 50166 - DNA, 607 bp, Arabidopsis thaliana landsberg
agaatatgtacttttcatagggagtaaataaattcaaaccaatgaataattccggtcgggtcgaatcgtgtgcgggcgacccggacccggacccggacccagacccattttaaattgccgcccccataaggtccttaggtaaaaccctcaaaaacctaatacttcatcgcctcctcttcttcttcttcttctctcatctccgtctctcagagagtgtacacttctccttcttcttccgtcatgctcgagtaccgttgcagctccgttgactggaaaccatcaccggtggtagccctagctaacagctccgacgactctcaagtcgctgccgctcgcgaggacggttctcttgaaatctggctcgtctcccccggcgccgtcggatggcactgtcaactcgtacgtactctacgctagtagcttcttctctattccgatttcaatcgaatcggaatctcgtgaagtatgttcgagttgatttgtggttttttgattggttttaatttaaccgttgccttctttcggatttttccggggttagactatccatggcgatccaaattcgagaatctcgtctcttgcgtggtgctgttctccttctataggg

SEQ ID NO: 50167 - DNA, 594 bp, Arabidopsis thaliana landsberg
ttagcccatcaataattattagcccatttatatttgttgacgtgacatgggttaattttttttttttttattctaattaatgtgcatggctaatgtttctgtgttttacccaaaagaataaataaaactatttgatcctattggtcactaaactcttcttatttgaccaacgccaaaaaggaaaatgtttttcacaaaaacatctttattctaacaaaaattacttttgtggttatcattactaagtatttttggtcgaacgaaacttgtaatcatatagaaattcaaatcagcttcatcctagtataactcttgaagttcactgtcgttgcaagaacccaaccggtgatgtgggagttcaacaactaagaaattgtcatggaattcaacgataatttcatcaattaccaaagaagataatggaatgtctattctcatatatgtacctaaatataaactagaatattattatgatgttcaagtatatggagtagctacatttcgttgatgtggccaactatgtggatggattgcaaaaaagatgtgatttactttaccagacattacaataaaccacccaaatttgtacatact

SEQ ID NO: 50168 - DNA, 181 bp, Arabidopsis thaliana landsberg
  unsure (1)..(181): unsure at all n locations
cgcgtgcttttcattacacccaagggcctggcggacctgtagtcggcttaaactgnnnnnnnnnnnnnnnnnntggtacggctaagaagacggtcgggaaggggtgacgccaccaagctagttatcaagcaggggtgttggacgaaaacggaagtaaccagacaaattgcgtcaccaacta

SEQ ID NO: 50169 - DNA, 654 bp, Arabidopsis thaliana landsberg
ccctatttttaataactatgagtggacgatattatatgagagcagagaaaagtcttattcggctttttttaaaaaagtggatcatgtgaatctacgttcactaatagtcttatattgtatggatttttccaatctataattgccgaatgtttttcaataactcgaaacttgtttacatatatgaaaataacagaaaaagtcaatatgttttactagtcaagataaacgatagattttcataaaatatttgactacattatcagttggatttcggcgtataagagagatcaatcgattacaaacattaaagttataataagttcaaccatagttgagccgaaacatctcattttggacgaagaaacttccttgcagaaccggaatcaagtgaaacgtctgcaattaataaataatgttattattcaagtcagctaaaaatccaacaaaaataaaataatacaggctcatactatatagcttatagtttgattcatataatttagtaacaacattaaaaattgaagaatgttatagcgggggtccaagataaaccgatggaaactagaaaacaatgaaaataacattttgttttatgcaaatcgattaagctaaacctaagattgttttaaccaaatgaaaccttcgaatcgatta

SEQ ID NO: 50170 - DNA, 1132 bp, Arabidopsis thaliana landsberg
  unsure (1)..(1132): unsure at all n locations
agaacatcgatcattttaaaaatcataaataggtaaatattttgattaagaaaaatataaattggtaataagtttttttatagagatttttattacggaaagaaataccagaccaacactaaagcttattttgtatagcattcatggtttgagcgtgttattattacaactaatccaatataatttagggatggtttggattattttttgaatgattttaggttttatatctttgttttatgattcttaaagttttggaacgaattacaattaccagtgagtgactacaattgacggttatatgtagttaatacttcttttagtttctttttggcaaagttaatacttcttttcaaaattatatttttaatgtcaaattgtcaattgtttttcgtttcatgtgcatatacatttattttaacctaacttaagtaaatgatttagaaaataacatttaaaaggtaataaaattgatttttttctgtttctataaataaactcaagtgtaatataatacaataagactaatattttacaaaacttctgaaaacaaatcgaattgaaattttgatttttcgtttcaattcattcatttgtttacataatgccagtctagtaagataaatatggaatcatgtaatggattataaaataaataaattattggacttcttaataacttcgtttgtcttattgacttgatggagctcgtaagtacataaatacaagtacagcgcctaaagtgggattatccatgtggctaatcatgtagttaattaatttaataattttggacatacatttgaatatcaattcaaatgaaaacaatgtataaattaataagaacacgtatccctaatctttcccaaaggacacatgctgacatgggctgataaatcgagatcttaggtatgtcgtccaatcaattaatataatctcatacttaatttgagaaataattttatacgataaaggtgctgatgtgtatcagtgtatggttatcctacaattaattgataaaaaaaatatatgctattcatcactgatttntaagattttctcaacttttggtttgaatacttatttaccctacatataaaaaatgtttatatttttcgaaaatacatatttt

SEQ ID NO: 50171 - DNA, 595 bp, Arabidopsis thaliana landsberg
acacttttttttttttgttcctgtatatgtttaaaactagaaatgaattatgattataaagtaaaagtgactcaaaatatctatctcaccacaaatcatagttattaccttaagacatggcgtgatcgagtcgattgatcgaggcattgagcatttatataccacacacacggttacataaggtcgggctatatatgaaacacgtgaaatgtcacatttcatagttcttttaatggtgcaaattctgatgtccctatctcaccatttaatactgctgaattaacttttgccccttccattccattgtatattctattgtatttaacttcacgtaatttagttcacgacgttgaccttttttttaattagcaaaatcagtggatcatacagtattttctaaatacttcctaatcgtaatatattcattttactatgaaaataaaatctgaaatcagattcattctcatcttgaataatcatttttctgcgttaaaacaataattcgcgtcgaaagacagttggtatatagaggaaaacaactttaaaagcgtgtgagcttaggtgaaaaatgtcaaagagaaaaggagataggtgg

SEQ ID NO: 50172 - DNA, 958 bp, Arabidopsis thaliana landsberg
cccgaaaattggttgctgctgcgtttatatcagagtataagtcaaatactggagttttaagtagatctgttgggtctcgtgtgttcgttcaaacatttatcctccccaagctccagcaaagactttaactgtagcgtttatcaagaccgaatcaaacaacactcggctgataccagaaacgcagatcaaggtattttcttcttcatctagaagattgatgtaatgaggtttcacttgcttctctttcttggaatttaatcttcttttacttgcattcagaaaaccttgtacaagccaagaggctcatcaatttgctcatacgaggtttaaagctgacaaataatttacagagcaacttatgaaaaactgatagaggaagatgctcaaatttggtttgttcgctatgtattgtggttgtggttaatgcgtgtttgactctacatgcaataaggtttgactaaatccaggctctggtaacttacagagcagctcataaaagactgataaaggaagatgatcaactatcgacatatggttttttgtctatgtgtcatggttgtggttgattcacggttgactccatatttagcggcaatagagcaggttgatcccatagtcaaaatagtactgccaattgttggacgctttgacccagaggaatttgtaacgagttggcaagggaacaacccttgtgaatggtttggtacaaactgtttggagggtatcatcattggtatctcttttatttccttgaacttaatcggaactatttctccacattttgcagatctaacctctcttcgggtcatagatctttcgcataaccgacttaaatgtaccattctttttgaaatcacaaagttgaagaacctgactattgtggatgtttcttataaccaacttcatggggaaatcccacgcgttagaggaattgttatactcactgaaaggaatccac

SEQ ID NO: 50173 - DNA, 637 bp, Arabidopsis thaliana landsberg
acttccacaacaatatctcacagtattacaaaagaaaatatatgcataaatagccatggttcatttatgaacactttattcgtttttttagtttataattgcattaaaacatgtttgtcacatcacatttcatgtccttcggctcctactacaacaacaagtcactgtcatctccattacttccacttctgctcctttctttattaacttgttaaaaacaattctaagataaataacaataaatgttggtctctctttattatttcccggctaaagaaggaggatgtctcgtattatccgccatcaatgctcttttgtttcctgtttcttgcaatttgaatccctgagaatcctagcccacttatttactactttgccttagctgttttcgacatcaaaattttggtcatatgactcatatcaatcttcaaatttgataaaatatgttcccaattcacaaaaacaaaaaagttttcgaaagctcaaaaacctttaccatttcaatagtagataggattcttttagatttgcatttcacgaaaagagaagaaaaaaaatcgaaaaatatttgcaatcatgattttttggttctgaaggagacctgtagttgctgtcatgaacattaaatacaaatcta

SEQ ID NO: 50174 - DNA, 1053 bp, Arabidopsis thaliana landsberg
tgagttgttttgtaataagtaactttccaaagtaatttaatttactcatacaaaaatagaatttttggattatatagcagttttccagtttttcaaaaacagtaattaaacatatgaccaaaggaaaaccaaactgcccatagtaattgttgcctgggtgaattggattagacagaacttgatgggacggtgttgcagtaaatttttaaaaagttacactcttccctacacaaaaccgcggcaacatataactttcccctcaaaaaaagaaaaaatgattactcaaatgttcgacacttgggattaacagatgtagtgatgtattataaagcagattatttttttttttagtataaatcaatcacatatgtcgtttgtaaaattataaagcagattatttataaacctgatgtagtgatgagatcaaatacttcttcattcgacagagatgtttatgcttattgaatcataggattatgagattctttaaatgtttcaaattatttgtaactcgccagacgcatactgtatatcagtatatgcatgtaatttcccgtctatgttcgattattttggttcaatatataatcataccacgcccaaaccaaaactaaattttgaattccatatattaaaccaattagttaccttaatcatatattcttcatcagagtaggatttctaaggaacatttaatcatatattaaaccgatctctggtagagtgactacactgatcattgacaaacagagaaagtctggattggactaggcgtggtatgactactacaccgaaataatgaaaatcagaccggctcagaccaaagatcggcttaacacaattatatgctagattataagtttttgacgatctgagccgttcatagggaataagaatatgtcaacgcgagggatctattcatgtactgtaagcacgatgcactggaatttaaagccttaaattagatttttgaaattcaaaagttcgaaaaagtaaaatcccaaatatacaaaaatagtttgagctgggtggggtaaccgaccaaattgccaa

SEQ ID NO: 50175 - DNA, 1178 bp, Arabidopsis thaliana landsberg
cgcaaactgttatactccgccgtatattcgcatctgggtcacacttctaaaccctatcatttgacttaagattcgatttctgaagatctgggtttcttaaaagtctttcctttttgttgggatccaaacaacaaaagaaaagaaagcagagatgaatattggtcgcctagtgtggaacgaggatgataaagcgattgttgcgtcattactgggcaaacgagctctcgattacttgctttccaactctgtttccaatgctaatctcttgatgactctaggaagcgacgagaatctgcagaacaagctctcggatctcgtcgagagacccaacgcttctaatttctcttggaactacgccatcttctggcagatttccaggtcaaaggccggagatttggttctctgttggggtgatggatattgcagagagcctaaagaaggagagaaatcagagatcgttaggattctaagtatgggaagagaagaagaaacgcatcagactatgagaattagtttattgcaaaagcttcatgatttgttcggtggctcagaagaagagaactgtgctttaggactagatagagttactgacactgagatgtttcttctttcttcaatgtatttctcattccctcgaggtgaaggtggtccaggcaagtgttttgcctctgctaaacctgtttggttatccgatgtcgtcaattcgggttctgattattgcgttagatcgtttcttgctaaatctgctggcattcagactgttgttttggttcctactgatcttggtgttgttgagttaggctcaacttcatgtttgcctgaaagtgaagactcaatcttgtctataagatcattgtttaccagtagtttgcctccggttagagctgttgctttacctgttactgtagctgaaaagattgatgataacagaacgaagatattcggcaaggatttgcacaattcagggtttcttcaacatcatcagcatcaccaacaacaacaacaacaaccaccgtaacagcaacagcatagacagtttagagagaaactaccgtttgaaaaatggatgatagagctcccaagacaatagatgcttatccgaataatgggaacaggtttatgttttcgaacccagcaccaacaacaacacttttttgagtcctacttgggttcaacct

SEQ ID NO: 50176 - DNA, 497 bp, Arabidopsis thaliana landsberg
taaaaaaataaaaaaagtaatttgccgagtgtccacaaatgacactcgcaaaggagcctttagccgagtgtcccctgtgagacactcgcaaataatattttaaaatttaaaaaaaaaatctttcaagcttaggaaactgctcacgaaaacagtaattgctctatacatatgctttattaccactaatggaacggatttgtaatcatacgctcctatacgcttatgccattagcctagcgtcctctgccatcactagcgtcgagtgacacaaacccattggcagaagcgtaggaagaagacggcagcacacgtctgatcgcctcctgccctctttttatacctcttggactccctcttcgtccaacatccgagcctccgactccgcctcgccagaaccaagccacagccaccaccaccaaagcaacaccaatgacgcccctcagccacacagccccagcctacacatcccgacgaagaggggtgcccatggatccgcc

SEQ ID NO: 50177 - DNA, 438 bp, Arabidopsis thaliana landsberg
cgaagtagcgagaccgaacgaggcatggagtaccgccggcgtggcaaggatggcatggggggtggcgctggtcgtgcggtccgagaaaaaggttgcaacagcgctaggggtgccgaggcgagaaggccgggcatggtagcaggttcaaggcccaccgtagtcgtcactgtaactaggacaccagcgacatgggtggatgcggtggtaagggtggcgacaggggccgaagaaccgcgagcaggagcggggccagctccaaatctgatggggagaggtgcggcgcacgacctaaaaggggaggaggcgccgtcccggctagtagggatgggtgtcgccgcgaccaactcggatgaggtgctcctgcaacccccgtcgggtagcgctgctgagcagtaggacaggtttgcaaacagtggtgagggctagttgatgtgcgca

SEQ ID NO: 50178 - DNA, 783 bp, Arabidopsis thaliana landsberg
ttgctgcacaagaaacaaacaaacaagttatctaatcaagcatcacacaaactgttttgtctctagtaaaatcaatcaaaacattaattgataccagctgaatctgatctatatcaatcggatctttcattgttggcacattcacattagcagatgtaaacacttgttgatgcactacatcatgtggcacctcctaaacaaaacagaacaatttaagcaaatatatcatcattttaacatgaataataatgtatcttaaacatgaacacaaatttgtattatcgagaaatctaacctgatggatgacagaatgttgttcaaaagaaacaagatcatttagttcatcataaataaccgaattttttaaggcattttttatatcacaactctggatggtgttgcgagagcatgattgagtttgcctccaagcacggagagttacctcctcaatgaagatctcacaagctttagctaaaagaacatgactttccgaggttaccatctgagatattgacgtttatctcattcaacaaaagttgtctataaaatcaacaagaataacataattttatctgtcacccctattaaatgatccattgaacggtaaaatatcaataacaaattttagttgttatttttttataatgaaaaattaactccatgcacaatcaaaaaacatcaaaggattatcgaaagagacaattttggtgattttttaaaccttgacttgaggattagatttcataattttttttatcctagccaaaggtagatcaagcttgc

SEQ ID NO: 50179 - DNA, 2116 bp, Arabidopsis thaliana landsberg
agctaaacaccaaatttttttattatcaccagttgcaaaaactacgatatcaacaagagaaaactaaagcaaagacacgaaacctggataaaaggtgcaggcatttgatgataatcataactcttaggcaatcttctctcagtgacctgtttgagaatgctaacgaaactgctaaccaaatccttgtaggagttaacatcttcacttataagatcaaacaacggacaaagagtcgctcccataacaccaggatcattatcacataacctctttctgaaattagaaaccaaatgcgaaacagaagaaggagatttgcgatgaaatctatgcaaagccataatagctttcttcctcacagcttccttttgatgattaagcaactcaacaacctgaggcaaaaccgccggaatcgtctcctcattaatcaacctacaaatcgcattaagcgcggcgcaaacgacgaggtagttatcggatctaagatctttctgaatcgtgttaacaataaggataataagatcatgatcttcgttgagaaacaacgtcactgctaagtaaccagtacgcttgagaagaagattatcgtcgtgagtcatcttcacggcgtgaatgtaaccaaaagaagcgtcgtggcctagcatctcaatgtaaacgagtcgtataatgtactctttcatcttcctcttgggaatatctggctctaataatcttcgttttagtatatcgacctcgcttagaacgatccgatcttcttcagctttagatcgtgcttctccgattgatttgaccagatcgagaaactctttcgactgaccaaatcctccttgtgatcccatcgctagctctcttccaattgtctttagctgctccatcttcctctctcactcactcaaatccctagcaacaaagtttgagcggtgatttctccgattggttataacgatgaaacgggattgaattagggatttctccgatgagaaatcggaaattggaccatgcgaaataagatttgttctgatgatgattggtgccgtgaacggtggcggcgatgaatctgatccggtggagttctctcagatctgagactgagagagtgaaattggagatgagaaaaacgtgaaggagagaagagattttgaagtaacgagaaaagagttttgtgttttgttttgcttctacctgatacaccaggcggtcccccaatagcaaaagcaaaaccaacacgcgtgtaacagtaaaatttagaggtggtttaaccggaatccggttttttattcgtttgagttttcacggtaaattttcgattcggtttggcataaataatagaaaatagtttggttcggttccacaatgttgaaattttgaattcggtttgaaattgtttttaaaaattactaagattgaaaccatttttttattattattcttttagtttatgttatttacttatcttggactatatattattggagatcaggccagaaccattttgttgtttacaaaaatgaaagatgttcattaacaaaaactattgaaaaaataattacaaattacagtaagacctgatgccaaacttctaatatgaactagaataatataatcatttgcttcctaaaactttatcacttttagtcttggaccagttttatataaaccattaacctacatatttaatcattcaatttaatttagatgatatatatttgtatatttttggaacacaacctactatttttttgcactagttaaactaattcatacacaatttttaaacaaaaataaatgatggatccattcaaagtcgaaagtatattttttttccatcgcacttaaatgtttggaccagctatgtataaaacccctccaaagccacatatcgatttttaacttaggggtatacaaattcaaaagcaaatgatcctctcactggttattggcatgaggagggtgacaccccaaaaaggagagatattggctccattatggacattgtctcatatgaactaaaggctgatagttccaattttgtctatctaactgtagtagcgactgagaagagccttagtaaattttctccctaatttcaggttttagtgtatttccagaatttgtgtta

SEQ ID NO: 50180 - DNA, 1057 bp, Arabidopsis thaliana landsberg
gtttaaaaatttgctaagcatggggtgatccaatacctacctataaaaacgtttatccgaacatagctacacacggaccgaatgttcttttttggagttttttataattttattaagattttgggacatttagatctctttaaattaatatttactaaattaaagagagtagttaagatccttaccaataaacgagagagatgttaagatccgtctcatcaaaaaaagagaaagattttaagatccaagtcaggtcacttttatctttggtattaatctcacaactcaattctcaactcaactcaggtcaccgagatttaacacttataattttacactttgttttcttaatcattatatactatcttaagcatatatatgaatctttcaccataagttataccatttatatatgctaatattttctaaataaaccttacaaatttgttggcgctaacaaccattgtttaattttgcttggggtggctctagttatattatatagaccttaattttgcaggaggtatgtaacacctcatattgctgcagcttagcaattcatatatagcaaagacgtgtggacttctcacccaaagttccctagtttaaatgtgaatgcccctaaacaaaagttcttgctttcgatgtctaccttagatccgttaccgaataaagccagatttacctcctttgaccttactatatagccagctcgctgcctccacgtacaactctcaaaatgagactcgcgatcatattagttgtttacaacaaattgaaaaaataacatttcactcaaacaaaaaaagatctaaacagccgaaaaaacaagtccaatatcaaaatctgttatagcaaaaaaaaaaaaacgtagagtattttggtaagaaagaactctaaatgcctctacgatataatattaataagtatgttaccaaacaacttaatattagtgcaaaaaaccctttagtttgtcataagcagcaaaatctgccactataaagttgttttcgtgaggtcaagttgatgagagtatatgattctctgaagctcatgt

SEQ ID NO: 50181 - DNA, 730 bp, Arabidopsis thaliana landsberg
tataaacaacactttcatcagaagatccaagactgataacaggtgcagcttcctgaccagaaaagatgtctgaccaatacacaacagctcgagtttttctattacacataacaacaccaacaggactacgagaccgagaagccctcgtagctgcaccagcagaagtatcccaagatacaacactaaccaaccaacttttcccatcttgtaaaccactaccagactcttcattaaccaaaacaacaacaggaagttcaagaacaacacattttctcgacggtaaagtcgtcaaatgactccatacaaaaagtttacttccagtaataaaccaagaaagacaggtctctttatccattccaccggatacacaagcatcacctggagaagacggataatcaaaaacttaagtatacgttctgaatcatctctactgcttcaatctaatgcaaagaatactaaccaggataattttgttcatcgcgtaacaattgaggaaactctccaacgaatacaggctttaattgatctgaatcaactcctttgtcaccattgtttccaggagaaactctaacaaccatgaacagataaatcaatacaccaaatggaatgacttagaaatgaaaggcaaaattcatcacagtgaggatactatacctagcttgaaccgataaacgaggagcccaaggagcaggagttccagtggcgggtctatctgagatgaaattgttcc

SEQ ID NO: 50182 - DNA, 593 bp, Arabidopsis thaliana landsberg
agcagtgaattttaacattaaaagctgaaattgcgggtgagatagtaatcttctgcaccctaaaattatcgcagcaaactcacgtgcccttgcttaaccggaacaccggcttaccgacacgtagaaaccaacaccaatcttatttttacaatcagtgtcggtgaaacaaaccggtccggttcgtcacactcacgttgttcaagtttctctaccagaacaaaagcactatcacatgacaattctgacatataaaaaccttatctctagcagttataaacctaccaatcgaaacacgaaaactattaatgtgagtacacttaaatttcaattttttgacaacatttacttttcacaaacacaattacgtcaaataaaaatctgatacaaataaattaatatatcgagcgagtgattaatgggacattaatgttacatatagaaaaacaaaaaaataagttattgcctttatacaacaaagttcccaaaattttgaattttttgtaatcatctctaagattctgttaatggtctcgcctgagacatcatcatcacattaccaatcatctccaatggcaaaatacgcccgaacaaga

SEQ ID NO: 50183 - DNA, 432 bp, Arabidopsis thaliana landsberg
gctgagtagtctttatcactagcgctgacagtacaccttacatgatttctgtagttggctatagtaattgactgctagtcttcagtgagtgtttacttttcactcctacatcactcgttcgggtatgtagttgatgactgcatagatagattcgttgtcctatcatggcttacagtactgaacggccagtaatataggatcgtgagcatccgcttgctgccctctctctaatcctttattgttccccttaccgtcccgtcgctggtgtcatgtggttatcgccgtatcggtcatcgttacggcgctctagccatcccatttcgatttctcatcactatcctacgcgattcgtcaactatgtacgcccattgcgatggtgatggcgtaggatgattcggctggttaaagttcagtcactctcgaatctatgac

SEQ ID NO: 50184 - DNA, 584 bp, Arabidopsis thaliana landsberg
  unsure (1)..(584): unsure at all n locations
atgctacttcctagtccatatacccaattgggaaaatggaaagaagttcaaaagggaaaatgaaaagtatctaaatcttcatatcatattagttttccatattcgaattatgaattatatagtacaaaactccgtggacaactagctaattaacaagagattccttgtaatataaaactgcgatttgggtccatatgtttgccacatttgtttgtctcatctgatatgtgtctctagtcttaagaataatcacttccttcaatcattattggttatttcccttcttcattaaaatgccggtgaattccatttcttttttttttatttctaagtgaaaacatgttcatatatgatatgtcaactcagcaccttaagcggttttactgtttatttttcattatttgtagtgatatagtcaactagtgtctagcattttttttaaaaatgaataaacagatgttttgtgcacaaaaaanaaaaatatatatatatatatatatatatatatatatncagattttaatttcagttcgcagatgtcagcgaaagatatatacaagtaccaataggtattcgacttacta

SEQ ID NO: 50185 - DNA, 421 bp, Arabidopsis thaliana landsberg
acctcctcctcccactcccacatacgtatacaagtctcctccaccaccaaccccgacttatgtctacaagtctccgccaccgccaactccaacatatgtttacaagtccccaccaccgccaactccaacatacgtctacaagtctccgcctcctcctactccaacctatgtctacaagtctccgcctcctcctaccccgacttatgtttacaagtctccaccaccgccaactccaaaatacgtctacaagtccccgcctcctcctaccccgacttatgtttacaagtctccaccaccgccaactccaaaatatgtctacaagtccccgcctcctcctactccgacatatgtctacaagtctcccccaccacctactcctacttatgtatacaagtctcctcggcaccaactccgacatatg

SEQ ID NO: 50186 - DNA, 677 bp, Arabidopsis thaliana landsberg
gaaggagaaggacatggcagccttggagagggttgagagtgttaatagtcatgttgagcttatggatgattttctagaaatggagaagttagcttgtttaccaaatctatctagcagtaatggtagtatagattctaaagatggttcaggtgatcaaaagtcagaaatggtgattcttgatgctcataccgaccttgaggattccgatagaggtagtccagcagtgatgaaatttagatctagattatcaaaggttcttgaatctgtatctcctgatgctgacatacaaaagatagtgggggatataaaatgcattttgcaagatgtgaatgcttgtatggaccaggaaaagccttctgaggtgcatgttcatcctgaagaagtgtcagatttatgtccagaacaaaatctggttgaagattgtcatttggcagaacaaaagctgcagagcattcaccaagatttgaaaaatgctgcatctcggattcatgattttgttttgttgctaaaaaatgaggtaaaggcgggtcaagacacctctattgagggaaatgattttgtatgagctgattgagggcttatatgtcacgttcaaccatgttttaagcggtgataaaagtatggacgaatttgtttcgaatcttgctaatgtcttcaacgaggcgatggagcgaaag

SEQ ID NO: 50187 - DNA, 653 bp, Arabidopsis thaliana landsberg
gctactctcagcgtagctcaggttagagtttttatgtgataggaggaaagtttttgatttttgggtttaatgagatttgagcaactctcagtgtcggagatttgtttgttttttagtgttaggcaaaagtttgtcctggaaaggtcgcaggagggaaccaggttcttctgacaagatcaaggaaaaccggaataggagacatcacagaggtttcgagtgtgcttatttttcctcaccgagacatcgtcaaggaagatcttgtcggcaaattagacgtggtgaagcaaggtctgttttgttatctttagctgctcagtgatttatgagtggtttactattacaaattgtgcaagcattgcctagaaacacagtgcttagaaatttgagattgaaggttatatgcttagaaatcgtctctctaattatatacatcataaatcgatttattagtaaagcaattgtaaagcttgcttatgtatgttgtgtaatagaataaccaacatttttcaactttccagaaatgtatctgaggattacaagagagatggaaatccggttgaatttcaagaaaatggagttcgcactgaaatgcttcctcaaaagaatgatcaagtatctagaaccgtggtggatgttgctggtgtgaagggaga

SEQ ID NO: 50188 - DNA, 1288 bp, Arabidopsis thaliana landsberg
  unsure (1)..(1288): unsure at all n locations
cagtaacgttgaagcataatagaaatcaaagatatattctaaaaatttgtgaccatagtgataatctgcagtggtacaaaatggatgtatatctcttaactttgtaaatgttttatttcttgtttctaatcgttatttcgaggtctgattttgtaatctaaatcttactattaatgaaatatgtacatcattcttaagtttattaaatagaaagagaaatggtacactaaaaaatagtttaatacaaattattataaacttttttaataaggtgaaaatttcagcagatagtacatgaaatgtttctatcacatatgacatatggtagattgaatcgtctgctttattattgtaaattgcatattacattgtttattgaacatagtagattttgtgaatattatttttcactataatatagcatgttattaaaaatgaaggaaaaaagcaattaataaggatatgtccgagttgtaattatgaatcatcataacgtgttttaaacactcgtaacaaagtcatctgcagtgcatagtccgatttaataatagatttttagttttatatttccatcataaaagtgtataattatttgaacaatatccagagcttgttgtccatgttatattttccaggcacattcggagaaggtaatacgaaaattgtaatcaactcttcttttgtttaaaggtaatgcagttnttcactctgtcaacatcatctgtgagttgtaataaaattttatgcaaattatttttatttgtctagagtaaaattcatttattttacctagtgtcttgtttttttttttgttatataaatgaaaataattatcgtgaaagcaatttccacccaatgaagacaaggggttgaccccagtaacacctcctccttgtgaagcaatcatgaatcatctctttagccagcccgataccttcccgttttttttgttcttaatttagaatcccggtacgatatttagtgatacaacgattaacagaaccggaagttcggttcagtacatggtaaacatagcaaggtcctaaatagtagtattcaaattttacagccaaacttaaaagttttggttagattacacatttattgccatttttctttttttatttgtgatctatcacttaaataatgattttatcagtcacaaaaattcatagaccgttttcttttcattacaaatatgataaataattttactttatttacacaaaccatgcatacgttacatcaaaatataatagtggctctcttaaattattgaatcgttttt

SEQ ID NO: 50189 - DNA, 431 bp, Arabidopsis thaliana landsberg
gacaaccaaacattcaggagctgacataatttatacatttgtatctctctatcgtgggttagattttactgtacttaggctatttatactatccaagcaatatgtatgtggcacgcctatccttaatgcttatcacaagctttcaccctggactttgttatctgtcactactctttgacttttgaggaccaatagcaccctgccacgtttctttaatttcttggttgaaacctaattcctaaattcaccctggttggttcatattggacgagatgggagctaaaactctacaacctagctgctcggctccagattcacttgttgaatgtgcgctccccgcttgagaatcaacatatgcatgctgaaaggtatcaaataacctgacgattatgcgttatgacatgtctacgcagaacatgtctgactcttta

SEQ ID NO: 50190 - DNA, 638 bp, Arabidopsis thaliana landsberg
  unsure (1)..(638): unsure at all n locations
nnnnnnnnnnnnnnnnnnnnnnnnnnnnnnnnnnnnnnnnnnnnnnnnnnnnnnnnnnnnnnnnnnnnnnnnnnnnnnnnnnnnnnnnnnnnnnnnnnnnnnnnnnnnnnnnnnnnnnnnnnnnnnnnnnnnnnnnnnnnnnnnnnnnnnnnnnnnnnnnnnnnnnnnnnnnnnnnnnnnnnnnnnnnnnnnnnnnnnnnnnnnnnnnnnnnnnnnnnnnnnnnnnnnnnnnnnnnnnnnnnnnnnnnnnnnnnnnnnnnnnnnnnnnnnnnnnnnnnnnnnnnnnnnnnnnnnnnnnnnnnnnnnnnnnnnnnnnnnnnnnnnnnnnnnnnnnnnnnnnnnnnnnnnnnnnnnnnnnnnnnnnnnnnnnnnnnnnnnnnnnnnnnnnnnnnnnnnnnnnnnnnnnnnnnnnnnnnnnnnnnnnnnnnnnnnnnnnnnnnnnnnnnnnnnnnnnnnnnnnnnnnnnnnnnnnnnnnnnnnnnnnnnnnnnnnnnnnnnnnnnnnnnnnnnnnnnnnnnnnnnnnnnnnnnnnnnnnnnnnnnnnaaaaagggggcgccccccccccccaaaaaacgggggggggccccccccggggggggggggttttttttttataaaaacccgggggggggggggt

SEQ ID NO: 50191 - DNA, 937 bp, Arabidopsis thaliana landsberg
  unsure (1)..(937): unsure at all n locations
attacagattttacatgtgtttttttgagactataattagaagatgtaaaattagttttgttcaagattataaaaatagtatatcaatgttgctaatttggaattgaaataataactaattcaggtcgttgacgttgtcaacaactttttggttttaccatacttgaaatgtgatgactgattttctacagtctatatgatagctctaaataatgctaaacatcacttcctagtactgccacaagcttaaacatatcgtccccgaattttagaggtacaaagctcagatatttttaaataatattgtgtcaatgtatcatgctatcataaactcaaaaacattcatgttatttaacagcatattgttgaacagtaatatatacaaaagtaccacaaatctgtgttcctcatagctacatatcagttgctgtttcggtgttgcatcgaagatggatcaaagatgggccacgattcgtcaagaacaaaacaaattttccaaaaatagtatccgacacgttacttggtgtggacaccacccaaaaaacaattctaatcttaaatctcaaacatggataagataataggttttgtatttgtctagtggaattaaaaaaatatcgccacgatcattattcgactatgacccaaatatatcaacctctgccctcttcaagatcagatctaccatgaaagtgtgaacacattgatataatagaaacatataatttaagggtcttatgaataaacaaattatatatatcgaaaaaaatatatacaatcgngaacgtctaaacttttatatattcacgggttacgtaaacttttcgtgatttttttggtttatacacaaaacacatcttgttctttcataagaaatatacctnttttgtccgaggcaagaaggtaattataatagaacatgaatgaacaaaaaaca

SEQ ID NO: 50192 - DNA, 342 bp, Arabidopsis thaliana landsberg
  unsure (1)..(342): unsure at all n locations
cgggcggcgncgaggcgaaagccgtccacgccctgtttcattcagaactggcccaccttgaccatctcggcgcgcacggccgggttgtcgtagttcaggtcgggcatggtcggcgcgaagatgcctaggtaatgcgtttgcgccgcggacgatttgtccgtcgcgtgccatgccgtgctgccggtaacgctgtcgctggccaggtcggtgtacttgttctcccaggtgtaccactcgtggtacgggcttttggtgtcctgcgcggccttgaaccatcggatctcgttgccggtgtggatgatctccatgtccatgatgaccttgatgccgtgcttgcgcgct

SEQ ID NO: 50193 - DNA, 626 bp, Arabidopsis thaliana landsberg
atatccacgtcagctaaaaacgtcggtttgaccgacattcttacagacatgtggcaacgcccgcagatggtcgggtggccatttaagaacgtcgacgacctcagccgatgttcgtatgtccacgtggctcgcccatggagccccgaaacctgccacatggctcgtcgttaagtacgccggttttggaccggctggcgtacttaatttaagaatgccggcctcgacgttcttagtcggttaaatacgtcaaataatgtacgtcggttaagaatgttggtatacagacgttcttaacctaaacacgtcggcctattagagtaaaaacgtcggttcctgaccgacgttttttttggttttcttgtagtgggacacgcatgaggccaggaattcacagagcctgtcgacgaaggtgtggagggcagcgagacgtaggtggaggggtcatgctggacttggcatccagcaacattgacgacgcggagacgactacaacgacgagggaagacacataaaagggagtgaaatagtgaggtgagatttcgttgtggggagctggagcttcatcctaaggaaggtacgttcgccatgtggtcgtgaaatgctataaagcatcacatatagtttag

SEQ ID NO: 50194 - DNA, 545 bp, Arabidopsis thaliana landsberg
  unsure (1)..(545): unsure at all n locations
ataacatcaaaatttaattaaacgtcaattaccgtttcactcttccattataaaaagaagtaacaaaaaagttctccctaaagattttgcttgcctgaaaaaagtatgaattgcatcaaacaatttctcttggcaatttgcttttctctggccttaacatgtcaagaccatgtcttagtcggcggcaccaccacgagagacattatagtcccgaagatttctgagtggcaagtcacggttgttaacggtttgacaactggtgaaactcttttcatccattgtaaatctaaagaagatgatctaggtgaaattaatctgaagtttagagatagattttcttggaacttcggagaaaatatgcttcactcaacttttttttggtgctatatgaacaaagataatggtcatatgaatgtaaacgtgttttgggatgatgttatcttgttccatagatgcggttggaagaactgcatttggtgctatattaacattagctttaactttctctctttatttgngatttttcatcaatgatagattttttg

SEQ ID NO: 50195 - DNA, 5737 bp, Arabidopsis thaliana landsberg
tttgtgactttgactttggcagttgatggcaaaggattttgttttttatttattgccatccaattgagattcacgagactacttggtgaagaaaaaaaaaattggagtttacagagataattagcagtacattgaagtgtcttagtcacagcttggacctactaaaaaaatgaaagtttaacaaacaatttgaagatgacagtgtttagacaaattatgttgaatatatcaaatcaaaccaaacaaaaagagatatttattctacttagcaaaactgtatctaattttggtccttaatttaatttacctttctcgtcattagagatgtcttaaaaccaattcttatagttattcttatataggaaccagaaaatgttcaacagcatttatttatcaagatccagtcgaagaaccagagatcattttactttcttgaacataaaatgtggtatgagattctcttcagacagcaactgaggaactggtgtcattgagaagaccataaaaggtgtaatattcagaagtttctttaaacccgggaatcaattccgacaagaccctcaaaattgcagccaaatgctgcatatcattcgacgcgaatgctgcttctaggaacatcgacgatcgcacactcgtcacctgcaaatttgcatacacggaattaatcaaaaccaaaaccagatatagtgtactttcatctgttaagatattataccttatgcttctgagcatatcgcagagcttcaagatagtatccatcttgcacaagggaggagatgtaatcatggtgcaaggagagctgtctcaacatatcaagcccaagttttcttacccggatattttgacgaccactatccagaagttggaacgcgacttcctttgatggttcgattatctgcacataaatgtagcctaaactctaagaacaagaaaccttagaggaggttttgtcttcacagataaagaagaataacaaaccttgtttgtggtgaatagcgacagttctgcaaatcgcttactgtaagctaaaagtttgatggtcatcacatagatgttcaaatccactttgagtttttctgcacttatactgcaacaaaggatcaaagtaagaaactgcagaattggtaaactgagactagatctaaagcaaaaaccaagtttctttagtctctggaaacacaaacagacggaagaaaaagttagtttacctgcgaaggaactcggtgatgatagcaactaggtactctgattcctcaaccatcatttcctccacagaagtaaatacaaacttgtagagctcatcgggtgaaattgccggtgaagagagttgagattcttgctgttcatcagcacaaaacatgttctcctgagaaccagatgataggttcatctcaacttcttcatcaatattgcttccagactgcctatgtctttcgctatcttcagaatccaaaggttgataagttgagaagatgtgttaagagattgtcactcatttagcatattcatgcataaaataacattttcaggttcaaaggttttaccaggagatgcaccaggggttggagtagatgcagtggcgttttcgttctttatttccttgtatgtaccggctttaaccgagtaggaatatgctgtgactagtacatcgattgcctgagttacctgggttgctggtcgacgttccaaaataatagcccttgctatccccaagcacaattgtttggcctgcaataacgtaatcaacaccatcaaaagatccaaccaagattactacaaacaccgaacacttttcgtgaaccacttttcctggagacactataaattcacgtaatcatagaaaaagagtcatcaaccgctacaaaccattaaatatggaaacgagcactagttatttcctaagttagacttgcatataacttcactaactgcgcaaaaaccataactgaagttccaagattctttatcaattgtctatgatttattcctcaaacggtttgctgctacaaaacaggtgcttcatcatgtttattttagactcatattttgttttttgggcaaaattttaaactcctatctaaaacacagattaacagaaagtttggaccttatttgcttccaacttccttcgctgcaggaattctagaagagacgtcctgtctgagctgctagcggaaattgcctgcagcacatagtattaaatactgaacatttacgacatatctaagaattaactgtcatctggataaactaatgaaagccaacttgcctcaagatccaaatgtatcttccataaaaccttgtttgtctgatccagaataaggtctggaaccagaaaggtccagccatcttcatacatgactatgttttcattgcttgtagatgattctgagctctcaatttctttgttaacagcttgagacgatgtctcagagacttggtaacccctccacagtaaaggaagaggcgcagatacaggagctcgagaatccacaaataagtcgtagatgatgacaacctttgcatcgatttggtgcacaagcaataaattgtcgaccacattcaccgacaacttgcttgagtatattggtaaagaaccctgtaaataagagccaatccaatgaccaaataaagagcagaactttgcaaaatgatctcatgtccagaacacaagataagttgttttgcaatgccaaattagtaacataactaaagaaaaagtaatattagcatcaacttcgtataggttaccctcctcttgcagttgcaattagagtaattcatgtgtaatgattttcctatgaacttgcaacttttaaattttagaagtttgctgatctaaatgcacacatgatctttattgaacatatagtagacttgcctaaatggcatctgaataaccagatatcaggaactaaggaaaagtaaactaacttgttggacgactgcatcacggtagaacctgtatagatgcagtagcattgcctccctgtccacttgtaagcaatatattcggccatagctgaaagagaatgatacagatttactctcaaggtacgtagtgcgataatgacaaaaaataggaggaaaagaggaacacatagaagaatcatacacagtgactaagtggagatctccagcagagagaataggtttactgtttgattcagatctagccattgtcatctcaaatctcggtaaacgaacaactcctgcagtggaaagctggaaaagtggatcatattttaagttatttaattgttaactcgaccataaaagctgaatgaaaactgtagcatatatatcttaaggccatgaacatcaaattaactggatgcaacctatacgtaacaaagttggaaaagctctttcacatagcaaaattcatctttttgtacttttctaggagttcacctgaaatccattaaatgtcttgcattgcagtcctgatgcaagaagaaccaatcgagtttcatgtgtatagatgtaccaattcacattcgcctttttggtttccaccaaacgtagtgaattcaacatagaatcacaagcgaacaagtccataccactgagaccaaaaaaaaagatttcattagaggggaaaagaataagagaaagacaaatgataagcgaaatgttgaaagttatagtaaaatagacgagctgaagacagaaacaactatgtataggttgctctattgtgaaaggaatgtccagacccaattacccgatactgaaagggttatttgccttagaaataccaagtcaaatggtacaactattctaaaatcaaagcttacaagccaataaattcccgtttaaacaagttattagaattctcaactacaaccaatcagtctttaaaattcaactgaaaaggttgcaaacaatctcagaattggaaatatttctctgttgtcaaactatgcagaaaacaaagcaagtttacctggtctttacaattgcaagatcacataatggagagtcactccaaaagaatccgagaatgctctctgatcctgccttgcatttgtggttaagtatctgcttggtctctcgattaaacaactgtatttcacagtcagatctttggacagctatcgcttttttatcaagagaaaatctgattgatagaataggcccttcacttatagaatcaactgaaggaggtacgtctggattgaagggggatgtttcccatgaaaagacctaaatgaaaaaattgggaaataatcaaaggatatgaatcatcaggctaatggaagatatcagttatgggtaaaacaaaatcaaatcaaacatttcaaaggaaaagaataaaacacctgactagatgtggtacatattagcaatctgttggcatcatcatagaataacccattggattcaggaatattgcaacgtagggatggatgatgtatatagacatgtgataaagcaccagaaccaacacctgcctgtgcacttgaattcctgctagacatattcatacatttcagtttcccaaatttcaaaggaaccaaactttagtccaaaatgaaatgttatgaaatggatgtcccactttatgatgggactgagtcaattaaagtttttataaaaaaccacagactaactcagaaatgtttcacaaagatttgaaaataaaaaagaaaggcgtacatgttaaaacttcaagcagtgctgataaatgcctctaacgaaaaggagaatataattgtgattcaagcctttcctcggatctataagaaaaaaaaacatgataatagaacagattagtctacaaagatgaggataaaatgatcaagacaagactctaacaatatagttcaatataccgtatgctgcatacaactcttcagcgcaagaaactctttcaaacatatatctctttcaacctcatgaactttagatgcaacacagctcccgtagtctttggcctgtaacaagtttactttctagtcaataacaaggactggatcttcaagacacaatgcacacgtaaaagaattatcgcttcacaattgacataatataatttcacacattctttaaaattgatgtcgtaatataacaactagcaaaactatcacaaattcattacgaaacctaaaaaaaaaaaaaaagtaattggagctgtcaaaccaacctgtttagaacaagtagctaaaatccgtccaagtgtagaggcggtagtggaattcttttctttcatgcctgcattgctaaagctaaaaggaaaagtggaagtgttttagttcaaaacattatagaaacagtagatttaccaaatctatgtccaagtactgtgaaaaaaaaacacctacaaaaatcaatttacaaaaaaaaatacgacacagtgtcgctaagatccaaacttttcatatattatacctattagagggaattacaaaataaacaaagaaggaaatcggagactacacattaaacacacaggaaaatggaagatgaccaacagagaagtgttaccttcgaaaacccagatggagatgaatataaatacagtgatggagttgctacaatcagacagaagagtagtagtttcgagtttttgtacaaacagacctcctcggcttgctcgtccggaaattgatggttgttgctcttcttcaacgaacaaacgatcaccgtgtgaagaaactaatgaaaagggatcgacacgtgtgtgagatatgtcattacaattgggcctgtagacccattatggcccataaca

SEQ ID NO: 50196 - DNA, 685 bp, Arabidopsis thaliana landsberg
aacaaagatcagcttacataaatataaaggcacttattttatgcaatggattatgctttggattacgtagtccaacattacatgaaatacctgcctcttaaatactacaaaaagaaatattttaaacaagaacacatattcagatttataaaaccactacgtaatatttggtcccgcaatttccattgtaatcactatgaccagattaattattgttcttaataggctaatagctacaataaataaatgattaaataaacagagctggtgctagaacgatggagtttctttaagaaagaatgtcactactgctagagtcctccccatcgagctactgctgaagaagtgatgatattttatagaaaatatgtttctagatagttctcatcaacttatttgtttacatagaggtattttattgttttttttttcacttacaagtgcaaggcaactatcgcgttcaatgatattttccagtagcacaacaattttgggattcgcatttgggaggctagattgaaaagaatgattggtactttaaactatatgttttcgtcatccgattaagtgatttttggtttagcagtttctttagaagagaattatctagttcgagtccacctagaggacccggtattcttaaaaggaatatattaaagaatgatcccatgtctacaaaaattag

SEQ ID NO: 50197 - DNA, 913 bp, Arabidopsis thaliana landsberg
gctgccaaaagagaaaaagaacacgggagtaagcaaggggtaatctttgatcccatataaatcaacatggattaatagacaatagacatatattgatagttgccaaccagaaaaacatatatatgatgatgatagatatatgtctcgacagcaaaaatgatacatatcatggctcattcggtttctgttttatattaatggaaagtaactattaaaactttagaactgataaaccatggttgtaggcgatcaaattaagatatagaatttaaagatttcaaatattcaaaagtaaattactagtaaaaagctcatatgattatttcaaatatatacaaagatcaaatgttcagtaatgcatttacgtttggattaatccgcattatacgtctatacgagacgtaaccgtgatgcactcctgaattttgtaatacttttggatagactaagttttgaaccttagatcttagcgtcaagatttttcatttttgtacttaacccaatggtaaaggataactgcaatttttctaattagaaggattaaaattctatgtcatatatttctaattattcccacttttttttatttataaatattatattatagatatacacatatgtatatcatatggcatatttatacatgtgatagattgtagattgtcggtattttaactaatcctacagaaaatgctgaagcttcaggacaaacacaatgatacaaaacgaaagaatatgtagatcacgaaatccacctacttataatatattttgtaccaaaattctatattgatgtggtgaatcagaattattatcgctaaatttgtggtttggaaaaacttatattgtcccaacaacaacctttacaattacgaaaaaaaagatgtgttctgtgtttgaatataacatattt

SEQ ID NO: 50198 - DNA, 699 bp, Arabidopsis thaliana landsberg
ttagatttcattgtttatgtgttggttgtttgcataaataaatattttggaaatgacatattaagtgttggtgccactttcgttaaaaagcatcacaagattcagattagtgaaaataaaataaaaacttctaatccatttcaatttcttttgaaattacttatttctcttaacatttcttgagtctaagcataatttgttataattgatggaagtgttaatttattctctattatcaatgcaatcatataaattttgttaacataagtgatgataattatttgtatcattacataaacgatataaaatgatattgtgtttaccttttgatctaaaaaatcattagtaaaaacagaagatcaaacaatagaataagaaaacaaacaaactgctataatccaccatttctagccctctactctatattggtttggaacgatccatagctacctaatgaaaaggtgagaccagcaaaatgtaagggatactttttcatccctagttgaggtcaaccaattagtatccgactaagacatgacatttcgagatgattaatgctctaatggatcctacaaatttcccaattattcaaagtatttatgttagcatggtatttaagaggaatacgttagattggcattacaccaaatcaagtaaatattggactgctcattattgttcacaatccatatcaagctg

SEQ ID NO: 50199 - DNA, 400 bp, Arabidopsis thaliana landsberg
ttttttttttattttttttattcttattcttttctttttttttttttttttttttttttttttttttttttttttttttttttttttttttttttttttttttttttttttttttttttttttttttttttttttctttttttttttttttttttttttttttttttttttttggttttttttataatttttatgtcagttttcatttttgtctttattctgtcttttttcattttttttttatttttgatttatttgttttttttttttttttgtttttttttttttttttttctttttttttgtttgttttttatttttttctttttcttttccttatcttttttttttttttttatatcttttttctttgattttgtttttttttttttgttttttt

SEQ ID NO: 50200 - DNA, 935 bp, Arabidopsis thaliana landsberg
tgatgattggattatgtttatttttttatatttttttcaagcttaattaaatatttaaaggcattttgtgttaaatagataaacttacttattaatcataataacacataattttaacatttgacaaaaaagaataaccattttaataatacaaattgcttggggaaaagactaaagccaaagcttttaggaagaagggttgattctggtgtaagtcctctctaacttcagtttcagattgttgagcacatttatgtttactatggtagaacggagaggtgaaaagttaagtttttggttatttctagaatgttccagaagctatgtaccaagttttagaacagcctttaagcgaacaagaactcaaaggaagatcagatatacctcaaacacttcaagatttcatgtctgaagtcaaaagaagcaaatcagacgcaagagaatttgctcaaaagctaaaagaaatggtgacattgatggaacaaagaacaagaacggctaagattcaagagtatttatatcgacatgtcgcatcaagcagcataccgaaacaacttcactgtttagctcttaaactagccaacgaacattcgataaacgcagcggcgcgtctccagcttccagaagcggagctagtcccaatgttggtagacaacaactactttcactttgtcttggcttcagacaatattcttgcagcttcggttgtggctaagtctttggttaaaaacgctttaagacctcataagatcgttcttcacatcataacggataggaaaacttatttcccaatgcaagcttggttctcattgcatcctctgtctccagcaataattgaggtcaaggctttgcatcatttcgattggttatcgaaaggtaaagtacccgttttggaagctatggagaaagatcagagagtgaggtctcaattcaga

SEQ ID NO: 50201 - DNA, 1335 bp, Arabidopsis thaliana landsberg
tgacgtgcaaaacgatcatgagtgtttttacggggtaaattttttcgtttgatatcaattttttaaaacatgacattttactagctacaattgtcaatatatctaagagcttgatcggttttcccgcgtaattttgttcgtttgatatcaaacttcaaaactgttatgtgtcagttataatgttttaaataaattaataaaatatttttgttttggaacatttaaaccgtcgaatttaaaccaacataattcatgttgttgattaaaaaacgaacaaaatataattccactttcatattgatatcaaatcgattactaattaatcaaacatatatattaatatttaaaatatacttgtaaaacatattaaaaatatacacatataatcgttttggagttcatttgagttggaaacccgcgaaaaaaaaaaaaaatttagattcattgaaaaaacatgacaatatttatatggatcaatctgaaaactccacaatttggaacacattttgtttttcaatgtcgtcccatttcttaataaaattttcaaagatgaaaccatttcattttgttgacaagaagaagcattacatattagatttcttaactacaataatatgtttatagtgtttttataaactttaaacattttgcttatcttgaatttttttcttttaagttgttaggacacgttggtggaatccaagcaaaataacttacaattacatctgcaaactcttgcacctactcttatttgtatgtaaaacaatccagccttaattgttaccagctcattttttttttcactcatgcgtttgattgcagaaaagaacctatgaactttaatttcaaaacgtttatgacacgaactgaaatgccagaaagtggcagtctttcattgcactaagattggtgaaccaaatgattattctttaaacgttcatttcttcgaactccaattttgtaagaaaacaaactcagtatacggaaaaaaaatcaagtgttcacagcttgcagtacttgttgaaccagacagcaatgttgagaaagctttcataatccgtctgtggtctgcattaacaatcacaagaagcaaacaaatgttttaaaattaaaaccattctcaaagagatcatttaactatgaacaacaaaaaatggcaggctttggtgtcttacctatctaagggatgattggcattgggaaatacaagaactttaacctcaactcctttctccttcaacgccctcacgtactatatagaaaacaataattccggattagacaccattaccaatgagttttgagagtctgcaaacttgaacaagttgcaaattc

SEQ ID NO: 50202 - DNA, 444 bp, Arabidopsis thaliana landsberg
  unsure (1)..(444): unsure at all n locations
ttctctagtaggttccttaattagtttttagtatctctgccagagtcagacgcagtttttacagactttttgtttaaatatatcacaaaccttattcacgattatattttatactcttgaagtaaaattttcatcagtgtgactcggtctcgaatccctagttttacaatattgtatatacatgtaaatccagtatgatgattgatcagagtatgaaatatatatatatatatatatatatatatatataaactattcaaatgattaggggttgtatagattttaggttggcaacttcacgtgtagggcacggttggtgtgaaacaaagagtcttttacacaaatatttaagaacatcccatctctcgctgactctctctatattccaaattgttttaaatgcggtcttaactactttatagttnatagtattctgctgtagat

SEQ ID NO: 50203 - DNA, 737 bp, Arabidopsis thaliana landsberg
ttaaataactacaaaattgcaaaagaagtgaaacttttttattttattttttatgtttgttaaattgttggtggaaagcagtgcaacaaactttgaattcgatatcccctttatcacaagaaccacaggcttctccgaagttcacaccgaagcttattgtctacattttaaaatattttcaccttcttaaaatagcaatgtgtggattcatgcagaaggtgacacatggaaagagatgtgatgtggggttatcctttcacttcttttttgcatcattctatctactcttaggtttctcttctggattggtcatcgtcagagatttaccaaaggaaatcggtcatcgtcagagatgatgtattgatgtcaagtccaaagattgtgtctaagtcatggcattaggagattctcgaacaaggcctaatactatagcgctttttacttaatgggccattagtggaattaagctttacacccttaatgggcttaattgtttgtaaaaatgagctcatcagtaacgggctaagttacactttgtaattgcgtttaaccttaataagttaaatgttataaaatataaaacaaatgatgacaaaaaattaatatttgtggaatatctaaatatgtataaattggtataaatatattaaactaaagaaaagtatgaaatatatgaaagatgttttataatacaaagacagtggactccatttccatatgtcagcagtaaattagat

SEQ ID NO: 50204 - DNA, 1006 bp, Arabidopsis thaliana landsberg
ccggaattttcaagtatatcacaaaagaatgttcacactttaccacatgaaccaaggaatgtttacactttaacattttaaagtatagtttatggcttattcttcccttctagtgttgtagggttttaaaccccacacaagaccacaaatgtatatagtaacattttgtgtttaaaatgagctaagactcaacgtgaattattcatttataactcatttaccaatcatatccattacagctgtatgtttttggtatcgataagtgtgttagggcaaaatatcaccatggcttttgatcactctcttccgaatgagtttttcttcatatattattattcttagctcatagcttcatccaaataagttagttatcgacgccggatatatatcatgctgcctccaaaataattagctaagagagacctaccggacaattagtaatttatggtaaaaagcggcatggattaaaagtttctttttattttcttgttctttttagtgttgttgaatttgcgataatgattccacaaatcgtgcattggcgtggccatattttatacttcaccgcttctcttgtgtggccaatgtaaagtctttctcattattatactaatctcttaccatcttatacataatgtattttaattaattgagatgaatggatagttataaataagaatatgttaatgtgtcgtgaaggaacaaagcctgttgttgtcgaccccacaagttgactgatcgtgttcatcatcatgcatggcttcgtttcacttatttaattaacgacttgttcacgacacaaatgattgtaccagtttaagaatctgttgatctctcttcatcatcaccaaatcttccttgagaaatattctctccatcatcaagtgtctccaacctatatatatatatatagttgcacaagttcaagaattatcataacaacaaactaacaaacaacaacaacaacaacaagaaaggcaagagttgatcagttagagcgatggac

SEQ ID NO: 50205 - DNA, 596 bp, Arabidopsis thaliana landsberg
cagcttgaaacgcaaaaattgcttgtcgtattgtaatcatgctgtcaaagcaaaatcatattacgcgacaaagatcttttagtatgacggtacaaaacaattctgtgtcactgaagtgtcgccataactcataacaataaactcttctcatgacacgaatttctccaagtctttatgtcatcacggctgcatgcaaatacaatctcttaatagctgtgaccatactcctagctccatgctttgcaaacaatgtgggttattaatagatgtgtcatcttcaaaagagactctcaactagtagtggatttattcaattgtcaaaagacattacacaatgaatcatgatatccatcattgaatcaatcgttttacaggtgttcaagttgttcacgcgagatatggtttaacaatcgtgaagccgatcaaactggctcgactgggatagacagaagatcaacattgttataattatcctcattgttgtttcaagactatgatcaaaattcaaaccattataaagttaataaaagatggatatagtggtgaatgaaaacttgtgagatgtccatataaaattattaaaatatactatatag

SEQ ID NO: 50206 - DNA, 789 bp, Arabidopsis thaliana landsberg
gatgaatccaatgagccgacatcttaacttaggataccctttcatgtcttcgtcgcctctttgtttgtttcctagtcaatacctttttctatatatccaatacaatagagattaaagaatcgagatctaaaaattgacttataaatcttatgcattgcatgttcatgattaacattttcttttctataatttttaaaaaaaaatgataggttaacatcagacaatacaatatccattccactcttttgatatcctacatgctacaatcttttaattaacaaaaaaaaacacgtacaccaataatttattgaaacatttttgtttttaaaatacattctttaatcatatattcccaacgtctctctgcaacaacacgcaccaccaagctagagagctctctccctccccatgtagtttagggaaacgctccccacgcgctaatacgcgcgtacacatccactctctaatgatacgacgtcgtcttggtcttataccgttgaccaatacacatgggttttacaaatatacgtattcatatactcatctctctctctctctcgtttcagtcacaagactctcacaacaaagcgattttttggcttcacgaactcaaagctatctctctccctctatctctgaggcacgcattttcgtctgtgattctcgagctcttttggggtttctccgagatttttggtcggttcttcacgttttgtttatggcggtgattacgtgatgaaagtcaccggaaagccgtattcgacggcgacattaccggcctttgagtcg

SEQ ID NO: 50207 - DNA, 601 bp, Arabidopsis thaliana landsberg
ccgccatattagaaagaatttagtgaccttaccttacaaatactgatttgtgtgaaacaaaatggatcatacaggtgaatgatttcaaacttcaaagtaaacaaataatgaagtatataaaatatacagccagcgtgagagatacgagtacaagaagagtaacgaatttggataaacaccttaatatagtatttgaatgttccactggtgtcatggagtattcggttggtgtcatcaagtgggttgtgaattccggggtatttcggcccaaatgatagatcgtgaatcatatggctcacgtttacgtttttggacccgccaaatatctgttcagagagtaaagagactagttatatactaacaaggaatatcaagtagtaagtcagtgaatgaggtgcaaacacaaattatgagagtaatttatcggttattgataagttaaattctagctttatactttctctgttgacaaatcaatggaaacaaacgtcaataatgatcatacggtactaaattaaactactttaacgaatctgaatttaaagcatgttcttagtaaggggatggttaataaagcgagatgaggataccaaccatgtac

SEQ ID NO: 50208 - DNA, 909 bp, Arabidopsis thaliana landsberg
ggtttgcttgctacgagccatttagtatccgaagctttgagatttgtgaataagtgatgaagatttgtgagatttgatgaagaagaagaagatgttgagactaaagggatactggattggtttttatagcgaagcgtatacaagggaagtatttgttttgcgtcgttagatcttttatttaatcaacggttgtgattgttttaattttagtgatccgcgtcacgtctaaagcagccaatcaggttagttttctttagcgcccaagttttttagcttccttcacaattttttagtttttttatttaggcgcgtcttttaaacctgttcgctaaattttggaacctgacagtgaaggcctctatgaaataaaagcccatgttgtagagtctaggttaaggccgttaatatgttgtgtatcagtccacgaaattataatcttagtttctgctgatgtggcccatgtagaataataatatcattgacgcacgttaactattattaacgtgtgagtggtgtaaaatcagccaatcaggctttaaagctagataaaaaagattgagagttgagttagttgattgatttgaaattgattactgaagcaataatgttttatatttcttacatttctgtttatttaataatacgtgttatactcacaaattaaagtgtctgtaattttgtataatgtgaatacttacaaaatgtgttgagaaaacgtcattttaaaagtttttttagttcaattttcacttaaaataaattgagagataagtcaatcaatagaaatcttatccatatacgtatgtaaatgttgtcagattttcttaatgaactctgtatcaaaaatatatcataatcaaagtactctagatagaggtaaattaaacctttagtattcatttatgaaac

SEQ ID NO: 50209 - DNA, 555 bp, Arabidopsis thaliana landsberg
  unsure (1)..(555): unsure at all n locations
tgttgcgagaattcggtttcgacgatgaagaatgatagcttccctttgtgactcaataataccagttgttatttaggaacaggggtcaccctcattgtttctttgcttttagtataagtagtttacttttatatgatcaaaatgcgaaagaatagttgctttctcaaacttttccacatgaaaaagggttccaaaagagaaccgtatttcaaaaaatcttttgttttacccttactgaatcatggttcagtgcccgaaaacaaaaggagtcatctcaaacaaagtaacaaatagctccattgattacaataaaaacagacagcaaaccacctgaaacaaagcttaatgttccaaatctaaaaccaactcaaacagtttttgaatagtcccaaactttccaccactctcttttcagcttccaataatggttccatnnnnnnnnnnnnnnnnnnnnnnnnnnnnnnnnnnnnnctgaatatgtcattgaacacgtagtagtttccctgattcgatatcacatggaacatctggacacaaaacacaagtatgtcagga

SEQ ID NO: 50210 - DNA, 1256 bp, Arabidopsis thaliana landsberg
  unsure (1)..(1256): unsure at all n locations
gcttggagcttctggctttacccgaggatggtgttcctagattcttactcgacattggtaaaaaaaacatcctattaatttactgatgatgagaaatgttaatttttctgctcgtttcctagaaattagtttagtcaatgttgttgtatgattccttttatttgaatattgtagttcaatgcacatatataaacatgtttgattgaaattcttttctaaagttttcatatttttcgatcatcagttagtttagtatctcgatgactgagtacaaaacttagttgtttagctttggttatctcgataattactaatctctattgcggttcaggttgtggatctggattgagtggagaaacactttctgaagacgggcatcattggattggtttagacatttcagcctcaatgcttcgtaagctccattctttttgaagggttacttatcattctctgtctcttgtgatctaagcccattctatctttaacaacgatgtagatgttgctgtggagcgagaagttgagggtgatcttttacttggtgacatggggcaggtatattataacttcactttatccctctcccttaaatttatgtgtggctattggtttatacggtatatagcttcacattattaattgcttatacatgtgttaccacgaccagggcttaggtcttcgttctggagttattgacggagccatcagtatatcggctgttcaggttttacgtctcacttatcattgacttatgttgctcatccaggtgttaccattctgtataacatatatgctacattgaccatatttttgaatctcatcgactgcatttttagaatttgttgtttaatcagctctcttttttttcatgattcagtggttatgcaatgcggataagtcatcgcatgaacctcgtttgaggctaaagtaggtgtaaatcattatactatagatgaattaattagaaaaatgtgttacaaaactgatattttacctatcaattttataagggctttctttggttcactataccgctgcttatcaagaggagcaagagcagtttttcaannnnnnnnnnnnnnnnnnnnnnngcgtgaattgattcttcgccaggccttacaagctggatttggcggtggacttgttgttgactatccacacaggtatgtgttgccaattccattgataagatcattcttctacagttaagaaaataagtaggtgttgtggacttatgagcttctcagaactctaat

SEQ ID NO: 50211 - DNA, 936 bp, Arabidopsis thaliana landsberg
aattgggtttaaaataaaatctaattccacgcatagggtgtgtaaagaccacaaagtctactagaccaatcatgggtttggggacactagtatagttttatcaatttaagagactaggctatattttattggtaaatgcttcatttaaaaggttaatggtggagggttaaagaagttttttagtttcttcctataaatcaattattttatttggctaatatttttttctgtcttgaatcacctgatgtctggccgttctgggtaacacctatagctagttagccatttaataatatggttaaaaaagttgaattttagtgcctttcgtacatgtctacgtatgactcttaatttccctttctaaagatatcaatatcatgaaatactatataaatataaaatcgttgagtagtctattatacatacgtaccgacatgaattttaaattaatcaactaagttgttaattaataaaaatatcacgactcatgtacgaggatctcgttgtgtttttgaaggaagtgggatggggaatggtgagcatggtggcggctgacagacggctactggcaaatgctctgcttgacgccggttaccaccgcatcgtcctcctctcggcatcggacattccacgctttaacttctccaccatttactcttacctcacaaactcgctacactcctacgctcgatgtctacgatcttcgcggaccagcaaggtctcggccgctactaaccgccgtatgtccaccagtcatcagatgcaccatctggcgaaaaggctctcagtggttctatatacaccgtgatgtagctttagcggtattatcggacacaacttactttagtgtattctacacatatagcctttgcaattcttatgacgttgagcattacttgtctacatttgtccacgccatgtgtcaggcgaacaatg

SEQ ID NO: 50212 - DNA, 639 bp, Arabidopsis thaliana landsberg
aacaacgtcagatggtgggaggacagttggtggaggggcgaagtaggcagtcaggagacggtaaacagcatcagatccaccagctagagaatgcagcgcacgaaggccaaccgaagcggagacaaggtcgaaggccgcgacaatggggcaaagatagcaaaccagaagagagccatgcttgattgggtgaaaaagatgcaccaggagcttcacagcctcctcacaagtatcctggtctactacgacaacatcagcgttgtctacctctccgacaaccccgtccagcatcaacgcaagaagcatgtcaagatcgacctttacttcgttcatgagcgtgttgctgtcaggatgtctgcgtccatctcctcccgacgagctcacaatttgtcgatatcttcaccaagggtcttccctccttgttattatcggagtttagctcaagtctcaacatctatcgtggctagaattttgacaggaggggtgtaaattactatgttgctattgtaacactctattgtaatgggccttggcaagccgatgtatcaccttatgtgatatatatcaacagccaaccctaatttagggttagggttctagactctcacatggtacacactagagattcgagtcaaatctggt

SEQ ID NO: 50213 - DNA, 720 bp, Arabidopsis thaliana landsberg
ctagaatatgtatgtagcttgattagcttcacgagaagaggcacctgcttagggaaacaagaggtttatattgtcaaagatttgacaagaatgcattcacgccagcatgtgatgactcaagacttgtaaagtcaacccagcaccaacacatgatgtaattgccacgcgtcaacagacataacgtaggacccttctgcggataagaattaccaaaaaattttacacaaaaagacattatttggatgagaaatgaatacggatctaggtaattaaaagtgtcggtctacaaatataacagtagatgctagaaatggtagggaatcatatgagtgataacataaagttaaaattgagtttgggagttgtggaattaagggtaacacgtgataatgaaaccaatcttcttatctcttcttcacttattgaatcatctaacgttatttcaatttttgttaggtacttgtaataataacccaaataaagcaaaaaaataataaaatcacgatctgcgtttcccctgagaaaaaaaaacagagagaggaaaaaaaaatgttgcagctgtttttcacgatagcgttctcggcggcgccgttaacgttgtacataccgccgataagatgtttgacggtgtttgtggagacgatggaggagatgggaatggaaggtagggtttatagccggagactttttcctcgagccagaattgcttggtcaaggctt

SEQ ID NO: 50214 - DNA, 550 bp, Arabidopsis thaliana landsberg
caagcacacacacacacataaagggtagaaaccaaaagaaagagaggtaaacctgtcattgataagctgctgctcagctttcctcacaacattaagaaccaaaggttttccctcctgtaacccatcaataaacaaccaatccttttcagttgcaacaacaaaaataataaatcaaagaacagagacacatcttcattgtaacattacctcagttcggtaagcaccaactcctaaattcagcttaactgggctaggatctttgttgtatgcaactgtcacctattcatttttttgtgaaaaacaaatatcagaatcactgacataaccacactaatcatcataattcatctcagagctgaaaatttggtgaaaaaaaaatgaattactaatcaaacgaaccaaattcagaagcataaacatcaaatcttatcccatttcataaaacatcatgtcattttatcgagagatcgtgaattcccacaatcaataacggatccaatgcgtatgatacacatatcaaaagtatcgtccaatatgtttgagaatgata

SEQ ID NO: 50215 - DNA, 516 bp, Arabidopsis thaliana landsberg
gtacatcaccgagtatacctacattcattataaatttcgtacttcattataattaaaatttatagaatttctatgagagtacaattgttaacaaaaaatttatcgaacgcaagttttatcaacgacacatccaaaatatgacttacgatcaactttcacttatactgagttgttatttcttcgattacaacattagccatcgggattttaatatattctatgattctctttcttttatatgaaaatgtcatgattttctttaaagctacctttggtttttattgacaaaagggaaagttgcctcaaccatgatctgttttatacaatatatttttgttctatcattgaagatctatatctttaatttgctaaacaagatctatctttccatagttgtgtatgaatcagtatattatattcctcagcaatcatatcgtttaaaacttttaaattttaaaactgaaagacattcttctcacaaagttgtggaccacggtacaaaatatcatgaatata

SEQ ID NO: 50216 - DNA, 2386 bp, Arabidopsis thaliana landsberg
ggactatagtccataacaaaataagaaatgccaaaaaaaagagattaaaattattacataaaccatttccactttaatggactcggaacaaaattgattttaagcccaagggctaatggaacactcccaaggaagagtagggaacctctcactgtctttgcaataatcgtatacgacgagattacgctgcacccacgcataatccatcttctgtgtcttggacaaatgccacgcgtcgtactgatcccaccaattctctgttgtggtagagacgcatgcagggaatggatccttccaacggcagccttcgacggcgaagtccttgtaagaagagacgaatggagcttttttccagtcagtcttctccagaccaccacgtgtagcccaatcgtcagcgttccaaatgctggagaacaagtacatcggcttctggttcgggaagaagtcgttgtttggtaccttatcactgttcttgtatactcgaattggtaccctatccacgaagaacctggtttgcattggattaaaccgggttatgcattgtaccaatcgataaaattagctttgattgaccaattcggttcgagttggtctagtttgagttctttaaagtttggttaagataggcttgctttggtcggtttgaactttaaaccagattggaatttttgtgtcggtcgaaatttgaatctgcaccatttaagttttctcaaagctaaacgtaagaaaacaggattgaacctattgtgaaattaatctgtaaactgaattatgttattgtgagtggaatgttggttctaacttcgaaccgatcataaacctaaggttccggtttctacccaaaattcccggtacagttcgtggtatctctatatatgtagccaactaattattagccaagatcaagagaggacttacacaagctggtggttattccaaagaattgagtaggtgtgataatccttggtcgggtcgaaccagagggaatgtcgcatctcccgattcccggttccgttcttatacactttgttctttataatgtaaggctgtccggttcggttccctagaaattcgaaatctatctcgtctctctccggtcctgccccattctccgaacacatctgctcaaccaaatttaatctaaaataattaatacaaaacaaaatcattggttatcttctttacaaaattgaaacattaaataagaacgacggctcacgtagtaagcggtgacgacgccggcggagtcgcctccgacgagctttagcttcatactaaaccatccgaatctatacatgtgctttgtctgaaatccacatcctgttttattttttatccaatcagaatatttaaactttcgatataataatcaagagactaagttaaaaaatgtcatgtagatttaagtaggaacagagtaagtatcagtgtaatttcgaaagactagaacggcattgatcctaaaccggaagcaaactggatttgaacgtaccggtgtcgttatctaaggaaagattccagatctctccatcatcggaagtcgtgaagtgattttcagaccacataatgttgaaattatcttcaaacgattgtgtcggtgttgctgcgatagaggacgacgccattagagccgtcatgaacaagaacagagccgtcatggcagaacagctcgttatgatcctcctttccgtctccattggttgtctctacttcgaatatttcgaagagagagagagagagagaggtaatgcaatctacacttgttccgtgagtgagaagagtatagagctttcttgcttttattataaagaccggggaaattactgttttgaccattaataattcttttaatatgctattgcgtttagacttttgatacggttttttttctaagattttcttgtaataatgatgtttacgataatttgtaaaagaaagcaaaaagggtaaatgaaaaagtttaattaaagaaaactaacagtaaaactcaatgatttttatgttaatcaagtgtaaactgtttggttataatacacacggtttagctaattaaaagccgaccggtttattcattaagttgctgagataggtcatttgaaccatattgatgagctagcaagggtactataggaaatatagaaaacaacagcagaacatggagaattggatctccaggctgccaccaagtggaagtgggatccatagaaatgttcatgtaaaagcaaaaccaaaaacattatttaactctgtactttaattctttggttaatcttcacttagtaaatctgatatgggaatatgtctaacaaaacccaaataatataggcgaacatgcttcggaacataatattttgttcaacaaaagaaagagttttgcttgcctctc

SEQ ID NO: 50217 - DNA, 977 bp, Arabidopsis thaliana landsberg
  unsure (1)..(977): unsure at all n locations
atataagtaactatcttagttttgctacaatgtcttcttcaattagaattttccaagcatcagttctatcacaaaccttctcctagatctccctagaatccagatctgctacactcttagatctttaaatcttgcctaagtgttacgaattccatagatcttgcattccctaaatcttgatgttctaagatttctaaatacaatgcctcgatttctcaaattcgccacagtttctcgatgatctccttcaaaactaaaagagtttttaactaaccaaatactcaaatactcctaatttgtattcttaaacctttaaccatagcctaaacaatacccaatttttaaaataataaataaacacttacattgtttttattgctttttttgtaaactatgaatttttttttgtatatatatataattttatatagatttcactatacatatgaagaaaattaatcagacacatattattagttgcactctcattttcttggaagtaggaaaaatgatataacttgtttaattgtacaaacattacccaattttttttattttatttttgtcgtattgttttggccgaaccattttcttcttttataaaatgggaatttttgcattctattttcgtagacaaagagtaaattaatcatttgtgagagataataataaactttggatgttcttgtctagtagcttaaaataaaattgagtatttttggtttagataaatgtataaatggtgtctaatgtattcttaccattggatgtttgacaaattacacatttctccattttcttttgagtaatcaaagggataagcattgtaagagtttataacgatggtccttgtgatgatctaaataatgcattaggcagtgcttgttgattaaagaatgatgaaatcctttaacactcacatgttaaaatattngttaacatcttgtccttatattgtaaagaaacttaactaactt

SEQ ID NO: 50218 - DNA, 626 bp, Arabidopsis thaliana landsberg
ataaccatcaactagaacaagagttaagttcatctacgatattagttctatgtgaatctatatctccctatcacagctgcacttacttgaaaagagtagagatcgatttctctgagatcgtaatcgaaaatcatctcactttctctacttccccatatgatttcagctgttttctttgatctcttcaatggactgatgatcacaatgtataacaacaacaaatgcagccaaatttacaaaaaggctttaacaacaaaaatctccatcacaaagaacaagaacaaaaaaattgcagtgattactatcataatctgtatctctgattcttcatagtcaatttcatcaattcgatgtaaaatccaaatccaagtgactagatttcaaataccgattcaatagatataataagaaaatgcaggacctggtgaagcagacatcgaaggagtcgtcgataagcatctgacgagaaatttcagcctgagactcgcctttctttcgtcaaaacggagaaatcggagcttccttgaatcctcccttcttcgttccacgtgctctgtccatgtctcacaagaaccactcgcttcgtcgtctccacggtgaatttgtcttgtaagctcgatgatgat

SEQ ID NO: 50219 - DNA, 619 bp, Arabidopsis thaliana landsberg
agaccttacaaataagttacgagatagattaacactaaataacgagatattgataattatgcattctaagcatcttcaacattaatgaaacacataagcatgccaaatccacgatgtcatcaagcgatatagaggattgagaaataaccttgtccatggtgtttttgaaacaagtcttgtgttcatccattgaggcatgtatgaattcatccatgtgatccttgaggtttgcaaagaaagtggcgttatcatccttcaccctcttcctgcatgatgatgcaggcacttgcggttttggcgggttctcggtttcgattttcttggtatccaccacggtttgatttgtctgggaagccatctgaaaacagaaagaaatctcatgaatacgaatgatccaattaagatattacacaaagcaatcctcacatctatcaaaaccagttatgttaatccaataatcaaactcaagtctcaagaaccctaaagtctcacaaacataaacaaattcacctaacatctaaccaaaaccattcggattctcaacaaccaaaataatcagctcaagcccagcaagaaaattaaagcaataatcattagcaagaaacaccccgtgatactg

SEQ ID NO: 50220 - DNA, 1021 bp, Arabidopsis thaliana landsberg
  unsure (1)..(1021): unsure at all n locations
gttagattttgtggacattcaaaaagtgcattgcctatttttgtacttgagactgcaatttggatttaaaagctgttctgctcaaagattgtctttaagccataagatctcaacttaagataagttaagtgctgaataatttggctgaatgaatctcaatgtaatgatgtaggaaggaaaggctctgaaaacactagcaacggctgctcggctcgacattgaagatttccttcagaagaannnnnnnnnnnnnnnnnnnnnnnntttgcatagaatatgattgattacataaaatggtattttcaagtataggaagttaacaacgtgagtgaatgatgttaaatgaaggtggaagtgaaagtgaaagagaactggagacaagacgaggggcttctcaagtactacggctatggaggacagatccgagctatgtagtatgtgggcttcaaatgggccttgaagaagatgagaaagtgcaaatgactcggcggctcaggttagctttttcccttctttttttttgtatttagccgatgccactcagtctagcttttgtttttaatctcaatcagttgattcctttggaaatttgaactctttcttcttttgttttgtccttaagagtttgttcaaccaaccccactgaatatctcattccatgatcacaggtagtagacttataattaaacaattgcatttaaatttgctttaaaagaaatgaaaaaggtgaagcgtaatttatggcgggggataagtagagtgaattgctgtgtgtgtttggttgggtcgagtggagtcggtggaagttaagatccacttattgcgcctatgcttcttctgttgatagaaaaaaagtgtcttaagattgtttgaaagtaagtcaaaagaagcaaaaaactaaagtgctctctcactaacaagaaaaccattttcctgattgcacaataaatttttgtgtcctttgttttgtcgtgaacctcaaccgaaaaaatctaaaaagcaacgggcacatgaagttttc

SEQ ID NO: 50221 - DNA, 539 bp, Arabidopsis thaliana landsberg
tttcttgcaagaaattagataaaagatttgctttgtaataaatcctaaaagaattaaactaaagtattacctctattcttaaatatttgatgttggatagttcacttttgaactaaaaacgtcaagtaaaaacggagggagtatttcttaagcaaagattatatatttttattttttataaataactaataaacattaaactttgagtgtggttattctcttaaacaaataatatggaaaatatatttaatgaggttatttactctttatgaagcatttacctaaatggataaaataataataaatatatatactgcatacatgctgagttcttctgtttgtgcatttaaacttgaggggaaattcaaaaccaaatttgaattgaatttgagacttagaaattagaatagataaaagaaaaggaaaagaaaagaataaacttacctctcatcccaggccctatatcccgaattttttgtttttgagcctttttgtgcaataattccaattagaccccagaaaacttgaatgcaattttg

SEQ ID NO: 50222 - DNA, 601 bp, Arabidopsis thaliana landsberg
tggtgacatgtcttgggaatacattagcttaggtcattagcagtgtgagcactagtcttctttagcttgcatgatgagggagttgccctttggctagctaagacaatccctgatccaatggccatatcttttttgtagcgcttgcactagtcttacttggggtaatgtccaccattggattggcccttatagtcatcatgcaatctggagccaaagctcacaccttttccctacctgtggccttgcccacgttcatttgtttcttgctgatggtgctagtggatctactcatgtcgcccctctcagacttgtgaagcttgagcttggtgagaccgtcttaataacatagaagcaatagatcctagttatcatggacgtgtgtcaccatgcgtcgctactcgacgatgcgcaacctaccgatcacctcattgacagagatgttgttgatgtcaagcaagtactcgatagaaatcatcacctaggctagaaactttggtacaactgcaacatctttcgtactacctcgacattgaccatgttgtcactaaggagacggagatcagaagcaagctcggtgatgcagttcatgaaatcttatgtg

SEQ ID NO: 50223 - DNA, 947 bp, Arabidopsis thaliana landsberg
  unsure (1)..(947): unsure at all n locations
ataaataataataattgatgttttttggtaatatttatgaagtatgggccttatttataatcacacgctgaattttgataaccttataattagaaaacgcattcaaaaaaaaaaaattaacaataagaaaatctatatagcctagtagaacggtcacaaaaacccacaaaagtatcaaaaactcgtaaagcatcaacgtttgagctcattttgttgttatagtcaaaatcattcaaagttattttgacaagacgtattggtaccataataacgcattaatacacctatacatttataaattattttattagttatacacgatggtagtacaagaatacatgtattgtagtagaattttgtaatcaattaatgtcacaaaattcaaaccaaacttcaatgagaaaattcatgatgctcaactagtcaatgtgtatgttatacgacaaaaaaaacatgcaatttgtcaattaccatcgatccaaaaaaaaaccctctaaaacgataagaggaacgaaataagtatggagaatggtgtgttgatttggaaatgttataatgaggccgagacagccacatggccctattgcttgtatgcatatcatctcatctcctacctctcccacacttctctttgtcatgtcactgtttaatttttgaatactcgctccatctctttctctggtcccatgatgcatcgatacgaatatacttgattgactgtttcttgtttgtttcataactatataccctactttaaaccctatttgatccaatattgatcttagatttaagatgatgtttcggtggaatatgnnnnnnnnnnnnnnnnnnntttgtaattaaataaaattttagatgatactgaaaaagtcacgacaatacagattnttttattacactataattgtttttcaataaaaagatggagttatgtattcagctctgta

SEQ ID NO: 50224 - DNA, 831 bp, Arabidopsis thaliana landsberg
gctgccaagttttttcggacgcgaatagattgccaaatgaagtagtaatatcacgtgaacattctgtttcacgttctgacgatgagcctcgtttctccttatatatgttggattattgtctatgtatatatgtatacagacttcattttgatatatttatgtattttttgttttcacgtcttacaaaatctttcataccttatatctgctaaattccattcaagcaatgttttaacttacagacttacagtgaatcatatatattatagtttaataagtctaaaaggtaaaataaaatatccattatctaaaatcatagtaaaatccattcaagcaatgtttctccatcatctattttactttcggtggtaaaatttcacgcttttgttatgtgtactttactagagacacaatgttgttttagagaaaggtagatacccaaattttattaaagtatgatacctaatacatctccagtcacatgattcacttactacttagtgaatatgatcatgtctggattgatttatgttaaaaatattgaagtacttctaaatatttgaatgtgacataaaattaacctttaaatatagatgatggagaaagaaaagactcaaggtccagctagtgtttgtctaccctgtttgatgagttcagtctgttcagacttcagagggaaacaactatcaaagaataggcaaaaaaacatgtttctggtatgataataattcggcacatacgtagcacaaagctctaatttattcatgattgtcccacgattttaactaatcttagatatttcatttggtatatattaaaaaatgattcact

SEQ ID NO: 50225 - DNA, 1160 bp, Arabidopsis thaliana landsberg
tgcttatgcttgggaaaaatggctttgatagagcctgagaaacttgttccagcacttcaggtagagtttcagtatcagaacaatctcactttttgcattgtgctcatttgctgttatgcttagagatgcattctgaattttataggtcaggacaacgagcccagctgcttttacccgtgcaactgttgttactgctgtgaaatattcagtagtggaacgacctgagaaattagatgaaatcatcttccctcagatttcttctttcctcatgctaatcaaagatggtgaccgtgtaagtgaaattttttaacccctttctcctgatacaacataaaacatcaatagacattggataataatgacactttgctgtgtaatcctaactttttctttctgttgttgcagcatgttaggcgtgcagctgtctcagctctgagtacttttgctcattataaaccaaaccttattaaaggacttctccctgagttgttaccacttctttatgatcagaccgttattaaggtaagttcttcagtgattcagcacagttgttatctgtgtcatataatacattagaaggttttatcttccatcgcctgagacatttatcttttgcagaaagaattaatcaggacggttgatcttggtccattcaagcatgttgtggatgacgggctcgagctgaggaaagcagcttttgagtgtgtgtttactctggtagacagctgccttgatcaagttaatccgtcttctttcattgttcctttcctcaaatccggattagaaggcgagtgttttggtcttcctctgatgataattaatctactgtttagccattttcttttattagcttataacataatctttgtttatgcagatcattatgacctgaagatgctttgtcatcttatactctccttactagcagataaatgcccatcagccgtacttgcaggtatgtttaatatatagtttccaaaatcattatatcagacacggaacataaagcagatttactgatccgttttaataatgtatatgatgtttgcagtactggattctcttgtggaaccactgcataaaacaataagcttcaagccaaagcaagatgcagtgaagcaagagcatgatcgtaatgaagatatgatcagaagcgctcc

SEQ ID NO: 50226 - DNA, 905 bp, Arabidopsis thaliana landsberg
atagggatggtctcccatgaaccatttttttttttttttttttaaaaaaaattaacaacattgttatttttttgcaatggggatggtcttagatctccagaagatacggcgtattgaaaagtactgctgatctgtccaatgtaagggctgagttggaactaacctttaatccactgagcgacatttgtcaatttcaaccaaaacaacaccaactggatgattatattgttttcttgttatttgattttcttgatgatatgtacaaaactataagtcttttttggtatcaatttagaccattagctaggacgcaacaatatgaaaccgtatcgctataagacattttaaacctagattttaatagttctactttcaaacaaatccgatagtttactcggcctcctatatcaaacaaatgaatcactatacaaggccacatagaaaaatcttatccctacgttatacaaatacaaattcacaatttttatttataataaaaaattcgcaatttgattagaacctttggttgttatttattgtacacataatattaaaatggtcaatcattgtctcgtcttgtagtttagcatatgtatggattacatagttttctgtctgttaccctctcacaagcataagcgtcgtctcgccaaaattagacactattcatatacacaaatatagatacgtatataaatatgtagacatttacaacttataaaagaaaatgaaggaaaaaacaagagtcggcggaccaatttgcatgaaataattattataattttgctaagaaatatccaaccgcctggaagtgctttgtttacagagaaagctctgttagaaccttataagggttctgttgcagaggttccgaccaaaagccagagttgtatctttatgtgaac

SEQ ID NO: 50227 - DNA, 959 bp, Arabidopsis thaliana landsberg
tttgactttattcagattaaagcaggaaggcttggtctttgaggccgttaatggaggcagtgttgattgcggcggtgaagaggaacaagtctggatcaatcgtctggtgaaataaagccaacgagtggcgaattttgccgtgggaagcgtatgcacggtggagcttgaggtttagaactgggtaacgagggtggaggaggagattatggcgaagaattgctgcgtggatttggagcacttcatgtactgaatgcgatttgtcgattagaactgcaagtttctctggcggcggaaggcggaatctggcggttgcggtggtggataactgattctgcggtagtgacgtggcgagaagtggtgacgaagccatcttctaacattttaataaaatgggtttaattcattaatgttgctttgaaaaacttcaggcccatatgctaacggaagaagcccattattcttgatcaattacaggcccatcttataaatttaaagatgaagacgagacgagtaaatgtagctaattaattaaagtatactgtattttaaaaaattctcaagccaagacaaatcgtggaaagaaaaaagaagcctactacttaacattacatatagagcatatagtatagtaaactaaagggataaaaaagattttggttggggcaaagagatcaaagaaagattttggttgagacaaagagatcatagaaaatttacaatatgtgcatgttcctacaactaaagtaatagtcaagaagattaaaaatttacatttgcaatcaaaaaaagggaagaagagggacaaaatctagagggaagtgaaaagaaaaagaaaaaaagagggaacgagccaaaagccgtgagacgaagagacatattaattgtgtcaacagaactaaagctatgctctgttccgaccttagtcatgtaacgctcccggcaacttctgttttaaattc

SEQ ID NO: 50228 - DNA, 557 bp, Arabidopsis thaliana landsberg
taagagagtttctgacctgagggacggcacagtcagcacgtgatggatcccaagagaagcagcagaagcattcccagtctttggtttgtacctctgaacgaggggccctgtgtatatccagtcaaattaagcatatttagacaaggaagaaggtattggtaattggtaagaagtctgatgaaaaggcgatagaaagtaagttacattcaagacgagagcatgaaccaaataatggaacttgcaaaattgtttaacttacctacgccactttccgcagataactccattagtatcttcttctctgcattgaagccaattcactgcagaacattgtttcttactattcttggccttcttgagatcctgcaaagagagaaggatggcagctatctgaaatccagctaattctatggcaacataaacttatgcttatccactatactgagagcttacatgcatgtattctgactggccaatttccaatggttcacccacaaaagaagtatcactgcattgagatcaaaacgcttttgtatgtcaaccaaataaaacaaagc

SEQ ID NO: 50229 - DNA, 722 bp, Arabidopsis thaliana landsberg
agaaaacgctgaagcaaaggtggagtcggatgctgtagctgcacccgaaaaggttgaggttgcagtgaaagcggagaaaaaggctgaagctgatccagtaaaggttgaggctgaaccagtaaaggctgaggctgaaccagtaaaagctgaggctgaaccagtaaaagctgaggctgaaccagtaaaggaggagagtaaacaagaagagaaagaagctgttgtcaccgtttgatgattaattaaatttgtgaaagtattttgaatgttgttgtatgtcaccttggtttgatttgctactaccagattggtttggcttttgttgttctttgtatctcaaaatgattcttctttgattcaattaaatataaatcagttttgcatcgtgaaaattttgtaatcaacatttcttaagtcgaacgtgttcgtgtgtgaatttaagatctctgattcttttttctccggaacacctacaatcgaaaacattaaaagatgcaaaatcccctgaaaactaaaatctttcatttgatcattgatctttttattcttgtgatgtgactccatcaataaagaattaatagatttcaatatattttaaattggaaatgtaaaaagcccaataaacgttagcccacaaaatcccaactgcaaataaaaagaaaaagacaatttccctgtccctgtccctgtccctgttcctgtcccatataataatgaatgtttaa

SEQ ID NO: 50230 - DNA, 837 bp, Arabidopsis thaliana landsberg
gaaatccacaatgttcaagagagctcaaagtttatttaaaaatgaagatgaaggactaaagaaggagtgagcaactacttataccctatttcccataaaggattcaggtactaggagaagttgaggcaagtttcacatgcaagtccctgtcatcatatatccatattataccacacctacgtctctatgtgtatttcttggcatcgactttctcatgaatgattcaaattttcatttatttttacaatttaattcacctaagattattatgcatttctcatcattggtacattttctgtatagcgtatttacatatatgaaataaattaaatatgtcctcacgttgcaagtagttaatgaatgtccccacgcaaaaaaaaatccctccaaatatgtccaccttttctttttaattccaaaattaccataaacttttggtttacaaaagatttctagaaattgaggaagatatcctaaatgattcatgaatccttcaataatctgaagtttgcgatattttccgattttcttcaagagttgcgatatttgtaatttggtgaccttaaaactttttttgataaagagtaaaacgttttttcttaaaagtaaaacttgattttatgttttagggttctagctcaactttgtattatatttcttgcaaaaagagttcgttaactgcattcttcaacactataaagtgattatcaaaaacatcttcatgaacattaagaaaaacaatatttggtttcggctagagcttggttttgcttggcttgattcacatacccattctagactttggcataaatttgatacgatagagagtatctaatg

SEQ ID NO: 50231 - DNA, 1141 bp, Arabidopsis thaliana landsberg
ttgattaacatcccagttatcaacacgtgcaatagttacctgtcgatcaccaaaaagtcctagttttagactactctttactcaatctttgtatgtatctacaatacaggttgcctaaattgcaattttgggtttttgataattaacagttatgttaaagtaagatcaggcccctacttatatgtaacttctcacgaattaggggctaactcaaatgaaatgagataaatttacaagtatctctgtacctgagtaactgtgacttgatccctcaagaactgtaaatcagctacaagaacctccaggctggctttagcattttccagattgtttttcagaagagctgaagcctgttggaacaacaaagattataagaacttattctatggtcccggagatttaaaatagcgaatagaatatgtttttagggtaatggacctcttcacaggaatattccagcatgacattagctcccaaccacaaacacactgagtctgtgtcttcaatgcaggcccgtgaatatattccttcagacacctcaaaatcagctaagagcgcctgcattgtaagaagaattccatgtgagaaaataatgatgaagaacacaagaatcaacagtaagtctaaaaaccaaagacactttcatataggaaagacaaaacatcgtgcccactacaatctctgtgtcagcgattcactgattcttccagtgaagcaagaactcaacatgttctgctgtcaccatcaaacaccacttaacactaatttaaggggccataggaataaataagaactctgattagtgatttcgacattgtcttttcaaccaatcaatctcgatcttcaaaaacagactttcaaatgcaagtaggcttatgagattctaaggaaatgttgcaagtaagactgactcgcgcagaagagaaaagaaaatatcttcacatgaacacaaaagcttgcattcaaagattggtaagaaatcaaagcacaacaaagttcaacattatggaataaaaactctggattctggattcaaaagtttaaataacaatgtttctacatttatatatactcacaatccatctcaaaaacagtagcaagacactgatcataacatcaaagcttaaccaaatgaaaatga

SEQ ID NO: 50232 - DNA, 690 bp, Arabidopsis thaliana landsberg
aaagggctaaaatgaaaatatcagacagcttgcaggaattgattaagataacaaacaatatagaattaaatcagttaagtatataaatagaaatgtgaacaaaaaaagaaagtaatttaaagctgagaagcatcattaacttctctaatctatgacctgttatagatatagtagaagcaaaagcaatgacatgtgacagctaagtaaaagtaaagatgatgacaccattaataaaggattctgaggttacccataagatactcagagaagattaattgtttcaacaagagaagtcagaatcttgagtactatgaatttcgttgatattttcaaaacttatcgttatgttgacatttttacaaaaacatgcatttttttcctttaagagtattttcacaattaccctttttactcaactttgtggtatttttagaaatcttcttacatttgtccaaaaaaaaaatcttctcacactgaagtttataggcccgaaatatggccgttaacaaatcacacaatgacatgaagctgtggctgcgtatctttgattttggcattttatttgaaaatgttacagacttcattcattgatgtgcacaaagcacaaaatatgtaaacaaaagaaatgtttcctcttcgtcattattgctccttttttatacaatcccattatgatcttacatgaatcac

SEQ ID NO: 50233 - DNA, 525 bp, Arabidopsis thaliana landsberg
ctcccttacttgcaactatgcattaattaagggaccatctgatcgctctaaagaatttttgtgcattcacaactttggtggataaattgagactaatgggatattaaactttcttgttctgcagccgacttacgtgttcatgaattctttaagacatcatatttcaagaaagggatccatcctcttccaggtgcccataagactcttcacaagctatcaaaatattgcgacatgtcagttgtgacgtaagtggcttaggttgtgatcttctcgttgttgaacgtttcaaattaccagttagttctataaagtataaaccgtatttgagtggttttaatatcattggataggtcccggcagaatgcgataaaggagcacacacttgagtggatcgagatacatttcccgggactatttaaacagattcattttgggaaccattttgctcttcatggagagtctagaccaaagtctgaaatctgcaggtgcatacaaaatcaactgatgaatctgacacattggcaa

SEQ ID NO: 50234 - DNA, 812 bp, Arabidopsis thaliana landsberg
aagactaccaactctgctcagaaatcaaattcagaaagtataaccacttcaatcaaatccaatacacgagcatctgcttttcctcgttcatcctcggttggaaaatcagtttctagtgctaaatgtacaactccaaaaatccctgaaacacgtgctagacctgtctcaacctcaagaagcagagtctacagttcaggtgacagatcaacgggacgatcgaagattagtaatgatgtgaatcctgtgttgatggggactcaaatggtggaaagagttgtgaacatgaggaaacttccacctccaaaacatgacgataacacgaccttgggcttcgggagaactctttctaggtcgtctctagacatggctttgaggcacatggtacacatcctcattcctttagccattgaagctagttagttagttatataacttgcaagctttaaattgctcacaaaattgtacgtttcgtttggcagaacataaggcatagcgtttcgaagaacctgagggtaacagtcagtgcttcgacaaactcgatggacaaaaacgagtcatcgtgataccaaagtattctcagctttggtggcacactctatggaaattaccacctacgtgacctgcccattattatcagatatagacgctacatagtacttatttcgaacttattcattagagatctgtatcctagtaaccatttggtggttaatagttataaacttatatgtatgtgtaccttttataagacatcggcaaatacaggttgaacctagcccagtcttaagagaagatatatattttttcaaaat

SEQ ID NO: 50235 - DNA, 1052 bp, Arabidopsis thaliana landsberg
ccatcgataattctccaactcattgctttgaattcagagaaatcgaaacagcttctttgttcactatttggtcattgaaagtgaccatttttcgtatcagaaccaaataaaaaaaaaagacaatctaagttggaaaattaagttgaaacacgaattcctcggtttctccggtggtttaagaaaatctttaaaatacaaaaaaaaaaaaagattagtctaagctgtgatattgaagagtttgacttcgatttgggacattgaactactctaagaaaaaatactctaagctgcattttacaggaagtaaggtgagagagaaatattaccagaaagctccagcgagtttgagaaggctcatcggtggccatctttgaagatagaatagatctcaaagctgaagaagaagaagaagaagagaagcacagagatgtctgatggatggcgagagttgaacaacaacagctctctcgcttacatacatcaaccaacaggcacgtgctacacagttggacaactatttgttaatcaagaaacaaatctgtaattattattattatttctaattgctaggaaacacatttccaattcagatccatggattcttgttttttgtatggattcacatgaaaaatgtctcgttttttttaaattttattttgtaatttttctatattttatataaaaaaatttacatgataatatgtagttaaacaaacaaaattatattacctacgagaataacatttttaaaaaatcacaagtttagtaaatattattttctcaactaatactacaaaatagtatggggacatttatatatttttatattgtataaaatgacagtgtactatgaaattaagaatcaatatagttttttttttttggataaagaatagtattaggtatttcaatattagaaaaaaaaaattgcaaaagagaaaataatacccataatagaatggacgagcgtttgaagaaaatgatggagtgttaggttaactttcttataatactattttttaaggctaattttctgctgcagttttgttaat

SEQ ID NO: 50236 - DNA, 650 bp, Arabidopsis thaliana landsberg
gctgaattggtgagagacttaagacgaagcttatcggcgacaccaagttgttgaagagcaagccagccgttagtctgaataccaaatgctgctccttccgatcttacagactctgatctctccaacacaacgctctttatgcccttcctttataatcatatttgtatgtttagttagtcaatagttcatgtatatgttttctaatttaaattaccttataattgagaaaatgaggagattatagtgaacctgtgaagagcaagggaagttgcaagaccagcaatgcctcctcccacgattactatgtccaattcttccattcttctatatttgtatttcctccaaattttatgatcgttatgtcctgcaatgtcgtggacttatatgtgggggttgaagccacatggcaatatggcatgtcgtggttgtaccttgacccgtcgtatttttcgttatctatacatattcattcacagcgatttttattggtatttgtcgattcatatatcaattaaactgtgtaccacacagatcgttatatgaaccaattctgaagagagaaaaaagaaaagaaaaatttaagcttcttgtgttagaatactaattttaataattatttaatatttctctgtatagtgatcaatgtatat

SEQ ID NO: 50237 - DNA, 634 bp, Arabidopsis thaliana landsberg
ataagaaccgttggattaatctgctaaaaatagacggacagggtccacgtcaagacgtaatgggaaggggacctcgttacccaaaatagaaagatggagttatcgtcaaacaagtcacgtctgggtttattgagtggggttaagtttttggaccagtctctctactttttttttcacccctcctctaatatatagtaagttactgttgtcatagactcttagtcattatgcattttaaaggttttcacttttcagcgtgcaaagaaaaatttggttcataccttatgccgtaaactactataatggattattatgttatttaaaaactcatgtagatgttatttaagtgttgtatcacttacgtacacactaataaatttcagattcataactaatatataagcactcaaactagttaacattttgtcatttgattaagatagtgactgggagtaaataactttcatccttgtaagttgtaaaacctcatgacaccattaaaaccatagtttagatgcctaatccaagataaggatagcatcagaagagaatatatagtccatcgaactagatttggaggagtgttgaagctagtccatcgaactagacttttgacaggttgatccactttttt

SEQ ID NO: 50238 - DNA, 1144 bp, Arabidopsis thaliana landsberg
gatcaataagcgctaagaaaatataaacaagtttccattgaaaaaactaatccaataatatggatatttacttgatgcaataaaaaaaaaaaaaaaaaagtggaggtgtaatctaatattaattgtaccaacatgaaagtttaaatccgcataattgatacattattaaaaagaatatgtggatattagttttaacttaagaaaagatatggtcaatactgaccatttgactatgtaaacaaagaacaaatactatactgatggagtatcataaaaagttacacagtccaactcttttaaaatcaaaggagaatattgctatagacattagacaatatagagataaagtttttatcaacttgaataatagaccacctaatcactgagatctgtctaaaaataataattagaagaatgtactaatttaatcagattattcagaaaagataaggagaatataggagggggtcacgtgagcacgtgtcatgagcagtgagtcggtgcgtcactagtcgtgagggaaagcgaaacgcacgaatcgcgggactgtgctttctccgcctgcgacactcttcgcgtcctctctcgtctcattcacgcgccatctcctgcacacactcgtacgttaaataattttattgtgtactgaaaaaagttcgaagcctattattaaaccttggttaagttcatacgagctagtaaaccggtttagtaggaatattttcatagcaataacacaaaaatgtttcgtcgatttggggtaaagaatttacgttcgtgttttcacatagataatatatcaaagagtgagtttgatatggctacgtaaaatagactagaattctatgttaataacataaaatatgtatatttttgttacatagttcaaaagaccaaatcatacatctaacatcattattatctaagtaaacaatagtaaacctaccttccaacgccaaaactagttctactatagtgcgttatcaaataatttgcgttacatacaaaatgaaagcttagaggaaatgaaatgaaattaagaatatttgatttccccttaatcagacagacaaagagaacgttggcgcgtggataccataaagcgtgtggaagaggaaactgaaaacattatttttttgttttt

SEQ ID NO: 50239 - DNA, 889 bp, Arabidopsis thaliana landsberg
  unsure (1)..(889): unsure at all n locations
tgctttcttgctgtttgctctttcttttgggattcatgttgagtatcttgaaaaaggctaatttagattgtccactgttctggtgggtacatcagtgtgaaggtggaaactctggagaaaaaagcttgtctctttttatagcccctgatgggtatgttatcttattatctcatcaaaatatgttttggtcatgagactgttgttaatcatggtgttttattttctaatttgtagttcatcagctacatggaattgctttagggggaagtgtgggttaaaaggtggagttcgggtgagttgcgatggttgagtacgagtacgagtacgaccaacattttatgaagtaaagcttgattatattttgaacttatccttattcctgtttgcaggcggatggtgggttggcatctgctgatcctatagagaaggttgaaagaaaaattacggtggagggtatagagctagaacctctctgtgatgaggttgttgtcttctttcatatgtttcttttgacatacttattcttattatttcttctgtgtctactgctttccttagatgatgactgaactttgtgaattcttcttttcgttgtagttatatgagtttgataaattttatttgtgttcttggttacgtttcagattcnnnnnnnnnnnnnnnnnnnnnngatttcacggaaaacactcgagagaaatcgggttatgcagaaaagaataggtgacgaggtagcttacgagtattcttctgaattggttatttttcaagatttttgctgtcctcagattctaaaggcgatggccactcgctgttccgatcttgattgcaatttagaattcctgattttctagctaaaatttttgacttaaggaacatgattagttctgat

SEQ ID NO: 50240 - DNA, 1050 bp, Arabidopsis thaliana landsberg
gagaccggctttagctttgtaatattgatttctcgttttccattcgattagtagttttggccagttatggactcatggttctcacgggaaaatttgtcaactagctaggtttacattatttaagtctcaggttcgttagaaatttccattgggaattgctctgttctggtcctttgaggttggacctggagtcatgtagtttgctactgtcataacacttagaaaacatatgcaagctggtgcatgagagaatcttggataagttttgcttgtaaactagtttatcgttttgttacgttcctcaagtggaatgtaccaagacatgatgattatattggatagttttagaacatatgtataccattttgttcggagaacaagctgcattctggcttatctttatgttttctttggacctctttaccctttgctgtcctctaatcgtgatgatatttcttgatttctataggacaaacatgaagagaacaaagaatgcaaggaagatgaaagccgtggctaaagctatagcgttgagcgagaagtatgaagcgaaagctacaaaggacaaaaccaaaaccctcagaactctttcggccaagaaattgtacgagtgattttggttaaaaggctacaaaagaaggaaaacagttataaatttttgatagttcgatttgtctattttggtcttgttaacgtttatgttttcttctagaaagagcttttgcaattttgtaatctccttaagttatcgacctatagaagttaccagtgcttatggattttgaccagatggtaaaatatattctttagcaagactggttttcttaacaaatttccaatcttcataaagtcatatcttaagtaacaaagaaacaggcgttcatgcgagactactacttttaacattaaacaatcattcaaagatcaaagggggataacaatgtcaaagacctatccatatgggcgtgtattctataccacttttttttcaacaatgagcttttttcacaagatttgtggtttttccaaatcaccttggctcggtctact

SEQ ID NO: 50241 - DNA, 513 bp, Arabidopsis thaliana landsberg
tatatttgttttaaagtaaatcttaatgattatattaaatttatttttattaatttaaaatttttaaaattagtgttgtgattttatttatttttaaaatataaaagttaagcccatgagatgggccttgacatagttttttttgttagtagtccaacaaaaaaatacccattgcggaccggcccgttttacacctctacctggatctctaaaccaaatacccgaaaatctaaaatatcagaaccaaacccgaacaagtatccgaatgaccagccctatttggttttatttagaggtgtcaaattgttacataagatatctacttctcccatttcatcttctctaaattgaaatggcaactgagagaggaaagctcatttggtgagttatcccatctcaatctctctctctcaatactctctatcccatctctatcaaagtgatttattagcttatagtctttaagtcacatcatatgtacatgatttgaagtatctaggaaaatcagaaaat

SEQ ID NO: 50242 - DNA, 208 bp, Arabidopsis thaliana landsberg
gaaacttctccagtctaaacgcaaaaccgagctcaacgagtttggttacagcgctaccgcggccaaaggcagggcagggacctagaaaatcaacacggctctcactcaccagcccgctaggaggaacactagcacttggctcaaggaccaagaccacgcaaatagggtctgccgaaccatcagaagacaagatcaatcaccacaaggc

SEQ ID NO: 50243 - DNA, 445 bp, Arabidopsis thaliana landsberg
atccccttttaaaaagtctttaattttagacatgactttaaaaattcacgagccatgttggttacaaacttacaaaaactcgtcggcgcatgtaaaacgcggtcgtttaaccgaatcgaatccaaacacgtgcgggttcatccacaccgttaagtttcatctgacgctgtttacatcaacggctaagatttgttattctctcttttcgtcaacgcattgttaccgtggcgccagatatgacgtctatatacgcgcataaaatcacgtgacaaacacgcgctcaacaaaagctggttcttctccttttgctctccgatgactttcttaccgaccagtttagtcttcttcattacggtatcattcaactatacatttcgccgctgggtttaattctctattgattcagaaccaagtaagaagaaacctttatgattctctttgcgat

SEQ ID NO: 50244 - DNA, 951 bp, Arabidopsis thaliana landsberg
gcaactttactgttgctaagctagtaaaccctagctcggcaaacgtttgctacttgtttctggtttttcgagaaagagtgtggatatatcttgaatgttgaatgaaacaattggtcatcaaacactgactgattgttgcttcagtactaattcccaggaacaagtgtggacagatcaatggatgaagaagaatgtaatatatcactgtttgattattctgctgagagtcatctaaaggcagtggaatctatcactgatttatgtggtgaagctaatgctgacattgatgagaatgatatcaacatattgtcatcatcagttacattcttgaggtgcgtaaagaattaattatgtattcatataagattctttctattgtaacttatgttgaagtggttatagaaagtgtttctcaatgtggcggtaagagtattctactagacgatttaacactcacaaatctaattcttgcctactgaatttttgtatagggaatggaggcattataatttcgaaccaaagagttttgcattctacaacgaggctgagaaaaaccatcaaccaaaggatataaacagtcaaactttgcctcaattttcttcggcacgagctcccaaggttttgtgtaattacgctaaaaaattatttctactttggttcttaactctccatttacttcttaaattgcttcaacgacaatgcattttttaatctctactcttattggtgcaggttaagatacatgacgatgagtcatcatcatctggtgaaatcaggtaatagttaaaatatatatgagctgtgatcatttaagctgttcaacgggttctgctggctagcaaaagtaatcttgaccatgggagatgaacataggtttccccagttagatgaatgttaattcactgctaaagtgctaatttaatgttcaatccgaaccaggactaggttgct

SEQ ID NO: 50245 - DNA, 544 bp, Arabidopsis thaliana landsberg
gcagtatgcaatatgatctagaatataattcaatcacctgacatccaaatgaaatttgcggacagttcacatggtgacagcgacagccatataagcttcataccaacttcgttcatgatacgcctcccaaaacaacccaagacaccaaactaacgcaattactccaaatacaagtgctggataataccaatcttgagaccatgacaaatccttcaagatccaaatgtagttgtgaatattttcggtgggtcgtgtcatgaaataagcctgactgctgaatggaaatcggaatatgaactctggatcagtttctttggtgttattaaacttttcgccgatttcaacatctttaactccgatctcattgtcgatcagtggcgccgagcggtggtcattcgctcattcatgtgtgggccccaaatccctacagtacaacgtttgttcaagtggacagtatttacatttcaacaataatcatacataacacattatatgcacatcgtcacaatacaacactaataaaaaagtctcttcccttaagccc

SEQ ID NO: 50246 - DNA, 492 bp, Arabidopsis thaliana landsberg
tggcggaccgtgcaaagtcagccctggttcgtcgagcaaaaggataacgttgccgtggcttttctttatctgggcaaacttgacgaggaaggaaaagaaccaaatgaaacctgctgatcgctccgaaaacggaacggtaacgccgtgcagaccgttctcgactcgcgcacgcgccacgggaccgctgttgaagggcgcgggatcgcccgacttgccttctgagaagacgaccttaatcttcagttcgtcgttctgggtccagtactcgaaaatctgatcagtgatccgcagcgcagccgcctcgcacttggcgtttaattcttcaaaatgcgtcgtttgttctaaatcatcgagggtcgtaccggcatattcaaggaaatcgagaaagacccgatcgccgctgtccatcgccttgccattcttatcggcgttgagcttgttgatcgacaactcgccgctcatgcggtcgtagtgcgaaaaatacatgaacct

SEQ ID NO: 50247 - DNA, 1112 bp, Arabidopsis thaliana landsberg
aaacgcaaatcatgcatgaaatatggttggtaccgccaagattccgattcgtgtttacatcctaaacgcacataacaatgcttcacgtgtccttaaactttgtcggggataagtaattgacaccattcatcgataaatatccactcacaagtcgtactgttgctaatggatcccacatattaaattcgtattagccatcgcagccgacgcgagacttaactccgtcagaactccgttagactatagcgtttgcaaatgccctcatttacgccctttaataacgaatatcctaaccaccactaaacgaattacctcagaagggtaaattagtatttaacagaaactcttgggacccgaatgaattaaatgggttaacgcctttatgtaatgtcgccgtcaacttacaacagtttcttcacggcttgtgcaatgaaaacgtgccggaacttgtaacgaacattgtagtttgatttttgtaatcaaccataggaataaatcatttttttccgcatataatttatttccctatttctattcgtgacaaaacatttgaggatataggaaattaatagcctataatatgtttgaccataaaaagaatttcttcttcttgaaccatcatagattgattttttaagaaaaatgtgtgtttagtctatcgatcagttttgtgttaaaaaaaaaaaaaaaagtctatcgatcagttaggtgtaaaaaaaagaagttacaaaactcgtgacaaaaacattctatattggacacacatcactgtcacttcagactaaataaaaaaagaacacgttatttcgttttctttatttattcgggagaggttaaaagccacagaaacttattggctagaattggttatttataacaacaacacatgagcaaaaagctcaaaacatctatatactctttggaatatatcctcgattttttgtacgtgtaaagaagtcacacaagaaaatcttgggttgttgtaatcttcatcacactagtatgtcaacgggacaagcgccggagaagtccaatttttctcagagatgtagtctgctcaaccggtacttgaaggagaagggaagttttgggaatattaatatggggttggc

SEQ ID NO: 50248 - DNA, 452 bp, Arabidopsis thaliana landsberg
atatatagaagagaagtaaacaaacactttatgcctttatttgaaatcaaatgacaaatgtgaaacaatcaaagtagatgaagcgactaccaactattcttctctttttacagtttacatggaacagttttatttttccttagataattttttacatgaaagttgaaatattgaagcagagagaattttatattgtttttttagcacaatattttgcatagattgaatccaaaacctcggaagtctaattgtataggagtatgtatttgtctagagacaaaatatgtaacaacattataaatatatctagctttgctttgaaaattggattccgatcggattccgtgatttgttttatggtgtttgatgtttgactataacttgagacaacaaaaacagtagtttggctttggacataagctaagtatgtatgtaccaaatgtattacatgc

SEQ ID NO: 50249 - DNA, 529 bp, Arabidopsis thaliana landsberg
ctacaattttcaaatttttacccaaccaagtatcttttttttttttgtgaacattatatattctgttgtagttatatcgaatcttcatctactggtggagaaatatcataattttgttttctttaatagagagataaaccttttgtggagtttgtgcacatgtgaagagtgaagcaaaagcaaaaatggatacggatccggattcttaagctgcttaatattggagaatttaatggcttaattcatcgtttatcaacaagaaaaacaattgaaaaccctacaagtgaatagtgatggaaaaaggttatgatggtgagtttgtatagaagcactatttggtgggggaaacttgggaatcaaaaactcaaagagggattacgtacataatagtcaaaaagcaacaaagattcgcgtgcttcctatatgtgtttatgtctcagtttaactttttgcctttattcaccccagccatgagtttgagtataccacttctcatgcgattcataagaactgcattataccatatact

SEQ ID NO: 50250 - DNA, 394 bp, Arabidopsis thaliana landsberg
tcggtatagatccagtcgatggaacagggaaagggaaacaaacccctcctccggtgttggcttatcacccaaactcatttgacctagacaaaacgcctatacttgtgatcggttcggggcttggtgaaaccgctcggaacccgttattcccaccgtgtgcacctcccggagtgaaccaccgagagttctttcgggaatgtcaaggtcctgcgtggcatttcgtcgcgaaggattatgggcatttggacatgcttgatgatgatacaaaaggtattagagggaagacgtcatattgtttgtgtaagaatggtgaagagagaagaccaatgaggagattcgttggtggacttgttgtatcatttttgaaagcttattttgaagagatgatcgtgaa

SEQ ID NO: 50251 - DNA, 1000 bp, Arabidopsis thaliana landsberg
gtaccactaacattgtcatctatgcagagaacaaattcagaaacagaaatcatagttccttttttgaaaaaaaatgggaaaaggaaattataaattaagtgatgtaagagaaaatacgagacacaaaaatttgttaagagaacgagagatcgattggctatttatatgtgggaacaaaagttgatgaaaagtttagactcactcccgtcctctactgacctcagcaaggagtgtgacctgttgatagtaaatgttgaatggcacaatttaaattacgaaccacaatgaactttttgacacctaggatttgctatatgacacgtccactataaaatatattagtttacatttcttattcggggaaatttgtttatgaaatattatttttaaaaaagaaaagcaagagaaaagtgtagctttttttatctcatgggaatattatttgtagtggcgacataatggtgcataaagttaatttgtctgtattttgtaaatatattagactaccaacaaatcttgctgttttaacacatatatgcgtttttatttgccacgagtatagtgtaaactcttgttattcattaatgttcaggaatcttgattatttcgttgacgttttgtcttatttataggaatcgaatgttctttccgactattacaaaaatatcggaccaatttaacaagaaacaagatttatgtagtgcatgattttatatacgtggactgtttttttccagcaaacactaaggctatttccttttcttttttgctaatcactaaggccgtttatatatatggtgaaaatagagtggtgccattatattatgaacatgataaaggtcttacgttcacatttatgttttggcatatttccatttcattttactagaaaacaacgcaagaaaattgaaaatagattgagagaatcacttatttaaggatctacaatgatgttatagcagcctgagcccaaattattatagaaaatacaaatcacgtc

SEQ ID NO: 50252 - DNA, 912 bp, Arabidopsis thaliana landsberg
tcctttgtcccttatttttatctttattcttggtggtgaaaatttatgtttcatttatacaagctaaaatgtttttgttataagtcaaacaaaaacaattattattaataatattggaggcttttattgtacttttggtttgaaattttcgaaactacgtctcttaattctcatcctttgatattctgtgcaaatgaatttttattttccatatagatagatattattttttttgttggataacatttacagtttacccaaacttgtaaacatgatttcaccaaaaaaaagcttgtaaacttgaatggaaaaaaatcagagtatataaaagatagtcttaaaattggacaatgaagtaaatgtggccctcaatatccggcatttgcaagcaaatcataccatctacatgtatatatactaaaatgaaatgctttattaggaaggaaatctttgaacagaaaaatagaaataaggtaagacaagaaaaaataacaatgaattacaatccacaaatcccaagaatgagaaaatttttaatttcctaaagaatattttgacacgaattcgacatgtataagataaaactattaattatttcagacgcctatatataaccaccataactcttactctgttaccaccacaaagacaaaacaaaaaaaaagaggaagcaattactataggggaaaaaaaaatctgaacaaaatgatgaaactcctcttggtggtggcaacttctgttgcccttatctttagcgtcactgatttatccggtgagggaccaaaacatggaggagaatccatgttgacagtccaaatccctgatttccgtctgattcctaccaccggagctttgggaccggagagttttggctttgattttttccgcgatggtccttacaccggtttattt

SEQ ID NO: 50253 - DNA, 579 bp, Arabidopsis thaliana landsberg
  unsure (1)..(579): unsure at all n locations
ccccacaaacgctgacattaattgcatctatattctccaaaatagtggttctgcttgtggatttaggtagttcatcctcttttattagccaacccttggcagcttttggtcctagattagtagctctatcttagtctgttactgtcaaagtggcgaatggtcagattatatattgcactcatcaaattcctcgatgtcaaatgaacattcaaggccatatcttctgtgttaacctcaaggtgttacctctacagtgttatgatgtcatcttgggtatggattggctatcttcccatagcccgatgcannnnnnnnnnnnnnnnnnnnnnnnnnnnnnnnnnnnnnnnnnnnnntggtaattctacaaggttagtgaactgattgctccaagttggaacaagtgtcagcctttcagttatatcatatggtatactatggaagtgcaactagttctggaaactcccaacatacaacttctttctcaggagatccaaggccttctatctgaatttacctcttatttgcctaccaagggctactctcctagatccattgcacacatactctcatcctggggta

SEQ ID NO: 50254 - DNA, 820 bp, Arabidopsis thaliana landsberg
tctcctcgctttgatctgaacttcttcttatctttttacacattgtcctatgctcatagatacagaaatggaaacaactagagccatcaaactcaaactctaagaaatctcctcccttgagatcttcgtccttcacaatcctcttccacccattaaccataacgaatttctcagtatcatcatcaccacaacatttctttaactccaatttccaaatatttccagaaatgcttctaacagttacagtttcaggcaaagactttggtaaaaatctggtgaaagaaatgggtagtacctgcattatacaatctaaaagtttcaaccaaatagaaatctacagaagaacatctcagaaaaacccacaaaaaaaacagagagaagagaagagtgttttaccatatcatctccggactcatcaggtaagtaaactttgaagaattttggaacacaattatccaaagaaactcctgttcgatagcaagaaaagatcaaaacagaggatacatggtgtaaatgtagaatcaagaacaaaaaagaagaaacctttgttcatcttcacttctgtctgctctttgtctagatctctgtgaaaccctaattgtttgatttaactgaaggttaatatgcgttctccgatcttattgtttgatttagtgtttttttccttttgtagctaaaagcagagacttgaacgcttattgtttcaaatggaaaaaaaaaactttactaactacatttactttaatgtagagctgagatttggaaccctaattataagatgagtacagttcttcaaaccccagatttctcagatagtacg

SEQ ID NO: 50255 - DNA, 693 bp, Arabidopsis thaliana landsberg
gaaacaaccaaccgtgaattaacctgttgcctctgtagatttgctacaacttttgtagcatccttcctcgtctaataaaaaaggggacagattgttcgctattcaatcatccaatgtatctcaaaaatgatgtctttcctatacggagaaatgttacctccaagttaagtttagggagacaagtaatcaagagacgtagagtatcctctttaaagaattcttgagtcaactgtgcacaagcttctgccacaggctctgcttcgctgttcccgtagagaatcgacttcatgtcacggatattccggcttaattccgccatctgcaaccacataccattaattcaattggagcacaaatggcatagagagaaatgacattattgcaatgaagataccaaaaccaaacaccaagaagaattcaacaattcatggaagaatttgcacacattgaaagaatcatcttttattggagaatataaataaaaatggaaccttttcgtcgcgtttggaatctcggaggtcaggcaaagaggtagatcgatcggagaagagaaggagatcgcgggtttgtcgaacaaggtcagcaggagtgcgtggcttagacttgaaaagccctttcatcttcgcaccgccgatatcagattgatccgacggttctccgccgtagccagaagagctaaggctaccgctgagg

SEQ ID NO: 50256 - DNA, 1036 bp, Arabidopsis thaliana landsberg
cccgatcaccgtaaatttctcattgcttgcacagacctttgacattttttccaaccccatggtcgccaaggtcaagtgagaatgacgaagatgaaaaccaagaggatgcgattggagatgaagaagcactcaaatgatgcctggcgcatggatgtggaagcggaagaaaagtggtttgagaaatgtggtgaagatgaagaatttttaaaacgtgaaagcaagagactgcatcgagatctattaagagttgctcctgagtatattggaggttctgattctgagagtggaaaggcatttgagggatgggactctgttgctgggcttgaaggtgtaactcaatgtatgaaagaggttgttcttatacccttactatatccagaattctttgataaccttggacttacacctccaagaggcatcctcttacatggacatcctggaactgggaaaactcttgtggttcgagcgctgatcggttcccttgctcgtgggaatagacggattgcctactttgctcgcaaaggggcagactgtttgggaaaatatgttggtgatgctgagcgccagttgaggctcttgtttcaggtcgctgaaaaatgccaaccatccatcatattttttgatgaaatagatggtctcgctccaaagcggtcaaggcagcaagatcaaactcatagctccgttgtatccacattactggctttactagatggcttaaagtcacgtggctcagtggtggtcataggtgcaaccaactaccctgatgctattgacccagcattaaggaggcctgggaggtttgatagggagatctattttccactaccatcagtcgacgatagggctgcaatcatctcactccacactaggaaatggcctaagccggtgtctggatacttgctcaagtggattgctaaagaatctgccggttttgctggtgctgatatacaagctctctgcacacaagctgccatgattgccttaagtaggagtttccctttacaagaatctttggccgctgcagagttgggagtgt

SEQ ID NO: 50257 - DNA, 699 bp, Arabidopsis thaliana landsberg
actattaaacatcgtttattatggttttttttttcaagttaattaaacaattgttttggatttaaatccttatataaattttttatgttaatttcttttgacaatttttttaatagattttttgatgtgcttatccgtcgaactgatagatcacagtatgcaacaaaaccggaaagtctaggagaatgaaaatctgaagactaattctgccaaagacaaatgatctcatgcaaattcaaccataccaactcatgactctagccacgatgtaatatgatgtagttaacatgttatgtgttctttaatatcaaacatcttctgtttttcttcatcttttgtttcttttagcacaagccgaaggatttgatccctctgatgctgaaacaattgaggcggtagatgagagattgattgagcaaatgaatgatcatatcactgactggaacgatgtagaaggcatgctatctgcgatgcaaagtaaattgaatttgacaggttctcactatgcgaaaataagaaggaagtatataatagttgaaaacgctatagaagtttcactaccgattcttgagcaatcaaaccatgccaaatttgacatctacaatacatgcttacgactatattgatacatgattattgtcaatcaactcgagtgttaataaaactatataaatattaggattatcttaacaacacttg

SEQ ID NO: 50258 - DNA, 1445 bp, Arabidopsis thaliana landsberg
  unsure (1)..(1445): unsure at all n locations
tctccaacaagtatggttcattttgattctaccaacctttcttcttctagtaaaagttcacaatctcaaaatttgaaaatccgcaaggttaggaatcacaggaattctggattcaagagtagggatcaaagtcctcagaggataaaggatcctccgcctttcgacatatgttcttcagtcctcgaaagaaatgatacaagtataaaagattggattttggcggatgaaacaaacagagaaactgttgaagttagtaataaacacaaagttataaggcctggaatggtgcttcttaaagacttccttacgcctgatatacaggtaaaaaactgtgaaaatgatcacataatccacatatttctctagtaaagtaaagagttgtacatgcttataggttgacattgtgaaaacatgccgagaacttggtgttaagcccacaggattttaccaaccggggtatagtgttggttcaaagcttcatctgcaaatgatgtgccttgggcgaaactgggatcctcagactaaatacaggaaaaacactgacattgatagtaaagcaccagagatccctgtcacatttaatgtcttggtagaaaaggcgatccgagaagcacatgctctcatagatagagaatcaggaacagaagatgcggagaggatacttccagtgatgtcaccagacatttgcatagtcaatttctactcagaaactggaagacttggtctccatcaggtgttgtgcagtttgactttaaacctctttgaagggttctcttgacactaataatgcgttgttttgtattggcgtataactatggcaggaccgtgacgaaagcgaagagagtatagcaagagggttgccgatagtgtccttctccataggtgattctgcagagttcttgtacggagagaagagatacgtagaagaagctcaaggagtgatattagaatcaggagatgtgttaatattcgggggagaatcgcgaatgnnnnnnnnnnnnnnnnnntcaatcataccaaactcagctcccatgtctctactcaacgagtccaagctccgaacaggacgtctcaatcttacttttaggcatttctaatcatctttcaattttatcaaatatataaagaattattgaaaaaataagtaaatcctaaatttgaagaatttctctttattaattttaaaaatacataaaaatccaaaatctcaaaataaaatgaaaagaaatcgttgaataattttgctgtaatttaggtgaaataaaaatatagatgtgcaacattattttccttaaatttatgtatattgaaaaagaaacaaattttgttgatttcccaggtggtatatattactatcattaattaaaaaaaaaaaaaaaagagtaaagagagaagaggagacaaaacgcaacactcattgacgactttccgtttcttcttcttct

SEQ ID NO: 50259 - DNA, 957 bp, Arabidopsis thaliana landsberg
aaaaaatttccacatgactataagtattagagtattttttttcgaccacttgattttaaaatacgatgagggagaacaaaacatatatgttcattgcaaaaacgacatttctccgatcatagttgagccatgaaccattgccggttggtggaaggatcattgccaccgacgacttgtctcctatacctctctccggtccaccactcagttaaacaatagacttttttctacttttatataattattaattatgtatatatataatctatcattttcgaaattgagggtgaggggtatagataaggttgattcctctttctttattaatcatctctttaaagcctccttgacccacacacacccttctctcgtctctctttgctttcttcatttttttttgaacttttgcttttgtaatgtttttactcaacctaatgcctttaatttgatcatcaaatatatatttcaattaaacattgtaccgatctcaaaacatattatcatctttttcaaaactagaagcaatcctaactatattactgtagtcaaaataagaaattaatccaaaccgtagtgcaaattagagcatagttttctatatatataacaaagacaaaagcaatgaactggtttatagaaatagtaatattttaggtgatccctcgcattatttgatatatacacctcgactgatgccaacatagaatcacaaaacaaatatctaaacttgttaaataaagaaaagaacctaatacagtagttagctacttagcttatcatatgtaattacaaaagaattttatacttttcaaatacattttgttgttttcctataaccagtataaatgctaatagagacaacgcatgagacctctttgacgtgtgatttacggaatgaagctcagccatttgatcttactttactacaagattagttaacgatcttgatcaaattac

SEQ ID NO: 50260 - DNA, 817 bp, Arabidopsis thaliana landsberg
tcataaactcttttgaaactcttcactctcattttcatctgacctcaattcgtttaaaccctcgttaatcctcttcactccattctgcaataactccattcctctgcaaattccttctggaagtttccttttcttgttcggtcgtttctctacttccattgacctctggcttcttccttctagaagcttctgcactgttgccttaacctcggtgccttctttcgaaagtaactccagttcttcttctgaaggtgtgattgaaagaagcgcttgttctttctccaaaaacatctttaattccgacatgaaccgctctgttttcgcttcttttccagaagctatatcgaaggctagagccgcgtcttcaggtacgaatctccatagctgattacagcttgtacgtgcacagaagtatccaaacgcagtaaccgcgtggtgtaccaaagcccagtggcgtttcctgagaagcatatggtagagttcccaaaccgcaatgctctttggacactttttggtttcagacatctcgtatttgctgagtcctgacaagaagagagcaaggtttggcttggacttacgaagatgattatgatgatgattagtttctgaattgaatagcttttgaagctctgttatgacattatccatctcttggcaagtgtatagctgttcgcttcttgagatgatagataatgtttcgctgagaatctcactgtaacgttccttcgtcgtttcctctttggagtttctgtacttttgaatgagaaaaacgacaaagttcagagttttggcatcaatctctgatatgctcgtcttt

SEQ ID NO: 50261 - DNA, 540 bp, Arabidopsis thaliana landsberg
tagaaagtgaaagggagaatctccaatattgtagaaacttccagattcatgactcttaagtaatctcaggaccattttcagcttcgtttttctatcacacactatagccggtctccacctcttattcaccgggtgtaaccagtaaactcatcctcttcgctataaatgacagtcacagagccaccgtcactgcttacttacgccgcacgtcacatctctttttcttcttcttcttctattcctcccgagaagaagatgaaaaatgttgacagaagaaagagagcacaacctgggattagcaaaaagatagttttgcccttgtcgggagtgtgctctctttccttctgccaccatcattgcgcattgcgccatgttgtgtgatcgtgtcatgagcgtatgttatgtatatagatcgcgtcacaaggtttcttcactatcaagtaaggcccgtaactttgatcaatcttgaaaatgggttttggcttttgattcctctataaataattccctatttagaaaatgagcttttgttcaagattc

SEQ ID NO: 50262 - DNA, 1030 bp, Arabidopsis thaliana landsberg
gtttttttttttgaagattactctatttttttgttcataagattttttttctttgatatggaaatctctggtgggttgatttgaagacgtttgttaaggattattctattttgtctgttcataagatttccactttctctgtccctccaagcaatcaaataagacacacacacaaaaaccatctaagttggagcaaattgtctgttcataagattgtgcttttcctttgtacctctaagcaatcaataacacacacaaaaaaaaaaggaaagaaaatttgcatctacatcacttaagacattgatacatacacatttttttagcgctctcagaatctgacctttaatttcattgtggtttataacttgtagtacacgaaacttcaagagacttccttctagagaaaatcactgtcaaagcaaatctctcagagttgttcttaccacagaactctgttttacctacaaaaacagcaatgacaagaacttatatccatctctgaccaaaaccaaaaaacacttttgttgttaaatttaggtcaggagtaaattaacactcactttttcttgaagctgaggatgatgacgcggatggccacattcatcatacaatataaggccgctaaaccgaggcaattcacatttctcacccatcagaattggtcgctgccaaaccggatcaaccgcattaagactcctttctttaaccgcaagcaatggtggctgccgccttgtttccatctccatccacttcgcagcagagctccaacaaaaagaacccatcaacgttcttttcactttgctccacttacatttcctcttttcctccatagtccttgacccaaacgctgtttcagacgcccactctgcgtctgctacttgcttccctcgagaattgcggttgagaaacgctgcggctatgcagagtagcgttaccgcagccgctgttccgaccaagatcacaacggcttctttcgtagttagcttcagtttctcctccaacttccacaaggcttccattttttgctaaa

SEQ ID NO: 50263 - DNA, 750 bp, Arabidopsis thaliana landsberg
agtcaagggtttttttttcttgaagagaaatgaaagatagtgtgttgttgggttagagaagtgaatgtttattttaggggttttagtaatggtgtgtgagagagaagaatgggtcatgggacacttgtgatttccaagacaccaatgttgactgttctttttattgttttctctatttggttgatttctttcctggagttttatgtgatttgagctttcattatctacttttagtttaaaatggtcaaagatgactagtttgaaattctgcatgcaaagctaatatagaggcatagcttttatatcatttgtttattttgttaacgaatattatctcatgttaataacgaatataaaatttcatgttatcaatatttgatttctctctgcattgaccattgtaagaagaagattattttatattgcatattaatgtatttttaaaataatattaagctaaaatacatcaataaatttttaaaaagagagtacctaaactttattgttttgaacataaactttattgttttgaacaggaacagactcggcaataatagaacatcgttttattctgcaactgtcggcagaaaaagatggcttgccattagttccaaattgaaaacttgcaaggggagagattcgatcactgaatacaatctccaacgagaatccgtatagagatcaaagatggagcaaattaagatgagatcataggatcttaatcatgtactgatgtacttaagaagaacc

SEQ ID NO: 50264 - DNA, 513 bp, Arabidopsis thaliana landsberg
agcaatatagggaaactacagctgcaataattgtttacgatgaatggctagcttatagattcctttgataagcttaggctgaagattcgatattcttgtttctagttcttcatgttctctagaagaaacaaggttttgatccgaatatctgaatccattgataagagcaaagagattgcctgagtatcacatgtttgggagtgcattatcgttgtcactggtcaaaagttgatgcttcatcagataactctgccactctacagcttcatctatacatacaagctcatagtgtttcttcaagacactaatacacaagacctcatcagggtgaattccttccccgatcatttactggaggaaggaactaactttttgcaactgattgcagtgcgataacccccagactaatgaagtgtaagcaagcaaattaagcttcataccaatctcagccattttgtctcgaaagccaaagcctatagcacattcccttgcttaaaagagccatccattaac

SEQ ID NO: 50265 - DNA, 185 bp, Arabidopsis thaliana landsberg
cccctaaacccatgtgtaagtatgattacttgatacttgacagtctttcactctttattcatctttgccatatgcttcagagctttaaaatctgcaacaaaagtctacatttttatccgagaccggtaaacagagtttcatatcgaatcattcaaagtagtggatttgtttcagacctcagctct

SEQ ID NO: 50266 - DNA, 541 bp, Arabidopsis thaliana landsberg
tttttagccctcccagccgccagtattttctcacagtagtctaatttctcccgcgatttttttcctagtctttccagtatcacgtgaagagactctatataacggaaaaacatatcttagcatcatttgaggaaaatttccgagggaaaaaaaaactgtatatcaaatcacgcagttaacaaaaatgaatccttactcgcatataagctcttggtgttcaataatgtacttaagaagaatccgcaagaactgccttctaagcttgaagctactttgagcccatgtcttttgagccttccttgatagtgttactcgctcctcgacctggaaacacaaaagtgtaaatcatatctcaagataaggtggctatagccttcagagaaacctttgactttgagtaaagtaggaccattcttataaaattataaaaaaacatattcccttcacagcaaggacatcagctactaacctcagttggcgacagagcagggaaatatcccagatatttcattgtggcaggttcataacattgaactttttt

SEQ ID NO: 50267 - DNA, 970 bp, Arabidopsis thaliana landsberg
tacacgttgttgttcttggtggaggttcgtttggtactgcaatggctgctcatgtagctagaaggaaagagggattataggttaatatgcttgatcgtgactcttttgtttgtcaatctatcaacgagaaccaccataattggtactttatagcgtttgatttttatccaaacacaattcataattcttgaagacttcgcagtgataaggttgattctgttgccagaaagtattttcctgagcacaagttacctgagaatgtgattgctacaactgatgcgaaagctgcattgcttgatgctgattactgccttcatgccgtgcctgtgcaggtttaagcacattgagtatttgtttttagttttgttgatttgtttctatgttctgctgattaatgtggggttgttgttgcagtttagctcttcgtttctagagggaattgccgattatgtcgatccaggattgccttttatatctcttagcaaaggtctggagcttaatactcttaggatgatgtctcagatcattcccattgcgcttaagaatccccggcaaccttttgttgctctttctggcccgtcatttgctctggagctgatgaacaatttaccaactggtttgtttgactcttgttcttcttttgtttaaatcgaatagcattatagttttctattgctgaatgatgagaaatgttttcttttggtatgttattttgcttgcagcaatggtggttgcctcaaaagataagaaattggccaatgctgttcagcagcttcttgcttctagttacttgagaataaatacttccaggtacaacatttcaaaacaagactccattggtttcaatgatttctggatgcatttccctgctgggctatgataatatccatttgcctacctgcttgagaggttattcatgttcttgtataatgtgtgggtgttaggtgactgagcttctaatgggtcaacc

SEQ ID NO: 50268 - DNA, 657 bp, Arabidopsis thaliana landsberg
  unsure (1)..(657): unsure at all n locations
aatacacattttaaaaagatgccacctgaaatattcaaaggccataaaatattactatttgtataaagaaaacgcgaagtcgaaatcaattagtccaacattcttggtcaataaatgctttttgcttacacacgcacccacacacaactatatatatacacacaagcctttccatctcataactcaacaactcgttttgacaaagccaacattttgagagagaactcaataagagaagtaataaaccgaagtcaagtcaaggttcgatggagaagaagcttatgatcttgttatgcatcatcttcttggtggaggtgttttcaattcttgggggagttgactgcagagcattgcgaacagagcaaacgaccggctgtgatcaaacgaccgccaccgtagagagtggtggttttggcgttttctcgggggcggcgaacggttcgagagnnnnnnnnnnnnnnnnnnnnnnnnnnnnnnnnnnnnnnnnnnnnnnnnnnnnnnnnnnnnnnnnnnnnnaatgaccattcatattgattttcttatgtttttgcatttgcataaactatatataccgattgtggtattaagttttagtttcatttcatcgcgaaaggaanaaaaaaacatttgtttaaagcatgattgatcaatccatgt

SEQ ID NO: 50269 - DNA, 787 bp, Arabidopsis thaliana landsberg
tcctggtggcgatgatctgctaccaccattatctccattacttctagaaggaggagaaggaggagagccgcgtgacggtggagtatcattgccaccattgtttcctccatttcctctttctcctccaccgccctgtgacggaggggaaggagagttattagaggaattaggagggttaggagcttgtggagctggtggagatgtggaatcaggaggtggcgatgatgatgagtctccttgaggaggtgtaggagaaggaggagacggagccggcggagaagaggtggttgaattggtattagacggtggagatggagaagaggtggagtttgttggaggagcagattcagaagaagaagccatcggagatcaaaatttccggtaacgaaaataaaaactctccgtctcctctctcccttaaccactcaattattctgagaacaacaacaacaacacgtagaaaaaacagatcataatcaaaatggtgttaacgttggaacaagttcttgtcttattatgttcgttagatcgttaacaaaacaggtaatgctaaatataagagattaatacaaaattagttaagagattagcatgaaagtgtgtaccttagaggaagagattaaggggagagagtttttgaacatttgatcagaaaatgataataggaataaggtgaaaaaggaagattgagatttgctctgtcttcattccgagaaacaagcaacttctctctctttctgtcttaataacagttttgtgttagttactaattgtaataatctccggt

SEQ ID NO: 50270 - DNA, 339 bp, Arabidopsis thaliana landsberg
tggtttgttctcctgatatataaggaaatacgtcgtgtgctgtagccaacaaacccttttagagacaaacatgctaaattctgttcggagatattatcgcgtaacagtatgtcatgtaaggatagatgtacccatacatgtgccgtgagcatgctagagctggattgaagaagtgtgcgtagcacccggaatactactatgaatcatgctctttatgactctgagtggtggagaaaggtcttgatatgactagtgagtgggaaagcaagtgacaagtacgggcgtgggacatgtatatataccactaacagggacgcgtactgattaatcatgcagatg

SEQ ID NO: 50271 - DNA, 929 bp, Arabidopsis thaliana landsberg
  unsure (1)..(929): unsure at all n locations
agaaggcctattttgagggatttatgattagtactcagttgatttttcttcattttcttatgagaaaatgtattttttgtgggatttatgattattcttatggaaatcaaattatattagtttcctaactttgtttttattttcattttcatctgaccaacgttataaaacatctaattgactatgtagagagattgaatgttctttttagtggaaagttaaacttcttttaaaagaagaatatgcagaaaaattgcctgattcgccttgtcgaccaaacacgccaaatttgacataacttttatatcacatttatcatatgttttgatgataaaataaaatcacaaaatttagataaacaacacttttaaatgccgtcaaattaggaaacattcagcatctaaaacaaacttctttgtacagtaaagtcattcatatcattcaaccttttttcttatgtacacatatcaaccaaaaatgccacgttgctactcatgcaaatattgacggattagagcacttaatataaacaactaactacatatataagcttgaaaaaaattattgcagagtcaaaattttcaagattttgtatagaatatggaatgcattgagactctaactgttatgtgtaactaaaatgtatttcatatcaatgcagaaagtttttactttattttggtaaatatcgacttatttttaataaaaccatttcacaaactactctttttcctttttcagaccaaatatatttcttctaacgaaacaatcagtccaaaacaaataaagcttcaataagttgtcgaccatttcgattttaaccctgaaaaaggaacactntgtcattnttgttgggttttgtctggtattatggatattcattcaataattttctcgtgtatatttaaatattttattcatatacaaaa

SEQ ID NO: 50272 - DNA, 1002 bp, Arabidopsis thaliana landsberg
taatctcagtgacacttattttgaatagaatttttttttcatatgttgcatctatacacatgcacacatacccatacatatctgtgtgtgaagcactgaagctagagcgtgagaccatcacagaacggaggggcagatgataccaggagaaagaaatagaaacagaaaaggtggaagaaaatcaaatatgattttattggtgctttttcatattagagaaaaatatttatttatatgattggacatggcatcgacttttgtctttccaattactttgaggagagattctattttgaggttaacataactccaaagaaatacccacactcttttcccccatttgccaattttacccatgcaacctttcttacattagttaccactaaaatcgtatgtatacatccatatattcatggttttgacagtataaaaaatctcatcaattgagacctaacaaatctatttcactttaatgtttagatgctttgattggaagatcacaatcaatttcatcaagtggtttgttggtcaactaactagttatgataattttagtatcttacttccatttacaatattgacaacaacaacaaaatggaccacataacataagtaaattgtcagtgaaggtattttcattcaggtactcttttcttttatgaacagtggactttgataagagcagctctgttatcctctctcacttaatttttttgtttttgtttttcctcttttttcttgtcttgtattatcaaccctctctttttgtctgcaacaatgtgctttaagtgaaatgagactttatctcctttcccatacctcctttgaattctttattattcaattacttttcagaaaaccaaccaaaatcaaaagatgaatttattactgttcttttaaaaaagaagagctacttgatcatattcttttttgtaaggggattcggttaatttctaattttttttgtcgttttaataagactatttatataaaaccaaaact

SEQ ID NO: 50273 - DNA, 513 bp, Arabidopsis thaliana landsberg
taagaagaataagaaaaaaaaaattaacagcgacacgtccgtttcagaaagagcgtgactgtaacagagacgggctagctgcctcaacgctttcagctgaaaacgaccgcaaccgccactcgccatcgggaatgtaatgcactccagccgtccacccttttgctcagatgaaaaaaaaaataaaataaaataaaacttctgcagcctacttcgaattcctgagattgtcttcacctcatcaatcttaaaaaacaatgctaaacatcgagtcacttctgtgcagactattgtgctgcttcaagatcgatgttctgttgctttaagattgcattttttctgtgtgtgtgtgtgtattgatctgtagcgctgcctgcctgtccagctcgatctgtcctgttttgtggtaacttgaattgaagggtaggtaccatcgacgccactagtgtcgtagtagtacaccacacagcgtacgcgtccaacaagttaggggcagggtaattatgctgaaaagtt

SEQ ID NO: 50274 - DNA, 516 bp, Arabidopsis thaliana landsberg
  unsure (1)..(516): unsure at all n locations
tttctctttataagcttctacgagaaaaccccattagccaccgattataaactcttgctctctatcttcctcttaccgtaaaagtaagatcagttctgttttttaagtcttacttggcgtcaaacccgtccatagctagaacgtgaagagtagtaaccagtggaagagacagcggaaatgtactgccatgcaaaagcagcaatcaccagaaccataaattgcggctatccacggctttcatggaagtgtatacaagtggcattttcccaaattctgccacaaaccggtttacgcagtgtgttcttttttctgtgtgccctcctatgctactaattccagttgaaccgatttcatatattttacctacaaaaacaggccaaaagaggaggatatgctctttatcatcaaagattatcagaatcacaaggcattacatggttctcaaagtagcctgcgattagaattacctttacccatatagcangagcgtttgagcatttgcgacgaggaatgaca

SEQ ID NO: 50275 - DNA, 1082 bp, Arabidopsis thaliana landsberg
aaactacctcatcttgagactttgccagtgagaaaatcccgatgttgtttcttgagatggatataacttccttgccccagatggagaaaccggaaacaccgtcattgtgtcctttgacaacaaaaggctgtggtgtccagctcctgttttaccagaaagataataaaccacatgtagggaacaagaacaaaaacttacaagaaaaggaaaaaccgtaatgattgtttttgctcacttccttaagtcccagatccgtaaagttttgtcaagagagctggaaacaagtaaatgactctcaggtgccactaactgcaagaaaatcaaaatttgaagataagaagaaaggccatattggttttgggaggacaaaaaagcttaattcacctttgtcacgtatccgtcgtgagctctccaggaggaaataaaaccattttccctcaagtcaaatagcctacactggccagaactaaaaccagctgcaatccaagaaggtgatactgaagctccgtctccatgttttgtttgagaccctcctgaacaaagagcagatacgagagaagtgaatccagattcaatagcttctcctccccaaagttcaagcttctggcctcgtgctagatcgataaacctgaattgtgcagtggaattgagcaaaaattgttgcatattatctctaatgctcaattagtttgattttttagtgtagtggatactattttacctgagggcaccaaatccggttccaacaatgagctgatctatgtattctaaataatgcatacatgtatacaagttctcatcgaatatcccacttgataatccatgtgacgcatgtctattacacggattggaattattctttgaggacggatctgatgaagcttgatcttgatccgaaggtgactcggagaacaaagatattagtttcccggtttggctattccacacatgtatagttccgtcgcaagatgctacctttccggtggatgacagaatactgatgtcattaacaacctaaaatatacaagaaataattaggtgcatacttcctattttatgggtaagagaataattatgtgttt

SEQ ID NO: 50276 - DNA, 603 bp, Arabidopsis thaliana landsberg
ctccttttggagcatctaagttaatccacattgatgctaatatctataaatcctagaagttctcaaagaaataaaaagaagcatccatgcaccaattcagtagactctaactgtcattggcaatgatagcagttagatctttacaatttactcacctttgccattatgaaaaaaatcttaagtaacccataacaattgcatttaaattacacatgctttccataataaaacaaactaaaataaccttttaattctacatctaaattaccaacgtattatgttactaatacaaaatgccaaaagtaccactaatatgactctaaaatatgcataccactattaatatataagaagccaactcaaagtaaggatatattgataattcaactctaaaatatgcataccactattaatatatttttaatgacacaacttttgtaatgatactaagaatatattttaaaatgtattacgcatgttcatcatatagattcacacatttctttacttaacattatatcatatctacagtagtagttcatttgcaagcactctattttattcaaaaatagtgtactacgtacataggttttttgatatatg

SEQ ID NO: 50277 - DNA, 449 bp, Arabidopsis thaliana landsberg
aggcagttctagtatctaacaagtgcatgttataccttaatgagcttgcttcccagaatctgcttaaacttgtttatctcgggtacgttggtgttgtttgttacaacatttgtttaattgcacctactggccatctaccattcgatcatgaacatatttgttttacttactaccaggacaaataagcgcgaagacggattttacaatgagttgctactcactcatcatagtattctgagggagtagtctatttttcatagagaattgtaaccaatcatgcaaagaaagaaacttagtttgcatataccagaggacaactttccggaccagtgtataaagcaacctatatatgctagacttttgtctatctatacggggaatcctttaaaagcctatggttctttttgccctgaaaattatgcatagaaatatgaccaccttttgttttt

SEQ ID NO: 50278 - DNA, 847 bp, Arabidopsis thaliana landsberg
aatccatgctaaatggatgggatttttttgatacatgtccaaatcttattgaccaataacacatgtaaattttttttgttagttttttttgggtaagaataattagtatatgtaaatatttttttaattagtttttattttctgtaaaagaaaacaaaaaaattaaaacatttgttataatctaatcgagaaagttacccgtgtcgcaatcatgtgagttactaattttaaaaaccaaagtctatataataaaataattataccgaagttagtaatctagatttacacatttttatacagatacacaatacatgtaataacaataatcttgtaccataacacttaatgaaaaaatgagttaattatatagctcaaattttataaaaaagaaattatgtgtatctagaaaaaattaatgttatttatatttctctttatctcatttatttttatattattatataaatctctcctttactctttgattgtcactctaaccctatttcttagataatatgaaattaagttttccaagaatgttgttcttcttcgtaggctatatcctatgtttcagcgatatagcgcgtttcaataatcattttgtggatgcagaagcattgcaaaatttcaccttatttgaaatggaagaacaacttaaagtcgtcaacgaacatgcagctaaaatcatcaaagtccgtttaatttaaatcttattttcttagagctgtactcgttaccttgatttatacatatatatctgaattttgtagagatatgtgaagtttacaaaatattttataatctactttttgtttatggatgatagactacacatggagatacatat

SEQ ID NO: 50279 - DNA, 967 bp, Arabidopsis thaliana landsberg
cactttcattttcttaatcattctttaaggctctggtagctttggcttttgatctaaaagctgagagtcaatagagagctttgtgctgagcatagcagagaagagttatggggaaaggagggatgtctcaaggagaaggctcaaaggttgaagaagaaaacatggctgcttggttggttggtatcaataccctcaagatccaaccttttcttcttccttccgttggtaagacaaagatttgacttgattggatatttggattgtcctgtgaccctttggttcggaaccttgaaaactgatagatttatgttcattcaaaggtcctcatgatgtgagagttaggatgaaagctgttggtatttgtggaagtgatgttcattaccttaaggtacttatgatataatcagatagatatttggttttttctttgatttggtatggctcttgacattggtttttgatgtgtgtgaatgttacaaaacaaaagaccatgagatgtgcggattttgtggtgaaagaaccgatggtgattggacatgaatgtgctgggatcattgaagaagtaggtgaagaagtgaaacatctagtggttggtgaccgtgtagctcttgaacctgggattagttgttggagatgcaatctctgcagggaaggacgatacaacctatgtccagaaatgaagttctttgcaactccaccggttcatggctctttagctaaccaggtggttcatcctgcggatctatgcttcaaattgcctgagaatgtgagtttggaggaaggagcaatgtgtgaaccacttagtgttggtgtccatgcttgtcgccgagctgaggttggtcctgaaacaaacgttttggtaatgggagctggacctattggccttgttacaatgttggctgctcgggctttcagtgtgcctagaattgttattgtggatgttgatgagaaccgtttaaccgtagca

SEQ ID NO: 50280 - DNA, 618 bp, Arabidopsis thaliana landsberg
gacgtcgttggacgtgtcgcccgcgacgcccgtgatcattgaatggacatcgccgccaccgagaggaatgagcggattggcgacccagttgcttgtgccatgaacgcggtagcgcaccacgaggtcttcgtcagagagcgattcaggcgtgcccgtgatcgtgatggcgggactcgaattgccactggcgtcgacgatcgaggttgtgtccaacgtccaatgcgagagattcggtgcggtgatcggtgatggcggcgatgtaggcgtcggtggtgcaggaggcagcgcggcgcttccattgccgggcaacccagtgacatcgatcgcgtgacccatcaacgagtcaaggtcgccgttcagccgcgaggacaccacgatcttgatcgacgtgtagcgcgcaaaatcgctcgccggcaacgtcaagcccgattccgtccagagacctgtttgctggtaaacctgtgccccggtctgatcgtagacggtaacgatcgtttcctggtaatattccggtgcgactgcgccgccggcccacgggaccgccgtgccatcctcgagtgtgccgttgcgggttttccatgtgatcgcgatgttggtcgagctgccgattgcaaccga

SEQ ID NO: 50281 - DNA, 813 bp, Arabidopsis thaliana landsberg
atggagtcatagctaaatctaggtgggggggttgagaagaaggtgttttattcgcaacaacagcaacaagtagtgttctgttctaacacaagcatgcagactgagattgccctttagacttttagagggtcttatggttaagaattgatcaatgtttagggatataattatgagaaatattaaagtttgttgttttctggggtttcttttgtccctcttgaagaaaccacctgtatcaaactttcaacaaactgattccaccaaaatgcacaacctgaaaatatcagcactgaatcttggccaattctttgtagaaaatgaacacacaatctcttgtgttgtataccaaagagttcattccctcaattatgaagatcagaaagaacaacacaaaccatcacaatgatattttgtggttgcagcgggatccaactttccccaaatcttacggagcaggaataggctgttccattgggtcggagaaactctctgctctgatgaatttgatatataaattataattgatactatattttttggtagcgaaagactttttaattgaacccgataaaatcaacttcaaaaactttaattaaaccggacctgaaccggttttgactatgaaaccgagatatatagtggctttcgggtcccagtttctttgggtcctagtatatgagatcggattggcttccttgcgcttacatcgagtgacaaaaccaagacatattatttcctattgcgtaagaagacatagttattttttttggtatgaggtatatatttcaaatattaaagccagtaattcacttt

SEQ ID NO: 50282 - DNA, 1229 bp, Arabidopsis thaliana landsberg
ttctgctttttctgaagttttctttctttatatttgcctttttttagttttatgctttttcttgtctctgaattatatggttggcttgacaaccaaattgtgttggaaattggtgctctttgacatcaaatagtatagatgattgcgtcccctatatcttatacatacaactgtaatatcagattattgattcactatattttcttgcactgtatacaaataaaaaagagttcgttttaaaatagttaaaactgattaacttatcactgtacaaactagtacatgtacatatagaattagctcagctgcttaatcaacttgtaataacaaaaaatgaccactattatttctgaataaaaaacccaatagaatccatgtttatgaagatacacatgaacgtggaacaaggaaaatggtgttttacaagaactagaaaatgacattacaattatcttatggactaaaattattagacaggaggacaggaaaatgtgagctgtatcaattttctaccgaaaagggtatctatatatcatcagtatggcatagtggacttggtaacatgagcatttagtaagctatttgttctttctggaaagagcatccttaaaaaaaatgatggagatgttgaattttgtgaacactttgtcatacaataaaaaaaggtgagtttcaattaaaaaaaaaaaggtggaactctatatatttagcattggtatgcacatacatatataactttgagttatgtccatcatagatgactatctagatacccatggttttatgtcattcacataaattaaaggatgaaacatttgctaaattgggtgaatggaagaacttggtcaagttagagaagtaaaataggtttgaaagcttgagaactgaaaacatgttggagtctataattcatagtcgactaattgtgtaagaaacaatttctcgtttctagcttttacaatttcatttgtgactttccacgaagtattggttcttttttctattttgaatattagaggagccagagtgtcctccaaaaaaaaaaacataaaaaaaaacatattcggtgattcaaaacaattcatatgtttaccactctggctcaaaacaattcacagaaaaccataaacttgtactagttaagttctaagctatgttaaggtcttcacatattttcattgattggaagcaatttagttataagcgtatatattagtttgatatgcaaa

SEQ ID NO: 50283 - DNA, 559 bp, Arabidopsis thaliana landsberg
ttgcatgtttaaccacaccgcttaacctcagaatcacccgaattttctctcctttttcttgctctgaccttgaggatttcaagcgttgcctagaggatttgattacgttttgttagggtttagaagtttgagagattgtttggggaagaagaagaaatgactgctattgttggatttgaccagctttcgaaagcactcatcgatgctggaacgaatcttcttagccctccttcttctactgacgaccttcttactcttctcgatgtacactttcttcatcgttgcttttgctcaaatagattctcttaggtttggattcacggaatgcgattagggtttctctttcttgccgataaggaaaacttgattgttgattttagccatatgtttgatcaaatctgggtgctttcttctgaattcgttgcgttttcttgtctatccaacttgttaatttggttaaaggcgaatccttttcttctaattcaattgtatctggcgtaggaaactgagtctctgcttaaaaatgtggagcaagatcaaccattatcaatgcaaagtg

SEQ ID NO: 50284 - DNA, 577 bp, Arabidopsis thaliana landsberg
gaccaacgatgcctagatccagatctcctgatagcaactttctgacaatgtcttttggtcgttgaaaccaaacttcagtatttggtaactggaggacaagaagattgagattaccattacaaattgcgttacaccaaacaaacaatgatagattagtaagtcaatacgcgtttgccttctctctaaatgcatacctgaggaatttgagcaacatattgtcgtggattgacttgtttgacaaacaattggcaatccttcatgagaaaggggaaagtaaaagagttgtaaggatctatgagattgaaaatcatgcgttgctaagagatactgagagtgaaaaatcatttaagaaatcaaaggatcaaaaaatgaaaccttgcaaaaacccaagaaagcaaacaaggagaatgtgatctataagcaagagaccatcaaacagagacaaaaccacaacagtagaacactcaaatacctaacttccccaagggagcgatatgcaagctcagcaatcaatatttaggcttcaaaacagagtcaatagctcaaatataagaaagactagtccttgagtaagtat

SEQ ID NO: 50285 - DNA, 403 bp, Arabidopsis thaliana landsberg
accacgtcctcagttccagaaatttcgagactaaccacaaaaccaaatataccttagcgtttaaaaataaaaataataattatatttgcagtctagacgctgctctatctatgctctcgcgcctcgtggcaacgcacggacacatacctagtcaggttacttaaaacctgaaccgattccgagcgctctccgcgttcggcggctgttccgcctgtgtcgcaccgacccgtggcggactcgaatttattatcaaattgcgttgagctatctcgggtccgctccctacggcctctctctccctcgcctgcttccggcttcccactcccactgtctgacgcagccatccgcttcccttcgcgactgctggcggcttgagcgtctaccagcggcggcttgagcgtct

SEQ ID NO: 50286 - DNA, 367 bp, Arabidopsis thaliana landsberg
ccttctatgctgaattcagcaaaccgttgcgcgactattttatttggagtgcagatatccctgataactggacccgtaagctggaagatgtaaccagtgaccgttaccagcaacaggttgccaaggcaacagtattgaagggtgaaaaagaaaaagaaggcaagcacttaggtttttatacaacgtttgcaacaaaagcagatgaacaggtagaaatgaaagccggaatttcttttgtgagcatagatggagcacagcaaaacctgcaagccgaaattcctcactggaacttcgataaggtaaagcaacaggctaaagaaagctgggatcgggagctgtcgcgcattcgtatcagcggcggatctgt

SEQ ID NO: 50287 - DNA, 762 bp, Arabidopsis thaliana landsberg
atgcaagttatgtatgtagccttgtgtagttctctggtacgttgatatgcaatgattctctcgaaaactattaaaaaaaactatttaagataataatgaatggggtcacgagtcaagactaatgtaaccaaagtcaaatggattttcgtatgattactacttttgtaaccaaagtcaaatggattttcgtatgattactacaagcttgtaggtcaaaaaacacatgtcacctctctgtttagtataataaaccaattttataacatcattctttttatttgctagtttaatcgtctaaataagtgacccaaccataaaccatatcagattatgaaattttgactttacgatagtgtacgtatcctcaaattcctcacgtatatgtcatgaacaattcttaaacaacaaaattataactctcttttaattaatgtagttttttcgtaagaactcaaattgatatttaacaaaaaaaatgaatgaaacatttctcaagttttaataattattttttggaattttgcaaaacatatatagagagataataataaatatgaatgaatccaaaaagagacaaaaagaatagatggaaaaagagacagtcatctttaagaaagaagccaaaaacaaaaacttgctcttttaatcccaacccacacacctctcaaatcctcctctcctcgtttctctttctctcctcttcacagaaccaaaacatatcaaacctttttttctcttgggtttaagtaaaaaccgaatctt

SEQ ID NO: 50288 - DNA, 798 bp, Arabidopsis thaliana landsberg
aaaaaaaaacccccccccaaaaaaacccccccaaaaaacccaaaaatgtggatgcgtaaaatataaattaacacaacttttgctatcaataaagacattctcagctaaatttgttcgaattaaaatattataagtgaatttcaatgtggtacaagaatttgtatcatcgaatgcgcttgtttggttgtatatttttccaaatgaacaaatgcggaagaccactttgtaatcctgatgtaggagactagtatttttgtaatgtttgagtgcgaaatgttgagttgtgatcaaccgagttctaaatttatctccaacagtttaatctctctaatttgtttcgctagatgggataaggcatgtaagttatcaaattcgttagcatgataggtttgtaagtatatcaccaaattttggtattggtctaactgtttgtatataaatttgtgtataccgtattcataaattgcttgtataaatttgtgcatacaagtatatcaccaaattctaattaaagtaaaagctcaaaaaaattatcttaaaatcatacgcggatagatagtatcaaaagtgtatgtaagagtgtcatcatcatatgcattttttgtttttgtatgaaagatatcatctcaatatttcgtaaactatatccaaaaacaagcctctatgatatgcattagagttcatttgtgcaactaatggttcatgccatctaaccccacaatagagacctagcgaattgcaatgtttcgctagaggtatgaacagtaatccaaccatactcaattatatggacgcatt

SEQ ID NO: 50289 - DNA, 939 bp, Arabidopsis thaliana landsberg
ttcagtcgtatgactcctattgatgctatcattgtttaagcttttggtaaataaatacggttggtcaaacaatatttattaaccatcgaagggtctactaatcaactagtcatctctgtaaatggattggctaaacctttgtctactttgcaatttgcattcgattatttggttagattttccatgttatgaagtttccaacctattttacattggtcaaataattatttgattttgggccttataattgttgcagtggtccttaatactattcatttactataattaagactagcaactgactttattttaattctgattttgttaccaagttaagcacaccatctccaaagttccaaaaaggtaaggaatttattattaagaaactaatataagcatttgattgatgcttcatgcgatcgtattctaatcatgattctaaattgtaattgattttattattgtacataattagatacgatataataattaatgtgtaaactcacctatgttaattttgaaaaattatgcagtgtgtgtgttatatgtgtctataaaatttgttttcgtgttattttagggtatttcttttaaattattgaccaaaatcacttggctttgtctcaattgtgatcatgtatattagatgtgcaaaataacccttacttaaataattaactctatctctcgtggtctcatctaaatgaaccgcaaggatgctcgccgcgacatcaagtttatatcacttttcgtggagaacagctacgccacaacttcgttagccatctcgtggaagcccttaggcgaaatgcgatcaatgtgtttatagacaatgatcaagagcttagaggtgaagatatcagcattcttttgaagaggatcgagtattcttgaatctccattgttgtgttctcgagcaggtacacagaatcgaggtgg

SEQ ID NO: 50290 - DNA, 930 bp, Arabidopsis thaliana landsberg
aggggataaatgtgagagccagctcagagtcatctaatttttccgaaagttttgtatcaatataggtatatgtttaatgtacgttcgaatcgtccctttgtataatgcgatttgaattactgataaaaatgaataatttgaaggtaaatttactgttaatgatcctcctaaggtgtcaagttttattttagttaccatgtaaaaactaattattattttttgtgttctcagcttttaaatgttgcgtttttcatacgaatgttcagagttgcttcgttctctgcctttttgacgttcataatttatagatttttaataattatttagcgacagacttttgactatttgagcaatgctcttgtacgatttgaacgaccgggattaccaaatgtgtgaatgtttagtttgatattcattgattataggtagatttttagtcaaactatggtcaggattacttttaagacaaattatggtcagaattaatagcttgccataaaatcttcttcagcttgagatacttataatttttcaaaccacatcactataatatggatattttcgtttcttcagtataatttctcatatatcgactaaaacattatcaactctcactataaatgacacaacaaagtcatactctggttaattttttatgctttaataaagtcagcagaaaaaatctaagaaaatatgatgctatcacttgataattcacataattttaagatataaacctccaattttgaataccgcagtaaaacaaaaatttacaccatattaaattaatacacacacacatatatataaccagtttttatatatttattattcatacatattataaatagtttttatgatatttcaaatataaactaaattttccttttcattgatccaaccatactttcatgatttttttgattatct

SEQ ID NO: 50291 - DNA, 1118 bp, Arabidopsis thaliana landsberg
  unsure (1)..(1118): unsure at all n locations
caagtcattactgccaatgccaagtagttccattatttaccataacgttaaaaaaccattttaaggagaatatttaacatggtgttatggtgataatcaaggccagctcaaaatccaataattttgatattatatcatatttctgtgtgaatctttaaacagaaacagattgggtgctaaaatatagatatattttgttaattttgttgggaatcatgtgctgaagcataagtcatgagctctcttatctaattaagatggtcctctccgcgatttaatgtggaagtactacttttcttggggtcaattctaaacttggaggtgtggtttaaagtctaatcggtccaaatcacatcaaaaccaaaactataaattagtttaaggtgaggtaagccatatgagtcgttggatttgatctcttggtaagccatggaagcgatgggtccgttggcagagtgtgaacacacaagaacgttacaaatgtgatcatatcggggtcaatatatagttcctagtatggataataagtcctcgcatgtctattagttgattcgagacgttccattttcacaatactcgtctccgcatcacaatggttctaactcctacatctttaaattaaactcaaactatataatagtaaaacaaactttggcgaatacactgctataattatgatcatgaaataataaccaataccagaaaattattaatataaccattgtttcattaaactccaattccttctaaaactctaaaaaatgaatatgacaatgaaaaagttttattcattttaatcagctgagtaaaaccaatttcagacgtactattaaatgagaatgcacataccacatgtcgagaccatataagaatatatacccctttttataattgatgaaaccttgatgaatatctccacagaggctaaataattcttgtctgaaatcgtgtttagcacgaccgatctttcttgcgtcatctgtaattaatcggtaagatatatacgacgttcttgtgattctacagtgcaacatgtcatcagaaaattatagtaatcccacatattttctctatatttttagnctatcattctgttgagtttcaacattttagcgcat

SEQ ID NO: 50292 - DNA, 420 bp, Arabidopsis thaliana landsberg
  unsure (1)..(420): unsure at all n locations
catttggattctggtcgaaaaattctttatgatattgttgatcgaattgggcagagagttttttgttatatctcctaaaataaagggagaacagacgagggatgcaaaccacatacggtagaatacacacacaatcctagtactgcccttgctgacccaaccataacaatacactatgactgggctgtcttacccaatgattcaatccaaatannnnnnnnnnnnnnnnnnnnnnnnnnnnnnnnnnnnnnaatacaatgaccatacaacttatctactacataacgagccttattacttgcgacaagggtcagttatgtggcaaagctaaataatcaacctagtggctcatatgtatgtgtgcctgttaacgaagactatacttgttaaacactcaaatccactgttgcatgcatgaga

SEQ ID NO: 50293 - DNA, 1640 bp, Arabidopsis thaliana landsberg
cgtcatatattttattaagatcttttaaaataacataccgtattaggtaagacatatctgtagtaatttttcagaggaatgtccacaagggaactctgccaataagaagaataaagaactctaggtcagacgcatgaacaatatgtattttccttttctccaataagaaacaattaccctttttttttgtctaaaataagaaacaattacccttgaaacagaatacacatgaaaaaatacccataattaaacacatcagtaaggcagctgtaacatcataaaaatatcgatctcagcaagagtaccagtaaccacaataaaggccagaagaataagtcctttgaacatctaggtggctcagaacattaagtttgacattctagtgatttccaaataataaggttagctgtatatattttactcaccatgggattcagaacaatcctcatgctcgtctgaacatgtttctgtagaacttgaagaagtgatgctagtttttgaccagtagggcttaaaggatcgataacagcatcaatgtgtatcgttgcattttcatttcccagcaaaaccgcactacacaacgtatggacatcttagttgcatagcattaaattcccaagaaattgaaaagaaaagcaaccaccagtatacatacctgtattctgaattcaacacctcaaaccgcgcactttcagaactacgatcccgtgttgccattgcagatgacacaaacatgaagacatcgctaaaatatttactgcaagtgtgacaaaaaataacaatattctatcagctatttttcaaaccatgcaagtaagggattattcctagaagaagtgaagaaccatatcctatcagctattttcagaacatacatgggatcatccctcatagaagaagaaactataaggagaaccatcagtctagagagtgaataaagcctataaacaattagcagcaagagccaaatctagaagaaaaaaaataatgcagctaaagaagctttgctcgccaagaactaggaggaaaaatgttgacaagaaaaagcataagaccaaaaaaattctgtttgaagttttggtttggcaaacaagaagaaacagttaaagcatgaatcaagagaccttgtcagcagatcgggatccacatcttgccattcaatgccttcaataatttcttgaacaggctttactctttgattgaactccattgactcaagaagatgtaaatcttggcccaaaaatgtcctctcatccacaggaaatatcacctagtcaaatatatactttaatgtgatgaaggttcataaatatacaattgaaactaacactaaggatatgtaaatagtattaaacgatctatataattacagaaaaggataaaagatggtttacacacccttccatttgaaattattgcatttgcatcagattcaagtccaagttcccaagacaagaattgggcgacctgcatgacaattataaacaaacccattgttaatactattgcttttgcagaggaaaactgaagattcttgtatcgatgttctttcaggtatgatagaaatttatttaaagcagtatacctttgtcaaacgcttaagttattcttcatccactgattcaacgagacaagatccg

SEQ ID NO: 50294 - DNA, 536 bp, Arabidopsis thaliana landsberg
  unsure (1)..(536): unsure at all n locations
ataggaaataagttatctatctatatctaaaataatagtcactgtatggggtaacgtaatagaaaacggaatttgtaataccttatcgacttaagtttctttattgatttttggaatcgctactccgggtcaacataaacgttgagttgcttgataccaggagatggatgaccaactaatactttggttttcttatcatactggtatcgcccatccaacttgctagaaagaatacggagccgtttacttcttcttccacaaattccgtccacattattagcattaccatcctcctgtatcgaaaaaaatatattgagaaagagggcaaaataattatttaacctacgacaaaaactataaatttagctaaatatgcatgaaggggagccttgacttctttggactgcgggggcggagtggtgaaatcctggaaaagtaaaagttttgttataaaatgtncgatagcaaaaagtatagcatgtaaacattntcagaatacctcatgcgaatcctggacaccacccagaaacacgagc

SEQ ID NO: 50295 - DNA, 565 bp, Arabidopsis thaliana landsberg
ccaagtgagtagcaccgtatttcagctcgcgcctaccccccacgatgtggacgtgaatgcgtgccagcagctaggctgacgctgaccagccgtatacgtcgatgagaaccccaggcaggcgcaggatggcgtggcgacggcggtccgacggaggcccggcgtccggaaggagtgcttcggggtcttctgcaccacctacgacctcaaggcggtgagtccgtcagcctcacgtggtcactcccccttgcggctccctgtgttcgctgaaatgctccgtcgctttagcttcttcttcagcctcaaaagtagaatcctttttccacctaaagctagcagcgttgttggtgcggactgtggaccgtggacgtgtggtatgggaagtggtatatgctacggtactggatagctagcacacataccaacactccaacagcatgcgttgggcgggctctactatgaatctcatacaggtttcacaaacgaaagcgtcagggtggagtccagcgtcacggagaccttgacttgttgacgtctaatgcatctatttgcgatgacttagtttggt

SEQ ID NO: 50296 - DNA, 1026 bp, Arabidopsis thaliana landsberg
aaagagtgttcaatgtaatttttacatttatctgtcattaaaactttgatagtgtatcaaattaagtggtagcttggctattaattaaccttttggaggtggggatataatgaagagttgaagacttagtaaagaggtaatggggtgggtgagacaaaaaataaatcaaatgtatatttatgtaataagtcaatttagttaggagagttctatttgggttaactacatgcttattgaaaaagaaattttgtttgaagtactaattcatggtggttaaattaaagattcattctaagattaattggattagagtttttgaattcttcgcagtactacagatcatgaatagggaggaactaattagcggtggcaaaaaaactactttgttcatagtgtttattttttgtgcaaccaaaaaagaaattaaagaaaaatattaaaacattatcgccgaagtcaaaaaatgtttttttttttttgctaattagtgtcttcttattccgcagtagtagtattgttgctgtttaaaaacatttaatatatatttttggctatttcttgtattttcaaaaaaaattggatattttttcaggtatttttagaataaatatatattgatatcacaatagctaaattgttattgtgattttttctggtttggctatattcggataatttttactattcagatatttgtggatatatatttatatttttggttcattcgaatgtgcgaaatattttagtttggtgtaatttcagtttttttttttttaagtttaggatccactcgattatttcatcggtttcagttcagctcggttccttttcttttgttcagttttgattcgaatttttattattcgatattatattccattgtcattcattttcttttctgattgtaattaattcaattaaaactgtaaaatgatcacatcacttctaatatatggtgcagataaccaactcaacaatgatttgatttgcctgaacaacgacgagttgatctaatgattaaacctt

SEQ ID NO: 50297 - DNA, 1040 bp, Arabidopsis thaliana landsberg
aactatcatatacggtggtaagctgtgagaaataatctctgtttatcttgtaatgtgtcaactatttacattttctttggatagtaccccatcttttattaacattactatccaagttttgtttatgaaaaaaaaaaactggtcaattaggtttaagcatcaacttgttttttatgacacaagattttgtccatcatcatccgaagaaaataatgtaagtaaccattcatcagtcacatatctatccggattgcgattttcaagcatctagatacatttagttctaaagaccaataacatacaagtctacattatttaattaggacataatacatgacagaaagttactacataagtaaaatgttccaataaagagtcttctcactggaagcgcacagaattggaagtgatcatcacctgtatacatcgagaagattaagatattcaataagaaatgacctaacaagatgaagccattcgtgttaaggataagaagttgtacctcacaattgatcattcttgtgttggccttagcctaaactcactaacgttcgatctcatccgcaaacttcctcacttttgcttggaacaatgtggctgtggatttggtgaggaaagatcttttgcccagaatgttatgtaaaacaaaaaaccttggacgccaagtacatttgcactcacatacttgacaaactcaagtcttgttccgttttcttcgttttcttcgtcaatggctgtctctatgagcagtttcattaactcattattgttcatttgatcatcaaaatcatttccccaatcgaaattcacggcagggaagttgtagtcaacattactccaatcaacatcgtaaccctaagatgcatatgatatgatccatataaattaattacaaggatgcaacaaaaacaaacaattgcacatacatctgattctaaggatcttcataaaaactacatcaaaggctatggaatatatatcacctcgctgtttttaaattgttcctcaaagatcattcgctgtctcgcatattccggatc

SEQ ID NO: 50298 - DNA, 430 bp, Arabidopsis thaliana landsberg
ttagtctgacatgttttgatatgacaaacataaaatttagtctttgttggagaattctttaattattgtatttgtggggtgtcaggaggataagtgataataatttcactggaccaataccagatttcatcagcaattggacaagaatactgaaactgtacgatctattctttctccataagagtactcgcatgttcccaagaaaagacatatgaaccaaaaaaatgttttgcaggcagatgcatggttgcggtttggatggtccgataccttccagtatttctagcttaacaagcttgaccgacctgtaagcctttaaaaaacttcttttcaaatcatctccttgtcaaacaatgacacacgagacattatcatataatttttttttctttggtgggttgtgattgataggagaattagcgacttagcg

SEQ ID NO: 50299 - DNA, 509 bp, Arabidopsis thaliana landsberg
acgaacaaaacatactcctgctgatttaactcctagaaagacggatgacatttatttctatattgttaccaaaatagaaacaatatattggcagcactataactattagatatttatttcattaaaaagaataacaaaaataaaaaaaaggaaaagaaaacttgttttaaggataccattattaaagcatttcacccaaaatgataacaaaaacacagttatttttaggaaacaaaaagtaggcttagtgaattttagccgagaagttgattctagttgtacactaaattgtgaatgaagctaaagatggaaaggcaattaaagggaacttgtggcaaacttccataccggtttgtttcagctagataatactcatcaaccatcatcatctccaagtggtctagtctcaactctccagttgaagcggtacacgaagtttgccaatcccacctcaattaacattgttgcaaaatctatggcaggacataaccttcgtcccgatccgaatg

SEQ ID NO: 50300 - DNA, 916 bp, Arabidopsis thaliana landsberg
actaaaaacatgattacagttaatgataacaaaatcaacctagtaatgtaataataatacctctataaactttagcttatagtctagatccccaaatctctgagagatctcgtactcttctcttaggtactcgtatatctgagcatatctagcttctctccaagcaatctcggatctatgagaaaacaagagaacatatgagtctcagcatatatatatagagatcatagaaaacaacaatataaagtgatttaacattagtagaatacctctcaaacaaaccaactttgagaatcacatcggctatattagaattcgccttccctacaagttggaagagctttttcctggtcattgtgaatgttccggttttcgccattgaacggtttatatcagcaaactcttccaccaacttgttaacctgagataaatacaaatctcaaatttaaccatatacttgtatcaattgacaacactgagaaggaacaagttacctgagaaacagagtaatccaaagcaatactttgtccgagcacactcccaattatacggatgctattagtatccaaagttttgagaacaatgtagtcagggccacctttcatttcctcaatcagcaaaggcttctccttcacagcataatctaacacaacaaagtccacaaaagatcagttcatttacaaagctatggtttcaagctaagtgctgtaagagaggacggatgctaaccatcttttctcatttctgtaagcaatccagaagcatgtctacgaacaatgtcgagataacggtcaacatcattatcatcaacattgaaaagaatagcagaaccatattgaaagacaaccatgaacttgcagttgcttacactctccctctcgtccaaactctaagaaaggtaacaaaaataaggtac

SEQ ID NO: 50301 - DNA, 528 bp, Arabidopsis thaliana landsberg
gacttttcgtggaaagaggttagaaagaaaacaaagagaaagtgagaaaacattaaccagaggaattgttttggtgaaatgtttttctctttaccttttttagacttttataactggtttattcaccaaatggctgatgttctaatatttatttatatacatatatatatacaattattagttttctctttttttgttttctttaacatcacctgtctaaattctacgaaggaaaatgtaatgtttcttttcttaaaatcaaaaacattatactatctatctatttggttagtgttaaactgttaattcaagaaaaaagatagtgatacttttgttgataatgggtattcagtttatgtgacacttgtatggatacttctgtataacaatctagtgaagtgatgatgattagtgttgattgataagtcgttaagggaggggtagaaagggaattatagaaatgttgaagagaaaattgggtcaaagccacctggcccgagaaaactgtagttttgatttacacgaagc

SEQ ID NO: 50302 - DNA, 144 bp, Arabidopsis thaliana landsberg
tcgactctacgacgctccctactttccttcgttcctccttggctgtttttccccccgttttctcccgccccttcgcctctctctccccccccccgcgcccctttcgccccctgtccgcctcggccccggcccgtctcccctggc

SEQ ID NO: 50303 - DNA, 733 bp, Arabidopsis thaliana landsberg
aagaaccactagcccaaaccaaaacgaaagatctggaaacctcaattttatttaattacccataacaacaaaaaggagggacggagtaattaacgaaaaaccttaaaaaggaagcacatacgaattagctagtaacatcatttgctaaatactaacatcaatatattaattgatacacaaatttaacatctttccccccctatcgcataaattgacatcaattacgaaaatcttgcatccctattttccagtcacttgtaaccttatttgttgtgcctcctacagagagaaggttgcgggtttttcgttgcatgtgaagtttgagaaaggtaccttaatgatgccgggtttcgctgctaatgaagcgtctgatatgtttctaagaaatgtaattgcatttgagcagtgccatgcagccgtaacaccctttacttctaactacatacatttcctaaatttcctaatttcttccgatagagacgtcgaggtgcttatcgatgaaggtacaattacaaacatcacagaattattacatttagcacttaatagatatgaatgacaacaaatgcatgtgttgctggtatatatataggggtggtaacaaacactatgggtcggccgagcatggtggtggacatggtgaacaagttacaggttggtgtgacagtagggaccatgttccaataccacgacatattcatgaaactcaagctcatataaatctcgaagaaat

SEQ ID NO: 50304 - DNA, 2211 bp, Arabidopsis thaliana landsberg
gtcgatttcgattttgtggattatggttttggttttctgtttttgttttgttcttatcaactagaagaaaacttaattcgtgtgtaatgcttgttgttcctacttaactagagtatctttgtagcctgaaatattgagtaggattaattttggatcacaagttaacaaaaatgcctattgcttgtgtctatagtttcccagacactcaagagaaactataactttgaaaatattctgtcttttttgttataactatcgattagatccaagtaaaagttcaaagaacctaatttaatcgggtcatgttggatttctaggaagaagatgagaagcttatattcaaacagcagctgagtttgtcccatttatggcttcttctggtattgtgtcttctttgattgtcattggaagggactcttactgtctctaattctagagctgtgcggcttcttctgagagatcttagagccatttgcaatgtttcaggtgctatcagtggctgttccattactccaatggtgtttgagcaaacaggacaagacgggtctctggtttgagctgttggggttgctttgtctaaacactcaacatggtagacgtgatggcaggggaaaacaccagtggctggcatgtctctggatctcaagatcttgtatgagctccatggagatttctgagacaaaagcttcttgcaaatcccgcatctttgatgtgtcattgaacctggttcagatctcgggtttgcggcttctgtgtcattggatctttcaacatctagtagcatgtcattgctgcttgagtttggtgatacttcttcctctactggtgagccttggtggtttcttgtggacatcatgatactggaaccagtatttgtggacgagtcttcttgcgtatgatcaggttcaggattctcacaaactgaaaccgggttgcagaagactcgagggtaagagcagtgagtaaggctggaagactgcttgttggtccgagtctcccatgggacagatgactctgaaagtgacagcaacgatctgaaactcgttgagatggcggtactgtctctatcaaaaccgttctcctgagccgtaattacatcaaagagcgacaaggttcagccaaagatgaaaccaagaaaagcccatcttgaagattaatgacttgatatgtaaagaagaccaaaattacctcgtttaagcattgaggatttgagctatttggtcttgttagactattattaaccaaggaggttttctgttcgttcccatcagaagcagatgagtatggagcccatcttggcgactgctgaaatctgaattccaaactttttctttgtctactgctgcccgagtgcaatgcaaaagcgggactctcatcactcatatcctgttccaaaccatctctagtatagccagcagcaggtgaaaagctgaaatttgtccgccattgcaaggcatcagcttgacttgattgaggaatatcccttccgctgcggggtgatgattttgttgtaaccagtggccttgaggccacaatacaacagagtgcacccgttttgagctctggtttatcctcaccgccttgaaggccaaacaatgctgccaaaaggaagagacttgaagaatgatttcagttgaaaccaaagtcttctttttgtaacttgtaaacactgtggaaagctaagttaatgattgtaatcttacttaataaatgaaattcttgattatacagccaaaatccccgagtttagtgattagtataaacacattcataagtaccaagccatctctacagggacaggaacacatctgagacaaaatggaaacaacagtatttgaggatgcatataaattaaactaacgcaatatttaagacaaaacactagattcagactcgtaacagctgttttgagctcttataatcacagaagaaatttagacagcaaaagattcattgatggagaaaccaaaataaacaaacccaggaagaattcgaggaagataaccaagtgtcggtgaaagcagactacagattatacagaaaaggaagattttaaaaatcaaagacaacaaaccttcaaactttggaaaatgataacctgggtttgagaaagaactctgtaatttggagatggctgatattttgtaaaatcgatgagagtaagagagagcgcacttctctttactttttctttgtctctttttggttttg

SEQ ID NO: 50305 - DNA, 692 bp, Arabidopsis thaliana landsberg
gaattaatgtaaatgatagcaagtacgatcagagcacttttaagtgcttttagtgtgatcgtgaaactgattctgtttagatttttgataggtgtgtatgatttatctccttataaaccggttttaacagattttatctaagtagggaaaacgggttttgaactgtagatgactaaatacattgtgttttcgacatatccatcttcttaaaccaagttatactctttatggtatattataatatatgtatgactaggggttggaaaatttccttatttttagacaagatttgaagttgtcattttgacgtcacgagggtcatatatataatgctttttcgataagaaaaagaaactaaaacattgaagaaaaaaagaacaacaaaacaaatcgatcttgaaaaagacgaagattgtgatttgtggtttttgacgtacatgcatgtctatttcttattttctgtttgtttttattttctcaaaaaagtaaaagaaaaaatgagaaatactgaaaaagccaaaggaagttgcgtttcatgagatcttgtggcatccagagaattttgggtgaaccctttgccaaccagacaaagtactattttgatggctatatgaattgttcaaatttgataggcaaaataatatatcaccacaaaaagatatcaacttcaccacattcaccagaaatttagg

SEQ ID NO: 50306 - DNA, 543 bp, Arabidopsis thaliana landsberg
gagacgggtaggtgatgtgcgcttcgctccactggaacgggtcggcccagccgcctgaatccgcgcggtgtgtgttatggtaggtatgcaccagctttaagaatccgtttctcaactagaaaggctgcagccgtcggtagtcttgagcatacctagaagccccccaagccgctaggaaactgggatgaatgggacccaatcagatgtatactaaacgaacccgtacgactgaagacaggcgcatgggaaagactacccaagcggcgtctactattctccaggctagcggtaactaggaagggggagttagttttacctgtgtcggccagtgtacagcttatcaagcacttaaaggacaggaggtccgctgttcagggccagcttggtcggggtgaagtgaccttccccatgcagcctgtctccaacgtctagtgtctagtccggtagcataacgcacccagccgttcccggcttcaacaccatccccctcctcgccccactggtccaagacatgcccgttcaccctttgatttgactagcaac

SEQ ID NO: 50307 - DNA, 848 bp, Arabidopsis thaliana landsberg
  unsure (1)..(848): unsure at all n locations
tttttattttttttaacaaaatccttaaccttaacaaacatctttttaacataaatgggaaaagtgtatatatccttagttagcgtggatattaagaaaaaaaaaagctaaaagaaaatttagaatttcactgttgtcttttttgactaattaaaggatattcccaattttaaatccaaaatattatcagaaaaaactaaaactattcattcacataccaaagtgtttattccacactttattggaaggaacaattacatctcctgtataatttgactgaaataatgtgtttaaaattactaattctttattattgggagaattttcttggttgcctaattaattacgttttaaaactataaaaggtagggacaaaattggaaatgaaaattattaagctgagtttttcaatggtaattaaaaaagagagttgtattataataaaaccgggaggtgagggcatgtcacatgtggtgtagcttgcacgtgtggtacgcgagtcgagaggactaannnnnnnnnnnnnnnnnnnnnnnnnnnnnnnnnnnnnnnntttaatttttttagattttccacccgaatctttcaacaaatctttaatctctccccttttttctcctttttattttattcaccccatttttttttcctctcaaagaaacaaaaacaaaacaatcactcacactacctcagaagaaggtaagagaaacaaacaaacaaaagagagagtacgggtttcttcttcgtcattctcacgaattcgtgaatttatttttgatttcgtcatctgggttttctcaaattctcttccttttttatcttttgagattttcttgtatcgaaagtgc

SEQ ID NO: 50308 - DNA, 441 bp, Arabidopsis thaliana landsberg
gaatttcgtcttcgtccgtcgccgttggccgtcgaaatccacgattgcgtaagcgctcgcggtgccttgaccatccttaggcatcagatttcttgcgctacagatctcaacaatcagcttcctcagaacattgtctgccattgtttccttctcggagataattgaagctgatcagatttttcttacgattgaagaagatgaatgagactgttcagtttcttttgaaagatagagagagagaaataaagtttgaatttttattttctagagagagagagaaagcactgtttgtgttcgacgctcgagagtgaaggtttaaaaaggggttggaggtagagtcacgacacgtcagtaatgccacgtcggataagttgccacgtgacattagaggacgaatcttattttgttttcttttaaagctttaaaatataaaagaatggg

SEQ ID NO: 50309 - DNA, 193 bp, Arabidopsis thaliana landsberg
ttttttttttttttttttttttttttgtttttttcttttttttttttttttttttttttttttttttttttttttttttttttttttttttttttttttttttttttttttttttttgttttttttttttcttttttctctttttttattttttttttttttttatttttttttttgttttcgtatttttttt

SEQ ID NO: 50310 - DNA, 780 bp, Arabidopsis thaliana landsberg
cggcagtaacaacacgacccagcatccagactggtcctagaacagacttaagggtagctgcaatcttagagaaagcaaatacaatacgcatggttcgttactctctttccatctccttcaaagatagtaaatgttttcaagttttttcacctttttctgtggtccttgctaatcgtagaggcttcatgtcaaagcatttcaatttgacatgaaaatctgaggagtttagtctcacattatgtcttagattggatccgaagcagtctcttaagtggaaacaatgaattataagcctgatcatagaccaaataaaatatcactttttctctatcgcacacacatctaaaaccggttgaacactggtgcaggcaatggctggaagcgacaaggatgaagattcagatagttggagtgattcttgaaatcgatgatcgttagcttttccatggtgttcgttcttgtatcatgatgagtgcgcaagcacttgaagtcaggtaggtaattcaatctctatttcaggcatataacattaaatacaaacagtcattggtaatttatatatgtatgcatgtataatgtgtcctgttttataggtgtgtgtatgttgtaatgtaagtagattccaaaatttgcagtagttatcggacaatttgtgtgtagaaatgtttcgttcttttttttagctcatatcacattcttttagtaggctatgtatgagtgtaaatcatacatacatagatatgtattgtgtgttctcaatcatttgcagtgtcctttact

SEQ ID NO: 50311 - DNA, 430 bp, Arabidopsis thaliana landsberg
tttttttttttttttttttttttttgtttttttttttttttttttttttttttttttattttttttttttttttttttttttttttttttttttttttttttttttttttttttttttttttttttttttttttttttttttttttttttttttttttttttttttttttttttttttttttttttttttgttttagggttattttttttattttatgttttgttttttgttttattttatttttttttatttttttttttttttttttttttttttttttttttttttttttttcttttttttttttttttttttttttttttttttattttttttttttttttttttttctttttttttttttttttttttttctttttatttttttcttttctttttttttttttttctatcttttttttttttttt

SEQ ID NO: 50312 - DNA, 1222 bp, Arabidopsis thaliana landsberg
  unsure (1)..(1222): unsure at all n locations
tgttattggatagaaatagcattaataaaggcagagcgaaaaaaagaagagatttattttatttactggatggtaagctacagaatctttataacaaacgtcttatcatatcattcatcatagtccacatttaattattagaactcttgagtgtagtgtcatctttcaaccacctgatcatatttctacttttcattagttaatttctttataaagcaaatatggttgcacattgcgagtgattcatcatttaggctaatgcgtgtagccatgcagttcatgagatcctgcgaaaaagaccaaatcatgcatgtacgtatcttaagcgacactttggtcaataaagctataaaaagccgattactttgtttacacgaaataccagcagaattaggggtgaattgatcatcataaaaaaaatggggtgtaaaagcgaagcatccttgaaacgcaagccaactttggcatttttatcattatattttctttttatcttgaactgtttattggacatcatatattatatttttatatttttttgattaaattgttttattgtcttacaagtgaaacttttaaaagttactaaatcgaagactatgtgattggtccaagcctcctcttttggctgaaaattggaagcgactgtggattataatcatatttcacatagacttaagtaccaatgaacttaactcgtcgcaactcgcaactcgcaacttgaaaccagcagaaactacaaaatgcagaattaacagaataacatgataacgatattaatccttctatctatgtcgacgttttcctagtagttagaaatgaaatactcgagtgctgacaccatgattatgcaaatgaagaaaaaataataatgcattatcggatgacacgtcaaaatcacgtcctaatttatctcgtttcataactatagtatagtatattatctatcgtcaaacaacgtatagttgtaattttatactagtgttattattattgaaaaattagatgcatggtcgtagttttatactttgatgtagaaaattaaaagtcaaaaaagtaacacaaaaaataataatgacgagagcgatgatgcaagagcttgaaatcagaatataaattggatcaagagccgtcgagaactacatncaatggctagattgtcatcttcggagatcggacggacaagactngttgaccctaccctcggtcaattaacacctac

SEQ ID NO: 50313 - DNA, 1107 bp, Arabidopsis thaliana landsberg
aacactacaaattatatttttttaattattcattcaaattttttaatttaacgtacctaacatgttaagatatgagtttgttacaagtttagcaaggtcccaatttttatatctatcaaaaaaatcacttgtgaccgatttttaaaggaatgttaatggaaaaattgttgtccaatagggtattttaatcccaaagaaattattgagcaaatgattaattgattatcatttccatatctccaactagccagtcaagaatctctcatgtttcttgtaattaccacttttcctaagctttttactaagattggacttgcatatgtttggagatgttttatccatattttagagattctatatatacacccttgtaacgatcatatattttctatttaataatagtaattaaaatgaagtatatcataattagaatgccaattgtttatatattgccgggaggaatattatacgatatgccaagaaaaacaaactttattttacaaaaaaaaaatgaaaaacaagcattagtttgtaacattaatctaagcactcataagtaagccgatacactaaaatagcatgatcttagcatctaacaactcaaataatgcatacattgaaattcagtaaaattccaatttcaaaccacgtaatattttcatttgtcatagtaactaattttcttcttgtacatggggctacatagtcattattttatccttaagctccaaaatattgatctgtttgccatcctccacctgaaaatttgaaatgaaatgatgattagtgtcaattttgtttttagaaaattaaggcaagaaaatatcaaacactaaaacttttttttagaaaattagtaatttatttatctaattctaatttcaggtaagtatattcattgtatttttgataaccacaaaagtagtttacaaacagattataatttgtatagaaattagcaaataaaatggtatgtgaactaaaaactgatattagcaactatgatagacccaaagttttgtaaattcttgtaacctttttctcttatattttttcagtaacaattttacctgcgaaacaatggtgtgcatgaatctctgttgccgt

SEQ ID NO: 50314 - DNA, 478 bp, Arabidopsis thaliana landsberg
  unsure (1)..(478): unsure at all n locations
tnnnnnnnnnnnnnnnnnnnnnnnnnnnnnnnnnnnnnnnnnnnnnnnnnnnnnnnnnnnnnnnnnnnnnnnnaaggaaggttaacgtacgcgatgccttccatttgtacgaatcgcgaacataccacgcacgaccggacgtagaggcaaaattcactggcagaccgagtcgggcgcaggtgccagatcctcaaagtatcgtaaagttaagttaagtatcgtaaagtatcgatcagcctagtgtannnnnnnnnnnnnnnnnnnnnnnnnnnnnnnnnnnnnnnnnnnnnnnnnnnnnnnnnnnnnnnnnnnnnnnnnnnnnnnnnnnnnnnnnnnnnnnnnnnnnnnnnnnnnnnnnnnnnnnnnnnnnnnnnnnnnnnnnnnnnnnnnnnnnnnnnnnnnnnnnnnnnnnnnnnnnnnnnnnnnnnnnnnnnnnnnnnnnnnnnnnnnnnnnnnnnnnnnnnnnnnnnnnnnnnnn

SEQ ID NO: 50315 - DNA, 485 bp, Arabidopsis thaliana landsberg
actcacatgtgttggacacactggcacctgagacgctggcgcgttaggaccatcttcacagaaccatcttcccacgtgtcaccactccgcgctaaatcccaaacagaatcctcacctccaaatcctccgcggggccgttagaacggtttgccagctggtgtccttggccgggatataaaaacgtgaccttccccaggcccctgggatcatctagccagagagcagggccatagggcatagtgtttcctcaatgtagagagtgtggcactgggggaacagccgaacagccaccatcgtagaccgtcatgtgcgcactcgctcgatgtcccgcgtgcgcctaggatggtgcgccggtgagtggtgatcttggccagcgacaactcgagcgcggggagtcattgcggcacggcgatttcttgtcgatgttgaagaatctgccacgagtcgttgttcccattgactacatgcgctggtgttcgatttta

SEQ ID NO: 50316 - DNA, 371 bp, Arabidopsis thaliana landsberg
taaaaaactcgatcaaagaaggaatgactgccctcccggttttcatagtagaaagacctgaaccactcgtcccagccaagaaaaccccccaaccctggccccccttcgcatcacgcgccgaatctctcgcatcactgcccaggggaccgcagtagcgcatcacagcccaggggagcgtggatcgtacgccagagcgtgtggtgcacaacaaggggattatttttggtgcgaaaccaagagtcgaacccccgatcatgtgaaaggtcacgcagccttcaccactaggctatcacacctagagcttctgtgattaatctaacagaaagccctaacagaagtcaccagtggtgtcgaattgtgacctaaaataa

SEQ ID NO: 50317 - DNA, 1331 bp, Arabidopsis thaliana landsberg
aagatttagggcttgcctggaagatattaacaacatacaatagatgttctatttgttttttgtcaaacatcaatacatgttcaatattttgcatatttcatgtaaattatcaatttctagagtgtaaatcatgtagtctaagttttcataatgattaatctcaacagtcaaaatctaataagtagtggaatcgattgtaatttgttttgtattgcagaatttgttgaatataaagaaaaaggaatccaatgaggagacaaaattaaccctatcctatatcccgttaatccaaccttaaccaaaaaatatatatataaattcttagtttggattagcttttgaaactgattttttgtttataatattaccataagtccataaccatcacgtaaaatcatatatacgcatgtttccttcatatccaaagtaacacaatcaatcctgcttggttaaagagtaagtttcgtatattgatattctattttaaacttcattcccttcagaagaatcacaaacgttgttttcatattttactttgtttgctttatgaaaaaagaaagatagataaaaatctttggttgtgataaccgatagcaacaattcactttaattgacaggcacaacgatatcaccgacgtaacatcttgtaaaaatgtttccctctaattaaagggagacctatatattattgatcataagtcgaatgtgaagatttaaaatgcaaattcatgtcgaagatcaagtcgcacaagttaaatgatcacattgttgaccaaaaagaaaagtgtactcatcatactattattttagtatttcgattgtttatgaagacctcccggaaatggattacaaaggcgctccttcatgtattaatctttaaaattacatataccagaaaaagagatgacttttataggcaatctgtggtgtattgcttacacatttcctactgctccagttggtaaaatggaacgaaaactgatgaacaaaaacaattaaagtatatataatggttacaaattatactagtaatgagttaaaataacaaacttgtcttcatcttattgctcatattcccaagattcggctcacctcggcatataattttccgtaatgtaatttggaaagaaaaaatcttacatgcaaaatcatgttcagaaacgtcattttattaataattgttggcaaaaaaaacatagattttattcaaaaattatagtattaatcgcttaagaaaatgtgagtccataatcatacgctagttccaaccagaatcactgaaaaatgattaggtatagtgaaaatgtgaaattcatcttcaaatagaaaat

SEQ ID NO: 50318 - DNA, 165 bp, Arabidopsis thaliana landsberg
ggccgatcagaggaaaggcatgtgacaaaaaagagaaatcaagggaaggaaaagcacgaggctggaaagaaggaaacgaaataaaagtagaaaacaacacgcgaacaaacacgtgcgagacagacaaagaagacgcaaacgaaacgggctcaacaaaaaagaaaa

SEQ ID NO: 50319 - DNA, 310 bp, Arabidopsis thaliana landsberg
agatgtttaacatttctgatcctagattttgatagtgagatgtgtagtgtattttgaacgttatttcaaactcggactcacacaggcgagtgagatttatgtcagcggaatggctcatgaagaagaatggtgcaatgactataagctctatcatgagaacagccatggcaaagaacggaactttatcctcgcattttctaaaataagaatagctccgaataggtatgctactcacaatggagcgcacttagggtcccatatattatgccatgcattggtaaggagattgaccacagcgtgaattgatcac

SEQ ID NO: 50320 - DNA, 921 bp, Arabidopsis thaliana landsberg
ggggatcatcgtagctcttgcgattttcctttaacaaaatccagagcaccagtactctcttctgaagcactgataaaagttcctgagctgtaacaacaacacaccaggcaaaaacactgaggctactgaagaatgtttgactgaagaagacaatgcaacatgaaactagaaagaaagaaagaccttgttcttgtgcccttagtgttctcagcagtttctcctttccggagagccaaagcagaaggtttcagattaacctttgctctctcaataatagcttggcattgttctgcagttgcaaaattcggaaaatatatagccctaggtctccaactaagtacctgccaattttaaaccaaataatccataaagatgaagtactaaatttcactagttgactaattgctaaaaaacacaatactctcactcacactcatggtcaccacacatgaacaaaaaaacaaagttcaattagataatcaaatgcacaatcttgccctaactaatcgatttcacctaatttgccaatccaaacatcttaaaagtctaaaaattagcaacaaaatcagacctgaaaaggaatcgatccaatagattcttctccagtaacaccatgaggcatcgagctagcttcttcttccccattctcaaccatatccaacattctcaacctgggtttaacacgaggcacattctgatcccaaacatagaaccctcgattagtcacaaaaccaagctaaagactccaatcacatctaaagagtacagagtaaaagatcagagagtttccacacctgagaaagtagagtggagccatagaaaccgaagaggaaacagagagaacagaccccgatacctgtggctaaccctagcttcttccacctgtaactcttcaatctgctcttcatcgagccttcttcc

SEQ ID NO: 50321 - DNA, 533 bp, Arabidopsis thaliana landsberg
atttgaatttatttagtgtcttaaacaatcaatttactcttggattattataatactcagggaaggaaaatcgtaatataaacataagtgaggtagaagtgaagtggtagagtaggttatgctcgagagagatttgcgagtttgaatcccacctgctgcgaaacacgtgaattcagctcaaaaatggtagagaaatgggtaggacaatggcgttggttgggggttgtcccctaattaatgttttcctatgttttccagatttttagcaatttttattgccgggtgcttttatttgcctagtgttttttacactcgacaaagggtttgctgataaattttttaccgagtgttcgttgttgagtgtaatactcaataaaggctttgctgagtgcaaaaagatctttgccgagtgtctagtacactaggcaaataaggcgagttcggtagtgatttattagagatggccaaacaagcatggcactttacgcacaatattattgggaactgtaagtaatcgacggtgtcatgcgagc

SEQ ID NO: 50322 - DNA, 340 bp, Arabidopsis thaliana landsberg
cacaaaatgacttgcaaactgtggaaccttgtttggttggttatatataaggaaaatatatcagttgtttctaataagatatgtgagctgactctcgagatcatgttgggcagaaggataaacaaatccctactagtgaataaagtgatgtggggtgggtcatcaaattttgcgaggacttgataaatacattcatattcagcgatgatatattggaatcatctgggccttttgctgaaagaagccatccaaaaggaacataaacaatgctttttatattttactcacttgctctatttatgaagacgaatggcaaatatttctttagggccaaagagta

SEQ ID NO: 50323 - DNA, 635 bp, Arabidopsis thaliana landsberg
cagtttgtttcttcacgtgtattgagtgatgagagtctctgttaaaaaatggctagggagaagtggcaacaggacatcgcatagatgtcaagaaatcttacacttcacttcatactcttgtcaacgacatgtttcctccaacttcacttgttgagcaggtaactagagttataatcttttagcaaatataaagtaaagtggattcatcagtggtttcaaacgcttgcttacacattcacaggaagattataacccatggaatttctggaaactgccaatagaagaggttgaatgaagaaatcatgttacagtacgagaaacttttccggtttctaaaacgaggtgcagatgggtcggacatggtggctgcggaatctccattgttggactttctagtcttattctgtgactttgtagacaggaaagagctggaaattgtagacaagaaagagctggaacttgtctctactctgtaatttatcatgtaggagttaacacaatagggaaagaactatataagctgtgacaatgttctgtacaagaccttattttctttggatttttctctttaacatctacagaaagaagtttaaaataatctttatatttgggatgaagtatcagattagtatatt

SEQ ID NO: 50324 - DNA, 1111 bp, Arabidopsis thaliana landsberg
aatccggacctttacagagatttcaaccattggtatattaaaacgcttgcacaagtacaccaatttttttattttagcaccacctgcgcatagaccgagtcagatgagactcttattgatgtttttactgctagtttatcatcatcgattcatttactcatataccttttcagatggacgtttgtgaaaagtctcctagcagcagccctagtaaacatcttgaagccacactgattaaaaaaaatgatgtttagttattactattcaagattggtgaaacagagagtgtagaaggaaacaacgaatgagatttaaaaagccacctgtgtatcccgaataccaggaccagcagctaatagaaccacatgatggaaacccttcatcagaaagttgcgataccatttcctctgaaattgaaagactaaaagtcaattatctaagatgcgtaataagtatatgcatctgtatgtgtacatagacttagaatgatgttgtctagaacagaagtttgcaagacttaactgtagcaagagctttctcctcgagatgagcacgagaaccaaatgcggatacttgaacatcacctattttgaaatccatatccttagatgctggatttctgattgaatattcttctctggctactgcattgatctgagaggctaggagatcaggaaatttatagcacaatttctagtttctctgaagttttaacagtcaaaactaagggcaaacctgattttcaagtttttctaggtccgttactttagttgctccatcagcatccaacatgagaagtagctgaccccgcgaatgcaacattccctattcaatgctttcaaaaagtagaaagcttcgattatttttttgtactatgaaatgacaaatttacagtcttactcaatcacataaaataaatatatagaattgcatgcgctacgagttgaactcacttttcttatagcttctcctttgccttgattcttcccaaggggtataacccttatgttgtcaattgtgtactttctaatgaaatcaaaagctactctttttgttccatcaacacttccatcatcaacaatcaccacctaaaaggagaaaaggtaaactt

SEQ ID NO: 50325 - DNA, 1176 bp, Arabidopsis thaliana landsberg
  unsure (1)..(1176): unsure at all n locations
ttaccatgtatagtattatgaacatatgaagcttatacatgtatagtattatgaacatatgactgtgtaaaactaaaactaaagatatattatcagccattatcccattgtttcaactacacaaaatcaccaaaatgtaggatggattttctgtcatttcaaatcacaagacgttaaagttttgtcgttgataccatttgatacatatatcaagtgctttcattggcggtgaaattaattacgtgggtcacataagcttcaacaactcgtgcacatacatctaacaaaatttgaattatgaaaatatagcttaacacataaaaaaaattgttttgttttgtcaccattacaatgatacttctttaagagaaagtaaactgtggtagaactaaactatgtcttctgcacactgaccacgagatcaaaacattatgcattggctttattttctgtccacgtgattattatatgttattggatagcaattttctctaattaatatcaattgttttcaaaatcagagctagttcaattttttatttgctttaaaacactatgatggtaatcaactaattattaacccatttgtggtttaatataagttttcaattttcaatatggtcctaatattagctacactatttctctctctctctctcttttttcttcttaaaaaccttttaaaaaaaatcaaatcacttgaatttttttttaatgacatttctcaaacaacccagacaaactatcccatcttagatattccccacaagttgggtggcactattaattatctttttgtcgtttttttttatttttatttatttgttattaacttattttattggaaagtttattttttttgtggtacatcccatgttcccattggcttttggcaccaaacatttcctatagacacttcaaatatttgtttaggtttttgaaattaattatgcaacaaatgtttcattatattttctttgtttctaagaaaaatgcgagtaatagttccaaggataaatcattttcttttaatggtacatagccacatatgcaatcataggatgaggttggagtcaaagatatggttatatgattcccccgctcataaagaattattatattaatgataacaaagcttctccatcgttttacatatccncattgtatatatccata

SEQ ID NO: 50326 - DNA, 1431 bp, Arabidopsis thaliana landsberg
gacccggaactcaccagcttttgccgggtttgctatagcgatctcaacacattgaaccgtgtctcttatatcgaggtagcctctcgtctgcaaagggaaaaacttcaatcaaaacctcaaatttttcgattgaaatttcacgtgaaaacagatcaagaaagtcatttacctgaccacctttaccataaactgtaagtgggtgaccaacagcagcttgcacacagaaccggttaagtgctgtaccaaacacagcatcgtaatccagtcggttacggagttcctcatgcatctctgtctcatcagtcttcactccataaacaactccttggttgagatcagtggctctaataccccaagccttgcaagtaaaagcaatgttgtgcgaatcatgaactttgctaagatgataaaaggagctagcttgcttggggtatggcaaagtgtcagttctaccgttgtgggttatggttatataaccttcctcgatgtcaatatttggagttccatactcacccatcgtcccaagttttacaagatgacactcctctccaaactcttttatagcaaagagaacgttgagagtcccaatcacattgttgtgctgtgtataaactgctctggaccggtcaatcatcgagtaaggagcggatctctgttccccaaagtggacaactgaatccggctcaaaagacttgaaagactcagctaagaattcgaaatcacagatatcaccaacgtacaactcaattgatttccctgtcaaagccttccatcggctgattcggtcatgaatggaggcaataggagtcaatgactcaagtccaagctggtggtcgaaaagacgtcttacaaggttgtcaacaatgcaaacttcgtaattcttcttggacaagtggagagcagtagcccaaccgcaataaccatctccaccaatgaccataacacgctttggtttagaggatgagttattggtagatgtttcgggtggtgcttgttgggttataggtacagcagttgctctgaaaacgcagctttttctcggtttcttctcttggaagagaagtcctttgagagaagatcttgaaaaaagctgagcattgaagaaggtctgccctgaaacaaacggcttaactgaattcttgctgctgctgctaagtgagataactgaagggcatgaagctgaaagtagatgcgccattttaaaggtttgttcttgattctatcaaacaaattcacctgcaaaaacaaaagtagctaagatttcaagacataatttggttcagcagaacaagacatatcaagtagatgtttttataccatataacaagttaggattcagctgattttctctagtttaacttcaaattcaaatcaaaatccaaaaagacaagaatagaaatcgaacttttttctgacacccccccccccccc

SEQ ID NO: 50327 - DNA, 1007 bp, Arabidopsis thaliana landsberg
aacatcaagaacaacaaacacaaaaaaaaaacagaaagaaagaaaacaaaaaagagctagtcaacaatcgtgattcgtgatacaacgtgctagagagacgaccagatgagatagggcacgtgtcgaaatctataccgttacttttctaactccgtgctcggaattcgaaatcaacgggagacacgtgggttccacaatggacgttatttccatttcatgacaatcgagaaatagttaaataaaaaataaaaaatattttctaaaatgaatacaaaatcaattcgaatttcgctttggaattagaatcatttttaaaacatatgaatatagtagtacaagaattttactgagtcaatgtccaattatcattaaagatatttgactctaatccattctctttctctaatttttctttaaagatattatagttaatcacatcatttactttaagagaaagatatccgaaaatcagaaaatgttaagatacattatctaatttcctttaattgatacggtttatgattttaatcaattttctatttgtacgaaaaacagtaggtataaagtaggtccactagtaggacccacctaagaaactcttttttaacagagggctctgttttttttttcttcctctcctctgaaactgcgacgaccacatctctgttctgtattccacttatgttttgtgtttggttttattttccccagaaattgaataactttagcttttaagaataaaaaggaaaatttaaaattgaaatttggtctccttgagaagtgaataaatgaagaaaaaaaggaaataaaaaggggtttttggtaatatttaaaaattgtagaaatggtgggggtgggggaaatttctagctgactgttcgacccccggtgaacggcccccagagagccggtcccagtccgtgccactttcggaacgcggcgacccgttctcgctgtggtatcacctcgagcagtccgctacagccgtcggtttcggaactggtacc

SEQ ID NO: 50328 - DNA, 736 bp, Arabidopsis thaliana landsberg
  unsure (1)..(736): unsure at all n locations
tatttacactaaccaattaaaaagaaagactctaagttttcggttacaaatgtcatacttgctgaattgttaactgttctactatgtaactgacacccaaaaggagtgacaaatggtcacctaacctatgggcctttgtcttacccaacctaacgcttgtaattagttccctattttgtccccatgcacacacaaataccaatatttatgagcacaagaacaaacattggtaaagaaaagattaaccaaaaaaaatgaagatgtacccaaaatctgactcagacgtcacaagcctcgacctatcatcaccaaaacgtcctacttactacgttcaaagcccatcacgtgactccgacaagtcttcctcggtggcactgactactcatcaaaccactcccacagagtcgccgtcacacccatcaattgctagccgggtatccaatggcggtggtggcggtttccggtggaagggacggaggaaatatcacggcgggagatggtggccggctgataaggaggaaggtggtgatggacggtacgaggatctttatgaggacaacagaggagtctccattgttacttgtagacttattttgggagttgttgcgacattgagtatcttttttcttctttgctctgttctctttggtgcttctcaatcttctcctccaatcgtctacatcaaggtaattttattcttacttacatatatagcanagattattcaccttagttt

SEQ ID NO: 50329 - DNA, 274 bp, Arabidopsis thaliana landsberg
gttgatatacagccaaaatatgggtatgcacatagccatatatagcttttttttttttggcaaaagccatatatagctatggagtcagaataaataaccctcttaaagggtggtgtggtttcactttggttgtacttgtgaatatataatatactaactgccattggtgggattatttttgtttcagcgtgtagacactttcatggtcaccttcagagacctggcagaagaaaggtattataattcgtatttttttgaggaatctcttaagcaa

SEQ ID NO: 50330 - DNA, 582 bp, Arabidopsis thaliana landsberg
  unsure (1)..(582): unsure at all n locations
ctaatgaatgatacgtcacacatgacggtgtcatttgcaacttttaaattgtatgcagaaagagaagaatgcacagcagctctggtagcagtttcagagtcaaaatttaaattgcaaaaaatctggctctagtaccaggactcggtgcgactccttcaattgcattgcannnnnnnnnnnnnnnnnnnnnnnnnnnnnnnnnnnnnnnnnnnnttcaagagtaaacaaaccaaggggaattcattcatttagattcatccgatgcttcgccttggcttccagctcctgtacattgtctttgccatgctttgcttccttatcaactctctctgtacatcacaatagcgagcggacccccaccccccaaaagacagacgaaatcacccatatctcttctatcccatcaattatgacactggaacagccttgtacatgtatgacgttccatggaatatagtcaagtgcgccccattaagataagcttccagctgccaacaaaaaaaagaagcacaacatcgattagatttacatccaacacacacgatctaatgtgaatggggcagcctaactcttcgggagaga

SEQ ID NO: 50331 - DNA, 268 bp, Arabidopsis thaliana landsberg
atgggtcagaacctagctctcaacattgcagagaaaggcttcccaatctctgtttacaacagaactacttccaaagttgatgagaccgtcgaacgagccaaaaaggaaggcaatcttcctctttacggcttccatgaccccgagtcttttgtcaagtccattcagaagccacgcgttattatcatgcttgttaaggctggttctcccgttgaccagaccatcaagaccctctctgcttatttggagaaaggtgactgtattgtcgatg

SEQ ID NO: 50332 - DNA, 508 bp, Arabidopsis thaliana landsberg
  unsure (1)..(508): unsure at all n locations
tgaagaagttgtggtgatctgatttgttttttctttcttctcgccgttacttgtgttcgtgtttatttataggtgcttgcttagctggttatgatctctatttgatgtttccgagatatttcttcatttttattttcccgaaaggccaaaacaaaaaaactatggttcatgtatatgattatttatttggaaaatagttaattgtagtagttaagaaaaaagacaattaaattgtaagaaaatgaaaatgttaggtcattcttccatattagtagtgaccaaaatacataatttatttatgataattctgttctcagatcaatcatacaaacatacacattgtatttgtatttaattgctaacgtaaaaacaaatagttttttttttatatccgaaaattacgaaatagaattccaaattaatttccggtattcacaaaattatgttttaatatatttaaaacgtataccanaataaattaataggtagactcacaaatcgaatttga

SEQ ID NO: 50333 - DNA, 526 bp, Arabidopsis thaliana landsberg
taagaaacgctgattgtgaggatggcaacatttgcttttcaagactacttgttaagtaaaaactttaaatgtaccaatacattttgccattttagcccccctcacatttacaagcatttttatagtttacaccatgatcgattgatataagttcatcgatactatatcgcaaaggacgggtttgattttggtcgcggcacagcggtttgcaaagtagtcttattagagaggttgtttgattagtacaatttgtgtttaggccggtttaatatcttaacttgtgagtgaaaaaaaacaataggtgatcatggtatgatgatgtatgactgaatgatcaacatgatgatgaagtatgaatgggacctaaagaagtgaaattaaatgtgcttgcggcacgtattagtatatcgcgtcacatagacacaggactcagcacacgtttcttcttcattcttatgattttttgtgcctttttatgtttaaataacacacaaccttatttaagaagcgctttggattcgccaga

SEQ ID NO: 50334 - DNA, 420 bp, Arabidopsis thaliana landsberg
  unsure (1)..(420): unsure at all n locations
cgtttgtcgttttaccctcgtcgtgaaattggtctgcggtcggatgtgcggcgacaaagatctcggagaggtccaagtcccggttcttgagcttcttcatggttcttcgtcgccgtcatctaacggtgacggtcaggggatgatgagatttgttacgtatcaggtcagaactccgtttggaaaaggtcaaggctcgttgactttttcgtacnnnnnnnnnnnnnnnnnnnnnnnnnnnnnnnnnnnnnnnnnnnnnnnnnnnnnnnnnnnnnnnnnnnnnnnnnnatcatcacacgtttacacgaatccgatggatataccgtctgatttctcgtcggcgacgacaaattatcctccgccgcaatcgtctgaagcaaatttctatccaccattatcatcgattggatatcctccgtcgtc

SEQ ID NO: 50335 - DNA, 493 bp, Arabidopsis thaliana landsberg
tgaaaaggttttcattttttttttccatttctgcagaatcgtgtgaactatgggtgttcgaaacaaatcgaatttttgttacgttttcatcaaaaagccgtcaaattagagcaaaaatccaatataaattaatttcgtaaaaacctagtgtatcgaattgcaaagagatcaattcaaaagagcagatatcatacccggatacaattgtcgctgagatggactacatcattagaagacgattcaggttgggacgaagaagaagaagatgcttctttgatagcagaagcagaagaaaaattaagcaatcgatgattttctctaatccgaccagccaaataaggagcaacgcgtttcaccagagatcttgacatagttttttttaattctttcggaaccttttttctctcagtctctttctacaattaattgagtgttatgattttttctccatggaaagttttaagctttctctggaacgaaattttctaccttg

SEQ ID NO: 50336 - DNA, 326 bp, Arabidopsis thaliana landsberg
  unsure (1)..(326): unsure at all n locations
aagttgagattaaagacgatgggaagcttcatgttactgttcgtcgttctaatgtttcaagtttttgatatttactcgagaaggattcatggcttatctgcgacacctataccttgtaatctaaccaacgctgatatatattcgcttcagagttcaagaaacccaacgccacgtggctttagttttaatcatactgatttttacnnnnnnnnnnnnnnnnnnnnnnnnnnnnnnnnnnnnnnnnnnnnnnnnnnnnnnnnnnnnnnnnnnnnnnnncctactccgagaccttccaactacgaagaagacggtggtcctgctaaacc

SEQ ID NO: 50337 - DNA, 401 bp, Arabidopsis thaliana landsberg
taccaaatcataatatcgatgacatagagaattttgggtgttttttaaagaaagaaattaggtgcgaaacaaaacaacaaagttatagaggactataccgttactattcccctgaggtacagagatcttaacgtccttttgatgatcgttcgtagcggtggagtaatcggcgtgtggtttcctcctccaccgccgaacacatctgagaccggcgaagcacttgagctccacacaaacatgtgaagatctcttccgtttccgtcttgtcttttcccaccaaccaccggagcgtttcctttcgccgccgtgcctccaccaccgccagtgttgggcgaaaacatccctgggttcggcgccggataatgcgctcctccaccgccaccacttcctccagattgata

SEQ ID NO: 50338 - DNA, 519 bp, Arabidopsis thaliana landsberg
  unsure (1)..(519): unsure at all n locations
gcatgacactcccgttcatggtgatggtctttcgcatgtcaaagcaaagatttgtttcttgttttcatgtatccccccattgtttggacaaaacacatgtctttatcgcttcttctgtggacaattctgataagatcttggacaacatatcgtcaggaagttgattaacattatcgattgcatcgatactgattcttttgttcgatgatatagaggatgcattttgtaagagagacatgaatgaagaaaagagagtttgactcaaaaactaaggaaatggaagtatagcttatttgattttattgttgcaaagaggagcacatcgtaaaatatatatacacataaggcaaatcaggttaattaattaccttcccgtttttcaattggagaattttgattattattttttgtctacattttcaaaatgagaaagaaaataatcatttaatacgtggaattatagcttagntatattatatatatttatnttattttatggtatatcatattctattacat

SEQ ID NO: 50339 - DNA, 967 bp, Arabidopsis thaliana landsberg
aatgttctgcactcttggacacgcatagagcactctgagaattacaccaaacaattacactcttcttttcaaacgatgttcctttaacgattttcattacctaaattgcttctttgatttgttttagttagtccaatatattttggctctatggttgattgatccactacattttgtaatctagactttcaactttgtataccatgtcaatggaacattttttacttataaaagatataacagttggacataaacatttcttaccaaattatccgcttttatattttcttgtcgactaattaaatattaaaaaaaatgtattttagtttctcgccaagttatccgttttaatattactaagttgtctttcaatttttaacaacaagaagaaaacatatttcaagttatccgccaaattaagttcatcgtatttaaaagtgtttgcaatggacatactttgtaaatattgtcacaataaaaatggaggctaaatatagatcataaagatagaaatgtcacacatgaatggagccatgcttttctctagtcaacagtcaatatttttttcctttttctttttgtctcccattggtactttattgttcttctgaccttctcataagtggcatgtaataaatttaaaattcgacataagccgtataggaatgttcaataattgatacacgactttgaataagatatttgtcttagttttttgaaatttgaaatggtttatattatataaggaaattttgaatagaaaatgatttatataaaggctgattattatttgctcttaaaccaagaaaaaactaagaattgttcttacaaaacaaaaactacaaatacaataatgtcaggacataaataccagctcgtatctttgctattaataatctgcctttctttcttttaatcaactgtaaaatgcttattttttgattatttttcatacaaaaaatgtaag

SEQ ID NO: 50340 - DNA, 1143 bp, Arabidopsis thaliana landsberg
ttattaaaaaaaaaaaacttttattcaatttaaaacaaaggtttcaaaattggattggttggtgtagtatttcacggtttattttattttatcaagctaagcggaattttgaatatatcatatttctgaaattaatatttcaaattcaagtatatgaaatagatagttattttatcttttcaagaaattaaattttaaattacaaatagaaataataattgtagcttctgtttagaagaggaattaaagtataattaattgaaagaaaaagtaaatttgtagtgcatataatttaatttttaatgctaatgaaagtgttacaaatacaattatctctaaagactaacctagatttaaaaagtttcaaatcacagtgagatattgaatcataattcaaacagaagtgaaagtaaaaaaaactctatcatacaacttcttatagtatatactatttactatatgtaaactaaattcaaaaattggaagtaagatttttttttttatcatacatacaacatttttgtgtctcattctttaatatttattttaagaaatacatgttcttcattttttcaatgtcaaaacaacatgttcttgcacgtgttataagatttttgagatacataactgaatcagccggtgctgaaaattgaatcggctttttttatccagaacttctggttttgcggcttttttaatttctacaaaaaatacttttttctagtgataaactagaatggaatatctggatcattttggattggtgcgatcagacaaattcagttcagtctaaagaatgttgctttaaagcaatgttctgtttatttttgtcattttgtgtttgtttggtcagtgcacagtaattattttaataaaagtaatgacaccacatttatatttttgttttggcaaattggcaacacacctagattagttgttagtttattttcctttttaacaatcaaactgattcaaaatttgcggctggtccagcccaaaaacaaatattggtgtaccaatccttcctttctagtttgtataatggttaatcatcttattaattgacattcatatatgttctatttctcgtcactatatatatcttataaaagcaaaagaaataatataatcttaataaaaatt

SEQ ID NO: 50341 - DNA, 725 bp, Arabidopsis thaliana landsberg
attataatttagctacaatataagaatttgaagagtagtgggatatgtttacctaaaaattaacagaaaataaaaaataaagaaagagaagaataaaccaaaatatacaaattaaaataacctgactaccttttcttttgtcaatgaataaaataatcttatatatctaatttcattaacggaatcttgaaaaaaccttccgctaaaactttttgtttacagaataaggtattgttctttaggttttattcatttatttttttaatttttttttggacaacgaattttattccttatgaatatgaaaacccatgttagaaaaaaagagtttgataactttttttggtagttgttgacatttacttttgacttaaggttcaaacatccatttaccaaaaggacgttgaagaggagaaagtcacgtgacaacgtgcctgatgaagtaattatggtattattgaattgatgaacgagtggggttccactttgtcttgcttgagaagaggcaaatctccacacaggcaatcatttgttcatgggacctttttttcctttcttaaacctcaagtttccgtaaaatgttattctatatttgtgcatttcttctttgttcatcttttattcttatctttgtgggcaaatcttactgttatactctgaagtgttaaaagttactattaactaaatcttcgaactaattaactatactaaagagagttcaaaga

SEQ ID NO: 50342 - DNA, 606 bp, Arabidopsis thaliana landsberg
atgtcatgtctctgaatccaaagaagactctttgtattgttgctgattcaaacttaacaaagaatcacttctatatggaattgtgggcttgtctgaaactttgagaaagtccatgaaggttagagattttaaaaactcttgtaaagattgtgagatttttcttttgccctttatattatcatgagaagagactgaagaacatgtgacttatttcaaaagaaagaaagtaaaagatccgttgtgggctataaatttggtgagaagataatgagtaaaacgttgcttgcctttactttcatatcatactaatgtaacatatatagagagagagggagagagatttgggtggatacaaaggatatggagtagtgatgggttgccgccaagattgtcctatactatgcttccatgcttccgacatttggatcaatccttaaaagacagacccatcttgtagatcaatatcatatcacttaggggatgtaacgatctaacggtgggggatgttttctatgaatctagtttgtggattgatgtagagtttaatatggcaatgttactatgtaatagtaaaaatcaggacatggctcagtccctaaagagcct

SEQ ID NO: 50343 - DNA, 656 bp, Arabidopsis thaliana landsberg
aattcattacttttatatatttgatcgaacacatatacttgaaaagattaaactttattattttgtgactcatactattaaaagtataattgtcactaaatgagctctaaatctcctcgactttcaaccagtatagtgtatagtatatattcatacatgtgcaacactcaacacactagagaggtttgcaatttcagtgaagacaagagctttacacaagtccaatagagagacacaatcacacgcgtgtctacaaagggacggtactagaattaacccaaatcaagtatttacttactagagtccgtctaacaaaatttaagggtaaattgagttttttttatatctaaaatatttgtgtaagaataaaatattgtataggttttgtacaaaagaaaattttctaactagctaatttctacaattagtttttaccattaattatacaaattttaaaataatatgcaataaaacattttttgatatcgtcaaatttgtaaaattttgacaataatgtgttatattgaaaccctcacgaggaattcaactatacttctagaattttaaaaatatattgaatttgaatgtaaaaacgttataatatatatatatatatataagttatattacgtattagttttaatttaattttttgg

SEQ ID NO: 50344 - DNA, 871 bp, Arabidopsis thaliana landsberg
gctttctaaatattggacaggagagctcagtactataagaattgttagtttattttgtcattcaatcatgttagtgttcatacgaaacaaaagatgtgatgtagaataaaataggtcgcagtcgcagacaagattaattgttcgctaaaatgagatagatggattgtccgccacttgtgtatatcatttttcatttgttcagaaaaacaaaagtgtatctttttgttttttgatttaatccgatatacattcattttgtatttcttcttaaagagacttacgtttgctttaagataagtagtttgctttctattttcagcaactttttaagatttaactaatttatttctattataaaatttaacgtatctgccacttgtcttttacttatgaataaaacgtttatagtatatcgtaagataatatagtaagcattgacatgtaaaaagaaaatagaaaaatatattttctttatctttcgaagatgcattgtttaagaaaatcaggtagaacctttagagtttagagaacatatttcaatatcattgtaacatattaagttgaatctatatctatgaagccgtgatgttccaaaacactacatgttcaatattattttcttcaaatatgttttgtctttatcaactccacaaatagcatctttgaaaaacattagtgtattttgatagatattaagttctaaccaccatatgtcgcataatgttcgcaaccttttggtaatgtagataaaggaaacgattaattgaagatttttgccgtttaactaaatttcttccactagattttcgcatgcaatttccttacgaagcaacacatagtgcatcacaaaacatattcttagtttcctatt

SEQ ID NO: 50345 - DNA, 1209 bp, Arabidopsis thaliana landsberg
tcttaaccgagtatcgaagttggagactattgcaacttttacacccgcttctttaatagccttaaacactttccctgcatctggatcacataacttccacgcctgggaaagcaaatggagaaatctcaagagaaagaaccaaaactattactgaagcatatggagaagtagtagtagagatcaaacctgttctgtagtaaaatagctgtaaagctcttcaaagtactgtgaatccgagcagcctgttgatgcagtcactatatactgccagaaaggtcttgcatcgtttacatatctacaaacaaagaatcaaaaatcaagaccagcacagaagtaaatgtcttaagcagacccatttatgaatccaacagagattccacagcaaatgtatattcgaaagagtcagtattaaaccagatatctttgtacagagatgcatcactagagtcataatcatgatcaagtattaaaagttgtcatacaaacaaatagaaagccacaaaagaacattttgcctagtggtgattttcttggagtagaagaaacaaaaagagaaagaagatgattctaaatacctaagatgagatccaccccatggtttctgataagctcttctgtatctagtaagtatctcagcctccgagtactccactccgtacttctctccaatattcttatatatctacaaaatcagaatccataacacatcttagaatctacacaataaaaatctctatctactcttctaagaacaaacagagatcataaaaagcctaagacattcttaacataacaataagcatcaaatttttactcagaatcaaacatgaatcctcaaaatgctcatagctttctaaaaaatttcaatcacagagcaagaaacatgtgaagcatttgttcaactgttgaatcacacaaagtaacagagaaatttgagagacctgagcagtaggttgagctggaacaaggagagtaccaacagcatcaacaagcaacgccttatgagtgatctcaccatagagagatcttctataatcttcatactctttcaacacacttcccaatccgtaaatcccaccagattcatcatccgctacaacagcggaagatgacgaaacagaggagatccaacggctgagcaatgctccggttctcgcgatccgatccgttccatgagtaatcccaccggagaagagaagtgtcgtcgtc

SEQ ID NO: 50346 - DNA, 1191 bp, Arabidopsis thaliana landsberg
gcccttttttgcttaaaaaacccagaccacattcaaaatttatataaaaaatttgtgccatatttaaatttgttatcccccataaaattccataataattatgtaattaaaaccatttccatataaatatttaaatataataatttatttcattaatttgttggtatatcttggttgcgaactttcgggtcgttagtcgagacttctttatgaaattttgttttgacaactgtatgctttttataataactttgatagtaattgatatatattatactgatattttatgcttttttttgtgtgttatctacgaatcatttgccaatctttttcacaacttttgcactcttatgccattgacagcctagaaccctcgatgtgtgatcactaaaatacaaccaattaaattgtttagttatcattttggtgaactaccgaatatagaatatatataaaaattgaactttcgcctataattattttttaacttttcaactttcaagacattagttttcttcaattacgtgtttagaaacaaaaggttcagaatgtgtagctggcacaagggttctactctttgggtaattgaatttagtgattctacttgcaagttacaacaacttttacttattttttataaaacaataccactaaaaccatgatttgtgtttttttctttcttataaaattagtgaactgcactttattactgtactttattactgtactttattattcgtttgtgatttaaaaaatgatttggattatgaattttgacttaacataatagtaatgtaagttttgcgtataaaattaaactatgttatgctattttatcatataaacattattttgaaaattactcacactaaaacacaccacttatttacgaaaatttaaccatatttttcttgctaataaagtaataatcccctctaatttgaattacataacaaattcacccttataaacaacttgtcttttttttttttttgtgcgaataaacattttgtctaaaaattaaaatctcgtatatatacataacttaccaagatacaaaaggcaaatttgagatatttttggcaatttaaacgatacatcttttaccaatgaaaaagcaaaattgagatattaattgcttttctatttcaccatttcgtttgtgtgaagcatttgacaaaatccaactca

SEQ ID NO: 50347 - DNA, 519 bp, Arabidopsis thaliana landsberg
tgcccggggaagaccattagcatctaaaacattggaatgagtacttcttctaatgaacagaccattatgaaggggataaaattttgaacctgttccagaagaacacagtgaaccaactaagtcatcatcacatgcctcccttgcttcctgagtgtcctgcaccagggaaccatacattccctgagaaacaataggcattatcattttattctgcatggatggagacaaagagataggttcatatgagatgtcattagttacctttctcagatcagcgttattcgaagtagcatttcccatagtcacgcacaagtcaatctgagtggtaacaggtgtcagcaatgtacctgctcccacctcacaaaccgggttctgaaccctgaatattttgacaattctaacgagtgatctgcagcgtcagttgagccatcagagttgatcaaactacagaaagggccataccctgaatgcaccaaagctccaagggcctgctgcaaatggggcccccatggccgagcc

SEQ ID NO: 50348 - DNA, 582 bp, Arabidopsis thaliana landsberg
atttcacgggaactatatatggttaatgaatacccaccctataaaaaaaaacaagagtgacacagaaaggatacaccatttatagacaaactagaactggcttaattttttcgtagcttgcacaatttcatatatatttttaagaaagtcttatggaagatatgtacattaagaggtcatgcgtttctgatttatttgtgacaacctcagttgaaatcattttgccttgttgagcgtttgtgattctggcttcagttttgattctggatatacttccagtgaagttaatatgatttgtaataacaaactagacaacaaatggctagatgtcgaaacttgaaacaagaaatatcccactcctcaattataatttcataattaaataatcaagtttgatacttgtcacatcaaaactctttttcctcattggcctgtttctctcaaatcttcaataaattctctatatatatatgagaaactttgaacctcatttttcatatatatcactgttcttcttctatattggagtcatctcttttgttctaaagaagagagagagagagagagagagaagatgttgca

SEQ ID NO: 50349 - DNA, 770 bp, Arabidopsis thaliana landsberg
  unsure (1)..(770): unsure at all n locations
taattaagtgaacaattcgaaataaggatttcgaactgtcagaataaaactaggttatataggccgtaaaaaaaggaaagacaagaaggtgaaagtgagatttggagaagaggaggaggagcagagaaggatggtcacgtgggtgcccattccctgccgttaacaatttgccttccgtctcgcgtgcggtgggtcccatatcatctcctaacgagagagtcgccgcactgttggacactctttgacgccgtttaactccaaacgttgccgttaagtagagagtgagatttttatttggtacgggcaaatgggagaggaagagtagagacgtgaggggcacgtgccctgtaagagagagagagaagcggtggcgaccgatcgctttctcgtgatggtatcacgtgagggcaaatttattcatctttgggtcccacgttttttttcactctgacaaataatatcagagattagaactcgaggtaaagtaaaacttgtgggccctctagctatgaatattttattttcttttttgtgaataaatagctgacacttatgaatccgacatccgtggtaatgcgctcatttaccactagaactaaggttgaagctgccaatttaaactaaatcgtggataattgtatacatagtagtaaaatgatgattttaaaaagtggattcgtactattttcaaacccatccctttacgtatatanatatttaaaataaaatattaaaactgttatgtttattaattaaccgatatgtttcgg

SEQ ID NO: 50350 - DNA, 921 bp, Arabidopsis thaliana landsberg
gaaaataagattgggggaagagggaaatcaaatttaaggtttgagttcttcctattttggggattttcagctttgaaagtctgaatcctgtatataattattatttttaagttaacgtgtcgactctcgaccaacagtaaaattctgaaccattaaagttgacatttcttggactcagtttttgcatcgttaaagaagattgaatatctatgtgatccactttaaatgttgggtttcttttgtattggaaaaattgtaaaagttcaaacattttctgatcatttggacaaatgtttttgtaatattcttcccttcactttcaataagaaattgtgttttcgagatgttaataattaagttttgtcaaacaaaaatgttaaaaaaaataagttagctggatggtagttagattcagaaaataagaaatatcagtagaggtgtcgtcgtgaagataagtacaaggctacaatctaacgataaatagcactactagtctactaacaccaagatccaagcacatcaaaaccaaaagtgatatacagagagaaataatgaccaaatccggttctatcattaccgtcctcttcatcgtcttcatagttatctctagtaagttaacttactttgccttgcttgaatgtatttggtaatagctttatgttattgcaagcagaaaattcatgatatgcgtttctatatattttgtgtttataacagaacaaatagaaagatagtgattgcttgaaagaatatggaggtaaggtaatatatgttggttcccctggccttttgtgcaattttgatatttctgtcatactgttatataaagtgtcacaaagacaagggggctgatggcggaagatgccaagtgggacaggaagaaggtcatactaagttgacgtgcttatgcgactattgtga

SEQ ID NO: 50351 - DNA, 1326 bp, Arabidopsis thaliana landsberg
tctactcaccctcgctatcctcatctctctccgattgctcgaatcgcgttaccttccgattcattcgccgcttgggagtcaaaccgggaaccaaaaacgttcataacctctggctagaactctccgacggcgaacttctctcgccgattcaactcctccagtacgcaccgtcaacgtcgtcaccgttcgagtaatcggaaaaaacggacgaatcctagtggaagctcatcaggaattatccgatgggagtattcgtgaaagatttcgtcctttatcagagaaaatgaagcctgaagaatctcccgacgaagcagtttttcgcgccataaaagaagagctcggatctatcttcaatggcgatggtgataacattggacagagaattaagattcttcccggaacttataacagaagagttgaagaaaggaactcgctatcgtatccaggattaccggcgcgttacgctcttcactctgtggatgcaacggtggatggattaccggaggaagatttctgtacggaggagaaagagtacgacggaggagactcaacggaagattcgattgaaacactcgccgccggaaaagctgtaactgtgaaacgacattactggaaatgggttagtcctgattcgattcgatcttaaaaaactcaaaacaaagattttcacaaattttatcaatcatgcttttgatacatgaataatcagagagccatgtaaagatacatatacacatttatatatgttcataatcatcttcttcgtttggctatttttgttttagtggatactattctccagaagttttgatctcactatagcttatgtgagaaacttgaaagttcatgaatacactagcttatcttcttcgagttcattgttttgtgcagagattttgtcaatcttattaattcgtcttgcaagttacagaaacgtaatccaaatgtatgtagttacagatctaacgtagattctaactaaaactcaacaacaagctcgaaagctgtgtatgtacacagaaaagtgtcaccaaatctaacgtaagtggaattagttgtacaaagaacagctcctgcatcggagaaaacaaaattcccctagttgatgatacaaaattgaactgtatataatatatcaatttgttggatcactatggagcttgtgtggattgaacttgacgaacgaattggcctttgattcgtggtcgttgctttgctaatttcttccggctctcgtaacgaacctgtaaagtcattcaaaggttcctttagtatcattacgttatgatttaatgtcatctatgtgatggaaacatcgaagttaag

SEQ ID NO: 50352 - DNA, 643 bp, Arabidopsis thaliana landsberg
gttgacattttctccgaagatagtgatgattcatggaatgaggattttgatgatgaagatgaagaagcggatactacagtttttaaatattccgaaaacatgtcggagcttgatttgggatcagcgacgaattatacccctagttcctacgatcatcgtaatgaaaaagatagtgtaagtttttgtgtagcagtttttttcacatttttatacctatgctcatacataaactaggaaaatgatcatctatgaaatgttgttattttaatcagttgctgatttggttattgtatttgtgattagggttcaagtttgacgtggaaaggtggttatcagcagttatataatgttgacacgtcttccgacgaagaagatgaagaatcatgcgatgagaaggatgatgaagctggggaatatcactctgaagaagcgatggagatgtcgcgcgagcagagaatgagcgagctaaggaaagtgcttcatgacgatgaagatgacgtatcacaaggatttgtgaatgtgaggcgagagacaattgcgaagaatacggaatttggtgaggtctatacccttttaccagatggtgattgggtttatgtgaagagtgcttaggggtctgatcttctggcaaaaatgtgtgtga

SEQ ID NO: 50353 - DNA, 627 bp, Arabidopsis thaliana landsberg
gactgtcccttccctgagaaaagtcaatcttccgtactcactggaattccggaagttgttgtccagacttccagacatggaacggttgattgcacgtatgttttctagcatgtaagggattagctagattgagatgttaattcttacattatatgtttataccaaagacttactaaacatatttgttaaacttgtgttacgtgttatagtgaagctagtggaagaaatggcgataaagtggtgttatatgaagatacagctaagaagcaggtacaggaattcatatcaactctacgtggttgtgaaacaatggcagaagcatgctcttctctccgtgctatcttgaagcatgataaatccaggcggctgcttcatttactaactcctggtataatcaatttgctccatattcacattcttatactggcaaattgcacagcatctcatatcatttctctgccaggtcaaagtcttccaaatatatcatcctccattaagtatttcaaggatgcttttgactgggtagaagctcacaattctggacgtgtaataccccatgaaggagcagatgaagagtatgattgtgcctgcaaaacagtagaaaaatttgagtccagtttgaaaaaa

SEQ ID NO: 50354 - DNA, 484 bp, Arabidopsis thaliana landsberg
tcctctcgtcctctctcccttcccttcaccacaattttccctctctttctcgcctccgcttcaacaattttcccgcactttccttcaaaccaaacacttcatcatcatcttcatcattcttcaaatccccagatataccctctctctcctccaccacaacaacaacaacaacaacaaccaccgaaaccctagaatcctcaatccacgagaaactcatttacctcgattcactcggaatcgatttcctaaccctaatcaaccgtcatccacctctcctctccaccgctctctccgccgttgaatccgtcgtcgattacatgaccactccaccaataaacttcactttacaagactttcgccgcctcgtctcaatgtgtccagagcttctcacttcacctttaacctcacacacaatcccagtcatcactttcctcctccgtgaagtcggcgttgactctatctttgacctccgtcaagctttacg

SEQ ID NO: 50355 - DNA, 992 bp, Arabidopsis thaliana landsberg
acggccagccgaaatttttaaagatataacactctgatctcaacaaattaaatttttcataataacacttcgtccaaaaactctaccattacatttaaacgtgttgtatataaatatgatatatcattgtagtattatgaatttacaattcagggtatattatggaatataggaccgaccaaatcaaatttttattcgaaatttaattttatagattatgctgattatcagtttgggttttatttccaagttcacatgttgagagaatacaaaaacaaaacaaagctaaagggattatatatggattaggttgtggatgtcaactagttattaaaataatgttagattaagggatagattaggtaaaggtaagtagctgttaatcatgttaaatattattattttaggttgtggttcgtctaaaaggaatctccctatgatttacgaatccgaaatagagagaggaggattttcatgttattgtggtggaggagctagggtcgtgtcaatgctgcttttggttcattgtttaagaacaatgatcataacacgataagattgatgaatgaaacgtttctatctgatataccacacaaatttaactaagcatcacaaatccgaattagagcagagaaaataatacaacatgttgctggttaggttgaaacattgaatttgcatctcttctatagttgatacaagattggatacatcttcgttacaaagcgaatacttgcttacatttaattacgccaaaaaatctcttcattttcatcttttacagttaattaataatgaaaagatctgttcatctttatatatagtgatcaataacaaaaaaatttgaatccaataaatataattgaactcaggttctgggggcaatcacaagtcagtcatgcgccttcacattttcctgtaatgcctgaattctttagccatgggctgaagcacgtgagtccttttctccatcaacttgtatccttcataaa

SEQ ID NO: 50356 - DNA, 687 bp, Arabidopsis thaliana landsberg
acatgtcgatcatatatagattatacatttatacatactactattacacagctcacaaaaaatttttattttttgttttgccctctcattggtctttctttatttgcactcaccaagtcttccctgatatgaaaagtcactcatctattcagttttcaatagttagtttcattcatgcatccaagctttttcgtttggcattttttgtatatactgtcaaatttgtaatgattgaaaggttagtttggttttaactttagagattggtcagatgattaatgcttctacattagatttgtacctttattagtgtacaataaatagagttgttttgtacctttattaggtcatgtactcatacgatatcacagagaaagagaattgctaattcatgtcaaacaaatcttaggaagtacccaaaatattattttatgtttttctaatatacataaataccatatgaaaatgtcttagtttgctcctattacatatgaacaagtaaacacctagcaaatctaactttgtatcttttttttttcatagcgaacgatcacatacaccacaaatattcacatgttgagtttgtttagacattacacttaatatgaaaaaagtattaaataattagaaatcatacatgtagtgattaaactaagtaactaaaatttttcgtcataataggatttg

SEQ ID NO: 50357 - DNA, 771 bp, Arabidopsis thaliana landsberg
  unsure (1)..(771): unsure at all n locations
tgaataatcacttccgcaatttattacaagaaaaaacatgaaagcccaaaaccatgaaaacgatcaaatactttcggctaaacaaaatcctttgaacagccagaaacattgtccaaaaggtatctcgaaaaagtactcgcatgaaaagttctccgtcaactttttcttctctttcattattgaactacgtttctctagaatcataagtcctgcttaaaaagaagttaaacatcatgtacatttggaatttcgaatgaagaaaaaaaacaaaatacaaagaagaaagcttactggttgagtaaattatgtgcccccattagataacgataccctacacaaaagattcacattaatcagttcttaagacccgcgaatttattcatcaatggagactccttaaacgccaaaaagaagatatctatctattctaaaccaacagtacttagattttctatagctccagtgtacattttctatgtagacgaaaaaattgatttgaaggtcgattttcgttaaagatgataatacaaatgacagaaatcaaaggaatgcatacctccggagggttaaattctgctccaagattgctgagcttcgcatggnnnnnnnnnnnnnnnnnnnnnnnnncatcctgatctgcagcatacttttcagcatagacctgcaattgcaatgaattttcagttctaaaggccaagacttaggaaggctcttcgcattgatatggttacaacctcattttgttaccttgaaagaagaatctccgaagat

SEQ ID NO: 50358 - DNA, 872 bp, Arabidopsis thaliana landsberg
aaaagttttatagaaatatcatcctattttgttttcaaatctaatcaagttttttgactaggaacttttaacagagtaaattttctttgaatttaggtttactctgcatttgtgttttcacctataaatagaaaatagaaagaaaaaaatccagttttaaatatatttttctctctactttctttcttgtatttttatttactagcccggacattttaccagtaacggtctaagttgccgaccaaaaaaaagtaacggtctaagtttttttcttactaccattttatcacgagtttaattatattatgcaattctaagaaaaaagtaattattaatttcctttagatggttttggagaacaaaaatttctatgtagttttttttcgatcaaaacttgttttccaattaaggttttctatacaaaataaaaggttaaaaccatataatataaattagtatataatttgatgtaattaatatgctaaagtttttttaaagattttattactaaaaacaagctaaaaacaatttaaaataaataaatttgtttgttatgatactgatgaattttatttatgaactattaaatgaaggcaatagggatggggactatgataatgatgccagtaattgggaatctatcagacagatatgggattaaaacaatcctcacccttcccatgtgtctctccattgttcctcctggtcagtttcttgttttctttttttagttctttctttttcttacttttagagtcactaactcactaacgcaaataaaatgactcactaactatattaaagtatatgataatgtgtacgtcaaaaatgatattgcaatgtgctgtgtgcattgaaagtaattgcgtgga

SEQ ID NO: 50359 - DNA, 634 bp, Arabidopsis thaliana landsberg
cttgtttcaggtggtaacggctctggtgtgcttgttaatttcggtttgttttgctaatcttgagaggttggcgccggaggattaaagaagatgaaatggtcggagagagaccggagatggcgggaggaagagcacgagaatgaaatcagtgtctgtctcaaccggcaaacgaaactagtctttgccgtggaattccaagtacggaaagagtcaatgttgaaaagtaatataatacagaaaactatatatattcattcattaatttggtaatatacatattttttttactttccagcttatatttcttaccttaaaacaaaagaaaattacataattagtaattcaaaaaccactaatccaatggcacattggtaattatttaattgaatcattgtattctttcaaccatttctacttcgtctaatcgacttatattaattggaaatttcaacttcaaccgtagcggtaaaaagctacttgtcgaaccttgagattagaggaagtcacgaagtggtgactttagaagaaatgattaaagaactataaaaatggaacacacgacgatgagcttggaaatgaagaaataagtctcatgattgttttatgtaaaaaaatgtagtaggttagtaaaatg

SEQ ID NO: 50360 - DNA, 979 bp, Arabidopsis thaliana landsberg
gagctttgatgatgttgatgcacgccgtcagcttttcttcacgcctgctcccactcactcacacctatgaacattctctctctattttataattatattcacatgtctctatgttactatgtaaatggtgaccacttaagtatttatatatcatgtatatatcttataggtatcatacaaaatggtcatgaaacttttgcaatttcaatctacttgttcattgtagatgctagcttttcacatgttttgaaaattagtctggatctgaaattctttaattagcattgttttgttggtcaacgtttaatttcttgattattgatgtcaaaaattcagagcgttcagaactcttacactaatttcttaaaaataatcgattaagagaaaatagagttttcatgcaccagtgttgatagtaacgtagtcgcggaatgtctaaaaccattatgagtttggtgttttgattggttagaattggtattagtaggacattctaacttttttgttagtctgttgatttaggatgcgtaaagagtctttttattttacaccagttgagacttgggatcgatagtacttgaaacacttggttggtttcatgtatttggcctatatataaacaaacatcgtaattatatacggatttttttcggaattttacgccatatctgtaagtatatataacatgcatgtcgttttcaaattcatatgatgaacgatccacgtaagtgctactactcctacaatattgcatgagagagatatgtatttataaattttattttgaagaagaaataagagggaaggttacttgggtggatcgatgtgaaaacaaaagaagaaaaagcgaaacccactaagccattacatgatatcgaccttcttatctttttcctctttattttatttttctcatcttctttttgtcaggacttttttctacttaatgaaacctgcaaactatctaactaatacactc

SEQ ID NO: 50361 - DNA, 524 bp, Arabidopsis thaliana landsberg
  unsure (1)..(524): unsure at all n locations
gcccttctggtgtcaatggtcacataaggttttgggatgtttggtttaggaatatggtttgggagattaaggaggcacaagattgtttctctgatgttactgtctcggataatctctcggcggtgttcaaggtcggtgcgacttcacgggaagttttctacgccgatttgaggagtttaggaactaaggatccatgggtttgtcttggggaagagaagaagagaaacttgaatgaaagaagaggagttgggtctaagatagagagctatgggaatcatgtgttttgcagcagtaaaggaagtgggatagagctttggtctgaagtgatcacgggtttggtggggaatgcacgccgtgatgtattggaagagagggtttttacgaagaattcgctgggaaaattagcggattcaggagaaaacaagataacaggattggcgtttggatggaatagaatgtttgtgacccgaaggnnnnnnnnnnnnnnnnnnnnnnnnnngtcctagtcgtggaatatctatcta

SEQ ID NO: 50362 - DNA, 676 bp, Arabidopsis thaliana landsberg
  unsure (1)..(676): unsure at all n locations
ggcccgaatattcttttaatgcagcgggactttcgcacacgcgatacggatgaatgacctgggctgttgtagtgaagcagaaaaaaaagggtgccagtaacagcgtacgcaccaccatcagacaaaaaattcggtttttgctttggattcttccaccaggatgcccgaacggaacaggagctcctgcaccttgagtatttccagttggttatgtcctactgttgaagcaaaacgggtagagtgtaaccacgattgcgcagtgggcaggtccatgttgttgaaccgcgtaatagacggtgctgaaagatgtgaaagcttgaaattggccgcctcttcaagtacaagtttataaaactgtgccagcaggtccagctcaaggtcatttaatccactgtttaccgtcagcacaaatgcgccccagggccctttgaaggaatcgatatacttgagctgattggactttaaatacgaccgagtggtgtgtttctcccaaaaaaacacatcccgcttccccggtttttaaggcattcagacctcctgccaggttattgatctctttgaatttgatctcattgacttgccaccccctttcataggcattgagaatgggcatgaagtgagatcccgatccgaatttgctgatggcgatggttntttctttgatgccttaatatcg

SEQ ID NO: 50363 - DNA, 541 bp, Arabidopsis thaliana landsberg
agagccagactactacaaatggacacaatggatctttcttagctttataagagatttttgtcatatcaggtcaacaaaatcaatgtctagttcacatgttaaaaccgtgcatttgtgtatagaaaagttctttgaaagattgtaaactcaggctgaagtaccggtcaattggtgcccggctcttggtactgttttggccaatgaagaagtggtggatggtgttagtgagcgtggtggccacccggttataagaaaggtactatctattaccatctgggaatattatgtcgtttttcccctttcgaaatctgtatttcctctgttttgaaaattctcatgaattttacagtgacattgtttattaccaagcagccgatgaggcaatggatgctgaagattactgcgtacgctgatcgtcttctagaagatttggacgagcttgagtggcctgaaagtataaaggaaatgcaaagaaactggatagcaagatccgaaggagctgagttgaactttttcaattcttgatggggaaggccgagat

SEQ ID NO: 50364 - DNA, 1076 bp, Arabidopsis thaliana landsberg
  unsure (1)..(1076): unsure at all n locations
taggtattacatatattgaggttatttaggttgataagatccgatttatagcaaattttatttttatcgtattttttgtttttgatatatntgaataaagaaatgtactatttttctttccagtaaatatttttaacgtctaaatttattactttattgtaaattttgagtacgattacataaataattctaccacgaataattttttctgatcagcttcaatacacgatacacgacactttattctctattattttgaatttggctcgtcatctgcgatagtctcgcgcccgataatactttattttttatatctgtaatagacacttttaaccataaaatcccggcgaacggttctaattacacagaatatctcatataaatttgattcggttaatatatagatttattaataaattgtattacttgggaatctgggatttgaacctaaaactctttgatgtaaaagcaatcatgaaatcttagtcaactgttagccaaaagtggcttctaccatcaacaatttttagaaaactaattaacaatagggatgaatgagtaatatacagctacactatatgatggagttacgttaataacatttaataacatttttagtactatcttattaattaacaaaaatcaatagtaatagttgagaattttttaagcactaatattttatttctgtttttttccatattttatattaataataaatccataacaagtaatttcggacctgcttctgaatacggtaccatgtgaaaccgaaataaagctcgaggaaaaaaactgcagaggggaacatctttacccacttgactaaggttcatatatttattattgatatttaaaactataaggattcagcaaatggccgatccagaatatttttcacggggtgcaattatctataagatttttttttataacttttaataaattaaaaatatatatatattaaaaagataagattttattggctaaattctttaattttctaaaaaattatgtccattttgacaaaacatatatggtggtcattacttgttcgaatttattgaatgtttttc

SEQ ID NO: 50365 - DNA, 878 bp, Arabidopsis thaliana landsberg
ggaacacttgttttttttttggaacttcgaagtgaaacatatggaacacttgttttatttcggatcgtctatatatttttttatttctttgattctgtcagtacactttgaataatttatttttggatttacatgaatattatttttttaaaaaagaagaagaataatatagaaggatgcaattggatttgtactgaagaggtcttgagagcgatacaacttagagaatatgtttttttccatctgaacaatatgcaatgcgttgtcattgtcgtttgaccaatttttaaaaatagtttcattatcatatatagtacctaaattatcatctcttgaaaacaagtcttcaaatgtgaaatatgacttttatagcagcgtcgaaagatacaaaattagttgttaattacggaaacatgttggtcttgattttgttaatacgttattcacttcttgcaaaaaaaaagcaagttatttttgattttgtactatgttaaagtgcttaacactgatcactgatgtagctatttttggacggtcactatttcaacttaacattgtgtaatgcatttatgagtttgggatctgtctgaggatatttatgaagaacttccacatggagaaacatttgtttactaaatgttgatatgactattcttgaaacttaacttttacacaaaagttaaaaactaaacaaaattcaacaaacaatttgtggttagctgcaagatctaccagaagttaggggattaaggaggatgagaggggtaaaaatataatttggagtgggccatgaagtggcacgttcacctgtcggcacagtggtggagagaacaacacaccttacttctctcttgttcacattcataatttgatgaaca

SEQ ID NO: 50366 - DNA, 646 bp, Arabidopsis thaliana landsberg
acctaggcccggtggacctagaaaaacaaatgttcacatgagttgtgcacgtgaggtaacttaacatgccaaatgttgttctactattggcagaccataatggctcgagagggacgaagccaatgatgcgttttggaggaataaagaaaaaggaaagacagagtccaacggcatctacttgtactgagagtgggcttttaaagcttttttatgtgcatttttatttgtgggactcattatcgtcatctcttctttttgcccatccgattgtcccaaacggcatataattgctgctgatgatgtaatcttggccgttggattctctcgaacttgttagaaacgtgacacaaaattttaaaatccacattgttcgtcatgttgtcattttgttattgtaatcatgtaacagtactataaaatgaatagaaaaaggaacaattctggaacaagcatgtgtcatgatgttgccaaacccactcacaccacgcaaattgtttcgtccgattgtccaacaatttttctaatatattaataatgtactattttaattgattcttaacttatagtgataatcgtaagctaagtggaaagtgagatgtgattaatccataaaacaattcgtttgttttcgtttatgaacaggtga

SEQ ID NO: 50367 - DNA, 1007 bp, Arabidopsis thaliana landsberg
ttaatattagcactcatgaatcatgactcaccaagtagacagagccagaattagtgcgtggattaggaatcaagtgttatgtacatatatttgatatatatatcatctttagtttctttttataaaatcttgtaagtatatacatcttattcttatgtatattaggtattttaacaacaacaaaaaaatgtatattaggaatcaagtggatatatatacatatttaggacttagcttctgattatgatgtgtgcaagtgtggtggtccttctgccggctcaatattatttagaggttttgggaggatttttctttaggccgccctatagacattacaatggctgatcccacgtccaaagatgaccataatggctgatcctaccattaccaaattttatttataattgtttaaattctattttttttttaccggattggtttacagtaatgatattgttgagccattatccaaaaaaaaaaaaaaaccgacattataatggaagagtttttttcgaaaaaaaagaaagaaaacaatataatggaagaacaaaaaaaactcctagagttcaagagttggggccggctgcggaaccattgtagctcccaccaagtaagccaaccctactaccatcaagtagtaaagagttagtttccggccatcaaaaaattcaaaataaacggctaacattttagagaatattagtctggttaaattgtcttctgacgctgatggttgatgtaattgttaatagtgtgctgcactgctgctactaatctttgacttgctaagactcaagagcaggtagaagctaaattctagataactcacgttgcgtgtaaggaatggtgggggaagatcttcccttcctatgagagtctaagaactccaattcttttgactaaagaatctagcaagattctcccataatcaacatcattgatgtattcattattaatcctagctaagttaatcttcaaaactttgataacaagactgaactaaagaa

SEQ ID NO: 50368 - DNA, 1204 bp, Arabidopsis thaliana landsberg
ttttgatacttataacaaaactatttttaatatatattttgcatgttgtcagaaacttgaaggtgaagagaagagggatggtcttgttttttgggctcccgtagttttgttacacgtgttcgcattggcgaccggtccccgctttgagggtcgagctttcccattagtttgtcttgattcttggcattttatcatcttacttatatactcgctcacgtatatctgtatgtatgtcatacatagatcgtgagcgtttttttatctgagtttaattagtagtaagcgtagttaaattatattgaattacatatttataatttgtaagattagatatgtgtccttaacgtcacaagagatacttattagatagggtcatacattatgactaaatgttaatcacgcatactcttttcaaaagatgggatctgcctaactcgtgtaccaatgaatgaatggaatatattatatatacgagtaaattaatgtctcacatgggaactcctgcgaagggcgaatgccataacaatggggagccaaattactatatacgtgtctctcgaacgtatatgaacgtgaactctgtaaggaccaagcaaatatatttatcaaacacaatttgatcattgagaagtatataacataaatcatactatattaatagcaatatgccaatatgcatccatgtgcaaataattagacatatatcattttagaaacacacactcattttatatatacactaatacacacactaggtgactgcgtttcgcaccgaatttgttttgttattttaccaaaatactacattatatcttatatctaccgacatccttttctttttgtaattacaaatctaacatcactagccatatatcagaatatttctaaacaatttttctctgttaatgcaattgaataaaatgaagtcaccaattagtgtgtgtatatgtatgtgtgtgtttaagattgacatattttaggatggcagaagcccacaggtaattaggtataaatcatctttattaggccttgttttcagtacattaataaaatagtgggttcgtaaaccaaatttactgatccagttattgtgtacaaaaatcaaaaagagcccacaagtaaattaccaatgttcaaatttacatagttcagacgtttgttaaatgatcctaaggttaacgttaacttgcgacatacgtcaaga

SEQ ID NO: 50369 - DNA, 445 bp, Arabidopsis thaliana landsberg
cgagaaacttgcggcccgctgacctactctttctgacgatgctatttccatcgttgaaaggacaaattgtaattcctggatcgaagcaaataccgtcgcaagcagaggtatagatctatatacggctctcactttactgagagcaagacgggtttctgtgcaatccgcacattatccttacttactgtggaggtctgtccaccacaaaaggatatggtatggggaccactgtcatggttacagtcattgtttaaggggtccagtgaagaaagacttaacatgaactagacctgtatgtttcttgctgaaggagattcctctatatgctatataatgtgttcagtcctggcgaactataccctattccctggatgtagacctgacaccgttacccgatgaatgatgtggggcgaaaggacattacttggtcttgtggacggtttat

SEQ ID NO: 50370 - DNA, 583 bp, Arabidopsis thaliana landsberg
tgttgttgttaaatgcttcttcttttgcatgatgggtttaaaattcgtattggagctagaagaaattgattgtatatggtaactaattagattgccctgaatctttctttgtggttttgaatgccgaaaatgcggttggggttggatcattaagaaaagaatgagtaatttcaccaagagttcatcattcaacagaagggcattgagttccttagctatagaaagccctaggaactcatcttctagtgtcttcactagtcccattggctcagctttcgctagcccgagatcacagaactttggaggaagtccacgcccttctacgaaccggttaaaagagatctcatatttgtttcaagtgcttatcattgctggaactattgtgtcgtttcttgttatcatcgctgggggttatttgtatgttgttcctagccttggtcaaacgttcttaggttataatggagcattggagtttaacagctctgttgtgggagatagggaatgtgatatattcgatgggaattgggttggtgatgataactaccctttatataacgctgcggagtgtccatttgtagagaaa

SEQ ID NO: 50371 - DNA, 577 bp, Arabidopsis thaliana landsberg
  unsure (1)..(577): unsure at all n locations
cctaacctctgaccctcacgtctaaactccaannnnnnnnnnnnnnnnnnnagcggtaatgacagggtattactactgaaggtgctcactgttgatcaaagtcatggagatcctatccatggagtgccgcggatcttggtgtccgagcacgaattccggtcgtcgcggtgacaatctcccctctactggcgacgacgcttcaccagtgactcaccgtggctctctagcgcaagagcagaactccgttcgtcggtggtggacgggattggagcttcgtggtgcacacagctccctccgcgccgacgctagagcttagtttggctcgggtaaggagaacaaggaagataggggaggtgcggctggcgtatatatgccaggaagtagtcgcgcaacaactaccgcgacgaattaggtggcagagctgggcaccggcgtcgtgcgcgtcgcgnnttcctcgcgagcgtcgttgtcctaatcgcgcggaggggtgatgacaagtgggccccgtaaccaatggcggtattagggcacactggctgacgtgcgggctcggcttgtcggcgcaacgctgagaagt

SEQ ID NO: 50372 - DNA, 510 bp, Arabidopsis thaliana landsberg
  unsure (1)..(510): unsure at all n locations
actgcaagtgtatatgagtctgcacacaaggtattacatacagctcttgtgttcccgcctgtccagatatactgataaggagatgtgcctcctgctacaacagtgctgatctgtccgtcacatattccattacaggaaagattcgtaactgtttgcgctacatttatctgtgaatccacataaataacaacagaatcggaatttatacatccattggtatcagtaatatcaacagtataggctgttgtattaacgggagtaacatccggattaaaaacagcagaaaagttcatagcggatatttcactccagctataagagtatccgctgccattgggtgttgcaagcagactgtaattttctccaaaacagatagtatcatttgcccccgcattcgtttgtggcagacaatgaatagttacagcatgttcaacggaatccttacatccgttattgcttgtaacaaatgaactaaacattaaatcgncacaggtggtatatgtatatacc

SEQ ID NO: 50373 - DNA, 956 bp, Arabidopsis thaliana landsberg
  unsure (1)..(956): unsure at all n locations
ggaaccacaacttttagaacctacacatctttaacccacagagagttaaagccataaccttggtcggtaacgactattatcgatcaattgcatgaaagttaggtgatgagaaatacttatctagtttaattctttttattatgaatatatttgcttcattttagtgtttttacaattttatttttggaataaatcattatttttttccaaataaaaaaactatatggacgttgaaacaaagtaacaaactctgtacaacacagaaaccaaagtctcgtgtttcatcaagctttaaccaaaaacaaactgcgattttatttcttggtaccaaaacgtcgttttggtctaacggtttaactttagaatcatgaccgtttgatagttttttacagggtaaaatccacaagacaagaagagtattggggcaaaaccgaaaacaaaagtgtaaagagagcaaatcccaaggatcaagaaaagaaaaagagaaggagaatactttattgggtttgcaaagacatgaagcagaaggaaacatctgctttcgtccgaaaaagagggaagtcagattccaaaaactgcacatacattacattgtttacatacacacaaattcatgtatattactgtgtttataatatataggttcctgattttaaaatataattattgatctctcttttcctccatcatagactttcacttttgtccccctcatgttccaacatcctcagtaacttgattttctttcattaaacacacatacatatatacacacattcacaatatttaaatgcagggttgttatatatgttacaaaagagtaacaagtcctctagataatcataaggaactaattagttattctaaactntatttctaaagaaaaagttgttagtactaaaatttagtaactaaatgttagttcgatccgatatcaaacatactgaacgaatgga

SEQ ID NO: 50374 - DNA, 537 bp, Arabidopsis thaliana landsberg
acggtttatgcgactcatatacttagtgcaattaagttttattatatgagatctcttccatttctaccgggggttctgggtatgatcacaacgcaggtgattaattttcatctgccctaatataagcataaaacgatttacatttttatttttatttttattttctatttcgctttagcatgtattttaatttatatttttagtagatttatagatagaaactagacgatagaatggtcgacaactagatagttacagaattacttcgaccataccaaaactaagagatatatttcttcattaacttttaagtaactaaactgaacttttgtctcattgcaaaggatacttgttggctttggtttgaagtttgtggtgattggttagactaaaactttttgttttgagaccatttttgggcatttgttacaaaaaaaaaatgtttacttttgcggaactttttcttatttttgtgaccatggaatctccttgcactttctcggatttgggtgggctggtctattccgtaacattttg

SEQ ID NO: 50375 - DNA, 699 bp, Arabidopsis thaliana landsberg
gagacgcagaaaagccaaaacctttgttatactaaccttcaagggaattttcattattcataaaattcttcacgacaagggtatgagagatcctctccagcccatataggatagataaacatattaacacctaaactaacaccagcaccaagagctataagcagaaaccgagagatagccacttctataaactgcccagttctgaacccagaaatcagaatgtagcaatacgtaagcaagaaaacccggaacccgtattcataagctttcatcgacgggtatagtttcatgaaagttgcaagaaaccctgaaacaagagaccaccacagtaaaaacatacgtaagcagagagaaaaccaaaaatgattcatgtagatgaagatgttgttaacataccaatgcagaagatactaagagtgcagaagatctcttcccagtcaccgaataaagtggaaagctcagccattccaagagcaagacctccagctgataatgtcccaagcgctctattaaaccctttgcttagagttgctcctataacaaccaacaacagtcatcacaatgtaaagcttctatacataattaccactttagcgatgttaagcgtataattaagctcaaatgatacagtaatcgtcaattacagtcaaaccaaagcaaatattaaaattataaaagaagaaaacgacgaaaattcat

SEQ ID NO: 50376 - DNA, 819 bp, Arabidopsis thaliana landsberg
  unsure (1)..(819): unsure at all n locations
tttttttttcttctttaatttgtgtggttataatgtaacctatagtgattgatgtgtcgaatatcttattcaattatgtgtgtacagatatatgttgaattattgagttcttcttttcttaaaagcaaatcattcgattacttttggaactttgtgattttatcaacgacaaaagaaagtacaaagattattgagcaaatagacaattagacatatacgtataagacaatcataagtagctctcactcgtgaatcttttgactaactgtaatttttttggtggtatataacttcatgttggtacgagtccacattccacaatacaataaaaataaaagtaaaaaacaaattgcaaatgcaaattgcttatgaaataaatacgaagctgacattattagtacatagactaccaaaaaattctaagaaacagaaaggtcgacacgataggagggtcggtgaatctaatcaggttcgcattaatgctttaattaggcgattcccgatacgcagtctcacgttacaattagtactaaaataaacgtaaaccgaacttaatctcctcattatgtgccatgttttaaatcatttgttttgcggttattacgcttacttttttctacatctttattttataaaatagatcatgaaatagcatgatgaagggaggcccatggaatatttataggtccctcgcctctttttactctatgagcccatcttatctttaatcatattccatagtccataccatagcacatacagtagttatatgctgcagaagagatccaacanaacattcacaatggattatagaaacat

SEQ ID NO: 50377 - DNA, 744 bp, Arabidopsis thaliana landsberg
aggacatagcggctgctgatctgtccttgaatattcccacttgtccatcagttaatattgatcccagtttcaatgtgctctcctgaaaaaacaatttatacatggtctaagatactaaacccgattacaacattgtagccattaattaaccaaagcctaaacctttacctgcatgaaagacttaaaagccacgccgaaattggaattttcttctaaatcacttgtttgagattgctcgccgtttgtaaatgccttccatgagtttcttgccgaagcatcatttgatgtaactggaatagagaccttatttgtacttctagatgacagagctggagcgctgcatttgacccgaaacgaagacttctgatatcagaaactagtttcccaaattttaaaaaggtcaaaaagaagacttctgatagcagaaactagtttcccaattttttttaaaagctacaaacatacaaacaatgttagatgtagaagaagaaaatcttaccttatgggaaggtatttgaagcggggaactgtggaacatggcatgatatttgattctatattaattgatagtttctgcgcagtatctgtgtacattcggtttagttgcacaaagaaaccaaagagtacagcatggcgtaggtacgactgcttttcgttctcccaaagataaggctcgtaccttttttgatattcaaaatactagaatcagagtgacaacaagacgatagagcagccaaaatagta

SEQ ID NO: 50378 - DNA, 799 bp, Arabidopsis thaliana landsberg
actctttatgatatagaatttgatcaacggcaactattttggattttggggattcaaatgtggcacattagttttatagactaattaggggaaacaccaattcgaagctcgtagaaaaagagaatacaacactaacttcaacccacctattaaagagagcttattatcaagaatatataaaaaaaaaaaactatgacagaaatacctaatttttgagattacaaaagattcttacaaaatatatatgttagattggatttacaagaatcttagattgtacagtcgagatacgaattgtatagtattagtttagaatactctattgttttttgattgagtaatgaaacaactcatggagtttaccaaattacaaaatgtgtaaggaaaaatgtgatgaaaaagatggaagttcattggatgctaagacattaacccatcattcattcatctaaacattcgttctttaaaacattcctctacctacaccgctctacatgccgaaagcaatatacaaaacttgatggacctaaaatgtcatcgttcaacaacatatgcattatgcatattacaaattatgatggtaaataaataaacgttattgtctacttatttaacatttgaacgtattttctgttactaatacaaattcagttactttgttctagctaataatatgaataattcccgctgacaaaaattaatatgatcattttttaatacatggtgaggccatggtgctctaaatagccaccggcattgttattatttgtggttcgtcaatagaataaacatatccatt

SEQ ID NO: 50379 - DNA, 624 bp, Arabidopsis thaliana landsberg
catcagcagacagaggccggaccacaaataggtgaaagtgggcgccacactaggtactacctgcggtgtttcgttgaccattaaacctagtttgggtactttattattaccctaaattcacatgtattgaattagattagaatgtaacaacaacagtactgtagaggattttcggcgatcgaactctgccgaagaaaataaggcattattattttcgacggccgaggacctaaccgtcaaaaataaccttattttcgacgtctgtgacgtagacagccgaaaataaacggatttaaacccgcccacaactttcttctctctttacttcttgcgacgccaggtcgctgctccctcgccgcccatgcccacgcccccgaccccgccgcccgaccgccgccgccgagccctcctccattgatagattttttgcgtattttatgcaataattttggcggacgttatttaattgccgccgaaattagtatgtatttgttattatacttgtttgattagggtgtgtgattagtattattgtttagttcgattccattaatgtattagttgcatatgtggttcagtgattagtggcatattgtttatagcaaaaacagtgaaatcccgatg

SEQ ID NO: 50380 - DNA, 491 bp, Arabidopsis thaliana landsberg
agacagaggtcgccgctcagacattggggatcagcagcaataatgctgctgattattagcttattcgctatgatagcgatgctcgtgggaggccgcttaatatatttggcgataataatagcgcaggggatctaagctaaataagtatattaaagttatactttaaaggcaaggagccaagcatacttcttagccatatagtggagaaggagagggaggaaagaggttggaagggatttaatgtttttttaaaaacttgcagtcacttccaaaggtggggtcctaattattcccattccctaatagtggtattgcatttcatctgattcattggttgcccagtccgcactgggccagctattgagctgctatgggatagtgcaaattagccaattcgccctacttaaataggggctccgtcctaatagtccaccttttctaataccaagagatcacccctatctatatacttacctttaatgctatggcac

SEQ ID NO: 50381 - DNA, 948 bp, Arabidopsis thaliana landsberg
tgatccacagtaatcgtatagtatagtaccttcgatcaaggtatcgaggttgaacaccagagccttgacaagtagtgcaagttaaggaaccagcaccatcacagttgatacagtttgagacttctttctctcctccaccaagctctacggtcacattaccacttcccacacacaatctgcatttctctgctccaccaccaaagaaactatttcttcagaaacatcataatatgtttataaacattttcgacacatcaaacattttgctcttacacaaatccaaccaaaatgctaacaaaaagttgagagagatccacttacgagctccggtgccattacagggaaaacaaggttgagtattctctcgcttagcctatgaaagtgtaaaatcaaaacagtgttaactttattccacagcaatgcactcacttagaagcattgccaaaacggtatcaaattttcaacaatgagaatgagaagactcaccgcattgtcgatttgagtctcgtagaacacagggattccgattcctaatgcgacgcttgctacgcctacagatatcgcgactacctagaaagataatcaaaatcgttcatcaataaaaactagtgagaagagaacaaagtctatatagccagagatgagaatcaaaccgtgttaggatcgagttcagctttgattccgggataagatgttgacggcgaccggagattcctcgccgagaaagaagaaggagtgaaattgatgggacagtgaatgaacggagaatgaagacgaggcggagatggagctgaaactggcatttcgacttctctttgtttggtatgaagctttgcagagaatcgcttaagcgcgcgaagatggatgagaggaagaagaagaaccagcagttttgggttaatctcagccactagattatgttttcatggctaagatttggtcacgtgg

SEQ ID NO: 50382 - DNA, 538 bp, Arabidopsis thaliana landsberg
ttcataagtccgtgacgtcgaacccccacggtgcgatgatggactcgctgccaattgtcatgcacctggacttggcgttcccttcaagaccgcttttccccagtggtgacgccagctacgcgctgttgatggccgtcagcaagatcgccagcggcatgggtccggcaattcgctctctgatcattccaagagtggcagagtatatggatccacgaggaaaggagtacttcatcgagacccggtcgaagttctttggaaagcctttgtcggaggtgcgaccgaccgatcaagggaccatcgatgagttatggaagcaggtggagattgaggcaggtccattggtcacaatgcttaagggtcgggagggcaagaagggacctttcttcgagggcgagaccccgggatatgtagacctgtatttggcctgtcagtttgccttcttcgagcgcattgaccgggaagctttcgaccggctgatggcaatcggcaacggtgaattcaaggccctttgggaggcttgcgagccttggatagatgg

SEQ ID NO: 50383 - DNA, 1138 bp, Arabidopsis thaliana landsberg
  unsure (1)..(1138): unsure at all n locations
tcattttggtttagttgataataaattactgaaatgaattttatccatatctataaataaaaaaatctgaatacgtttttttttgcgtttaataaatttagattctagaataacaaggttgttttcaaattattatcaaacattcaaactctactgcaacggtatctttagaaattacgaactaaaaaagtctaaaattgtttgcatgtatactttttgaccagaagaaatagagaaaaaaatacatatgattggaccgtaaacttttgaataaactttcagattttcctccaatctagtcacacaaatatgaatacaaaagacacacacacaaattagattattttcttctctcccaattattacaaaaacatttcaccaatttgaccaagagagcaaacaaaacttttctaagcatttctcggttgaagtaaaaacgcgttatgccgtgatgggcaatgaacatgaaaagaagctgacgatagaatcatagttatcttttagttgttagagaaaccacttgttcgagaagcaaaaaccggacttgttcaatgccctgacatgtgtaatgacatggaaggttgcttaaggtccacgtgttgaccttggagatatatgaagtcttcgagaagctcacttggttttcttgtgtaatgtgttgtgtgaagttgacctaaatcaatattatgcctttgggtgaatcttgaccaatgtggctatggtcaacgcgattagcagactttcacttccccttacgtatggagttatttggccagggtcatggactcatggttttacgatgttaactttgtatacggttctcaaattggtaagatatatcatgtaagatatcttgtagaaaatttcgatatttattttgttgatattttttaaatttcgtaacatagatatcttttagatattttgtaggcttaggattttcggtccacactgattttgtctggttcaaagatagttgtgataatgtatgtggtagaccgtgatctactaaaacgtacgttactttttagaatcgaaggttgtattttacttggatctaataaaatcgaaacaaataaattaaacccacctcatgttaatacaatatttaacttattagtcatanaccttgaaaaaa

SEQ ID NO: 50384 - DNA, 836 bp, Arabidopsis thaliana landsberg
  unsure (1)..(836): unsure at all n locations
aagcattgtataaattataccactacacgttggtacgtgtatattccaacaacatttgatagaagattatttcgtcaagtttgcatgtggcttccgtaagaagctgcaagatggacaaccatgtacactaaatacttccattatcgggtattcgatggcatgagaagttttataaatataagtatgaacttcatttatatgaatctaaacctttttctgtgactgtgagatttctatttagtagagaaaggaaacactcacaaacactagtttcaccaaatgcatccacactctttagtctttataatcccgcttggtaatcatcctcatagatcattttagttcttttacttgattaattattacctattatttttccgttaaaatttgagtgttctgctaattagctaacctacaatatcatccatttctctgccatattttacaaaccttaagatttcaccattgctaatcctatataatccaaaagaaatattaatccattcctccaataaaatagcaccagtctacaacatactattctgctcaagatactagtactactaccactattcaaagtcctttattatttttgtttgtaacaaattgacaatcatcactactgaacattttcaagttttaagcacgacaaagaaatcaaatcccaaaaacttgttgggtttcataaatgtgaccctatgaatgatggatacttacatccaaacggaagaatagaagacccttgaaaccaaaccggatcaagtcaaaccaagtcccttgaaaccaaaccnggacaaatcttgaccatacatattaccgttcattacggcggtttt

SEQ ID NO: 50385 - DNA, 1101 bp, Arabidopsis thaliana landsberg
gcatgagtaggcatgacaccaattagaattaaagatgttttagcatatttagaacgaaaaaaatccattagataatgaactatcttctctatttcctttttccttttttattatgttcaaaaaaattattctcttctagaagaggtttaagcgagggaatttttaagacacgtaatttatatagcggaatcacttttgtaaacatgaaaattttatgaatgttctacacgattaaatataccaaaatcacgttttcaaaacctgaaaatgagtatcattcgttagaaacgatatatagtgagatcgattcaaatttttaagaaaagaaattcaaacaaaaataaaactaaacgaattaagaatattgatctaaacataggttttaccaaattagactacacaaaaaagattaccactctaattactgattccagattaggttatttaacgaatatgtgaggttttttttggtctctctctttatccaagaaataacaaatttagattgtgcggtgtttagatggtgttaaaatctatattactctagtttcctcttttaatatatataaagcgaaattcattttgttcgttttgttaagaattcctcactttgtagttttcaaaatcatataaattatagaagggaataaaaaaaacatcaagtcaaaatgaaggcttgggtcatatgtttgatggtaataagcattttcatgatgattgagccaacactagctgctggtgggggtaaatttttaaatccaggagtgcttgatccgtgtttgcgtcctaatcctccaccagggtgtcaagcctcaggatcagctgggaaacctagagagcgagttaatgagtataaagctggatgctccaaacttacccggtgcaatcgtgtcggataatcattattgatgttattagtgtaatgagaattctctcacatatagtacacatgctcataacttctttcagctatatcaataatatggtatatttgtacaaaatcgtatatgtatgtaacagctttaataatatatatacgtgtaagactagaatcctacttatactgcgtttgtacaatgatgtggcgtataatcaaagtat

SEQ ID NO: 50386 - DNA, 602 bp, Arabidopsis thaliana landsberg
aatgagattagtatagaggttgtcttagcttttaccagcatgaatgccttgggtcgctggatgtagtacatctaccttaagtagaaatcgctcttggaatagcccccagacaaggataggagtggaggcgaatgaaggaacacagggtgagacacgaacgctgtgttctagggactaatttttaacctctccgttttttcattttactcctaaattgttaaataagtatatttagcaatttagtgactaaaatagaataaaagggaggaactaaaaattagtccctagagcgtgtttgtgtctaggaactaattttagttcctctatttatttgcattttaatcctaaaatattaaatacaaaattaaaatagagtttagtttcgtatttaataatttatggactaaaatagattaaaatataaggactaaaaattgaaccctataaacaaacacccgtaagcatggatagggatttcagacattgtcacgcgccccatacaaaaagtttcttggcttccattatctttatcattaacccaccacactagctaggcgcctctttaattgccccggctctctttgtctccatgacctttgtgt

SEQ ID NO: 50387 - DNA, 724 bp, Arabidopsis thaliana landsberg
ggaggtgattcccaatcccatgtgcttctttttggtttaaccaccttctcacctaatctaatggtgccgaattaatcatccaagtctctctgtttatgttaagaaagaacattataaaaatacaaccatatcttttttttttcttctaaatacaaccatatcttatcttagcttttataagctatgaaacaatgatttaatacatgtgtatattttatcatataccaaagtataatcaaagcaaaaatcataacgtggtgaaaatcgtattattattattattggatgctagagaaacggcagcgttttgggagatcttaattcttaaaccttactcttgtgattctcgagccgcttcaaggagcttcgtgcttgtcaacaaattttccaagcgcccgctgaactaaaaaagatgagttctgatctgaagagaaagccgaagaagaagataactcctaaacctgttcaattaaaccctaattggtcactcctccaacaagttagtctctatttctttcttctcttagctaatttctcctgtttttcttccagacttttgttcagccattgatttggttcccgttatttttccttgtagaaactgaaatctgattctcatggcaacactcgaaaatcttcaaacccagaaaatcccagctccatattaggtagcattcaacctaaaaattcgaactttaagcttgggtttagggtttatagactg

SEQ ID NO: 50388 - DNA, 609 bp, Arabidopsis thaliana landsberg
ctttcctaaacagcagcaacatttaactagtctcttagtgatgctctaagacagcaacattcagaaaatatagtagctcagtttacattcaaaagcaaaatactgaggcattatttggataacattaacacatataaatagaacatcactagcgtggggatgcgtttggggtgtacgggtttttttagtgaacagcactaacgtggagagtgtgagaagacttatttgcaaaaaatgcaataacactgttggatatagaacggatcgactggatgcattttacgcatgggagcacctaccttctttgcgtacagaatgctcccatcacgatatcacctaaataagttctccacaaccacaaccaagcaaataacaccagtccgccaactaaattcgtgaatttgaagaatacacaagcaggtaaataactaataagttcagtacaacaagcattaggtgttggtgcgagaagaattttaatccagagcttcatggaattgtatgcgaaaaagtaacaaactaaatagacgtgcttgagctagtaccctattcaacttatatgatttgtggagaggcactaggtactcttggatcaatatatcagaaaga

SEQ ID NO: 50389 - DNA, 635 bp, Arabidopsis thaliana landsberg
tatgaacttgaaatctatagcttcactaaaccctaagaaccccttttaaagaaacaatcccacaaaactgagagcgatagagagaaagagagatgtgtaatgaaggtatggtaagagagcagtggtgggattttatacaaaatcaaagctttttttttctctctctcgtgcacgctttggtgggttctctctcacacagccttacctttttttctttctcaatttgttgttctctctctctaaagattctgaaagggacgagaagagaaaaaataggaatacaaagaaaaggaaatttggatttgtatgaacaaaaaaaaactcagaaaaaggtaaagcaaagtagagtgactccacttttactcctaaaccccaaaagtagaaatgaaaactacaataaatttacagattgcataccaagaaaaacagtaattgttcttgacatgaaaagagaaaactgtgaaaaaaaagaagtgggttttaacgtttttggttttaggagttcttttgtggagtaaaacacacgcaaccttgtctttttttctgcctcaaatatcgctaattaaggcttttgtctagtaaaagaagcaaagcgtgctgttctgtttctcacaagtctacgaattagaaaaata

SEQ ID NO: 50390 - DNA, 532 bp, Arabidopsis thaliana landsberg
tgattgtatacatatcaattatacatatatgattatatatgcaaatattacaagtatagatttccaaattattgaaattgggagaggaagactaaaatgggtccccacatattggaaagagtaagtcttaaaggcaagggaacatcaacaattatttcattgggctctttatgatcccatcctcctacgattacataacccctcatgaactataaaaccaaactcagatttgatatatataatcgatatttctatctcatgaaactttaataagaaaatggataaaaactctatcttcatgcaacgtattgggagttacgtataaaaatgaataaaatagatgcaattaaattataatatgtaggtttctctgaagtttaccagattaaattataatgcacttgtgtttatcttttaaatagttggtgaaaatgaggctctcttctaaataataagagtttgaaaacattaaataaaatcaagacatccgattagcaaccatgaaaattggtgtatggaaacattgaaatat

SEQ ID NO: 50391 - DNA, 766 bp, Arabidopsis thaliana landsberg
  unsure (1)..(766): unsure at all n locations
tgaaactgaaacctaacaagaaagcgtgaatccaaacgcattcctatgaattgtaaattgacaagtagcattttagaatagatggaatctaatctctaaatcgtaaccgaataaatggattggatccgttgcacagatggtttacaaagataatcatattataactaatccgaatttcaatcttgttttgatctatcttttaatagcaaagtccatgagtttagtgtttttgagattcctggaccaagggtcatttttcgcatattaaaatgaatgagataattacgacaaaaaaaaattgaatgagataatttgggaaaaattgaatatatacaaaaccattattatatgaatgtactaaattatttttaaatttttatatttcacctatacctaatacagaatacagtgtcattattgctttgactccctccaccaacaagtgaaaaaccttataaaattttactaatagaaaacgaatagtggaagaaaccatgtaatgtccaatcaaccagtaaatcggtttaaaatatataaaaagtcagtattcttaagtagaaagataataaatttgtgcaatagtaatcaagatagtagatacgccgttggaatcaaatcttcttttcttgaatgtgttgntaacttaagccaaccatttgattctctttactgcagctatattaattattaaacaccaatgcaataaccatacatttcttctaatattttaattataataattcgttttatttagtctgtatattcg

SEQ ID NO: 50392 - DNA, 1038 bp, Arabidopsis thaliana landsberg
tgacatcattcaccccagcaaaagcgctcacaattagttgaaaaatatcctgaaacaagataggaaacaaaagaaatcagtaatggacatgtctgtgatcacggtgccagaggaaagtcaggacaaacaaccttcataatattatcactgtaaggcgcttcaggtgctgtaatacgagttatctcagaaacgcagcttgcaacaagaagcttgacatccttgtcttgatggttgagaatttcaggtttaataactgcatcaagaaaaggctgaatggacttgagcactgcaggtggtggagactgctccaactcagaaagacaaacagcagcttcctgcatgtagcaacacacaagttaaggaaagtctttttgataaatcagtcacagtattgcacggaaaagtgtttaaggagagagatatcttagtaaactaacccgaccaattcaccccaatgaaaccaatcaaaagcaaatcacatttccacaaaggtggttgataaagaaacatcttagtcaatgtagaaactgaacattggggtaactactgcatcagtcaaattgctggtgaagatagcgcagttcaattccatcatgaccagggacagaaaaatactagggccaaccctaaaaactcgacattctaacagcagacatcataaaagtcgcaaatctaagcaattatagacactgaattggttctcctaggaacagtcccgagttttatgcatgacctaatttcgcaagaacaatctagcgtagacgaaaaagatggtacaaactaaccctaacgcagctcgaaagaagaaaacactggctcaattaatgagcattacccagaacggaagaggatctacaaagctgaaaactttattcggttccaatttggcagaatttaaacaggggacaaagatggaaaaaagttccctccaaacgaaaaatcgaaacttggagaaattgttgaagagacaatgagaagtagagatggggaatcacaccttttagagtttgagcaatgaatccttagaaacaggagcta

SEQ ID NO: 50393 - DNA, 857 bp, Arabidopsis thaliana landsberg
aacggctacggaaattttaaaacctttttaattttatcaatcatcggccgacgtctgggggtggggggtaataatgaactatccagtatcaccacaaatagtcatcacagaagtgtgacatacttacgacaacaaactttaatctttttctaatttctatacaaccaaactaccaaagtggccatgaagaccaataagaacattgttgcaacttgcaaacggaacctcagccacctccggcgccaaatttccgagaatattaacaaagttttcaattaaagcaaaaaaggaatatttgagaaaattaattggcacaaatcacaaacaaaatcttctttcttgatcatgctgtaattacaatgttttcctttaactgaactcttatcacttgtgcgtgaacatagaaactaaagatttgtatagcttcgtcctctttaattctactcgaaaacatggaaagaaataaaatatcagcattgctaccgtaatttaggggaggaaacaatatttgagaataaaccatatattctttacgacaaaaaaaacaaaacaaaaacatatattctttttttgcgtgtgtcttatataaacacagaaagaggaactccattgttaaatcaagaaacttcagaaagtagagctcttaaagaaggtattatatacattctttttttcttctagtaatcactctgcatttactttatgttaatatcccatctgttttactattcgtgttaatcgtatatggatttggaattatgcataggaagcttgacaaaacgataaggattatgcttattagtgaaaaaattgagaataaaataatatgaatctttcttcccaatacatttgtaggc

SEQ ID NO: 50394 - DNA, 768 bp, Arabidopsis thaliana landsberg
catcaacttaaagaccgtagctttagtggacacttatgagttgcatcctcttttgcggcatatatattgaagggcagagaataatgggacgatgagacccctttgtacgaacaagatgtcaaaacttagaagaacgaaggaaaccgaacataaaaggcaacaacagtagttgtgtcagaacaacaacagtaaatgagatgtaaaagcttgtccaggctagttccttgcgttactgtaacaacactgttgaaaatgtactagtataaaatagtactattacaaattacaaccaaagcgattttcgtgctaattaccgaccatctgttcatacacgtttttttttttttttttaccgaccatctgttcatagacgttttctccaatgcatcattctcattgattttttttatttattgtcacagtatttttttgtaatccgaaaggttaaatgcttctctctaaagtttagtgacttttgcaatacaattaccctccgccaaaaacttaagcgcaattcttcactaaaaaaaacgttatttcattgcaatcgcactacatttacatatataatataaacacgatcataaagataacaaatgcgatgagggtcataccaaaaaaacataaaaagtgcgatgaggttatagcataacgataactcgccttctttctttatttggtctctatggcctgacatagaaaaaagagggagtaatgtaatgggcctctgattcgcaaataataatatatgactaagcctacgaacga

SEQ ID NO: 50395 - DNA, 849 bp, Arabidopsis thaliana landsberg
gatatgcacagaaacatagagatatacacataatctaaacatatataatgtgctaagttcctaacaagggcgttgaggtctccaaaaatattcgtaacgattaattcagcgaaagagtcatcataaattaaaagatctgcgtgtcacgtcgagggtagcagtgtcaccgcgtcactaggcatctcttgtataggagaatttgttttgcaattattcacctgtaaataggagaatttgttttgcaaatgttagaagaacttttaaatgttttggcgaataatacttgtataggacattgtctttgttaggttccaacataaaaaatatgatgaaagaaccaacactgatataaaaacgacatgaatctctctatttattgtgaatttgtttaaaattgaaacacttttaactttgggtcacactgatgacgctcttttcatcttcttgctgattggtggacattcctttatcagcgatcgatcacatattgcgttccaaactattctaagttttaatgatatccaaatgctatatataaatttttatattaatttatgaaaacataattattcgtatttatctgaagtttacatttttaaataatgaacctttcaacttttcctagttacacatttcatacaaagtatacgcacaaaaatagatatactttctatttgcatctagaatctgcatatacagtttgcggtaaagtacaaatccgttgtgtgtgactgtgttcataagaaatacacactattattacatgtaaacacaatgtaaatacaatctaacaaactcatggttaattttgttcgtaagtaaggttcactttccaaaaatgtgtgtatc

SEQ ID NO: 50396 - DNA, 1089 bp, Arabidopsis thaliana landsberg
gatgaccctagcagtggttttacttctggtatagaaaatgtatgaactatatagcataaattgacttttgactatagaagataattggacaaaaaccagtaacagtaaaagaataaaaaacaaaaacatctgaggaatgagccctgtgaatttaaagaaaataagaaaaccaaccaaatctgcctaaatgaaaaagaatgccgtgttttttttcctggcctttttcacattttatgttctctttctttgatcaagataatattaccatgttattggatccgaattgcaagcatctcatccgtcacttagaataaaacaagaggcaaaagaagggatttttttcacttactgtcagttctggaaagaggatgtcatgctgagggcaaacacctagttctttccgtatctcatcctaccaaaagagagtcgtatagtcagaaacaaaaatgcaagaataggggaaataacagcataaaaaacatacagatggtattcaactgatgctagaaaacaaaaatgcatatcttagtagcttataggtcagagttttttggttatgcaagaaaattagagattcaagtaatagcaacagaaaaaatttaccatgtttgttataatactgtttccaagtatcagggcatctccagacgttgggggaagaaggccaacaagcattgatattgttgtgcttttaccagctccattatgtccttcaagcaaaggaagcacgatttaacgaatatatcaagattagcactatcttttttcaacgtgattttcgttgtttctgccaattgagattgcatgcatggtgtcatgatgttattgcagagaccaagattcatcagagacaacatttagatgacaaagccagggaatagaaaatatcaaaagatgtagataaatgtgttataagaaagcttttctcaatatgttaaaaatgaatttcccaacaatgaataaataaaaactgaccaaattagaggagatgggaatgtttaataagcaggaaagacatacccagaaatgaaagtatctggttctcggataatgtaaggtgcaatgaattaactgcacaacaattttccc

SEQ ID NO: 50397 - DNA, 649 bp, Arabidopsis thaliana landsberg
ctgaatgatctgtgacaatgagtcacaaaaggcaaaatccccaattctcttctattttctacattaaaatcattcctacttttgaattttgctttgctgtaagttcacctaagcctccactattctctaaatgccaaattttctttttaaataattaggtccctaattaattattaaaacgaattttattcaccaactccagttatagtagcatatatgatacagtaccagcatatcacaattcacaattgtatcaaacgtttctagtaacaagagtgttttctattgttttaaccttaataccaagaacaaaacaaaacgctgtgtgagtttatacattcgtctcatgtgcatggttatatagtcttatctataggtcagaggtctctccgcttttgccgcagctagctaagctattttctttcctttgaataattgttttgcgtataattattttgttttgagaatttcactcgattgcgatagatttgggacatcattgccaactagatgcatgtgttaaactttttggcataattttcgaattgctgaaaaagcagttgttagagatttagattttcacctaacttataaggttccactattttttactaaaactggtattagttttcttacatacacgatgata

SEQ ID NO: 50398 - DNA, 480 bp, Arabidopsis thaliana landsberg
gcctgcatccattagctgtcatgctctgaaactttcttttcgcatgctcaagcctctcaatcccggacaaggtgcttgagaaacccgtaatactctttcttattcaaaagctcaccatatcccgctgatttcatcttatcgatcattctgtccccttcaccgatcctcgctgcttgatacaaactcctaatcagaacaagataagtctcagcatctggttgacaaccccattcacccatcctaccaaacactggcattgcttcttcagttctgctgatgctacaaagattgggaatcaacacatcgaaagtctatgtgtttctaggcacaccacgaaacttcatctccagcataaccttctctacttcacgttgaagcttaaaaggatctttcttcctacatagcttacagacacaatcgagcatcatggtatacgctataggttctatctcacatcctactctagacatttcaccagct

SEQ ID NO: 50399 - DNA, 1034 bp, Arabidopsis thaliana landsberg
atcatcataggtcaatatatatcaaatcgatcaaatatttgctaactaaaacttaaagaagtgaaggaatcaaatctaaaacgtaatggcaagtgttaatgtgtccggttcgtcatatcaacgtgttaattagggtgctccacttgtgattaatttgatcaggaaaataatgaaaaaggacatttggtgagataaatgatgccacgcggtctgtcataatgacgactgtcactttagtccacaatcatcatcgtgacgctcctctctcattcacttgtacgtgtcaaataatcattggcttgttcggttaattaccttccactttttaatcttgttgacgcagtttcctcttactatttgttgttattttaagtggatttatgacttgaagcctaagttttgcaaatagtgtcattcataggattcgctttcttatagatatttaagcatgatctctaattatattgtttcgttctatccattaaatctgatgcaaatgatgttgacgtgtatacattgacttctaggagattcgttgtagagtttgtctcagctaccaatggcactatagttcacattgtgagagacttcgcctatggtctactctcacgcctaatgttactgacaatgttttttctttttagttaataatataaattgtaagaaggattaattattgaaaagccacagaaaaataaaaatcttataagatacggcactattgcaaaatgtttatagaaataggcactcttcttcttgtcaaatgacgactttacccttgttgaataatctcttattgagacatgatttctctcgatctgggctccatcaacgataatgaagaactccgacgatgacaaccgcttagtgctccggtaaaacaagagtatatgtcatctctcaacatggcttcccgttaacgatgatgagaaggcaatgaacactgcttgaagcaagggtggtagcctatatatagctccggtgaaacaagcatcaagaagaggatggcaagatcttgagtgccaatggcagcg

SEQ ID NO: 50400 - DNA, 835 bp, Arabidopsis thaliana landsberg
ctttcgttgcctcggagtgtcttttgttgaactcggtttgaggaagcgacgtgggtttgccttggtatggagtgtgaagccatggaagaagaggaaaacctgaatcacctactatgtattctcttagctcggttctttctgagagcggtaacttttccccgttcagtctcttccctttctcaactagtttgtagaatcctgagttcttgaggacaacatcatcatttaaactcccaggccaaccagctattacatcgaggaatctcatgtccgggtctactacggcctgcaaagtcatgctgaagttcttttctccgtccaaccaaactttgtttgacggttccacagcaggaaggttcataacaatatgtgtaatgtcgatagcgccacagcagttaggaagacctgagattttctcaaactttgattttatttcatcgagtttcgaaggccatgagagatggtgtattgctctctcttccattgattcaacaaagcgccacgtgatttgggagactgttgactggttcatcccaaaggtctctccaatgacagagagagattcaccagagccaagcctcctaagcgccacagctacacggtcattgagagataaagggttcccatttgagtcgctgaaatttgcaggctttgctgtgaaatcggctttcacaagagagcaaatgtagtcaaatgtcttccttgatattttgaaaactgactcaaatgtctttggatccgttgaccctcctgaaaaaggagatgaaaagaaaaaacatgacattctcatagtaactacaaaatcaacaatgtatccaagatcaagcttactgct

SEQ ID NO: 50401 - DNA, 507 bp, Arabidopsis thaliana landsberg
tatttgatctaaaagtttataaagcttaaaacatattttgattcgaacaactataacttttaaatcttgagatatcaaaagacttctataatgaaataaaaagactgaacatgacattcattgtagctttttgtttttaatgcaaatatttcatcgtagctttttttttcttaacaaaacaaaacattcataataactagtaacgagtaacaacgagcaagagattcgcatttctcacactcacactcgcaaaaacaaaagataaaggggaggaaaaagcttaaaatctatcatatacaaaaagaaaagaaagatttgcctataaaaatcaacaaaaacccatcaaatgaatgtttttttttatagaacttcgtgaagaagaacacaccccacaagcaagcaaccctcgcgttttggctttggaaaactgaaaaccccacaaaaaaaaatttcaaagtaaaggaaagtacatgcaaaaagtaaaaagtaaaagtaaaaagtgtaaag

SEQ ID NO: 50402 - DNA, 530 bp, Arabidopsis thaliana landsberg
  unsure (1)..(530): unsure at all n locations
aacccttctaacatgaaacacatcacagtttccaattctccttttcttaaacattaaacagagtgtttaaatgggcagcgtgtcacctcaagtcagcgtctcgaagagagttcggttcttgatgctcatgctagtgatgtgagtatgatcttccacaacaaatcatataacaacgtaaaaaaaattgaatctacaaagctcacaagtctcatatgcttactatatgtagattgatggggagccttactggtactacgagtaccttgtccgcaaatcaccaaccaaaattgtaatgctctctaactctgagcagattcttcttgtttaaagacataaggagattgattttgataggacttactggctttgctatatgtgggcaggctgaagcatcaaagctttacagacactatatttcttcaacagctgaacgtgatggtaaagaacttttcacaagggaattgattgagatgcanagtttaaagtttgtttagcctgatgtagagtaacaacatttacctgaatctcac

SEQ ID NO: 50403 - DNA, 593 bp, Arabidopsis thaliana landsberg
cgccattatccaaaatataacagtgataattttgacaattcattacctttctaacaaaaaaacatatatctacggaaagatgtttatatacctgggttgtcttcagtagagctagtcctccaataccggaagttaagtttaatgcaccagacttttctactcttgcctctgtagtatggttctctgacccaagcttaaaaccttcaaaacaaaagattgatttagaaaaaccattaaactatagcaaatattcgttccagaaaaaagtgtcagaaccaaccatgtaaatgtggttttccatcgatggagacacgctcccagggcttctcaatgatattcacgatagcagtaaaaacctggttaaacagagaggaaacaaaacagcaaaatgaataaaacatctttaaggtgaatatatccaattgcttactaaaaaagatatggtgatagtgcatagtgcatacatacctgtggataaaatgagcaaaagtgtttcccaataagtatggcaaattcctccaccgagagccgatctccacattccttggctttcacataaaccttcattccaacataaaacatttgtcagacac

SEQ ID NO: 50404 - DNA, 647 bp, Arabidopsis thaliana landsberg
atgtgtgtatatatagttgacttaatgttgcaagcttcagttttgatctgtcaaaagaatctggtcccctttttaattcctgcagtatgctttctacaaacactacctgatggccttgagacttactttcctcaatatgaataagaacatcgtgtttcaatgaacacataaacattgactcaaccataaaccagtaaaacagtcgaaacaatactcattgatagggcttttcagttaacaatcaggaaaattttgagttttgaatgatttgagcaaaaccataaaacaggaagtaggagccaatgaatttttttaacatgagacaaatagatggctcagagcaaaatcctacgcctgtattaaaaagtcaaaagccaatggcattatctgatttttacagcctccacttcatagacaagccacgcactcttaggcaccttttccttcaatcccctttttgagtacctgtgtttatcacatccagagtaagagacacaaagcaggtgtataaactcagttacattatgctgagaagcctgagatgaatcatcaagacacggtcaactgaaaccattatgacatacccgagggctggcggtattatgagtcttctcttatcaccaactcgcatttctgagtattagaaa

SEQ ID NO: 50405 - DNA, 512 bp, Arabidopsis thaliana landsberg
cgtcttccattcgatactctacgacgagaggtacatctttcgacattgacagagtaactgtgggtgataaagctgtagctttggtgaagaaattgagatatctgagcgcaaatgtcagttggacagcttcttccaattcgatggttgtggtttcttcaggcttggtgtcaacgccagttgtaggtctgcatgtaatgttgccagttccaaggtcaccattgacgctaaatttcacaccttcctttgttgcactaataacaactgcagaacacatgttagttcacaaataacgccgagggacaacagcacacgtacctgtatcaccaagaatggtcaagtctctgcaaattctttggaactcggcggcaggcatctttaccacagctttgtattctgtatcaggaatacccaagtgttcgctgtcaatttcaagcaatttcaactcaaagtcagaaatcttgtcttgttctgttgtgagagagaaaattatacactggtaagacacacacaac

SEQ ID NO: 50406 - DNA, 516 bp, Arabidopsis thaliana landsberg
  unsure (1)..(516): unsure at all n locations
tggtagctacaaaacaannnnnnnnnnnnnnnnnnnnnnnnnnnnnnnnnnnnnngtcaaatccgttcaaatttcacagaatgtatttacgaaatcgtaaagcttaaaaaaagacctggtggagaggacttccggtagagctgaagttgcgacggtggaagcggcggcgaagagatgataaagatcttcggaccagttgcgaaaagcttaggaagaaccttaaggcgggcggtgtaccggatcttgaaagcgcgacgtgattcatcgttgaaagctgtgtaactaactctgagaacgtggagaagaggaaatccagagaaaaacctcttaaatctttttttttttgaactatagtttaatcggttgacttatataataatcaaaatttacttgaagaagaggttttaaaaaaaaacttggggaagagtcaaacagaggtttttgttttcttgcttatcacgaatttgtataggctaataaaaccctaagacttgatgaataaactgcggtatgttg

SEQ ID NO: 50407 - DNA, 824 bp, Arabidopsis thaliana landsberg
aacatgaacacttctcagtactttaattctaaaaccacatgaacaatggactagccaataaaacagataaaaaccggatttgaaaagagaaaacagagcaattcagagaactttgaaggttgtataataaatatatcaacatgaattttgaattcagtggcacatttttctcatcatcatgctctgttttcctttcaatacaaaattaaacaaactaacaccactcaatacccagatttcagctattggccaatacacatttctgagaagctcaactattgaacaacccaacaaaagaagcgtaaaaagccaaaatatagcaccaattgagtacctttttctcgatttgttccttgcatctataaatctcaaagatgcaaggggctatacagtgctttaattactatagcaagaaatcaagataaaaatccaaactttgtacacagaagagaaattgagcatacacccataaatcaacaaattttactagaattgaaaacgatcctataacgaaatcgataatgttgacggctgcattggattagtgattcatggaagcattttataagaagacaacaacttggattaggttaagaaccgggtcgggtttttttctgattattaaatgtttctgtcgttttatcactttaataagcaactgcatgtcgttttattgttgacggtagttttcagtagaaatcgagggccgggtaatgttattttgggccgagtccaattacaaatgtttttttagaattataatagttgagaaataatatcttgtctcctataataatgttcttgtggtgaattaatcggtgatc

SEQ ID NO: 50408 - DNA, 771 bp, Arabidopsis thaliana landsberg
cctaaccttgtaatacaccggatggggaatcaactttggctgaagattcaacgcccataatggctgctgttcttggagccctagaaacttttcctttcaatattgcagtagagctgtttgtgggactatcatccagtaagtttctcctggatatgcacaattatgcatttatcagtcgtaaacaatttattattaaactgaaggaaaatctataacgaaagcttgagtatctccttacttattatttcccttggctagcctctgctcagcaagtactgaccgatcccttgcaatggaaacagtctccaactcattcttggataatgcacccatacatggactgtctggctcaaacgaagtatcaagtctgttgatcccactcaccccggatgaagatttcgatctgcaacaaatgggtcacattatgtattcttcgggaaggaaagttaagcaagagggatcaatctggaaaactatataaatacaaatgcatgttgcaagaaaattccacagcatcaaacataacaaaattatcatgctaaagtaagatctaccaaaacaaattcaagatgaactccagtttaaatgagaaacttgacaatctctggcagtaacttaaatagttcatggacaatagaaacttgtagactagcatagctcaattagaaagcagagtaggatccccactagaaaatcatgaacctaagacaacaaccagtaaataaacgcaatatttctctcttgtaggtccacttctggcccatggactag

SEQ ID NO: 50409 - DNA, 527 bp, Arabidopsis thaliana landsberg
gaatcggcttctcactagcttctcaccaggggtttgactttgtaacacaggagatatagtgtgctcttctggaacttcatccccaacatcatcctcactatgatcttgtgcagtacttggcacttcagtgacggcttcaaatacagcattatctcctagattgtgactctgttttggggtcgtgggtatatcagtttgcatattatctggagccttccgaggcaactcttttattatagcatcagaatgtaaggtttctatctctgtgggtagattactgactgacgcttccttttgagtgtaggcttgctcaatgtcgcccacttgctgagatgactcttcagatacagatgcagcttttgcaccttccccaatttgattcacatggacaattagctcagcatcaatatttcctgctttctcaagcctgtcaacttcactgataaatgtactgtctgcaacttccacttgagatgtttgccttgaagtctcaacttcttcagatgactctcctgtaacttttactt

SEQ ID NO: 50410 - DNA, 693 bp, Arabidopsis thaliana landsberg
  unsure (1)..(693): unsure at all n locations
cgatgcttacaatatctcaatatcacattttgtcagttgtcaccatatatggccgctgcaagcaccatcgcctgatagcggactgcagcagctgctaccgtgcgtagaccactactgctcgctagccaccaccacgcccgccatcgtaagactgtgttcagcggttcccctaaatttctccccctatatccaattcacgtgtcacgtcagcattctctttccccctatatctccatgctctacagtggttccctctatatctctactaatcctgaagggtggtgcgagggcgtccaccatcaccgtgcccccgcccggtcccgcgcatcccacagccgtgcccccatgtgtcgccctcagctcccggaaaacctagcgcgttgtagccgccatcaatgcctccgcacaatcccctgcccgctcggccgcgcacgcttggcgccagtgaccgccgcctctgctccctcctccatcccgcgcgcgccccgcgacctccgcctccccctccgtcatcccccatccacgcgcctcgccgagaatcccgcgcccatgcccgcccctccgacataacgccaacgggcgttcctgtcgtagggaaatggagagctagcatgtgggtgcgacggtgtgggtggcttcttcgatcctcgagcgtgctctgatcactcacacgtgagacgacnacgagagaga

SEQ ID NO: 50411 - DNA, 696 bp, Arabidopsis thaliana landsberg
  unsure (1)..(696): unsure at all n locations
ttccatcgaattatagtgaagtagcaaaagtgaatcagatgttatattagctttctctaataatggttgtaaatcaaggcagtggaaaataaatccaaagaaacttttttgttgaaccaaacaaatcgaagtaggagcacatcaggcccactatcttgtaagtctatgtctgaagagaaaacagagcacaacaacgaaggacaaagcaaccgagggatgggccagtcactaatgcaacaaactctgaagcccatttatgaagaaaagcccaaattttaatctgttataaagcctcatataagcccaataattaattttcttcacaacggctccacacagtgagtgttgtacaaatggccaaaaggtgcaatacgattactgagattgagaggcaacttcctggagccaggaatgctccattgtacgtaccctgggcctgatgctataattatgtgtcgacatgtgtggaacaaatgtctggttaataatttttaaattaaaaacacacacaattttgtaattaaacatcattaagcatgtgctcaataaatagacacatgacacatgctaaatgctacatatatatggcaaaaaaaacatcaactaaatattcaaaaattcaaatctttaacaaccccacanaattaaactgtgttggaatcacacannaagttaatttcaattaaaaatatataa

SEQ ID NO: 50412 - DNA, 992 bp, Arabidopsis thaliana landsberg
cgcagcttaaatgtctgaaatgcttgatgttgggatcaaaccaactctgcagacatacagtgctcttatctggggttatgccaaggctggaaagcgagaggaggctgaggatactttcagttgcatgttgcgctcaggcactaaacctgataatttagcgtattctgtaatgttggatgtattactaagaggcaacgagacaagaaaggcctggggtttataccgtaatatgatttctgatggtcatacaccgtcttacactctgtatgagttgatgatacttggacttatgaaggaaaacaggtcagatgacattcagaaaaccatcagagacatggaagaattgtgtggcatgaacccactagagatttcatcagtgcttgttaagggcgaatgctttgatctcgctgctagacagttgaaagtggctatcaccaatggctatgaattggaaaacgacactctattgtctatcctgggttcctatagttcatcaggcaggcattcagaagcgtttgagttacttgaatttttgaaagagcatgccagtggatctaaaagacttataactgaagctctaattgttctacattgcaaggtgaacaacttaagcgctgctctagatgaatatttcgctgacccatgtgttcatggctggtgttttggcagttccaccatgtatgagactctattacactgctgtgtagcaaatgaacattatgctgaagcttctcaggttttctctgacctgagactatctggctgcgaagcttcagaaagtgtttgtaaaagcatggttgttgtgtattgcaagcttggctttccagagacagctcatcaagtggttaatcaggctgagacaaaaggcttccactttgcttgttcgcctatgtatactgatatcattgaggcttatggaaaacaaaaactatggcagaaagcggagagtgtggttggcaacctaagacaaagtggacaaacacctgatctga

SEQ ID NO: 50413 - DNA, 611 bp, Arabidopsis thaliana landsberg
cgtctttatttttttgttttctaataaatggtgttatttctttgattgtatatagcaaagcagaaacagaaaacatcactaactctttagattccttttcgtttatacattttacactttcttaattcttgacaccttctttaaagtttttttctttttggggtgaaagagagttcttgaaaggattttaatcagaagcaaaaatggaggagaagaaactaaatttagatgctccattcctatccgtgaggcgagttccgactaaacctgatgatccaaacgaatcagagaacaccaagaagaagacgatgacgacgagaaggagaaaaatcaaaggttcgtgtcaagaaacagagaatgaaactctgattcgattattacaagaccagagtttcgagcatgtaatggaaccatcttcagttcctttcaaatgggaacaaacacctggaaagccaaaggatcaacaaaccctaatcgaagaatcggacctaatcaaagctatggaaatggtttcttcaaccgcaagtttctcttttaattgcagttcaagtggagtaagtgagttcgagaataatggagatggcgacagatcgagtaatgtttcgagagat

SEQ ID NO: 50414 - DNA, 677 bp, Arabidopsis thaliana landsberg
catcaaaagattcttcacctgttattaaatcttacctcaatcagcaacaaataaccaactcaactagcatgaacacagactagagataaacacagtcgtaaacaccataaacaatagtttcaagaacacacaatacactgatgactgatcactcaaatccactcaacttctgcaactttctaacattcaacattaaccattgaaactcttaaacaaagtctaattaccatcaaaagagctatatgtagatgaaaattcacattcaatatatgaagtaatgactaaccttgatttgcccatgtgttagttttttaggtttgagacgaaaatctccattgttatgtgactgagtagctgcgggtttcgtggcggaggcgccgtaaacggtggtggtggctatcgaattgattgcagctctccacttgggatcttcatcttcgctgctgctatctcctccacttaactcccgtttagccattccaataccgtcgccgtgaaatctcgctactttgtttctatgtcttaccgtgaactgcgtaatccccggcagaagaacgtcgtcaagggtttattagataacactttttccggattcgggtcgggtttaattttgacacggaagagagattagtttaattatgaaccccgaatcttttagtactaccaaattaccccag

SEQ ID NO: 50415 - DNA, 629 bp, Arabidopsis thaliana landsberg
  unsure (1)..(629): unsure at all n locations
atgcggatatanngtcgagatggggtaaaatttctcctttgccattgtgagnnaagacagcggnngttcgcattctccgcggtatccgggcgcaaattattaaatgggatatcaaacacagagcaaacatattctggtattagtgtgacacggggaaatatgtggtaagtnnnnnnnnnnnnnnnnnnnnnnnnnnnnnnnnnnnnnnnnnnnnnnnnnnnnnnnnnnnnnnnnnnnnnnnnnnnnnnnnnnnnnnnnnnnnnnnnnnnnnnnnnnnnnnnnnnnnnnnnnnnnnnnnnnnnnnnnnnnnnnnnnnnnnnnnnnnnnnnnnnnnnnnnnnnnnnnnnnnnnnnnnnnnnnnnnnnnnnnnnnnnnnnnnnnnnnnnnnnnnnnnnnnnnnnnnnnnnnnnnnnnnnnnnnnnnnnnnnnnnnnnnnnnnnnnnnnnnnnnnnnnnnnnnnnnnnnnnnnnnnnnnnnnnnnnnnnnnnnnnnnnnnnnnnnnnnnnnnnnnnnnnnnnnnnnnnnnnnnnnnnnnnnnnnnnnnnnnnnnnnnnnnnnnnnnnnnnnnnnnnnnnnnnnnnnnnnnnnnnnnnnnnnnnnnnnnnnnnnnnnnnnnnnnnnnnnnacgt

SEQ ID NO: 50416 - DNA, 538 bp, Arabidopsis thaliana landsberg
  unsure (1)..(538): unsure at all n locations
acaacgcatctgttcaggggtgccgcataagagatctantgtatcaccatgtgacgttttggaagcagggtggggtatcatcgctcccgatatctgacgtccatagaggtaatcaccaaatcaagaaaaaagaagaagaagaagaaaaccgaaataaagattatcaaaagatttcagaaacaaacccttcttatgttttccaaattgcctcctccttttcccataactttactcattgcatgcgccgggattagaatctccagagcagaagatgaaggcaaactataaataaagaaagatcatttacagagaaaaagagtcttaatgataacaaagaagccaagtttgcaagtttaccgtccatatgagtatggaccggttgatcccaaaacattatctcctgcctgtatatagaaaaagcctaagtcatgactttggaattgactacaagagattcagtggaaattcaatatgcaacttcttaccggaagcttccataccatggaaatccgttgtagaaccattgagacatgaacga

SEQ ID NO: 50417 - DNA, 828 bp, Arabidopsis thaliana landsberg
tatcctggctaatatttcactctcaaaggatacaataattgtttacttatttcttcatttaacctaagagccacatatatagagcttaacaagaaaaatgtccatttgttaattttttactgctttatgttagaattttcttctacttctacgtgttattggcatctagattagtatgttattattgcatatgaaaccgccagttatggtttggccagacaaaagaagatgagacaaaagaaagaaataaggcatggagaaaaggaatgtagtacactaataatcaaatggaatgagaaatgaagccacaaaagtatctgcaatcaaaatatcctgctatctccatctcaagctctcaatagtatcctctccgaaagataataaatcccaaaagaattcagtcccaagcaatacagtggaacaaacaaagacgacataaaaataaatgcaagtaacacagtcacaaaagattccacttagatcataaaccagacgagaacagatccaaatactaagctcgaaaccatcttgctagctccattctgcaaaacaaaaggtttccaatcagcatttcaatagccaagggacttcacagttcaattacttaatccggggttacatttgaaaagatcctaaaatttaggggtggaaagttaaataatttggacagcagatcttagagaatccgtccatcacgctttggactgtttttttattactaaactaaactagatctactttggtccgaaagaatattgccacgcggcagtattaaattattcacgtgcagactgacatagtcacgtgactacagcactcacgcgctca

SEQ ID NO: 50418 - DNA, 1001 bp, Arabidopsis thaliana landsberg
atgcattgtgtactgagaaatgatccctaacctagtgatgtgtgtcttgtttcatcatatgtgccttaaaattcatcacctctatctagcggagtgattttcaccgttctatctaattgtctctttacttcaataatgaacactttttactgcattcacaaactgatagttttcatgcactagatagagataacaataatgtgaataatcattaataaaggtaatgaaagactttttacctccaaagatggagcattaaaaatgtccacaaacatttgtatgtatcatttcaagaggctgtatacttcttgtggctcttttcttagtgtttttagtttgcttatctttaatgcaatcttgacactctttagtgttggtaaaattaagattcgtaatgagtccatctttcaccaatcttttaattctttcattggaaacataatccaaccttttatgccacataaatatgagtctttagcacatgtttgcattgatgtccattattaccatagaaggtaagatgtgtctcaaacggttgatcagtcatataaagaccatcaaccaattcgattagagttcggaaataaactaaaacaagcatcttttttttttcttaattttgaattatccaatcaagattcattattgaaatacaataacaggaattaatatggaacataaaagtctgaagtaaatttagacaaaattcagtattcataatgaggtgagaaatactaatactttcaactagcacattatctttgtttcccttataagtaatttcacttaagttgatttttgttttctgcataggacttaagacatgtataatagcactgtttattaatccaccaacattttagaagaactataagcaagattatgttcgaaaatcttacaaatctataaggcattctttctgaaggtgtacaaactttcttcaaaggtatgcataggtcatcatctttcattgccattatcttcttatcaaatagattata

SEQ ID NO: 50419 - DNA, 1323 bp, Arabidopsis thaliana landsberg
  unsure (1)..(1323): unsure at all n locations
taaaagccaccaccataatacgaattcgttatacccttttctccaaattacgatattttctgttcttcgttggctatgataaacctgaggctaggcttagagctaaagttatgttcttttaataactttactctgttcttcacacatctcctctgtttctgacactttcttcatcaactgtggatctccgacgaatgtaacagtcaacaatagaaccttcgtctccgacaacaatcttgttcaaggattctctgtcggaaccaccgattcgaattcaggtgatgaatcgactctgtttcagaccgcaagagtattctccgatgaatcatcatcaacttacagattcccgatcgaggaacacggttggttcttgattcgtatttactttttaccattagtctctgcttctcaagatttaaccacagctagattctcagtctcggctcagaatttcactctgatcagagaatataaaccctcaacgacttctgttgttagagaatacattttaaacgttaccacagatagtctcttgcttcagtttctccctagaactggttctgtttctttatcaatgctttggaagttttgagacttnnttnnttttgatacctgaagatgcaaaactcattggtacacagaaggatcttaagctcagtagtcatgcgatggagactgtttctcgtgtaaacatggggaatcttagtgtgagtcgtgatcaagataagctgtggaggcaatgggattctgattctgcttataaagctcacttcggtacaccggttatgaacctcaaagcggttaacttcagtgctggtggaataactgatgacattgcaccagtttacgtctatggaaccgccacgaggttaaactctgatcttgatcctaatactaacgccaatcttacttggacattcaaagtcgagcctggtttcgattactttgttcggattcacttttgtaacataatagtggatccttttggattcgagcgtcagatacgttttgacatttttgtgaactcagagaaagttagaaccattgatatgacagaggttttaaatggaacttttggggctccttttttcgttgatgcagtgatgcgtaaagcgaaaagccgtgaagggtttttgaatttatctattggtttagttatggatgtttcttcgtaccctgtttcttttattaacggatttgagatttcgaagctaagcaatgataagcggagtcttgatgcttttgatgccattttacctgatggttctttgagtaacaagagttcgaatacgagtgtcggattgatagctggtttgtctgcag

SEQ ID NO: 50420 - DNA, 579 bp, Arabidopsis thaliana landsberg
gagcatccttttgtagacatgcatgtttcaaacttttgagcccgctttctaacaccaatcaatgactggcggataacaacaacttcatgacataccaaatgtgtctgcaattactagatagggcggcctctctttgagaagaagacgttaatggtagaagagaagcggaggcgtcagttggtaaagctgacgagaacaacaaaatcagctgctgctgctaatggtggaagctttgcatcattaagtagattgaagcttcggagacggtggtgcttgtcacggcgacaatgacggtggccggatttgcatcacttttttttttttttttctaaactctttgtttgttatcttatatgtagaacaaaagaaagtatatggactaaattgtgaatatgtcaattaatataggctttaacccaaaacagaataggacatttaaaaaacattatgttaaaaaatattttaaacaatatattttccttttatcaagattaatttaagatttttatttttgttttcaaataatttcattaatgggataaaaaaaaaaaaactaactttagagacaatctccataga

SEQ ID NO: 50421 - DNA, 2218 bp, Arabidopsis thaliana landsberg
  unsure (1)..(2218): unsure at all n locations
ctctaatataatacatcgaagatatattgacatgcaacttcgttcattgctaattggttttgagccgaaagtctacgtttacctgaatacaattgcccatgttaatgatcaaagcatccgagatcggtttcacggggatccattgtccatccgatctacgactcacttgtaatccacctacactatcttgggccaggacggttaaagctcctccatctttgtgacgtccaacacctaatgctagctcggggttcgggcaaggagggtaatggttaaaccgcaaaaaactagtttgctcattgaagaaaccggttagccgatcaccaggtagacccaaactaatggagacaagttccaatagcctaaaagctaacttctcaacttctcttgcatattcttggcatacctctctaccaatacacatgataaaaaaaaatcactttcaggataataaaatgaaattctaataaggcccaatgggcctaaactctcgatctcgtgattgaacgcaccaatcaataattcagtgagtgagagagaatcaagaaaatggtcacctgaaatgagaagggttttgaggccactggttcgtgagctttcggagctcagtatcttccggctccggtgacgccggaacgatcgtggaatcttgtaagaagaaatcgaaaatttccttccaatctctaacgttcttagtgtgttcttcgtcgtgataacccataggattcacttcgtctcttttcactttcctcttctcctccgtcgttagattgaaaaactcagcagctgtcttctctacacgatgccttaaagctgaaggcaagccatggttgatcacttgaaaaaatccccatctcttgcatgcctctgcaatctccttggcgatcgcagtcttgtcatgatgagtatcttcgagagaagagaggtcgatggtcgggatctcgtcggagaaaatgaaatcaccggagtttgtgaggtgagtgttgggtctgtgttctggagcttggataaaagcttcgtcgagttctcccatggcagttttggcagtgattcttgtggttattttttagagtaggctttggagatatcgatgattagtggtgcggttggtgttgctttataggataatgccacgtaagtagagtagaatttaatttctccctgaaataaaatgaatctatactaatttatgcaaaccactataggttattttttcctttggtctttatcgtagttcagctaaatgtcatttagggtcttcctattgttagacgtaaacatcacaatttgtttcgagtcaaatcaaataagttccttctaatagctcgaagggctgctctcttgcatattcttggcataccaacctatctataaacttgaggttaacaatcaaataaacttgaggttaacaagattcttatcaaactcaatgggcctttgttaaggcctttttagatgttcttgagaaattcttatctgaacaataatttttgattgtttttttcaagtttgatggaagaatcaaatttgcacaaagaaaaaggaagaatcaaatgaagaacacctgaaataatcacaatcgtcggatctccaaatttacatgtagggtgaagaatatagacctagtaactaggtaaaatacttattacttgtgaattctatacatgattaataaaaatttgaactctaaatccaacttcccacacgtgaacactgaacagagggtccacacttacattgttacatttaatttaagtggctcattaagtctactcactacacatcacatatgctataacgaatactcaaaaccaattaattttcaaaggaaatcgaattttgatgcaaatgatttgttcagggttttgcagcaaattcagctaagaaaattcttcaaaattagttaaagattttttctgtagtaaaaaatgcagaagtatgataaactaagccagggaaaaaaataactagaattgagcatgtataacatttaacaacaatatctaaaattaggacatagagaaatacaatttgcaaagatagctcagtggtcaagagaggaggaccacaagacgattttatctttgaatctggacgcaatcttatgtgtggtgccgaaattgaaatacattagtcaattctttaaaatgaagacattntatttgtttattctcttctaacggcctatatcgaccagagggatgtgcttaggacacta

SEQ ID NO: 50422 - DNA, 152 bp, Arabidopsis thaliana landsberg
  unsure (1)..(152): unsure at all n locations
gaaaaaatttcattgtcacttggtatatatcacnatttgcctatatcaaagnaaaacaccaacaacaaagacaggttaaattttttattataacataccaaccccgataantattattntatctacatatatacattcaaacctcaattaaa

SEQ ID NO: 50423 - DNA, 748 bp, Arabidopsis thaliana landsberg
aaggcaaatatagaatccctaaggagagtaaatggatgtccaagtaggaaagacaaataccttatagcgattaatgatatccttcagtatcttgttaagagcatgacccatatgcagatcaccattggcataaggaggaccatcatgaagaatgaaactcccctgaaattctaactaactatcagacaccagtctctcaaagcaaagttggcataagataattttgagaaactcactccattgttattatcagaaactctcttgaagacctggttctcttcccacaacttctggagttcaggttcccttgtcaaagaattcgctctcataccaaaaccagtctttggcaaatcaaccgtttgcttgtactttccatcttcttgcttttcccctaaccaacacacaacggtaaatgagtgccacattgcaatatagtattaagaaagaagtacaagcaatgcgatgcaaaccttcagatgctttcttggctgccataacaggcccacgagaccttcgttttgataaatgaccaaactcattgtttggttcagttgaaaaccgtgagacatataagaatgaaaaagccttgacggaagaccttcccttggcaagaaaagaatccaacggcgtgtttctccttaaatttgaacaacttttacctgacaaaacctaaacggggacaaactacatctcaaaaactattttcacgcaaattttcagcaagacacaataacttctatcagattga

SEQ ID NO: 50424 - DNA, 870 bp, Arabidopsis thaliana landsberg
ttacctaagacagatcctccaactcggttttgacgattcacttcctgcagatgattttttgagaattgacagagagagcctttgagacctaacgaataaacaaagagagaaactttatttatgtattgcttcaaaaataaataatgacagctattttccagcgaaccagagaatcattattggataaacatctgctttgaataaaaaaataaaggaccttctgatttagacagagtgtttcatagaggctttaaaaaggtgcttaaaccctttagggtttttgtcttccagctaaatcgactctgagtctctgacacagagatacgcacagatacagagagctttgagatcagattcaatggcggctaaagcttcgttgaagatcaaaggcaaaggaaaagcatcaagaggatcatcatctttttcttcttcttcctcctctgcatcatcaaagtacaaggtcttcaaggattggaccaactggtcattacagaaagccaaagtcgctactcactatggtttcatccctctgatcatcatcattggcatgaactcagatcctaaacctcatctttttcacctcctctctcccgtttaatccaccaattgaatcttcttcttcgtaatgttttttagatgcttttactttttcccccagatttgttctgttttcttcgttttatgaaatgggtttatatttgcttctgattctataattcaaagtctcattcttttttgcatgattcaaactcaataaaatcaaatgatctatgaagaaacagagaatttgctttaatggttactactactagtctgtgttgtctcactctgcatcaactgatcgaatatcttcaatcaattcaaaacttg

SEQ ID NO: 50425 - DNA, 1402 bp, Arabidopsis thaliana landsberg
aacactcccaacccaccatttccaccctaatttctggatgacctcgtctctgttgaatttacgatttatgataactgcctctacgtaagttatgataacgtggccatatgcaactgatgatgaagttttataagttccttatgcacacttgccaaaagccacagaacttaagcagagctgatgcatcgaaaagagatagggatagtaaagaaagcatgccaataggaaaatatacacagcagtgtaggtctagtatcacgactgattttgagcaaatgagtgcagaaaacaagtcccttcagaagtactttcaaaccagatagaaaagttggaaatacctttttaagtggtggcccatccttctcaggaacaatatcgtggatagcaatcagtacctcggcaggtgtaagtgcagggcctgtgtgagcagaaccctatcacagatataacacaaaagatcggaatagttcagaaaaactacaggtgtgtaaaatatactcatgaaatgaactgttgttcctgttttgtaactggacaaaccaatctctcatttcatcagatattaaaatatcaaggcaatcctctatgcatagcatgatcagtgagtagcaattaaaggatggattggagaatatgcatatacctgtaatatatgagcaagtgcaagttgaaacttttcaggcggaagattaagaaggggaggaaagatgggcaaaacctgttacattgaaaaataatgtccgtcataaaataaggaatttccacaattgataggcaataacaaaacatcatctttcgcatccaccagcaaaggaccaaaatttttatcagaagccttccatgattactagttcttatttatttccatatttcagataggtaaaataacgagggaacaagatatataataaaaataacaagcctcttcatctttcttcagggtaaacgtacagcaaaagagcagaagctatggaaagaaagtaaaaactaacctcgtctttagtgagtgaagaaagcaatggaataagaattgaaacatcctgcaaaacaaattttctgtaaggctttctgaactttattttcataattatttacacacaagaaaaagatacgagcgagctcttcataacaaatcaaacctttagctttgtttcatatagatgttttacagtagcaatcaaatccaaagaaggtgccaattcttgtggcaatatttgcaacaccttcacaagtaacagaccgttattcaaaattagatctacttttgaggctaacgtggatttactacagggaaaccagaagtcacttcatatgtcaataaatttcacttccctaggagggtcggatatattggagtagtccgtatagatgacctattctcgtatagatagtatatgcgatg

SEQ ID NO: 50426 - DNA, 881 bp, Arabidopsis thaliana landsberg
agttaatattcgactttataaaagagatgagagtcaacaaaactttttgcaactaattttggacgtacgaaatgctttgtgaatacattgatatcacttatgtttataatatcactcatcccaagtgttggtcaacatttctttgataaaaattaaactattcaatagaacgaaaaccacaaaaaaattataaagaattattgataacaactcttcatgttaatcttatatatttttttaaaaatatttgtttttaggttttaatacaaacaacatgattctagtttattaaactaattaacgcaacttgatggattataaaaatatagcttaactaatccatcaaattaacaagtgaatcgcactataattctaaaagaatcaggtaggtccaggatttgtcttttctccacttctcaatttcccattaataatcccgaaaaggcattacgtaataattaatattttacgctgtagtattattttatgataaacatttccaaattttccaacacttaatcataatttaaggattaaaggaaatttgattggtgcattcccaccacgagtttgcttaacgtgtcgttaaatgcagccgtcggacttgacaatgcaaaaatgctacatgatctaaataattaactctcgcaataagattcactaataataacatttttaacgacgatatataattttacaataagaaaaaaaatatgaatctaatatttatttaatattaatttactccattatctgaataatctagaatatgtcaaatatccttttattattttgtagctgtcgaaactatggtgaataaaatctcgaggaatatattagaaaaccaaaaagatctagaggaataataatattttaaatat

SEQ ID NO: 50427 - DNA, 308 bp, Arabidopsis thaliana landsberg
  unsure (1)..(308): unsure at all n locations
tggttatattacttcatgacaaacaatcaactctctaaaaacttgattatgtatggattttgataataattcccttcaaattgcaagtggaagaatacgtaaaaacataatattaagaaactttaattcagcatgaagaaaaaagttggtaaacatagcagtgaactctatgaatctttaaccatggaatttcaagagattccaccaaanaaacttcatgttattctatgaggaaataaaaatactggaggaccgtataacaacctacatgcaacttaagaagtttcaacaattaccaatatccaatc

SEQ ID NO: 50428 - DNA, 216 bp, Arabidopsis thaliana landsberg
cgcttagaaatattataccttctctgagcctaaatatgatgacccgcgtaatataaggttttaacatctatttactccaaaaagcctacatctcctacatcatcaaactatggcttctttttccgttccggccctatctcctaatatttaatcccgcagacatactaattcattacacttggttatatactagatcagactcggatcttgttactc

SEQ ID NO: 50429 - DNA, 410 bp, Arabidopsis thaliana landsberg
gaagaagaaagcggccaggaagagacccttttggtctgccccaagacactacaaaatccatggtcaggccagcttccaataagagacgagcacaccaccacacgaaacaaagggacgatcgcaacaacccctacaaaagcccagaatgacaggggacaacgcgccactaaagggctgaaaagaaaccttgacagatgccccataaactctaaccaatgaggacaaacctaaaccagctcgaccgagagcgatggacacacacccgaaaaggaacattggcatatataaacaagaggagccatacatgtacccatcagacccggcggatcccacgagggcagaaagcgtcggacatgcaatgtaacataccggaagaaacgaacctatgccaccccggagaaggccggaaa

SEQ ID NO: 50430 - DNA, 584 bp, Arabidopsis thaliana landsberg
tgaaccaaacatgacccgaacacgagcgccactgcgtcgcattgggccggcccatcggttgcccaactcggaccgcacagtttggatctaaaggcaaggctcaaagagaggatgtaatccaattgtccgtggcctgacgttgcaaggacattggccccagaagacccaattggccccaactaaacgcatcgtcctctcctgtgtttccccttgttccagctactaacgtgggctagccaccggcgaagtccatggccacacgattctttattttccaatatgttttgttaacaaaccttgcaaccaactcgtacccgtcccaaaaaaaaattgggttgaactcaacctgatcaatgtaacagacgggtatgagttataatttttaacccgcaataattttttatccgactcaacccaaaagaaacgacccgacacgtcaaaccgtccacgacccaatcttgacccgatccgacgtttgagcaggtctacaggcaggtaacacgaaacaaatcttttacatcttactaatgtctccatgggtgttagaaaaggttggaggttatgatatgggatctgcgaccata

SEQ ID NO: 50431 - DNA, 818 bp, Arabidopsis thaliana landsberg
acaagttaccctacaaattactattgatgaggttctttgtatatatagtggttgttgcatatcatcatctccttttcgtttctatatatcataaactttctttatgtctcaaataaaagctctgtatggtattggtcttcttgagcaagtcatttatagatgacaaaatattcatgctctgttcttagcgatttctgtatcgatcgcttcaattttacctatgaaattgtttatacaagatttttttttgttaaaagcaaccaagcggtagtggttttcactgaggagaaattttttgtaggtttaatatatggatcgaatcatttcaaacgtaaaatttactaaattattccagttaatccgtcgaaccccactagaaaacgtggtgaataagtaatttgacggctacattcaccctaaaaaatgaaacatgcgattaatagtgtaactttaaatcccttaccaaaaaaaacaaaaagtgtaacttataagttgatttgtcttttattttatcgcatggtataaaatacgtctaacaataaaatagaacattttattatcattgcttacattaattaaccacaaaataaacccaaaccaaatagataaaatacacacaattggtaaaaaaaaaaatagaggataaaatacacacaagatcaccttactaaagtgtaccgaaatcaaaccgaagttgataagtcttacttaagcaattttctgttttattattatattatcaaattaaaccaaaccaaaccgaagcgcttcgttttgttggcaaaaaccgttttattcttttactgtttatcgatatt

SEQ ID NO: 50432 - DNA, 120 bp, Arabidopsis thaliana landsberg
  unsure (1)..(120): unsure at all n locations
ctggtaggtcatgtctatgtactcggggttttcttaaagatatggctntcagtcttgaggggtgggggattttatactgctaaaccctccctgagagcgttcgcaccttttgaagaagat

SEQ ID NO: 50433 - DNA, 467 bp, Arabidopsis thaliana landsberg
  unsure (1)..(467): unsure at all n locations
aattttatcttatagcagtaatcaaaatgatcttgagaatatatagttgtagtgagccaaatagttcaatgaaaagtattaaacagaagctttgaatgcattatcaagcaatacaaagtttaatacatactcgaatcactaacatcatgacattacatcatcacatgttggctctcatgattacattaataaattataaatgcatatgaaaaaatgtgactcgctaataacaatggataaagcctatacactacaaaaaaaatagcaggccatttatcatcagctaagatcccaatgaaaattataggatcttagtattaccacanataaacgaatgaataaataaaaaaataggaacattaaggcgatctgtagttgaaactctgattattaccctggcaatatttaagttccaaagagatttgtctctcaatcttaagctgtctgtagaaattagctatgaacat

SEQ ID NO: 50434 - DNA, 713 bp, Arabidopsis thaliana landsberg
aaaccctggttccaagtacagtcaagaaagatcagatcaggaccacccaccaccacacacacgagtgttcgtctggaaaataagagaagctttaactttgctgcgtcttcgatagattgtggctaatacgcggggacgatataacgtggcatatcttttgttctctaattcgaacccaccacaaactctgctaattacatcaattttatattgctacaactctgctttcaccaatcaaattcttccaacattaaggatatacgagagaaaatacttaaaacgtaaaaagttagtattattgtaaagtaatcaaatgacattttcgacctataaatctcgattaaccttttatttttataaaaatcggactcataaagaaatcaatcctcaaatgaatagaaatcaaaactcatgatctaggcacaaaattctactctcaaaagtaaagaagcaaaaacaattcgagaaaacaaaaaaggaaatttttttggaaaacatacaagaaacaaagaccgttgtccttgtcttttaacagcagacaccgtcacttcctgctgagctgaatgatatcctctccggcttttctgacccaaatgtgtatttgatacctaacctcgcatcatcatcctcactgaccacctcttcgcttacagagggaaacgaaaacaccaggggcgacttatctcctcttctgttgctgccgtcgaaactaa

SEQ ID NO: 50435 - DNA, 778 bp, Arabidopsis thaliana landsberg
  unsure (1)..(778): unsure at all n locations
cctggattgacgacagatgtttcctcccctggcttgttaatgttagtttctgtccttgcattttttcttacgaagggggttgggtgtgatagcttttattaattcttgttttacaggtcccatcagagcaagaacagctaagggcacgccaaattagcgcacagcaaataaacaagatagaggaattatggaagacaaatccggatgctactcttgaagaccttgaaaaacctggtgtagatgatgaacctcagcctgttcaacctaagtatgaagatgcgtaccaggtatagattttctcagccttttacttataaaataagtaactcaattgatatattagagaaacagtaaattcgtcatgccacttttggaagaggtcactgttagaattatgcttctatacttatcctttctggtggtttgcagtatcaaaatgtgtttgcacctctaatcaaactcgaagcagactatgacaaggtgtgtatttagtaattcattttatttggattgattttcatgtcccttttatatttgttctgttgggacttatcatcttaagtctgctgtagatgatgaaagagtctcaaagcaaggaaaacctcactgttcggtgggatattggtcttaacaagaagcagtgttgcatacttcgtctttcccaaaggtgggttgaaatctagctggtcgctattcacagccttgcacctagaacgatttcccgattntaaaaattttgataaaaggaggaaaaatgaacttgcgattgggtaccggg

SEQ ID NO: 50436 - DNA, 529 bp, Arabidopsis thaliana landsberg
tgtttaggaggctaaaatcatctctgtaagaaacaaccttgcatgcagtgaaagtacctctcgcgcccttcgagaagtgtggaagtgttggtacaatccggtcaaaaggaaaaatcatgtcttgtggataaagtgtgcaaacctcttaagaatattataatctgatatcagttgtgctcatagttacgagttaaacctctcaagagtattaaccctattgcatccctaacaataactctaaaggtctgttcatattctttattgtcgacagccaatgatagagtgcgaaattggtttttaaatacgagcacaagatataaaaaactgctcgagcgtaaaaacatatagagaccacatttttaaaatatttaatggtcaatttttattcaaataactataatttatagattttttaattatacatatgccactctactcttataaaactaaatggtcagtttattttgatgtcataaaatggcataaaaatgagctaatttttaatatctttaaatcagagtgatatatt

SEQ ID NO: 50437 - DNA, 596 bp, Arabidopsis thaliana landsberg
gggctaaatctaataaagattctctgcgccactgagttaggagaaagatttataaaaatgtacaatagatgggggtatatgtggatacattatgcatacatatatatttatgaaatcattttagaatcttttacttaagcgttatttgtttcaatactatagagcctaattctcgtatcttcggcatcatccgcttgagtactgcagtatagtttacacaccataattcattaaatactaatatagtttgaatctttgatctatttaaattcccaggctcaatcgttatcaatggacgaggactacataaatagagcacttttttctctttggacaaagcatagatagatcactaatgaaaatttagttctccgggactagtggcgctataatctaagattctctaggccattgagttaggagaaagaacttaaggaaaggaacaattgatagggatgcattacgcaatgtataagaaatcattttaaaaggatttatttacctttatttaaagggtatagacctggatggtgggtggcaaaagcatttataacgttttgggagcgtaatttgacttttaaaataaccctattttt

SEQ ID NO: 50438 - DNA, 549 bp, Arabidopsis thaliana landsberg
tttgaatgttggtagaagacatgttttctcagatgtctgcctcaaacagcgagattagtatcttttgattttgtgataattgttataaataaaacataccaacaatttattaaatagctatgtcttaagctgcttccgatactcctacgcgacccaaaacattgaaaagatgtcggatagatcatatatgagttgagctaaactgtgttcatattctcattggtgtgtactttaagctagatgatggtcgtaaactcacatacaaataattgttgtttatattacaccattttcctctttcctctaactattacctgatacagatgacataattaagtatagtactaaaaggtaaaatactgaaaacgagtttgatttaatttgcacaattgtaaactagaaagaaagattcaaagtatgcaacagtcaagcaaattcatacaattatactcaaatatccgatagtcattaacattccagaaaaaaataaaaaattcagaacatgagtttgggtttcgagaaatactagatatactagttagctcttta

SEQ ID NO: 50439 - DNA, 641 bp, Arabidopsis thaliana landsberg
taataataatttattttttatttatctgttatttctgggggttatgcttaattacactgttcatttttactaatacaataagaatattgatttccctatttttattattcgggttggataactaatacaattttggcttggatttaatcgttctcagttctcccttcactcgtcccaagaaatgatattcacagcttggttttgcaatagaaagtatttcactaaatcatagcttatccattattaactacgtttaaattgtctaatgtatggcgtatgggagatgggcctaaattccaagacataatcacttgtagtaatctttagaacactctacatggtctgcttactaaaacttagttaataatgaacttacgagaaaaattcaggtcatcatttgagaagaagtaaaaagtaagtaatcaactagacacaaaaaaagagagggtaaattataagcaaaaagataagtaattttaggaaaatgaacaaattgattaataaaaataatgaatatacccaaattttaatactatcatggaagcgtcccaaaaaaaacaaaaaaatgagcaaatgcctgaattagtaattggatactttgttcagtttgttgcttaggcgggaaattatatatatttata

SEQ ID NO: 50440 - DNA, 635 bp, Arabidopsis thaliana landsberg
ggggaagaggcggcggggcggggcgagctgggcggggtcgggggcgcgggcggccggggtggcgggcccggggcgagccgagctcgccggagcggccgagccgggggccgacgcggacgagggcgcaggtggccggggtggcggggcggggcgggcgagggcgaggcgggccgcgagcgcgggggagggcgtcggagggaggagagggaggagaggagggaggaggagggggagagagcctcactggagggggacggcgcggcggcgacccggggaggggtggcggcggcgctagggcaggggagaggtggcggcggcgctagggttagggtgagggtgagggagagagagagagagggatgggatttttggaaaaagaaaaaaaagagagggggggacggttgggccgactgggccacaagtgggggcgcgcggctgggccagcacggggcccacgcgggaaggggggtaggggggcggctgggcaatcgatgagccggccgaagcggggtggttgggccggaacgggagaagggtggcagagacaagataaaaaagaacaggctttttcatgtttctaatttctaatttcgtctagatgaaaccatcacatttttaacaatcaaaagtatcat

SEQ ID NO: 50441 - DNA, 892 bp, Arabidopsis thaliana landsberg
ctctctagctttggatgagtctcacagactggatttcattccttgatatactaaaatgtaaagacaaagcacacgtaggaaaaggaaatgaggaaaatatttcatgaactaggaaatagaaggaatacataccacacataatctaagatgttcaaagttcctattaactattcgtgtacagcccatgaggtgagcaactagtactgaaattatcaaaataatggagaattctgttgtttcaatgttaaaaacaggagataaaagttaaactgaagaatgtttcatgggcaatcgctagcttatctttgaagcgacctaaaggttttctctttactttttactagtacattaagttaccaatggctcacttaggcaatataatggatttatatctgttcttgataatttataaatgagtaacttgaggacctcttattggtatttgtttccaaagttaatcataagttccatagtatatgacactaatatgtatatgcaagcatttttatatgaaaaactactttatttagatgagaatgaaaaaatgtagatagcttttgtagttaccattttgtaactggtccattcttgagttctatgtttggagaaagggcccaatttataaatttacaaaatattggcgcagattaggagtcaaaaatacttttctatattgtttgaaatctcaatgtattaatatatcagctctatttttacattagctccaggcgcaagtaatgtattagacgctagtgttgatcctgtgagtatcggtccaagtcagttccaaggatctctgcgcaaaggaaatggtgataaggactcaaattgctggaattctcctagtggcatggggtttatgatcaggggaaagacctacctaaaagataat

SEQ ID NO: 50442 - DNA, 1333 bp, Arabidopsis thaliana landsberg
gatcgcaccaataatccatactcagtttaaatacaattctctattgcttatttatattgtgatgatcattttgtgtttccttgcctctgcttatatggaacttgtaagaccacctattccaacttagaattttatttgcattttattttctcttttgcaaatagcaaaaccacaaaacaccttatggttcttcagctcatctctttaggtgtgtgcacttgtgccattcctctagacttgatcttagccaactccaaaaataaataaattaactcaattccatgatcctattccttctattgaaaacctaattaaatcaaacttccatttgtaattaggcaataaacaaaccttaatttcaaatccattaattcactaatcaccctaatcatctcttatttgataggtatgaaaagattagacattttattgaacactctaacacctctggacacacaagatgttcatgctctatattctaattagaaagatcaattctagcattaattggaacatttaaatattacttttgtctttctatagagaatgtatcagacaataaagaagaaaggatgtgcctcaatatctaaatttgtctccattgaaaatcttaaccaattgaatcatggcttatagatcactttccaaactgcaatttgtactacttttaacctgatgttcaatgggaaaaaactatatataaattaattatcactttattaaagacctcacaattgattgacattcttacaaaccatgtctttgtagtgtcagaccacaaaaaaaaaaaaaaaaacagtaacaagcttggtacgttcgattctaacacacaagtttgaacggaatattggcgaagctagaagaaaatgtagcgaaaatctcatcaaaagaaaacaaaaagaatcaaataagcaaatggaagtagtgattcaacggctacaaatcgaacttaaacaatacttattaaatatttgttatgattaagctcaatcaccatatatatttccttgatttattatttgtaccctttgctctatcttgtttatttaggtggatcaaacaaagcactttaagcaagccctgtattattctctttatatacgtcccttcattacttttatcctctgaattttcttttatatatcttcggtataaaccactagttcatgaaagaaatcaaatactaaaagataaaaagtgcaaaaagcaaaaaacaaaatctagagcgccattttcaataactttgaccgctttgggatcgaactagtgaaaaattaaattacattggttaacttttaaccaacacaaccaaaaaaaaagagtgtccctagaa

SEQ ID NO: 50443 - DNA, 1691 bp, Arabidopsis thaliana landsberg
tccttagcttgaatattataactttcccactttaacatactgtagctgttaattaatttctccaccttcagataaattgatataatcttttattttcaaggtcttcattttaatatatagtttacgaatgccaattatcatattattaagatgtaattacgtgatagttattatcagagtaactttttgggttaaaacaagaaagttggtggacaaaaaaaaaaaaaaaaacaagaaagtcaaaatcaaatattctatacaataatctcttacagtacaaattattttttgcaagtggttggtgaatagaaaatgctatgttttattaagcaggtgggttgaataattagtttaaaatgtatgattaatatgaaagttatattttaatttagattttcgatgttttttcgtttgtcaacagatttagatttcgaagtttgttgattagactaagatgtaacgtgagcgaatacgacgagaaagctaataaaaatttggttaacctgaccatcaacttataataagtctcatattggacgtggtctgataatgcgcgggagatttgaccacgaagaaagtacactaacaactctttagaaaatttctaaccaaccccaacaccaaattacaataaacaagataaagtctcctttcatgctactttgaatttttcttcattactaaagattcataggctggtttatatattttcaataggttaaattaatttcatattgttagtgtatgcttttggtattccggtgttaattaatttaatcatttacataagttcgtctctctggttttcaacattcttcttcttcttcttcgtcttcttcaaagatgcataaatatatttcttaaaccagaggttgatgatgaatcgaagtgaaatgcaaaagttaggtttcgaacacgtgagatactacacagagtcgccgtacaacagaggagagtcctcggcgaacgtggcgacgacaagcaactattacggtgaagatgaaccatacgtggagatcacgctagatatccacgacgattccgtctccgtgtacggcttgaagtcaccgaaccatcgaggggccgggtctaattatgaggatcaatcgcttctcagacaaggtcgttcagggaggagtaactcggtattgaaacgcttggcttcttctgtttccaccggaataacacgagttgcttcttctgtttcttcgtcttccgcgagaaaaccaccgcggccgcagctggctaagctgcgccgttcgaaatctagagcagagctagctctcaaaggtcttaaattcatcaccaagactgatggtgtcactggttggcctgaagttgagaaacggttttatgtgatgacaatgactaataacggattattacaccgatccagattcggtgaatgtataggttagaagaagcgactggtgagagggttcaatattttctgttttgaaatttcaatgattgattacataaattttgctgcagggatgaaatcgacggagtttgcgttggcattgttcgatgctttagcgaggagggaaaacgtaagcggagattcaataaacatgaatgagcttaaagagttctggaagcagatcactgatcaagattttgattcaaggctacgaactttcttcgccctgtaacgcttcttgtgatctctctaatataaatgacatgaa

SEQ ID NO: 50444 - DNA, 284 bp, Arabidopsis thaliana landsberg
agggccatggtgtcccaagcctcggggtttttctttccatcttcgccagcgagacctcggctctcatcactgccttggccgttttcgtcgtcttccgctcggcttggcttattctgtggcttctgcctctagtactgcgacttctgagcaccttttttgcattacatcgcgagcctctcgtttcgacctcttcgtctgctgtcgacgatcctccccgcgactttgaatttcattgcccccagtccgagggcagtttcatggtcgtgacgggaccgcctaccctt

SEQ ID NO: 50445 - DNA, 688 bp, Arabidopsis thaliana landsberg
tttccctcttagggactaaattttataattaagagataaatagtagttatgataattgaaaatgtattaattagaacagctgttatgggaaactctattggctcttccaggtatgatggagatttgagatctactagttttcataaatacgagaaaaaaggataaaggaaacaaaattagttagggtaaagtcatccataatgtcaaatctcaccatgtttttatctaacacgtcacacacaaccaagtcattatcaaacataaatttcaatttaatttgtttggtcatgaacaactggtaaattatatggttctcttctccccaaccatatctccttctacattatacgctttgagatctgtgcaccattcttcatctttaaaggagtaagtaaaaaatatcgaatataaaatgtgcacagcccataaatgacttgtatctactcctccattccatattcaatttaataatttatttttggatagatgaaatagcatttaatgtcctttttttttatcacgaaaggagattatatttaggtgtatctttattttccctctagggaattttttatgttgaattctggtgtttctttacttaatagaaatagactacccaagattgataggattttttgttaggttatgagaatgtacttgtgtaactttaaaaaggttaaaggcccaa

SEQ ID NO: 50446 - DNA, 544 bp, Arabidopsis thaliana landsberg
  unsure (1)..(544): unsure at all n locations
cagagacataacattccttcccccttaaaacgcagcatgtcctcatgctgctactgacggaaaaccacgctggacatccatccaacaaatcctcccatgtagccatgtgtagaggtagacccatccatttcaccagcacttgttcaacaannnnnnnnnnnnnnnnnnnnnnnnnnngccgtaatgtggtgnnnnnnnnnnnnnnnnnnnnnnnnnnnnaaagatcatnnnnnnnnnnnnnnnnnnaaggaatatatattttttaacagcgaaacgtcaaggccacatatgactgcacatgtggttgaagcttcaaatacactcgatctccaatgtcaaaactcctctctgatcgatgcttatccgcttgatgtttcattctctgttgagcacgcaacaactgttgtttaatgagctctgacaacaattctctttcttgcatccattgctctagatcaggtaaagtacgaagaacatatagccttacaatacctcgaaaggagatttgcctaatgaagagtgaatggtagtattataccagtat

SEQ ID NO: 50447 - DNA, 602 bp, Arabidopsis thaliana landsberg
taaaaatttgtagctgaaaactttttcatttgaattaatttactgcttcaaaatgtgatttttaaattttctctgtctagtgttgaaataaacactcggaaaagaagcactttgtcgagtatcaaaaataaaacatctagcaaagaaactatttgtccagtgtcaaaaataaaacattcggcaagcaaaccctttattgagtgtttttttgttttacacttaataaaaaacttctttatcaagtactcgaaaaaagataaagtaaattatttggtactcgacaaagagtcgaattacgatactatcccagtcttccacggtagacgtcggacggacacgtgcaccattgtgatcaaggttgccaccgtgcatgaaagtgatgccggcagattgattaaattcgattaatccctacgttcgtgccacgacaagtcgaataataaagcatgaactagaacgtgacacatgacaaaatagatggagtatatggttacgaaatggattcatcagctcgatcgtaacactaggcacatttttcttgggccttgtttgggcaggtccggccagtctcacgtgtacgaattggccactacacaagccat

SEQ ID NO: 50448 - DNA, 555 bp, Arabidopsis thaliana landsberg
tgcaacgtataatctcggccttgacctcgaaagaaatcttcgcctcacccgagctcagcctcggccaactgccctcgcaggggagcacgcgcattaaatgccagctgctctcccgcgaacctcgctgaagaccatgtcaagcactgcttcaaccactccgacttgacacacttggaaacgtctcattcgcatcccctatgtaggctagggttcggacacatgcccatgctcctgaacctagcttcggttcaatacccagtcaaaagaacatgctatagggatcgaccgtcattctcctgaccaaagacgacaacaaggacgagggccatcccgccgaccataccgctatagggctcggacacacctcctttgaccacaacactagcataacaacccttgtacacttgggcctcctcctggcgactataaaaggagaagcctagggacttctatgggagaggacttcacggttcactacttaccccactactgatattggcactcgcccaatcatactcagagacttgggattcactcctctctcgacttgcttgt

SEQ ID NO: 50449 - DNA, 966 bp, Arabidopsis thaliana landsberg
ccatgattagcgcttgtcttaatcccgtggtttaacaactaattacatattgattacttatttagagagccgtaatgccgaaatgccaaattgcaaatgcaagcgaagtttgagttgtggaatcaaaagtcaaagctgccacttttgttcttatcgttcttgcagtttccacgtagtagccgagcactttagtacaagagatatttttcttttaaagatcgaccaaaatcgtagttggtaaccaaatatataaatatgacgccagaaaaactatacattatacatttatttacatgggaattaacgttgtaccatgtcaatgtgatatttattctgagagtaatactatacattaatagcagaacgtatcgcatactggttaatgtcaattgtattacactattgaaaatcagatttgcatgttatttaatcgtatttatataaaaaggtttacattaaaaatgaaaaccatattaacactatataaaaacttagcctattactagcttaactttttagccacaacattagtcaattgaggaatattttttttgcaaaaaggttagtctatagaaatttgatttttgaaggtcgttttcgttggaagacataaagcttcttggttgggtgaatttaaaaaatattcaacgtatttttggagaacagcttgcagacgacaacatccttcaagttgccacttgaatcctcctcaaattggctgcttaattagcatacctcaaaatatatatcaattaaaaaagaacgtcacttgttagtctttttcacgaaataatatattactatttttgtcgttatatataagttggtggttggcattttgtcttatggtccacgttaatttcgtgagaagcctttagcgtgtttcttttgagttttttctttcatttgtcagctcgaaaacaggcggaaattaaaccaaattattattacgtgttccttaatatc

SEQ ID NO: 50450 - DNA, 745 bp, Arabidopsis thaliana landsberg
gggtgtctaggtgcttgttggttttgtaattatctcttaaattatcgaaattagcaatttttattactatagaggattgaaaatcttatcactgatcaaactacacaaaaaatgtatcaaagtcatatgtaggtggatataaattgaattggtttgatggttatctttttcttagttttagtatatatgatatatgatttgacaaaatatatagtcagctgattgtatttggacaaattactctttttttttttgttttttcatcatgaaatttaatattttgactgtcgtctaatcatcacttatgatatttcttaacgttttagttttgatactaatctttttatttatttataaattataatgtagtttagttaatctttgtgtaattttgggatttagaagttttcaaattttgcatatatagttatgaatcatgatatttcatatgtaatgctgttttatcttataaatatcaaattgtttatacttcaaataagcgcttttaagcaccaaacgtttgattgctgctacccatttaacgcttctcatgtttataaattaaaaatagttaggaaattcagcatcatttatatgtctcctggatacagacgcacgaaaagaagaagataacacagttactggcatatctactgattttgtggaaacggaacgtgacaagaaacaagtgcatacatatacttctaacccttttctcgcatcgcatataggggagtgcttttaa

SEQ ID NO: 50451 - DNA, 855 bp, Arabidopsis thaliana landsberg
ttttgatcgcgtgttgctttgttatcatctttgcccactttagggacctccaagtgtcagaatttttcttttgaatagttagaggtttcttatcaaaacaaaaaaacaagaatagttagaggttttgaccccaaaagagaaagaatagttagaggtagggacattcaatacaatttttcgtttaagctctttagttttgaaatttcaagatggatataaagttgattgtacttttggataagtttaacacggtttggattttttcgtttcaatatttttgaatcattattttccaattggttgtcaattcatttaatttagagctgacctagagatatcactatgtaataaagtaattgttctattcaaaattgttagctcaaacctatgtggtctaaaatgttttgcatacgtgcattatttttccacaaacttttccatcgatttagacatcaatggtctgctgaatgttgacgacatctagttttatatttgtattcaatgtctattttttgaaacgaaccccctaccacaacattgagtattcgaagtattttttttttaactgtaaacccaaacgcaaaacttatgaaatatttttaccggctgagcaaactattatccatatttaaataaaattttagatattgagagctgatctcggattgcgtcactaatggcaacaatgattgacactttcacgtttgggagcttcaattggcaatcgaacaagcttgactctttgtagttcagtatggagatacataaacagccatatttgggtagccaagcaaggtccacaacataagctgtctgatctgcgactaacattttcacgtttgggagctcaaccta

SEQ ID NO: 50452 - DNA, 881 bp, Arabidopsis thaliana landsberg
aaataaattttaataaaattataaattataaaaataaataaaaatgaatatttctgaaatgaattgtaataatatgttatatgtatagaaaaaataaattttccatgttttgttttttgtaagatagtacgttaatatatgtaagatcaaatttcatacatgactgatgaatgttcataacgaaagataagaagagtacctgaagctgcagcaccaacaacagttcgtttggaatctcggatgttgaggacaatcctcgtcttgaagccattatgagtgttatagaattcagtgcagcaccaacaacagttcgtttggaatctcggatgttgaggacaatcctcgtcttgaagccattatgagtgttatagaattcagagagagacatgttgatagctcgtaagctcaaagctgctaatgtcgcattagtgtcaagaacaattcccacttgaacttgtaaaacttcctgttgagatttcccgagtaatactaagaagttgataaaaaataaaagccataaaggaagagcacgagatagaagatgattgaataaagacataactaagattgcatgattacaagaggagagacgatcgagataaataaatagatagttttgaagagaccaattccgcttattaattaattacctgttggaatttgcaagtagactattagtttaatacatactttatacttaagagataattgttaatacaaagatgatgtatagagaagacttgttttggtcattttggatagttaacgcgttactcaaatgaggcaaagacgtggtcttccaaaaacatacaatataggtgatacaaatggataatcatttgtgaatggttagttaataaagcttaaagagtacataaact

SEQ ID NO: 50453 - DNA, 623 bp, Arabidopsis thaliana landsberg
caacataagtatcacttaatcactttactaattcaactgatcaaaacttcttttttggtgggatattcaactgatcaaaacagtaaaggttgattattagtttgccttagaagttgaagatcatatagatgctagtcaaattagaagggcattttggtaattcagttgtagaatcgtaagacaaaggtgaaaagcataatgctattttcaggattatataacacatcaacagaggatccaaacttttcccaattattgcaagtcaatcgatttgtttatctatataaagctcccaaatctcaaatctcaaatctcaaattttttattaaacacatacatatattactcacacttgttttcagatcataaagttttttcttggatttatatataatgcactaatacatacacacccacatgcttacacacatgttcgaactgtaatcagtaaaagaaacatcagagaggaagagaaggagaagaaaagatggagatgggtcgtctggtcttcgggttgtgtttgattcttattgtgggtacgtttcttgaattctccggcggtgctacggcggcgaagggagtaacgtacgacggacggtctttgataatcgatggacagagga

SEQ ID NO: 50454 - DNA, 924 bp, Arabidopsis thaliana landsberg
ctctggagttagataactttattcattctaaatatgcagatgtatagccgtaaaaactactttatctgaatcaattcttaaggatgctggtccttctatgatacgagacgatattggaaacatctcaatcaatgacattctcactggtggctcagattctaccagtatgtagtctcaaagaaattcgatggaaaatatcgttcttttcatgtgtattttatttcttgtttactccttttgaaaacttttgaataaaggggctttctttgtaacgagattacacatttaaaacaatcttttctgtaaatccatgaccttttcttcacctactttatagtggcttatacagtttcaaccttttctctttacatgcttgagtacttacgcagctttttcatcctatagcttccacagcaatgcttgaagagaacacggtcagcgacaaaaccagcgctaacgggtaagaaaggttcctttatctaaacattaataccaagtgaaggtcatctggttatcaaatcacagccatcatgcaagtagtttgatgttgagaaccataataagtttagggcttatgtttataatatgcaaacagtttattcgagccacctatggagagaatcatttatgattacaatgttactgttgaggaattcaagaaaatgttgggactatagaatttgaagaaaccagaaatatttactcattaactggtttaatcattggagaatgaaacaaatgatatggcatgtgaaaattttcatatacttgagattgcagatgcaattttccaacaggtttcagggctctcgacgagatatactgaggtatgggagtcttggcattgctctttcttgtgtctacttcgccgccaccaactggaaggtaaaccagacaacatacatttcagaataactttagcta

SEQ ID NO: 50455 - DNA, 799 bp, Arabidopsis thaliana landsberg
cgttattactttgtgaaatagtgtaatgtctaaactattgttgaacttggcaattattagtggtaagggaactaaacaaaagaaaaaagaacaagcaaatttcttcctatattttaacgatcgttatcttgtaattcaactaaaattataaaaagttatcaaacgaattgttcacaactcagaagtgcacattcagcttccaatcttccatccattacaatcttgcatatcaaacaaaataagaaatgtaaaatcttatccttaatatttgtggccacatacttccacaatcaaccaacatccccaatacattcactacttgtctactttatatatacactaatacactctacggatcggacgatagacaaaggcaaataccaaagacaaacaaaaaaaacctgagatgaatttgacacttccgatgaaaaaacaaaaatttctgctaatcatctcattattgatattattatcattacttcatcaagattatcacattgaagctcaaaattcagacaaagtagtcaatcttcctgaacaaccactgaacccaaagatctctcatttctcaggttatgtcaacgtcaatcaagaaaatacacgatcactcttcttttggttcttcgaagcattgtctgaatctccttcaacaagacctctagttctctggctcaatggaggtaactaattaacttaattaaatatgattctaattttttgacatattatcaatgatcatgctgcgcaggtcctggatgttcatcgattggatatggagcagcatctgaattaggacctt

SEQ ID NO: 50456 - DNA, 527 bp, Arabidopsis thaliana landsberg
ttttttttttttttttttttttttttttttttttttttttttttttttttttttttttttttttttttttttgttttttttttttttttttttttttttttttttttttttttttttttttttttttttttttttttttttttttttttttttttttttttttttttttatttttttttttttttttttttttttattcttttcattgttttgtgtattttttttttttttgattcttgtttgttttttttttttattgtttttttttttagttttttttttttttttttttttttttttttttttttttttttttttttttttttttttttttttcttttttttttttttttttttttgcttttttattattttttttttttttttttttttttatctttttattttttttttcttttttttttttctttttttttatctatttttctttttttatctttgtctttttttcttttttttgtttgtctgtcttatgtctttttttttgtgtaatttttttttttttt

SEQ ID NO: 50457 - DNA, 828 bp, Arabidopsis thaliana landsberg
  unsure (1)..(828): unsure at all n locations
taatatataattcactattccaactgatcttactacatcagtaaaaaaaaattggtagtacaatctcgaggaacaaaaaagtttacaaatgaaatttagaatcttgtttaatctttaaatggatagtttttcataactcttttaattagtctagtttttgatacaaattttatccggttatagaaaacattaaaggaccctaagtttggatttcagcaaaattatatatattccattctcacttagggatgaaatgacatcattcatcactacgtcatttgagcttacgtcaagctcaccataagcaaaagaaatgggtggataagttcaagttccatctcatttcctcacacatctctctttcttccttctcatttcctcgcatcttcctctaaaaaaaaaaaaatcaaagaaaccaacaaaataaaaagtgcccatcattacaaatcttatttccaccttatatttacacacacttctcttctttcctttaatcatacaaaccacaccaagaggaaagaaaaataagataccactcaccaaaaacttcctcaaaactaacaaatggatactaataaagcaaaaaagcttaaagttatgaaccaactcgttgaaggccatgacttaaccactcagcttcagcaactcctctctcaacccgggtccggtctagaggatctagtggctaaaatcttagtgtgtttcaataacaccatctccgttcttgataccttcgaacccatctcctcctcctcatccctcgccgncgttgagggatctcaaaatgcttcatgtgataacgaccgcaaagttgaagattccggcgat

SEQ ID NO: 50458 - DNA, 589 bp, Arabidopsis thaliana landsberg
  unsure (1)..(589): unsure at all n locations
aatcaaattctaaaatatcaccgccattagtgctttaagcgatatttacgcctaacatctcggcgtagagttttggttgtcccatagcatctcctgccgttttccattttttcttggcttctattaccgcgataggaaagttctgtgaatagcgaaggatataatctgctcttttacctgcccgccgcttagcgtctcggnnnnnnnnnnnnnnnnnnnnnnnnnnnnnnnnnnnnnnnnnnnnnnnnnnnnnnnnnnnnnnnnnnctttggtaaagccttggagttacctccttacgacaagtatcggcctcgctgtcaccttgcgaaatatgaataagtggctcaaacatgggcagttagcattgctccaatcgtaagatattacttttttctaaggtatatacgctttcttctacatttcagactgaggaatcgctgattatcacccttttaagcgtgaaaccgcttattaatttgaatacatggaacatttcaacgtgtaaaaactgagtagaccattcagtgcaccttttttttgaactcggatggacgtattaaaaaggaaaagaattttacccaaagaaaaa

SEQ ID NO: 50459 - DNA, 653 bp, Arabidopsis thaliana landsberg
ctaaatggatctgcttgtacaagtttcatgacttctcaacatcttttgaaataagacaatttcactatgaatgattaaacgaatgtggacctaaatcaatgtaaaatgagtgcatatcaatcttcccataagctttcttcatctatgtcttaatcttgttttctcgagctaagttgacgagcataagccgcgacacgctttgcccacttaacgatctctgccttgagtattttggaatccatacggttcaacgatgatggtttcttcttctctcccgttgatgactccaagaacgagaatgacaagcatcgattataatgactcgacttggggcttccattgttcttgctctccaaagcccgtttctttacagacatgtcaaaaagatctcccaagttttgtaaagtatgagttagaaagagacttttaatagagacagacgcagacaaaagaaagcgagtcttacaagttattagacttcatgttagttagggtaaaagacgtgcaacctaagcatgttggtttcgttgacgtttgactctgtcaacgcatattcttctcttctctcttcttcgtaaatggtatctctgctttcattctctcttaattaaaacttgtgtcatttgacttttctttgatctgtaccatttgga

SEQ ID NO: 50460 - DNA, 950 bp, Arabidopsis thaliana landsberg
  unsure (1)..(950): unsure at all n locations
aaggattcttaatgtgtgaaataaacagcaatacaactatatctaatttatagagtaaccttgttttcttaagattacatttcggctcaaagttttaaagtcaagaagataacaactatagaaagaaacagtaagctactagagtattaactaacatatacaataaaatatactcaagtagaaacaaagggaataaaaacgaatcactgattcaaccacttgcttggggtttgagcaaacgcactcgtttacttacaggggattaagctaaataatttctttaaaacaatcttaattaactgatccaacagtaacataaataaaaatacttatacccataaattttcgtaccaacgcatatatatcagacggctattgagtccagttagcacaaaactgttggaatctcgataatagcatgagcaactagttatttttgtataataaactacgatgttatatagtatataagtagataaaacattctaatctcgaagtaatatttatatacacttttcgattaagcataatttggcttgttttagttttacttcagcttagtcctaagagatgaaactgaacttttgtagtttttacttatatcttttacaaatttaaccacattatattagatcgacaaaaggggaattaaaataagatataagtatgtacattacatgattcacgtaaactataaattacactgcacataccactagtggttatatgaccaacaataagcatgtatccataggtaattttgtactaattctagctatttaacaatagaattttctttttaataatttttatccggaattctataccgagataatcatattttttcttaaaaactatattgattagatatttacatagtaaaaaaaatagaaatatttcccatattgaagagcnatttaattaaccanatttttttgttacccttacat

SEQ ID NO: 50461 - DNA, 921 bp, Arabidopsis thaliana landsberg
tagcctgcacatattaagaccaaatcaatcttgagaagcgacatatgcaaatcgcataaaaaaaatgcttttcaatgagatggtcagcataagagtggttgtggagtttaccctgaagttaaagcaactagctgcggatacagctcatcattgatcaagttaagcaaacatgagcgtgttgtagttatggaatcttctagacgctgtatctcggtttccaaactctccaaagacaagcgtgctttctccattttgctcaaatcataggtttccccatcttgcttttgcagtaatgcagacttcctctcatgctccactttggcaatctctttgttctggtcagagaataaaacttagtatttcattgttgaacttgataatctaacaccgaaagagttagatcagctagctcttactctgactagctggtaaagtttcttctcagctgtgtatagcttctcaagtgtgctgcagtgagctccaggcctacagggttcaacagtcccgcttgttgtagcatctttgcccaactgaagagactttgaagaccaactccatgacaatgcactgaatacctttgccgagctgcttctcttccctgcgagccacataagtattataatatgtacaacaaattgtttatgcttatgaacacaaatcaaaatctgtagttggtccaacatcaaaaaagattaaaaatctcagtcagtcacttacttcttgtttcctggtacctgaaaggatcaacagtatccctactgttgatgtctactatcacagctatctccttctcgcaacccgatgctttaagaaaataatcatccaactctctgatgattccttctaaggtcctcctgattctacaatcagtcacatgagtgttctcaagatctttactggagcagcttgtcatagatgagt

SEQ ID NO: 50462 - DNA, 1382 bp, Arabidopsis thaliana landsberg
  unsure (1)..(1382): unsure at all n locations
cagggtagagattgtgatatttacatatagttattcttattgtaccgattgtatcgaatatttatatacgtggtttctcctttcaccattgaaaacttggatatatctttgtacatcaaatggagtcaataataatatcaagaacggtgaagaaactgccagctagagggatgagattgattgannnnnnnnnnnnnnnnnnnnnnnnnaactctttcatgtgaatgtgatcttaatatcatgtcacacaaatacataatctgtttctactaattgcgttttgtgtaaaagattaataatacttcacatcttaattactctttaaacgaatcattgatctttcatgaaaggaaaagaaggttctagtctttgtcagaaatccataatccaatcttgtaaaaggcaaacagtttttgtcctaaaagatttgacgagcaacgaatcggttcattcccagccgttggattgatttaaatactcaggaaaagtcatcccaaaaaggtgggaacttgccactccacatcaccatggcacgtggtaagcttacagaggaaaacttcaatattggtttactttctccaccactcaacattttgtttgttcgtgcatgttgttttgtgtccgtgtattatctattaatctatgttagacattttttttcttcttttttcgtcaaggatattcctttttatgtttaaagtattgtgtacatatataaaaaaatattgcatattattattgacttgaatcgaaggattttttttataaaaaaactgtttgtagagaagaaaaatcgaaaactacttgtattcatttgaattaaaaaaaaaaagtcagtctaaaaatataccctaataaactgacatacctatttcaacgatacaattctataatgagttattaaattgatttgatttcgtattctctaaaatatactcatagacatagcagaaactagttaatttgcttaaatgttcatattcttgtacatcatgtgatctcacgtggaataaaaataatgtgaccatctctaattctctacttcacttagtatctaagtatccactgtgataccttgttttctgctcaaagttgtacatgcgtagattaataaatacatttcaccccttcaattgatcccaaaagcctctacaagacagccaaaacaaatcaaggattgcgcaaagcattcaagtttcgaaacaataatttttttaatggttgacaaaaagcaataatttgtaaagcgattcataggtcagcttctaaatgttctcgaaataactcgaaccaacacctaaaccatttgttctaacgataatagacgtacgtattagagactcgttaggaaaacactacttgatatattcactttacataca

SEQ ID NO: 50463 - DNA, 699 bp, Arabidopsis thaliana landsberg
atctcttaaccatcgtcatgaaacacaacaaaggataaagaaagctaattagatcatgctggcagcttcatcagatgccggtgcaccatagacttcaccgtagcagatcaagaaagagaaagagagatttttctgttcatcaagtgaagaagaagacgagtgtttatatagaagggataaggaggagaacgtgaaggagagagatagaataatgtttttgagggatcagtttcggaatttatggagagtttaagggtcgaaagtgaaataaaatcgagagaaagaaaaaaagaacgagtgacaaacaaaaggcgttaaagaaaagtggtccaaagtagaaccgtgaataaaattgaataatgtcacgccgattctccgagcctcatgcacttctcttctctcatcatcttacagagacagattagttttgtgtgttgtttttgcttgtttctgtaactctattaattacttctctactacattgatggggaccctctttttttctttctttctttctttattttatcttcttattcttggtttttggaaagaaagttttgttttgataaccaataattccaatgaataattattgattgttttctattatataatgtgattaatgttctagaagatgttagattttaatcggatgtgcatgtaataacatgttgtgtaaaatttctaccactttgactt

SEQ ID NO: 50464 - DNA, 1260 bp, Arabidopsis thaliana landsberg
tcattttaccatgccatcacttcaatgggtttttatttgccaaaggtatctagaaagtggaagtcaataaaattgcatagatctattcctaccattgactggtagcgagcaagaatatccaattcccattcacgctttgctcgggttattgctatttgtcttggcaaaaaccgctcaagaagtgatgtccaatctctgatatgtgatacattgagaaagcaaatgatattgttaagggaggaaaattggaaaaatagagtatcgtacaactaaaataaagtcaatggcggagcttaagaaaactaacatgcatgactctggactattgacaaacccaatcccaacaagaatttgcaaggcacaaagctgtgcagcatcgtccctcccaacaggatagtttcctagcaaatagtcatgttgcagctgcatatatgtgtgtcagcaacgaaaggcaagccttttgtgtggaaataaatgtcaccaatgaagaaaatgctcacttgaacatacgaaagttgcacaaacatcagatctgttacagcttcatcagactctcggaataatttttttttaaataccagtttgcagtgtagtatctctcctttatttcgatctttaatagctttaaattctgcgaggagatctccaatatacttgttatcatccaatcctatatattcctctgcaagtgcacagatagaaaaatgatcgataatgttgtattacttcacaatatatgacgaagccagtcatatgaaagcataccatttccgggatcagatgatttagaacttgaaacaactttacgacattcaaacaaactaaagctagagaaagctgatagtttaattgttccagctagctcctgaaacagatgtcaatgcagtgagagaaaaagggacaagaatatgatcagcggtaaattatgaaaaaagaaagcaagaagatacctcaacagcatcagacactgtggtagccatgtcatatgaaatttcttcaaaagtttcatcgagaaagaagacaatggttgtgagctttctaccggtcaaaagggctttaatttttttacgaccaggtgtggtgtgcctaggaccagctttgatagagcgctttaagctttcaagtgttaacagcaagaacctggctatcggttaatagttgatcgtgtgcgaattatgatatactagatagattccacgattctttgtagaggatagaggagacataatcataattcccagcttgatcagattgctgtag

SEQ ID NO: 50465 - DNA, 351 bp, Arabidopsis thaliana landsberg
  unsure (1)..(351): unsure at all n locations
gaacatacttgatgagaactctcgcaacttgcgaaacgaaataccttgtgatgatggaattgcttcttccatttatcgacgactacgaagagttcttggctaaaagtaagtagggttcttttggtcggtgcagattccaattcgtatttgaagaatctcatgacacagtattcctatcaaggtatggtaggtagattgagttagcntactttttttttttatggttctttgacgaattagggtcggatagggtacatcgacaaaatttggattctgaaatggaagggctaatttaaatggcggataacatatcctattatagttctaatgtaagcacagaattaatatatc

SEQ ID NO: 50466 - DNA, 564 bp, Arabidopsis thaliana landsberg
tcaatcttcagtatctgtatttaccagatatctgctcctccaatggtccaacacgtgatttacgagggattaattatacatttatactatataaaatttagagtttatgaatttaatcaattatatttttagaggacttactacaataagaatatatcaaagcatatttgagatgtctttcaattttgatgtatgaaattgttgatctcatttctagatttcatgagtgggattcaaaatataattttggattatagtttgtatttgcgtttacacatgaaaatcttttgggtttcatattctaacttttttaatataaagtttttgaaatcttgggtaatataccatcctttgataacaataaatttgaattgataatttaaattatcaaatccaaactatagttacttaagaatttataaccacggcaacaaaacatgaatttgtctctagatagtttgaaagtacaataccagtataccatggaattttaccctagactattgagtattagcattgccttggttttttagtttttacataccagtatacgatagtggggag

SEQ ID NO: 50467 - DNA, 1161 bp, Arabidopsis thaliana landsberg
ataaattacgttatactaaaacacttagtctacttgatatatattaagatacgtacatatttgctttatttatcaacatcaaagcacaacacggaatcagtacaaaactatttgagaattcacataaacaactaaaaagaaaaacattctgagaattattctggttatgtgtttactttaagaaaataaaatttcccaagaatcgaaaatttttcccacaaagcaaatgcacgagttctggttattttaacactattatgggttttacgtgcaatcagtttactgacatctgatttctcctcattcatctatttaattattatatctctttgattcactttttctatttgtaaaataataatattcgaaaggtacagttttatggcagatgaaatggacgtagcgtgtaagaaaatacaaacccgtaccttcataatttagtaaacaaaagcataaagttaaaaaaacattataataattgaacaaattatacatatttttctgaatatatatatagcaatgagccaatttcatcactcaccttacttattagaatttgttttttccaacatgacaactaattggcaagtgtctcaatttcagagggccaaacaatgctaaatgtaatgggccaattattttatctgcaggcccattttgaaaagcacacaagactattctttttttttttttttttgtcgaccacaagactattctctactgcttaagttatataataaaccgccgacaaaaaaaagaaaaagttatataataaacctgaaagcaacgatctcttaaacgacgcagtttagctaagtagcaagtatcaaataagataagaatatgcagaatcttaacttgtgcgatacaaagagaacctttgagccaacaagctttacagttcaaatatagatatcaaattctttgtattcgatttaaacatgattattaagacaatccaacgaaaactagtaaccaagaagagaccctgagttcagccttgtgccactgtttcaagcatctgcaatcatacaacaaatattttcttgtaagagattatgatacaaaagaaaccctacactctagcccatacgcagaggcgagggatcgcaaacgacaggtttttagacaacaaatgcctatgcccttaaaatttttagt

SEQ ID NO: 50468 - DNA, 888 bp, Arabidopsis thaliana landsberg
gagactacagagcgttcttatctgtctctgaatcccattctctgtctctcacaacattatataagcttacacagacactttacaatttccacaaattcgattgttattgaataataatcaactagaaagaaatgggctctcatagtgttgagttctgtgatcttggcttatttcttgtgtccattcttcttggctcaacatcagcagaaaagctgtgcagtgactacgacagcgacaacggttgattccggtctagggttttggccgcgcaacgagctgatcgagtgaaagagcttccgggacagccgccagtgaaattccggcaatacgccggtaatgtgacggttaatgaaacacatggaagagcattgttctattggttctttgaagccactcagaatccaagcaaaaaacctgtcctcctttggctcaatggaggtaaattaaactaactcacatccactcatttttcttctattacgtctctcggttaatcgtaaatttctcagtgtaagaactcatagtgaaaagattaaaacccacaaataaaataaggtgtatcatgcttagtgtgcatttcatctacttgatattgatttcgtaatagatatttgatccttgcgcaatctttatattcgaattttgaaactttcatgagttgggttacaaaaacaattccatttaacaacatacacgttaaagaaaaaataaaccataaataaataggtatgtatgtatcagtcatttgtatgcatggagacaaaaaaaggtaacttgggggagaatattaggtgaagctttctattagtaagacgtatctcattgggaccatgtcaaaatcaatgaaacgtatgtgggtaggataggtatcatcatcaccatcatgat

SEQ ID NO: 50469 - DNA, 832 bp, Arabidopsis thaliana landsberg
atatcaaactatcgttttacttctttgatggagagatctgtttatgattttaaattgtatgcgttgaacaaaaaacaaaaaaagatagtattaaattgtgttaaatttatttatattctgctggaggtaagaaagttattccataatctcccaatgattatcatattggagagagtgaaagttagtataagtaagacaaacaacacaaaacaccaaaaaacaaagaagaagaagatagagtttaaacagtttaactattagatattccccaaatccatccatcataacttggattatagacgtaactacaatcagataatactattactctgaaatttgtaaaaatgtatagaaaatgagttaaaaaaaaagagatttgaaagagagagaagagaagagtataggagctgagattctctgacgttggtggtggtggtggcacagtaagcgagagaactgcttatatttcaccttcccatcaccctaaaacccttcaaaagtcttctcacctctctgcaccacacccacatgcctatctctatcttccttatagccttttttcacttttaccgttatcaactttttactattctttactttaaatcaatcattttctaattatgtggaaaaatatttatatcgggccggactaattttggttataataatatttaagcctataatgggcctcaaaacctaaagcccatctaaacaaagaaaaaccgcgaataaatgggacgcgaacatcatatccagatctagaccgtttattcgctttatacaataccaaaggtggattagaacgccacgtcaacaatccgtgtcagagcct

SEQ ID NO: 50470 - DNA, 931 bp, Arabidopsis thaliana landsberg
agggaaaatatgttcccctctcctcaaagtccggttattggtttttagtaattttagaaacttcaaaaggcagtgttccacacgtacttctatgactataatgcactattctaacatgttgtatacttgtatatgcgtgattctctattaaacataatagctaaccctaaataaatatcatcaaagtaaaacttatgtgactatgccaaaaccttggtacatagaagaaacacagtaacttttgaaaagatttaccgtgttggaacgacggttctggcgaatctccggaatggactgtcggagctttgagatgagatcagtgatctggtcatcgctaattcttgatgatgagcttgcttggctcgaccttctgctagaagacatgtttgatttgaaaaaatattcttatatatatgtgaatccaagaaaaggctttcttctcttgatggctttgtttgtgcttgtcgaaagaaagggagaagaaagaaggagaagaaatggtgttatatagagagctaggaccacttctagatagagagagagagagagcgagagtaatacaaataatcttaaataggggtgttggatatgccgatgacaagtgcacaagagagaacagtggtttagaattggagtcttggatacatgacacgtgaatttacaaatttatcagatcgtgatgtatatatgtgtctaatattactattatttgatgattaatttaaagttgatttataaaaaactagagaaaaagatacataagacaaaaaaaaagtctgtctaacttttatctatttactttaaaaaaagacagcatatttatcaacaataaatacaccgaagatagatatatatcttctattttcaaatattcaaaaaaaaaaaaaccatctccttctcttttgaaaattacattagtccaaaggctcca

SEQ ID NO: 50471 - DNA, 951 bp, Arabidopsis thaliana landsberg
  unsure (1)..(951): unsure at all n locations
acatagctaaactataaacctaattcaaatcttttttttttatccatcaacccccgttggactgagtaaatgaggcatactgttcacataaaaacaattgttaggaagaaaatttacgaaatgatgcttctcctaacatttacttaatatatctgtaaaatgtttttcattaacaatgtcaacatgcagaaacaggattatataatatcatccgtaggtgtaatataatatacatcgatcggcaagcgcgtatatatgaattcactacaaatacaattgactaatcaagagaaacaccgctacaagtttataacaatttataaaagtaaaccatagttagtcaatttaaatattagtcatattatactataaacaatagagaatttgcactaataagaagatacaaacaagccgacgaaaccttaaacagttaaactactaccaagaaggcaaaaataaaccataatatatatagtcaactaagtctttttattcattaataaaattgaataatttactagaagaacgtaaatgaagaataaacttatatctttaaattcaattggtagtttaaattaaattacattacttcaacttttagatcatgtctgtaatttaaaaaaaaataatgttaaaatcttattaattttagaaccaaagtgatgatacgtgaaaatctaacgaaatcatataaaatgacttcccatctatctagtcagcttttaaaactgaattttgcaagacttccatatattttcattaatcctatactataaatcactttagcaaaacatatctagatttatatggtttttttatatgaatctataaccagtaatggacttcataaaaaaaacttcattaattaactatagtactatactcattctgtctatatgtctaacaataggtatcatttagacaactaanaatgtttacagtaactattct

SEQ ID NO: 50472 - DNA, 1111 bp, Arabidopsis thaliana landsberg
ttatgaattatcctcttatcatggccacaactaatgatgttgtacactttttaagtgtggattttttaatttcggttgataagtatgtatttttctgttatctatgggcttttgattggttttattagatatatggtctgttaatttcccagtctccagtgacattgatacgaaaattatacaccctgtgatgacaaacaacaacaccgacgatatattgagaataaggcgacgataagtagtgttgattgtatcggatgctgaaaataagagtaactgtgacaatttatttttttatccggtgtgactcttggagtggtttcggtttttttatttttatttttattggtgataagaataggccaaaaaaaaaaaaaaataggcccaaaggaataggtcctgtgtagttatttagtgaacaaaaaaaatattaactttcacctatacaaaaatgtgaatttttttttttgttggaaacactttttacaaaaagatgtgatattatttgatctaagaatatccaaaatgtggtttacaaatgtataccacctgtttaatgttttgaccatgttaatttcctatagcttgcttcaaatccaactctcgattatacttacagttcagagaacaacaaaactaatcctctgttttacaacacatgactacattgttagtgttggtggcaatgccaaagctctaggagataattttttcaattttttgttcttggtaatgaaagtttttgagagagcatgtatttatttcatttataaagatttaatagattgtgttttattagtgtttgactttttatcataatataaaatttgacgggcgctggtagcctggtacatgtccttggcgccgtcgagttgagttgcactctggtagaatcttattccaaattacttcatgacattctccaagacagaatgatctcctctctttaagaaatttacgattatactgaagtatgatgaattttacaaatgatatactattatacaaaacatataacaatatatatacctgttacacttacagccaataacatataaagagacaaaaaagggaaaaagttgtcggttatgggaactacataccaacaaag

SEQ ID NO: 50473 - DNA, 414 bp, Arabidopsis thaliana landsberg
tataaccaaggccggtattttcattaatagtccccagaatcgtcttccacccttccttgttaaaatgagtgtcgggtctatttccctttaaagtctcttgaaccaacagatcaagaaacagcttatgtgtagacggagaccaatacccttttgtttgagggttagatgaactacacatgctttggttatcttcatcttcttcctcgtaacaacttcttcgcctcttccttacacccgagacttcatcatttttcacctctacattacaacccgcaaagagaatctctagcttcttgagatcatgcggaacactcaaccgatactgcccagcatcaggattctcctacggcacaaagcaatcacattttagcattttataaaatcaacaaaaatgaatgtaacaagtggttttga

SEQ ID NO: 50474 - DNA, 119 bp, Arabidopsis thaliana landsberg
gggagactctagtagatgccgccagtgtgcgctaaagagttgctggatctgagtaagtagtgtgaagaacgaggtgaagtcgagtgagttctgtaggagatccatgcagcggattcacg

SEQ ID NO: 50475 - DNA, 602 bp, Arabidopsis thaliana landsberg
gtgcccttaggcaggacattgaaactcccgagtggcgtgaggtatcaaggtactaatctttcgctagaattctgtctgttgttccttctgatgataacattcaaaaacttgtaatattgttcgttttatttgctaatcatggaagtcttgttttagagataattgaaggtgaaggacgagaagctcatgaaggggacctggtcgaactaaactatgtgtgtcggcgtgcaaatggatatttcgttcataggttagatttcatgcaaaactttagatgccttgatagtttctttcatccaaatctgatcctctttttaactctcatagtttcttgattcagcacggtggatcaattcagtggtgaaagctctcctgtcaaacttattctcgatgaaaacgacgtactttgatttgcactcaaccttgcatataacatagcgttccaatcatggcctgtactaacaaactgcttcgcatgacaggtaattgagggcttgaaagaagtcttggtgggcatgaaagctggaggtaaaaacttgaaacaacaaataagattttggtcttttgatgtaatctcatatttctaatgactcgcacataat

SEQ ID NO: 50476 - DNA, 523 bp, Arabidopsis thaliana landsberg
  unsure (1)..(523): unsure at all n locations
gattagaccgccgttttggtgaattacataaatgtattttaaccaactttttaatattttcaccaactacattgaaaatcaatgttcagccagcattatagtttggtgaactaatattttaatgtgctaacgacattataaannnnnnnnnnnnnnnnnnnnncttttatttaagcatttttagtgtcttttatataacaggcttttggtcaaatagaataacactaacttgatgaaatatttgataaaaggaataaaactaaattattatgactttgttatattccacttgtgtccggtggctttggatgattgtgtagctgtgaattagaattacacaactactctgaattagtcttcgttagtggagttttctgcatgtgagctagatttgaatacaatcatatcgaaaatataaagaatgatcaaaagtagtttctttttccaaatagtgatcagaaactagaattaaaattatctggaatccatatcaatatgcgtagaaatttgatagtcaacgtcg

SEQ ID NO: 50477 - DNA, 639 bp, Arabidopsis thaliana landsberg
atagtgggtagaaacattcaggaagcagattcatgtcgcgtaaaagagaagacttgattcttggtgtagcatataggatggccaaaaaattaccagtctaacatataccctgggtgaatgctaagttcgtatggtgatacttgaacattagcgtttcctctttgccctttgtatagtttcttcttagagtcgtcttttccttttggcttctttatcttaagtgggttagatagcatctagctagcttgtatatgtagtagagcctttgatcatactgggtttctgtttcattcttccaagtttcgtcttttcgggttcttagtcttactgttgtcttgtatctccctctctgtccatatcttttcttttaactctctcttttaagtcttcttctcttccttcttattcatttctgtcaagccttaaatgatgtaaatctaactactctcctgctaagtgatcttcctctttgcctcgtttcctgtttttttgaaatggaaaaagggaagaggaagttttacagaccctcttagagtcttagactatctctgctgtaaaggttcatccagattcaagccatttcagtctcaacattaatccacttcttgtgaagaatagacattcctcagggtcttacct

SEQ ID NO: 50478 - DNA, 823 bp, Arabidopsis thaliana landsberg
tggctgtgccaattggaaatttctttatcctgaatttactataattttcccttctactagttggtttcggttgggaaggaaatgtgttacgagtcactcgcgcattcgagctagctttggaaccgttgttgtttccagatgagggaagagctgcgtttgatggaatccaatactcttctccaagcaagtaagctgatcctttctctttggcttttccgatttgttctgcttgcttcattgctgccacaacatcttgaagctttctgatatctggatcaacagctttctttcttttggtaaaagttagactcatgttagattctggactcaatggtctcgtgtacggagatgatctccagtatagccaattggaaatggacctaatcagactatactgcacttatttgtacttctctctgtgaaacatcccaacaaaactacttaatatcttacatgtaagtgtataacttgactatagataactcacctgggaggtcccccctgtggttctgctcatagctttagcgcatctttcttggaacttcttgacatcaacaaagacattggagacacgctcaccatccgtgtttccacccccgatcctcacgttgcctcgtggttgctttgacataaggaactccaatggagcaaggtcagatctctccaccattctgcacatctcataaagtatcatacttttatgtatttctctaattgtctctattgacttcacatatagagagggaaatgaaacaaaaccattactacatctactagttaagtgcttacgaaatgcagtctactgggcaagcttcaatggctt

SEQ ID NO: 50479 - DNA, 719 bp, Arabidopsis thaliana landsberg
gatccttacctgcagtgccaatgtttaatactaggtttccttttcttttcatatatcacattgatattctcataaatgcatattcactatgatcgtcataataaacgtcttatacaagatcgtaaaaaaatttattctcgtttaccgtaaagtcttttaactaaaaaaggggaatattgaaatattcatgcatgtgggtgtgataattaagaagtacgaacgatatgaccaaaaaaagataaccaagtaaagactgaaatttagaaatctataacaatctgcagcttttacaaagaaagaataaactaaacatagataccctaaatagattattctaatacgtactaaaaaacttataaaacctgaacactctacatatattcttaattatattatatacaaaatactaatatatattggataatcattaatcccacattttatcataaactcggatcaatccaattccaacattgattcatatgtggaaatatcaatatatgcataactaattttgatggacacgtttcgtatctaattgaaggacagttttcagttgttatatattcatattttatgtaaattaaagatacttcttaagtcgatgattataacataaaagggtgcttgtgtcaaaacaaaacaaaaataggttcaaaaaatcaataagtgtgaggtaatttggacatgacgacacatgggatacacatgtggagcat

SEQ ID NO: 50480 - DNA, 421 bp, Arabidopsis thaliana landsberg
aatgcccggggggtgccggcggcgcaagttgccgctggtggtggtcggtttggccggcgggcgcaccgatgccacgtcgatccgcgtgcgtgacctgtcgcgcaccgaacacgacgccatgctcagcctgatgcgcaaaaaattgcgccaggagcatcattttccgcgcaatcccaaacgctttttcagcatcccggccgtgtatccgctggaaaacgtgcagtacccgcatgccgacggcagcgtgtgcggcacgcgcccggacgggggtgacacgctgaagctcgattgtggcggcggcttgggcgcggccactcacgtcacggtcacttttgcgttcccggtggtgggcaaggtgctggaaaatcgctggagcccgccagggacatggatgcggtggctgtcggataacaaccaaccg

SEQ ID NO: 50481 - DNA, 539 bp, Arabidopsis thaliana landsberg
atttatatagtgacatgagcatatgccttaattaatctttctttgacaacaattgtagattctctctctttgatggaatgatcaacacgacggattttagagcgtctcggcggtcggcatccgggtccggaagctccggtcgtagctctcgtcggctcactgagcaagagcttgagatcgtgaggctgcgtgaggagaaccgtgagcgcgatgagcagttgagggctcaaactgagcagttgagggctcaaagtgagtactatgcctcagtccacgcgcacatacaacagatgattcaagtaagcccattgcattattactgtttattcattgctttacacatccaatgcgtactactaatatgcttggtcaatagttactagctcagcagcagggcattccgtatgtggcccctcgcctccgccgcaatggacgttcgtccctatggccctcctccacttccggtaagaaattctatgtccattctctagttacatagtaaaacgacgacttgtgccgactgactcacatgaatatgt

SEQ ID NO: 50482 - DNA, 599 bp, Arabidopsis thaliana landsberg
  unsure (1)..(599): unsure at all n locations
ttttttattattactttttatttcctttccccacgatgaagtatgcacgtagttgaatggctcaccactcacgtagaaaaagatttgtgcaggattggttgcggccacgattttgtggtactccttgtggtttcggctcagccaactaaaatacgctacctcttcttaaatacgcgaactagtaaatattcaatatatattttacgtcatagatccattttgtctcgttccggttgtgttagatttgtaatgacatgttaataatattgtttcatcgtttcacatattttagctaatttatttttagtataaaaacaacatttagttagtgattctcgcatgctcgcgttctgcttcgcgcatcacgcgtcgctcacgtatgtcgcgcgttgtccgcgcctaccgcctgtactgttcgcgtacgctgtcaccgcccattccacgcgtgtcacgtgttgtgctctattctacgagtatcgtgagttcgatctgtacgatgttcgcgcgtgttgttcacgtgtcgtcgttcgtgcgagtcgcgattcgcgcgctttaataaaattgtntaattcgcacgaattggtaactatcaatatata

SEQ ID NO: 50483 - DNA, 746 bp, Arabidopsis thaliana landsberg
attccaattaaattttaaaggccctaatttttttttccacccattaagccattagccacccaggaaggcattcaaaacgggttgggcaatgccggcatggcgtgtagaaaagattattggtcaaagttccggactttctacgattttttttaaatataaaattgatgctaaatcatgtttttattatcgttcgaaatccttaataacatgttccatgagattatgtaattgcgggtgcatgcatgtgttttcaattgataatgaaactcggtgtgcactctcactgacaatcttggatactacttaaattaataacgataaaacttgtaatatataaatacattaataatactagtttcaaatttgtttaaatgatcatgtactattcattaaggtaaattagctagataactaatttttggaagaaaatataaaaaataaacttggctgcagattcttaggtaaatgacttatttaagaaattggaacatcctaaactatatttctcttattgaactgaattttttatatcgcttgttgttgttaccgagaggggaaggaatagatccacagacgaagatgcgacgacaacaaagatcttgttgtggtggagattcagcaaaagatctgaattgtaatagatgttgtgaaaaatagttacaaaaaaccttcttatatgcttacttaaattaaggacacatatgaaaagatgtaatattagatgttggagaaagagttgtgttgac

SEQ ID NO: 50484 - DNA, 551 bp, Arabidopsis thaliana landsberg
ctcctcatcagccagttctgatgccaaaacatggcaggctttccctgacacaaagactcaggcccgaccaaaggtcgatcatgcaactaatgggagccaaaacataaccaagaacacaacgtcaggtgcttcccccgatgcgtggggttttggtactgataatttcagaacaccagcaacaacattaagagctaccacacagatcaacagggcagctgcctaacggagctcatcccaaagatttaacgctggtgtggccaaggtagagcagccatctggatgggctggtttttaacttcaatcgacatgcgttaaccatcattctgatcaacatttacaatctgcgctacacaactgctgttgccgatggagttgtgatctttgacatccacagggcatcaaaattggttatttttagtgtgttcatcaattttggttgagccaactttgatattgattcatgagatcacttgaaattatccgttgttaatctctactactccttatgtttgtatcgtaggcgtccacattcgaggatggtgcacagttct

SEQ ID NO: 50485 - DNA, 563 bp, Arabidopsis thaliana landsberg
ctgtaataaccggttttgggatctggaacccaagaaatcttctgggttgattcttccactcccttcttcttcatcacagccgaagcagcagctccacttcttccaccgctcgaaacgctcccttgcgccgccgtggccgcataaccacgtctgttatcacacaaaaaacgacaccgtttagaaaaaaacagagcataactacaagaaaaaaacagagcataaagtagaaaacagaacaatagagacttaccggaagatagcattggagagttcatgagagacgaaagcagatacgatcttaacgttagagatagaacgagccattttcgaagtaagtggtttcttgaaaagagagaaaacagactttttattcttgtagcttcttgtcgccgccgcagaaggagagatatatccgaggaatgagataattatactgcggcaacgagattgaagaaagttggtatcgtctgtgttctctctctaaaggctttcgaaaatggtttgaagagatgagaagagaggaagaggagagggaggtttatatagcaaagagtgatctgagc

SEQ ID NO: 50486 - DNA, 683 bp, Arabidopsis thaliana landsberg
ttatgattttccaataataagtggaaagattccagatttcagattgttagcttaattacacgaatccaattcccaaaaacgtatatatatatatatggtcgtactcgttattgactattggagtttcgagtttgacaaaaagttccggagggtaaaatatgccgacgggatgcgagtttccgatgatcaaaaccttcgagaatgctcttactgccgccgacttcgagtctaccgtcgagctcaccaacttcccagcagtaattcaccggaatatacctctctttctttctcccgctaaatctgattagtcgtctgattcgtaatttgctctttcttcttatggaggtttttcggggatgtgctagtgtctgggatgcgtattctaagtggaatccattcaacagtggcctcgattatctggaggtactgttcttagttcttacccctcacttcatttcgacggacttcgtttcctttttctggtaattgaagattgtataaccttcttatgcgttattatatgaaggaacgtgcaggttcagttgaagtggaggcaatgctttcgaggacggctccagttttcaatggtgatatcagaagccatgagagggtaacaacccccctcatttctcggttctttaacagattattggctgatttgagttctaattgattatggttct

SEQ ID NO: 50487 - DNA, 746 bp, Arabidopsis thaliana landsberg
gaaatgagggagtgtatgtgtgctgtgcaaaattatccatttgcaccatgtctcaaattttggggggtaagggtaaaactatacgcataccttttgatttaatgcaattatgtagagtttggtaaatgacgttttaaaactagaaaataacgtttgaaactttttaacaaaagaaaagttgaactatatttttttttgtgtgggttcactagtttcttcagttcactgttggcaatatgtattcttaataccttacgactaattagtaatcacaagagctaacattttccaatactctatatatgataatatgaaccttttgtcgtttccagtagagaaaaaatctttggtattcctcatatgtttctgcttttgtttcatctagttgaaatgaagacttaaacgaccaaatatatgcctgcaaaaacatacacatttccatgtgtcccagtccgaagataaacattttgttgataatattttagttaagatctagtctcctttctttttgtgtgcaaaagttaagatctagtctaagtctactttttatcgaaaaaagtttatagtctctcaactctcaaggcctcacactcttacaaaaataatgtatgtttgaatgaaccaataaaaatggtaatttgcagaaacacgtatacaaaaggaggatagtgagttaatggtaatattcaccctctagttgtaacttgtaagcgagattatttgtgtgatttttttatcaccaaatt

SEQ ID NO: 50488 - DNA, 782 bp, Arabidopsis thaliana landsberg
gaattgcgttaaatgtgtcccaaggccattgctcaacttcttgaattgtgttttcctctactgcgttttcttgttcttcttcatcatcgtcccaaaaagcacacgtgcaagtctgttgcccttctctgtactctgctccacacgagtagcaaaactcatgcccgcatctgcggaaaacacagagagttttgacatttatatgcgtaagaatcgcaaaagaaacacttgctctagaatactagatttaaacgtaggcgagaaaaaaaaaaccttagaatcatatggttattacgataccgtgattctgcagttaaagggtcaagactaactatattttattggaagtcaaaaacctaactttggtggttcaaatatgtatagatacggaaaacaatgtgtagccatagatatatatgtgtgtcttaccggcaagtcatgtggttgcagccttgagcaagctcgatcattatacggcattgctgacaccgcctccacctcttataccttgccaagcgatgcaatgtaatatcatctgggtatctttcatcaactggaagaatctgaaactcttcacagctcatagaagcatgccaaggaacaccacagtccacacacacaaacctttcacagactggacactccacacagcagctattctctgactgagtagacgagcttgagctagcccttcctgatgatagacattcttgcgggtctaacaagaaaagagcaattgggatatgggcagtaaatcttcccattggttttactacacacatttg

SEQ ID NO: 50489 - DNA, 566 bp, Arabidopsis thaliana landsberg
aacctacaacaaatgtattgctcaccaaatttggtgaggaacatgagaaccaaatatatctacaaaaaaataattgttaaaaattaaaaatactgtagcaattataaatttacataaacgattaaatgaatattatactataaattaatatttttgaaataacttttataaggtatagaattgtgtttaaaacaaaatttcatgttcagttaaatattgtgatttaagtttaaactaaaattgacaagtaattaagttctgaagatatatttctatatgaaataaaatttatgaatttcaaatactatccacaatatctattactttaaatttaatcttgaatactaataattttaaagttctttttattttctaaagaattacttttattcgtcttcttctgattcattctttttgttttctagttcttgaactatcaacttatgcactccaaaacaaatggcatctaagcgttttttctgttgttcatcttactatttcttacatgtaagtctattcctttttttcttttagagttatgtatatgaacaattcgatttgtattt

SEQ ID NO: 50490 - DNA, 1059 bp, Arabidopsis thaliana landsberg
tttctctctctccctctctatgggggtctcattttaggggctaacttattttcttactgtttcttgccaaatcatggtttttcagattgtggtctttacctcaggtagtgccatcggttacggctcagcaatgactttaactgacacttcaaataaagttaagaaaggaaccaaaggagatgtttcagctctgaagccaactataatgactgcagttccagctattctggatcgtgtccgagaaggagttcttaaaaaggtaccatcttagagacgacaatgttgtgtgtattgttggagttacttactagatacttcaatttgtgtatgtaataatctaggttgaggaaaagggagggatggcgaagaccctttttgactttgcatacaagcgccggttagcagctgtggatggaagttggtttggtgcctggggtttggagaaaatgttatgggatgctcttgtcttcaagaaaatacgcgctgtgcttggaggacacatccgttttatgctcgttggaggagctcctctgtctcctgattcgcaacgcttcatcaatatctgcatggggtaatgtagtctcacatctgatattttcatatgagtcttgtcccattttggcttagacaaacaccattttggtgcctggtttgtgtttatctgtattcttctttgcaaattcacaatgcttgggattagtttgttctgattatgattgtgcattattttctgttaggtctcccatcggccaaggatatggattgactgaaacgtgtgctggagctacgttttctgagtgggacgatcctgctgttggtcgtgttggacctccacttccatgcggctacgttaaggtttgcagacaatctttaacacaccatgttgacaatgtgcaagtttattgtaatcatgagtaacaaatttcatcttgcagctcgtttcttgggaagaaggtggctacagaatttcagataaaccaatgcctataggggagattgtggtaggtggtaacagtgttacagcatgttactttaacaatcaagaaaaaccgatgaggt

SEQ ID NO: 50491 - DNA, 1224 bp, Arabidopsis thaliana landsberg
attgttctccaaagaatatgtaacactaatacccgaaaaatgatttgatatattattatgagtactctacaattaataaatcattttccatttttttggaacgttcacaagagatgtttgaaaaacatttgggaatgatatccaaaaagtcaaaagttcaaaaaatcaaaagcggacgaaggaaagtttgttacttgaggaaagcgaggatgaggtttgggaatattattttgacgctttcattatatcattttaaaaattacgtctaagtcggtttcgtggcgagttgtgtaaagaagctggcacaacactaatgatttgatttgcttgtaagttgtaataatgtgacattttcttcccttacattatacttgcattgattatattagaatatcacgtaccgtttatgcatattattttagaaaattaagacatataacacaataatttttgttatagtatcctcgtcgtaccacaatctatatttaaacacgcataaaacgaatttttaacattttttttctagtcgaatttaagtcttacattttaatttcttaacattttgaagcaatttcaaacatttaaattggtctttaccatgctacagaaaatgtttcacaactccttcctctcaatcaagatcctcacaaaatgatgtggcttatagtgtccttaacaataatccatttgctgccttcaaatctagaattaattcaggtctagaatctgtttgtgatgtagcttagagagttagagatcttgagaaggatgaccaataaaggcagctcaaaaggttcaagagatgtaatatactcatgtcggtggacgcagaaaccatggtcgtggagggcctggaggctgaggcaatcgtggaccatttcaattaaggatctctagtgagtatatatggaggctatttcttctttagctcctccctagtttcttgagcttttgatgtttttaaaagctagcaacttgtatgcttatgcttatctctcaaatttattttgcattttctgtgacctttcatgtaatctctttgcattaaaaagacaaaaaagattttatctatcaaaaagaagaggggttagttttattaggaaagaagaggaactcatgtggacaatatcttctaatgaaatattgagataaaagattaaagataattatttaatctaactacgaaactaaacacctcctaaagtgagaaaacatgaataacgt

SEQ ID NO: 50492 - DNA, 1067 bp, Arabidopsis thaliana landsberg
agagtccgaagacgatgagtagcccggtcgagaagaggcttgagtttagcagtccagaaattagcaggaagcctctatcacctgtatggaataactcaccagattctaagatgaacaacaattgatgataaacaaaatcaaacaactatctgtatcattcatatgtgaaaccggattatattgttgcttctctgaagctactaacaacatgtatcagtattgctatgaacaaatttgaccagaaaatcatgttttcaaactggtaaataactagcttattatatacaacagcagtgtaaaactgacatagcttactaaacactggtgtttaacatttcttacaaaaacgcaaccgttttcggtaacctacaacgacgtcgttgcgtctacaagaacagtgaaatttatacaaacgttgtcgttttcaagtacattttctaaacgacgtcgttgcttctacaacaaacagtgagaatcatgaaacacgtcgttttaaaactaagaaacgacgtcgttagtctattccaacacaataaatgtgaaattgcgttgcttttcgatttcttcttcttatccaaaactctctcagtcatggctcttcttcgtcttcctggcatttccctccaaattctaggtcacaaatcaaaccagaagaaccctaatcccaatgttgccttcaccaatcactctctctctttatctactccttcactatgtcgtctccatcgtcacgggacgtttccagactcaattccagcaaaatccagaaacctcacttcgtacttctccaccacaacacaagagccagtcctcgaatcttcttcttcttcttcttcagctcctgaggtagtagaagaagagatttctaaaaccagattgattgctcagaatgttccatggacatctacacctgaagatattagatcgttgttcgagaagtacgggagtgttatcgacattgaggtttttggtttttctcgtttccttcttttcccatcgatcaattgaatcttttgtgttttggattaacaaattgtgtttgatttttgatttgtagatgtctatgc

SEQ ID NO: 50493 - DNA, 480 bp, Arabidopsis thaliana landsberg
  unsure (1)..(480): unsure at all n locations
tagagtctccctctcgctgtcaatgttgtccttcagaaggaaggggcaagcaatgtggttgtgtagacacagagttttgtggatacttcggcgtgctatggccggatgggggcgttcgcgctgacggcgactcgacgtcggtcggcgtgggtggcggcgacaggtgcttaggcctgggcagcagctgttagtgcattgaccgatgcggcggggacaccaatcaagggcaaggctggtggctggacatgggctgaccgaggttgcagtcagtgtactacccaattcgtatgctatgtggaagagnnnnnnnnnnnnnnnnnnngtgcctctactcagtagaccatagcgagatccatattttaagtggccatatagctagtgacacatcggtcattcagacgccactgtggcagtggatttgcgcgtgccatgacttaccatgatagtacctccagagtcatacatccatggccacattta

SEQ ID NO: 50494 - DNA, 537 bp, Arabidopsis thaliana landsberg
tcacatcttccatatacagtaattagaagattacccaaacaaaagtaagaacatgacacgtgctttcacatgttgaccaattggggacttcccttgtaagaaaagattttactcatatacaatgagaagtcaaacttcattcacatcttccataacataacgacactgactctttacctaatttttctatgatcattgaatcaaaggttcctctaattcaacatctcatttatataatctagatagatagaaaaaaagtaagtgagaagaaatctcgggatctttggtgtttctctgaccattttataagaatgtattacttataaatttatgaaagaaaaatcaagcagatgtgattcatggaggaatcacagaactatcattaataattacaacttttttcagtatgtctcaaaaagaaaaagaaaaataaagagagtaaaaaactcttaaccataaacttatttatttgattaaattatataaaattgacttctcaatttggggggtgggggggggggggggggagttgggggg

SEQ ID NO: 50495 - DNA, 1927 bp, Arabidopsis thaliana landsberg
cggttcgattcaagattcttctactccaggtccgagttttttcgcatttcaaattcattcctggtaacataagctctagacttagcagagcttcaagttcaagatccttcaacacgacttatccagtctcttcttctcatagagaagatggtgttacttcaccttcagaatctgctattaggctcaatgatagagttgagtctccgagaattcctgtgattgacaatgtagttagagatattgatgccatgagatttggggaagatggtagcttacgttctccgagagtagttaatggtatggatagtacttatgctggacttcttgatagaagacatgttgtacgagaaccttctattgagcgcaatgttagatttagtagaactctgagtgttggaagactccgtgatagagttcttcgccgatcttcactctctgatttcgcattccgtccctcgccacatcagggagaagaagatactgatctcttctctgctgaaaccgcagcagcagaggatgctcctgtgacttcaacgtctatactaaatcgttccgcttctagcattcgaaggaccttattcggcattcaggatcatgagacaccagctgctcttgtgagagaagggaggtatcaaggtttattagaacacagatcagatttccttgaaagaaggaggagaataagatctcaggtttgaaactcattgattctctcttccttgatgtgtctgatcaactcaagatctaactaactgatataactaattccacaggttcgcgctcttcaaagattaggaagccggtttgagaatgtcgcagtccatcatgatagatcttgtgtcttatcaggtcaagatcaagcaggtcgctgcacatgccgtgcagttactaaccgtggttcgacaacagcaacaaccgatgaaacaaatgcaagagctagcatctcaaggatagtattgctagctgaagctctcttcgaggtaaatacatgttttcggtctccctactaacagctttttgccactatctttctttctcatgtatgctaaggatctacagtgcattcattttaggttcttgatgaaattcatcagcaatctgttgtcttatcctctcaacaaccatcagtatcatctataggatctgttcctgcacctaacgacgttgtggatttattaccgataaaactttatactaagtcacaaagcgaggatccatcacagtaatgcatactaaattctcagatctttcttttgccaattgtgatgctcaaaagtctcgagacctaatggttaaacatgttttttcctggaacctcagatgttacatatgccttgtggaatatgaagaagcagactctataaggacacttccttgtcatcatgaattccacaaaacctgtgtagataaatggctcaaggagattcacaggtatgaatgtgatatataatttgaagtttggtgacaactaattttccgcctttttggtgtgtactagattatctgatgatgtttttatggcgatgcagagtatgtccgctgtgtcgaggagatatttgtagacatgatccatcatcggaacaacattgattacagtcttatagacataatgctgaaagattttgattctacaagagaccaagaacattcatcggtttttgcctgcaactgaatcaatattgttgtgtgtttgctttttgtttcgtagcttacaatggaaaacaaaagtgacagtttaaaagatgtaaacttgtataccaatttgatccagcatatctgtaagaaagttaatccattgatgttgtgtgttcatgagcactttgttctgtattgcaactctgtaaatgtagtcaacttagtagcttatgtctaaaacatattaagaagaccttaatttaaagattgatccttataaaagaatttagaa

SEQ ID NO: 50496 - DNA, 606 bp, Arabidopsis thaliana landsberg
tcgtccatggaaacattggacttaggaatatttgcatgacatccaagttcacctttaggaaaaaacaatgggtatgatagtgcatcataacatccatggtatgaacagatcccgtggcttgacctatctttcccatgcaacataacactattactgaattgacctcgatgttcactcccctcaatccaaactgcagcaacctccgaagtgatgggtacattatataacttctggttcagcgtttggtcaaggttcaaggcgatatggtagttttcaacgttatcaacgtgccccatactcctaaggtgctcagagtatgggtttcccttaaatatttcaaccaactgtttaataatggccttgtctttctcaagttgctcttgacgacatttacaatatctatgctcgagactgggataacatcatagaagtaaagttcaaggtgtttatgttctgccccatcttccctaccgaatgaccttacgttgtggtacatcatgccatgtgcacgaaacgtgtagatccacaatccatgtttgtagtcatactgtcaaggcaacaatatagagaagtgacgagaaatggccgttaaaaaatcgaatgtta

SEQ ID NO: 50497 - DNA, 566 bp, Arabidopsis thaliana landsberg
  unsure (1)..(566): unsure at all n locations
caattaagagtcaaaaaaagaaagagaagaatttgttttgtttatggnggtgcttaaaatctcaggatatggtgtgatcacttgtgattggcttgtccttatgcatttcggatgaactagccctgtgatttgattgatggttctcgattggagactagtattgatctaactaacaatttgttcacatgactttttcaaaaaatatccgacaagttatgagcgagcattagggtgaatacgggtgaatactgtggtccatatatcttctataggctacgggctaggacgagttttgatcatcacccttactataagttttgtttccattgcaaactaatagtaatgctctgacgacccagtaagggtgatgatattgttaaaccaatgagttaatcgatacaagactagctaggaaatttaggatatttggctcatgaactttcattactttacataaatttttttaataacatggcattttttccccaacttcagtttataaataaaaattgtagtactgttttcgtgaatttaatgtttgcttgattgtttgttttagttttttg

SEQ ID NO: 50498 - DNA, 693 bp, Arabidopsis thaliana landsberg
aatgattcatttgttagatacatatagtgaaatattcctagggtttagctatagaagatgaaaaagaaaatgagtgtgattaattcttgagtgttgagaataagcaataggagtaattttcttcagcacttgtcttgtgtgctgtttaaattgctctgtttctcttctattctgatgtaaaatgcaaattgttacctttatcctatcaaataaagtataattcttttctcagctgtatcaatctttttcattctgaattagtgaattcattattttgtgaattggttgtttgtttggcacctggttatataccacattttttgtctttattttcaaattcttaaaagatttccatataatatggatacaacacttcgatgatcagatctcaggtttcttcggagaggttcggtgactaaacggtactaagaaaaaactttaattcgactctgtttacatgtttgggccctgtacacttttctccttttggcccaatcaaaaaaatgcaactactatttatattttcaaaacataacgtcattattggtttattggtttgatcttttgggaatgaggagattatttttttttgaatgaaaatttttctgaaaataaatttgatgttctggggttgcttttttggtaatctattagatatagctagttactcagtgagcttaagtctcctttttc

SEQ ID NO: 50499 - DNA, 713 bp, Arabidopsis thaliana landsberg
tgtttgattttaaacctttgactatatctttattacggaaataccaccatttatcgctataaatagcaatagatttgattttgatatatgtgaaattttggggttttgttataaatggtaagaaaatcaagtaaatgaaaaaataatctcattgaaaaaaataggctgttgagaataaaaacaagggtttcattttttttctttgataattggttaattaaaccattcagaaaatagttctcctgtttgtaacatagcggagtttgaatccatgtggatgtggtgacacttataaaaacaattagattacaaattttactcgcataatatatgtaacctacctagctaaaatatatgtaaccaaagagataaatgaaactaatatggcaatattgtaaactcttaagttgtttccctctgctttgaaaaacccatattggatcttgcatcggttgtgttgttgttcttggttgcactgattgtgccgacatgcaagtttgttccagcaattgcgccgatgaaaacatatctgtggaaagttctaaacattctagacctggtacagcaattgtagacgcacctctcacgtttaaacactgtccttgtgcgacttgtcctgatcctgatgatgccgcttctattttcatgtctctcaagaaatctctgtgcatggaactctctcgctgcatcggaagtcaacaccgtactctgac

SEQ ID NO: 50500 - DNA, 1080 bp, Arabidopsis thaliana landsberg
gggatcttttctacagcttgaagttgaaggttctggctttttgtacagacaagtcataaacatggtttgttctacactctcttttacatgcttgacatggcgatataatgtttttttagtctaaagttctttacatatgcaggtagctttgctgattcagattggaaaagaagcactggattcagacattgtcccaatgattctcgaaaccaaagacaggagggtgcttgcaaagtatactagtttgcctgcgtcgcctcatggtctttgtcttgtgtctgttaagtataaggaagatcatctaaagcttccattggattgtcctgtaactagttttggtagacatcacactataacaaaatgttaacttcccttctattgaaacattcttctgtttgacataagaaactgaacaattagaacattgtctatttagtatttacttttttgcaagactacaatcttcacaggatcaagcttgacattttgagtggaaaatcctgatactatgtctcaaagaaacgaagctcaaccatgaactcattctgttttggggagtacgaaacaacagccttggcagaaagaagcacttgaagagcatattcaatagcaaatactgtcttatctacagtcacagggttagctccgttcctcagatcgatctcaattccagactccactttgaaactaaacggtccaacaatctgcaaaacccgtagaagattgttatgaatcaagtagctgaaactatgaatttgagaatttctgtgtctggtagactgtttgctcatcgtagaatatcgtttattttacctgttgctgtagagaaactaatacttcagggcagattttctgaaatgcttctaaactaggctgccgagaatttaaaagatcttgtgcgacgctagtggcaccggtaagaaacctcaaaccatgcggaaagtctaatctagcatggaaacgggtgagatcaaagaagaatttctggaagtctccatattcagctgtgagtgatgcccgcaaaaaggcatcaaacatgaatccggaatttacagatggaaaatgaagagagtttccccc

SEQ ID NO: 50501 - DNA, 562 bp, Arabidopsis thaliana landsberg
  unsure (1)..(562): unsure at all n locations
caacaaaacagaaacgttgttatccaatcgcagacgcagacgcaaacgctaattacaactggatctctaattttgagccgtttcttagcgcaaaacgcaaagaacggtcgtaatcttaacgcagcggatcattgtaataaagacgaggagatatgcaagagtcaaggaatgtacaactcaaccatgacgtgttgcannnnnnnnnnnnnnnnnnnngcgtacgataacgacaactgtggcgcatgtaagaaccaatgcaagttcacgcagacttgttgtagaggagagtgcgtttacttagcttatgataagaggcattgtggggagtgcaaccatagttgtttggttggtgagttttgtgtatatgggttgtgtaattacgcatgatatgtgattagttagttttcatatattaaactttggtaatttattagtgatttgcttatttcgatatataaattttaatcgataagttgatacgactagattggttttctttgtgatatgagtttgaatgtttgatattgcaaaaaggttcaagatcaaatggagaacaatcact

SEQ ID NO: 50502 - DNA, 552 bp, Arabidopsis thaliana landsberg
tttttttttttttcactcttttttttttttttttttttttttttgttttttttttttttttttttttttttttttttttttttttttttttttttttttttttttttttttttttttttttttttttttttttttttttttttttttttttttttttttttttttttttttttttttttttttttttttttttttttttttttcttttttcttatttttgtttgtttttctttttttttcgtttttttttttttttattttttttttttttttttttttttttttttttttttttttttttttgttttttttttttcttttttttttttttttttttttttttttttttttttttttttttttttttttttttttttttttttttttttttttattttttttttttttttttttttttttttttttttttttttttttttttttttttttttttttcttttctttctttttttttttttttttttttttttttttttttattttttttttttttagtattttttctcttttatttttttttttgtttgtttt

SEQ ID NO: 50503 - DNA, 619 bp, Arabidopsis thaliana landsberg
ttcacataaaaccagaaaaaaaaaaaggatttagaatctttcttaacataatatatattttctatgtttggccacggcaatgttactaattcaacgtatttagggtgtgatattggttggggttgttactgaagtttttaactataaaattggctgcaagaaatttgattattgcaacttgtttgttgttaactatgacaaaaacaatgaaacaagaaaatatgaaccagaaataaaaatttgaactttgagtaacgttaagaaatgtgagaaattttagtaaataaaaaaattgattggtaaatcttccctatataattaataaacttatatcggtctttatatcaactcttaattaaaatataatgcctcaagatgtttcctaaggctttatatactagttaatcaaccaaaaaaatgtgattttagttaggttgaatttacatatgttttcttgtaatcgatcattaaaacaaagttgctcttcttgtattatgttcagacaacttggctgtattaatgacgagttagaaaagatgtagaaagtgtgctcgaacttattttggaaacacgttttcataaagttaacaccacccgtctggcctaaacatagcaaccc

SEQ ID NO: 50504 - DNA, 622 bp, Arabidopsis thaliana landsberg
caattaacttggtatttctagtgttttctactggcatggttatggttggttaaggaaatggtctgctttacaaaggttttttttctataatctctactactaattaagcacctaatgtaggcgttcacagccaaccgtggtgcacgttctgccgcatccggagcgtccaacccgcatccaacgcccctgccgcgctcgttccagcgttcctgccgcagcgttcctgccgcagccccgcgattcatccagagcgtcccagcgttcctgccgcagccccgcgatcccgcctgccaagcatggcgtcgccgcggccgttgcccccgcagccccgccgtcgtttacccctactgtctctctcgccccgcaggcgttccactctacatggaaggtgagccgccgacgcccaaaacgacggaatcacagcccgtgcatccccatctctcgcgctctacatggaaggcaaggctcaccaacgccgttcgatctgctccatgaaagccggcgccccgctctcccctgctctcccgctctacatggaaggagttgctggagccaaatcgacgaaatcactgctcgcggacggcggcctcgatcagcgctcgccactacatggaaggaggtg

SEQ ID NO: 50505 - DNA, 848 bp, Arabidopsis thaliana landsberg
gggatcggtcagcagtttatgtgtagctacaagtttcgttaatatgtcatcgtttctaatgttaccatccaaaaaaatcaaaactttaaaagtggttaatttgattataaattaatcaaattttaggctgtagaaactagaaagaaacttatactattggattattatataaacaaaaacataattttcaaaagaaacactaaatatttgtttacaggttcactgaccaaaatgctcaagttacccaaaaaagaagaggaatctagaaggttgtccaacaatcgttgaccgataaaaggattagatcagacttttttcttaaagctcctttttcaaaattctctcttctcctctcattgtttcttgctgaagatgaactattctatttgttgtctcttccacgtcaaaaccatgagtaaagaccataatacctttgattcgctactgatgtagactctatgttggcaatcggtcaagggccatttagtatattcactattaaaacttaccaaaactagatatcccctcgatgcatgatggcttcctccttgtgctgtcttgttccaactttcaacactcgacaatggttgttaagactattacacacactgacacaagctcacacacaaacgcatgcacacaatatatatacatatgttttgtgtgtgtcttaaatgttgaaagtgattagatacgagataaagccaactaaagcatcctacgacgtcagagacacatggcgtcgatagtgatgctccttagagcactgatgagttgccgtcttacgcctaaagacgagccggagacatcggatttttctttggtggctgcgaaccttacagaatttt

SEQ ID NO: 50506 - DNA, 444 bp, Arabidopsis thaliana landsberg
ccagaaggaaagcaaaacctgagaaatgcaatgatttttatagaaccacttattatataaaaacaaatctgtgacctctaatctccagtcgctctgcatctaatcgaatgcgttcctaatttctccgaaggggtaaaccttgatatcattaaacagatcactgatgaagtttaatccgttgaaggcgtgcggctgttaaacgttgaccctggcaaggcgactaaccgtactgtagtaacttttgtgggcgaacctgcgccggttatcgacgcagcattcctggcgataaaaaaggccggtgaactgattgatctgagcaaacataagggcgaacacccccgtatgggcgctacagatgtttgttcgctgataccaatagtcaatatcagtatggaagaaactgctgaatactctaaatggtcatcaaaagcggtttggggagga

SEQ ID NO: 50507 - DNA, 613 bp, Arabidopsis thaliana landsberg
gaaaactattttataactttaaatactctaaacgatacaatggtttattcatatacacaccaaaagaacattaacaaaaaatttaaaaattctaacatggctgatttttttttttaataatatatcgttaactttgtattgggtcaagctaaaaagcaataaagaaggaaaagagaataataacggagaagaagaaatcaagaaacaaaaaatcaagaatataggaacgaaaactacactactataaaactaagaggattagataaaataatcttaagtaatagataactaattgtacattctgtcaaaacccctcgacgttatgtaaacaaagccatataaaacaatgattggcttggcgacatatagctttacgacaactaacaatgacttttatttatttgcttacatacaagtaaaagactttgtcaaataaaaataattaaaaggacttctacaacataattaattttgattcaataatccagccgatgtcgacacgcactagaagaacgttaaaaaaaattccaaagtttttctttaaaaaaatgtcattgtcttaaaagaaggaaatctcgacgtcaaaaagaactaaaagaaatctgtttgtaac

SEQ ID NO: 50508 - DNA, 649 bp, Arabidopsis thaliana landsberg
gatttttcattcggatcttcagatctgcgacgagatccagcggcttgacgaatttctttcactgataaagccacagatcggtttctcgatctactaagcatgttctcaagtggttttttcggcgtaggctatgctacagaagacggatttggattcccggtttgagatttcgaagacggcgaatccatcaccaatcgtttcttccatttgaatggaatggatctagaagagcctggtgcactcatttttatcaacaatgtctatagagtgtcagatgcagagaggagatagtggaggagatagatgaagacgatgaagacgatgaagacgacggaagaagaagaagggtttagatttatttaggtctttggcgcgcaatcctacgtgtaccaaagccacgtatacctcccgcgcctattaacccgttgcttcccgcgaaaacacttatctacgaataagcccattagttaggcccattatggattgctgtctctgaccgaatctaatagatgcaaaccaaagagaccagatttctttttttcaacttgtgattttttttatatgaacatgatttatataaagtcgtcggcaatgtttatgctgcttgttcagtatttatagtttttttgacaaatcaaagataatctca

SEQ ID NO: 50509 - DNA, 505 bp, Arabidopsis thaliana landsberg
gatccctgattgaatccattctgccacatgcttttgcttctccctgttaacatatttttattgctgtcatgggctcatggcaatttaaacttttctcatatatgaagtcaaacagttacacggcgtacattctgcttgaacatggttgtttggtatttttctcatgaactgtaatgttgcttatgctggttctctttatctcgggtgcatttacttatggatactattgtctgcccagttcgcctggagcacggaaagggcgatcaccttcaccgccccctaaaaagggttcaccttcaaagaaagtccgttcgccatcaccaccacttaaaaaggcttcacccctaggtatatacaggttttcatataactgcatatgttactttaattctctggctatgtttattgttaattatatatttaagcatgctgtttcactttttatttgactatcattttcatcttctatatgtggagtaattgtattttgtcaaataggatgctg

SEQ ID NO: 50510 - DNA, 760 bp, Arabidopsis thaliana landsberg
gataactaggagcggagtaacaatctggttttcgtaatattttgggagaatgattttttatttagccaacttacctggcagtttactgtcaacgtagaacattacaaggttcacagtatacctgcagaagaaaatgttgaaatgttgagatagtgtaaaggaatcaatattgtcaaacaagataattgatttcttctttttttctcaccatgcaacaacaatgtcaactgtgtaatgtttccttgatgctataatcaatatgctctgtattactgccataagccaagccaagtccttgatccacctggggatttcacaaacatgagatgtaagaatcttgtgaagaagttatgaacttctgtggaacaatataagagacagtaccttcgtgtgccgtatctttgatatgtgcgtacaaagactaaggtgaatatcgtatgtgatgaaaatattagatctccacaaccatatataactccatcaggaactataattttgaacacaaaccttaatcaaatgccactttatgagttattctgtaccattctaataatttgcaatagatgcaattcaaactaacagttaatcaagagtacttcaagaacattctttggaggtggaatcttggcgagcttggagccctaatagagatatttgatataccagggagaagtcagtacacaaccaaagaaaaaagttacaactaagataccaaagcttaaacgccctgagaatcttacttctcgacaatgataattcg

SEQ ID NO: 50511 - DNA, 717 bp, Arabidopsis thaliana landsberg
aaagaaggtgataagtttaatctaatcttgaccagtgaaatagctttttgttgcttgttgtttttgttcattcttcacagatttaattgtcacttacccaacgtatatggatggacctgtagatttaattccagttttacccttttcttcttcctttcatctgattttgtttgctgctttttttttgttttctggggaatatggaaaaggttaggtttcatatttggacctttttttttggtgttgaatttttcttcttaatttttatgcaaacatggaaaaggacatgcgatgataatcctgaatctactagtgcttagatctgatgaatactggattattaaaaaaaaatattactaaaaatttcaatgatctagggtttcttcagatctttaaatttgttgctgattttactcgatttctcttagtctgggtgcagttgatggagctccagctattttgaccatccaatttcaccagaaaccctaaatcacaagactatgtaagcattttccttatggctcttcttcctgatttttgattcagctaatttggtgatgaaccgtttatatatatctgtaaatcgactttaccctgaaaatatgtacctaccatatgtgtcatgtgtatttttattattctaataacggctgtctaatctctgctgcttcgtcctatcattctcttcttgttttctaactcttccctatcttcatc

SEQ ID NO: 50512 - DNA, 266 bp, Arabidopsis thaliana landsberg
taactatgaccatttttgagaaaaaattaatgtactttgactattgactttgatgagatgtgcacaccatctttactagtttcacatctataaagagagagaaaaacctttagtataatggagctttgatgtgaactaataggactgacctgctttctgactttatgtcctttcttctatcctactagcttatgtttgtaaaaaccttatactaaggggatgttactcacaatctagtcagattactacattaaaacttgcttttt

SEQ ID NO: 50513 - DNA, 555 bp, Arabidopsis thaliana landsberg
cttcgacttaaaataaacaaggtggtctcgtccacaacaaagcaaacgacagcagacgaaggtaacattgcaaaggtcatagtattatacaagccgatccttcgataatttcattacattaaaacgtattttgtacaaaaatattacaagaattttacaaattttttctaagaccaccaaaatctctcagcttcagttcttcactctttgccggcttcagcctgaattttttttcaaacaaagtgttttagcattgggaaacagagacaaacagaggtcgaaaactgggggtattatatcatacttcggccagaaggactccgacctccttgccagccagttctccgaccgcccttcgcctagatctgggtaataatccaatcccccacgctacgagcttcgcttgtaatgttcttaatgtcagctggtgagatagtgaaggtggtcttgttaacatctcttaaatgcttacacccagcttttgcaaatatgtaagctgtcccccggaagccactagggcacaaaaacttccatgcccctccatcacttcatcaa

SEQ ID NO: 50514 - DNA, 789 bp, Arabidopsis thaliana landsberg
ctcacaggatggatacatagattgcacaaaagcgatgctgcatctactgagattcatgtcttgaacaattttgatcgtgatggcaacacgatcttgcatcttgcggcttataagaataatcataaggcatgttcttacccgtctttacaattcgatattcatcgtttaatggttcttcaaatttttgaatcttatattaagaagaaataaaaaaaccaaaagtatgcaaatatataggttaataaaaaagtcataagaaatataatactctaattaatcttctcaaggccatttatgtgttataggattttctaatgaatggttgtcgtgaagcttctacaggtagtcaaagaactattaaaatgcatatcgctgaaccggaacatccaaaacaaaggtggtatgacagcccttgatattttacgtactaatggatctcacatgaacataaaaacagagaaaattattcgacactcagggggtaagagcggggtttatctatcaaaagttaagaccgcatctgtcttcttgagatcgcccataacttttgtagaatattgctccacgacaatgactcgctataagaaccgtatgtccgacggaacacgaaatgcccttctagtaataacagctatggttatcacagctacatatcaaactgccgtccaaccgcaagattaagtatgaaatatatttcacggggaaatatcatcataaaatgcgctgtttgtgtgggggattaattcttatagcatcttgctttggctatggccttgactttataccctt

SEQ ID NO: 50515 - DNA, 1594 bp, Arabidopsis thaliana landsberg
aaatgttgttacttacaacactttgattgatgggtattgtaagttgcgtaagattgatgatggttttgagcttttgagatcaatggcgttgaagggtttggagcctaatttgatttcgtataatgttgttatcaacgggttatgtagagaagggaggatgaaggaggtaagttttgttcttacggagatgaatgggagagggtattcgcttgatgaagtcacttataatactcttattaaaggttattgtaaagaaggtaattttcatcaagctcttgtgatgcatgcggagatgttgagacatgggttgtcacctagtgttattacttatacttcgttgatacatagtatatgtaaggctgggaatatgaacagggctatggagtttcttgatcagatgcgggttagagggctttgtccgaatgagcgtacttacacgacgttggttgatgggttttctcaaaaggggtatatgaatgaagcttatcgggttttgagagagatgaatgataacgggttttctccttcggttgtgacttataatgctttgattaatggtcattgtgttactgggaaaatggaagatgcgatagcagttctcgaagatatgaaggagaaaggtttgagtccggatgtagtgagttatagcacggtattatccggcttttgtagaagttatgatgttgatgaggcgcttagagtcaagagggaaatggttgaaaaaggtatcaaacctgatacaatcacctactcatctctgatccaagggttttgtgaacagagaaggactaaggaagcgtgtgatctttacgaagaaatgctgagagttggtcttccaccagatgagtttacttacacagccttgatcaatgcttattgtatggaaggcgatttggaaaaagctctacagttgcacaatgaaatggtcgagaaaggagtattgcctgatgttgtcacttacagcgtgctgatcaacgggcttaacaaacaatctcgaacaagagaggcaaaaagacttttgctcaagctggtctacgaagaatcagtccctagcgatgtcacatatcacacactcatagaaaactgcagtaacatcgagttcaaaagcgtagtatctcttattaaaggattctgtatgaaaggaatgatgactgaagctgatcaagttttcgaatccatgcttgggaaaaaccataaacccgatggaacagcatacaacattatgattcatggtcattgcagagccggagatatccgcaaagcgtatactctatacaaagagatggtaaaatccggattccttctccatactgtgacagtgattgctctggttaaagccttgcacaaggaagggaaagttaatgaattgaatagtgtgattgtgcatgtattaagaagctgtgaattgagcgaagcagagcaagccaaagtgcttgtggagatcaatcatagagaagggaatatggatgtggttcttgatgtgcttgctgaaatggccaaagatggatttcttcccaacggcataagttaatctagtgagtaaaatcatttacatgggcaatggatcaaccatgcaccagcaacaatgatgcta

SEQ ID NO: 50516 - DNA, 1469 bp, Arabidopsis thaliana landsberg
  unsure (1)..(1469): unsure at all n locations
atggaagtaaccttggcgggattggtttttggcggtccaaaaccaatcctatctttcctggaaaccttaaggatttagaaccgggtggtatttgagagattatagaatcaagggaaatttcattttgcagaaacaacattttctttcacatcttcggttgctgtacgaagtaaataattaaacacatgaacaaacctgtaacccaatgtttttcagaaaggacattattgctaccacatttattaagcgagagtggttttgaaacttcgttgggaacatctacacctcagaatcacataggaaatgaacctgtagagcaagacaaaacatagcatgatcacaacatttctccatctactttcctctccgtacctttcttctttgagtagatcctcctcggtcaccaaacattttccgaatccatactccaaacacttgtttgattttgagaactcgttaatcagaaatccttcgaacgggtacttgaacaaggagatgtagtgcatgaaaatccagtaaccagggatctcatggttcgatatgaagtagccggagaacagaaagaaggaacccatcacaccggaaatcactgagtttccaactataaaattaggaaccagtgcactaaagcacacaaccaccgagtttgctgtgtagaggatcaaccaaatgaggagcgaaaagtgtagaaacgccatgaaactggggttcagtcccaccagccagtacactggggttgagaatagaatagctaggatgagcagaaatggcaagtaaactagtccattagcgacggcatatgaagacactctgtagcttccactagaggtctccttcatcagaatctttctttcttgcagaaatatagggagtgcctctattgtcgaagttagcagaaaggtcaatatgaatgcaaagaggccgactctttctcgcgcaccttttaaatcgtctttgagattatgaaaaatcagacctaggacaattcctgaacctaacatctgaaccgtcctgcacgcaaaaagctccttggttctgaaaatgttcttggagaacctatgtgtgagtatcatagtttcttctaatcttgaatttgcaaaatctcttgtgaactctgttgctatgttcatcgttcctacatcagcgacccttgtttgttgaaacagctgttgtagtgtgaatttgccacttttgctctccccttgactatcttctgatctcttctcttgtaatgttgtttgtggtgttaggacatgagctgctcttctgctttcctgtagccgttgctgttttgtgatggattcgattgattcaatggcaaattcaacgatgttttcatggagaggagnnnnnnnnnnnnnnnnnnttaagtaaacgccaagctgatccaccgacccctgcttcaaggtcgagccattggccaacaagagaacagaattgaactgtttgactatccgaaatcccggttg

SEQ ID NO: 50517 - DNA, 1381 bp, Arabidopsis thaliana landsberg
aaacaggatccagccagaaacactaacatgaaaggttagaatatatgaaaaacggctctgcatttttcactaccctcaacaagatgctttaattcctcccaggatgaagaggcagttatatcctgcaccaaaacaaataatcagggagaagcaagaccaccacccaaaagtcatccatcacataacattatacagaatcaaactaaatagattcaacaccttgaaggagcgaagcatatctaccaacttttcagtctgccgtgtctgttttctggcttctttttcttccttctcctttgccctttccagcaaatcatcaaagactaactgagaagcatcaccaaaacaaataattagcagtcatatccaaatgagacattcaaggttcaataaagaatatgctaacactgcagtgattttactgtgcttaaactagtttatgcatcatgaagcaagaagacttgtatcttcaaacatcatctggaaatgaatttttgaaagtcaagacaaagatctacagacctttagtctaacgtcaggaataagaggaaaaccaatatcctcggaaatagaaaccttgaactcatcaaatgttgacccagcggataaatttacctggaaataaattgaaattattaaacacctacaaaatacagaaatattacagaatataaattgcgtacttttctcaatttcaatacatcctttatctgagacttgagctcgtggtcctgtgaaaaaaaacacatcaaatatacagatggttatttaggaattaagggacataaaaaaaaacaagcaaaaataaacaggaaatggaaacagaagacgccactattcacaaacctagcaaaataatgctaccagaactacttaatacaacaattactgtcttttaaaaggaatcagtctagagacagcaaagcattttttctcgtcatgtaacagattacagtcactttcatgatattttggaaagtaaacggactattgaatataatctagtaccctttttttcaaatcctcaacagcatcttcaaataagtcttttggagtagctccagaggagtttgacgcaattgctgaatatactggtaaatccttgacctgagatgtagaattcattttctattaaaacagttcaatacttgaaatggaatagttattctgggtgacataatatttaattgagttatataaccttcattaaataatcacgccatatagttttggcagtaagctctcctgttgcaatatgttcatctaacagcccatggaactcatcacgatgctttcgctctacttatttgagttcctcctgttgtcatgaacagcagatataatgaactaatgttcaatacaacaaacaaataaatgccaa

SEQ ID NO: 50518 - DNA, 1495 bp, Arabidopsis thaliana landsberg
  unsure (1)..(1495): unsure at all n locations
ttgaagatgggatggagatgcaatgattctgataacttaaggttgttaagttcatttgcagttccttgtgctttggaaacgttacatggatccattcttttgggaggttgacatggccgaggatatcagagttaattatatctaaatttctttcaaaggtttgcttttagaactcgtgaagttgtgaaattttgtagaaatttctttggtgtgagagcactcttctcctttgtactttaactgttgtagtctgtttaaaggttattgttttctttggagtcaggttgtcccagaagatgcttcaaaacttgctgactttcagaaaattatcgagcggacctctcaattcgaagccgctctaaaggaactgaattttgtttcatcatctgacgcagagagtaggctcagcaaatatgctgaagatgtggaggttcattttgcatctagaaagaagatagaaatcctagcaaaagcaagcaatttgctgttgcagtgtatctttacgattccccaggtgggcttttgattgtcatcatcatcatgtcatatttaccgcattaaccttttcatgtgaaagatcaggattgtgaactccgttttccaggatattgctatgaggaatgccaagcacatcgtctgcttacttttctcctctgaaaggtgtgtggtatctgaagctgcatctcaacttatgaatttggtgcataagacgctcgaggtggctcttttcagacttttgcaattcaatataagctttttccagacacggttgggataataaactcatttttatacaggatgtctgtgtttcttctgcaagggttgcttcagagttctacaacgctgctagagattctatccttctatatgaagctgttgttcctgtcaaggtcagtaaaaaaatagttttcaatgaagatttaacaactgaatcaatatagtgactgtcgtcacatggaaatttctcaccaatatgcacaaattcttattcttctttttccttactccgttgaaatgtgaagctagagaaacaactcgatggcctcaatgaagctgctgttcttctgcacaacgattgnnnnnnnnnnnnnnnnnnnnnnnnnnnnnttgcttttgaggtatgaacaatgtgtcttaagcaagataaaccgctatttttaatttctttttttcggttaagtaattgtcttcttaagcatccttttcattgacaggtgaaagttataattatccccttctgctgactatatcatcattttttgttcacagtatcgtgctagcttccctagctccatcaaggagtatgcagtctttgctgacatagccccaagatttaaactgatggccgaagaagttttgcaaaaacaagtccatctagtaatttcaagtctgcgagaggtgaatctgtgtggaaaaaactgtgcttaaatcttacaaagtaatattatgtactcagtattgattcctcgtctaacattttgcatctacgatcagg

SEQ ID NO: 50519 - DNA, 1046 bp, Arabidopsis thaliana landsberg
atccactgggtaacagttcgacgccagacaaatccccaccgtttattgcagctgcaaaatatggcgcttttacgcaagtgtggattatcattgctcctgattcatcgtggtatgtttcttgaatcagataccactccttcgaacccttccactgcaatatatttaattgttctctattcataaatcaaatgctcaataatcgattggtattactaaaccaaatgaatttttttacgtacctcaatgctgaaaacagagacttcattccatgaattaggatgtcttccgatacgaattagttctttcatatctttagcagactctaaataactccatatttcttgtttttctgcaccgttgattaatccaaacattacttctggtttagtgtgcattctagctaaaccggtagcgctaaccaaaacgcaagggatcccactcatgcctcgactttcttgcgtgaacattctaatgttattagccgaaactccaactgtattcaaccgattccacctttgtccagttatcccgcaaactcccgaacaaaatacgttaaccataaatgaagataggttaagcaagttcttgcgacagatctggtcgaatactaaacaagtacaaacgttaaaaaacatggttagtgtaaaatcaaactaaaattgatgaatagaacaataaaaactttaaaaaacagaattttcactactttgaatattgtgaccaattgaaggaatagaaacggggcaggtgttgcagtaatgcttttggagagcagtgagccatctctgtgcaccaaattcagagtttgaattgaaagtgtacatgccttcttcttccttgtaaacccaatggtcgagaatggttacctacaaataataacaaaatcagaacaaagctaccattatatatattctaaactctattgaaattgaaatataccttagagatacaattggctatatgttggataagatatcccaaaggaaaacttctatattcaggacgtaaatgtctgccatattagcctgaaatacattcaaatttct

SEQ ID NO: 50520 - DNA, 755 bp, Arabidopsis thaliana landsberg
attacctaatggtttttgtctaaggtttgtctacaagagaggaatcatcatcccaatgggaccataccatcgccaccacaaaacacactttgtctttgtttcaattaattttggacccaattttccaatttattttcatactatttcatttcattttctatctttttcctgcaacttgcatttagttgaatttttagttggatttctttggtcctttttattgatatagaaatcaaaatatctgcatatctaatcagcatatgacaaaaaaaatccaataatataattaatgtcgttcaaaaaaaaattaatatctaaaatacaaaattgatataacatcttttatagagtaactattaagaaaaatatatatatatatatagtatatatcttttgtaaaatgcaaaatttatttaatattatattttggttatcggcatcatacgcttgttttcaaggattttctcaactctgtagcagatatatatctttcattctctttagagtttatgtcacgctttatcttttggtttatgtcgatgataacgttatcaaggatatttttttcaacaagttcatgatttatggatcccatatgctcgtttctcctttataattaaggatctacataattgacaatattttcatggaatcgagttctctcgcacttcaacttcatggaaactcttatgagttctagatcctttaatccaaaaatatatgataactaccttgctatcaacaaaattatccta

SEQ ID NO: 50521 - DNA, 541 bp, Arabidopsis thaliana landsberg
tgtagatactggtatgtattatagcatgtggttgagtagattatgtcttcttaaaaatatgttatgagttttcagatagctatagctttccgttttgtttcttgcatttaatgctaaacctcttttttgaaagttggttgatcaggtttggtagagcttccatcacccaacttagcttcttcatcgggatttatcttttaatttcttctcttaaattgttcatagacttaacctgagtgttattctcttttttcttttctttttcggtttgttctcagagtgctagggatttgggaagaaacttgaagagaattcttgacaagccagcagctagtagctgataatgatattggtataacacgtgtttacatataaacctatgatcatatctacttgctgaagccaaaagatgaactaccaaatggatagagttcattttgggatattcaaattcatgtttcgaattcaaattgctcttttacattctatcgattggtaattatatagagctactttataatatatgtagaagcaatggaac

SEQ ID NO: 50522 - DNA, 590 bp, Arabidopsis thaliana landsberg
  unsure (1)..(590): unsure at all n locations
tagatgataatgctggtgatagcaatgatgtctttcctttgtaaagaacctttctacaatatctttgttatatatctgtatatagctaccttgtcatatcatcttggtgtgaataacatttggaagtaataaattggtcatatagctcatgttctgaatttcttgggaaggtagatttggttctgagatagctctttttagtgtattatataaatgcttcttcatatgctggatttacagaaaatagacgagagcatgtatttctagatatcagaaggatcgatagaatcttcgatgatttggatacaagatccgacagattctcctttggacatagcctgcgcgacgttggatcgagctatctcatggcgacgtagtagcagtatggtgttaaggactgaccacctcacctgcgagtccgctttcttctgtgtgaccccaaactcttcaccaaaccatctagctgttccatctacaccacaaaaccataaagcatatgtacataatcagaagagtttttaacgggtaaaagatagagacttgctgatatcgcaaggcatcctcannnnnnnnnnnnnnnnnnnnnnnnt

SEQ ID NO: 50523 - DNA, 861 bp, Arabidopsis thaliana landsberg
atgagagttccacggaggattcgtgagaggcttttgtctgactgtagtaataagaagacagtatcttttgttcaagatattgaagacaagcttcttcatgcccatctacgaagacaggttctgtttttttttttttttttttttaatttcctgattaagcctttacctctgaaatgactaagtctttgatttctatatttaatttgcttaaagtttttgtcttttcgtgaattctgtatagcaattttatcataacgtttcgagaaaggctcgtgctaaacctagaagtccttcacgatcatctgatgaagaacttggccaacgaatcgaagcaagacttctggctgctgaacaaaaaaggtgaaaacttcaattcaaagtctaagtctttcgatggtttatctctgtagattgatttgattgttgaaattgttaggttggagattcttgcgaaggcacagatgcgtttggcgaagttagatgagttaagacaagcagcgaaaacaagtgtggagatacggtcggagagggaacgtgtgaagcttggaactcaagtggagtctcgtgttcaaaaggctgaagctaatagaatgaagattctcaaggcgtctcatcagaaaagggcttgtgctaaagagagaacgtcacagtctatgatgaggaggatggctagagagagtaagtataaggaaagagttcgtgcttcgattaatcagaaacgtgtagctgctgagaagaaacgtcttgggttgcttgaagctgagaagaagaaagcacgtgctcgtgtccaacaagtacgtcatgttgccaactctgtttctaatcagcgtgagatagagagaagtaaaatgagggataaac

SEQ ID NO: 50524 - DNA, 436 bp, Arabidopsis thaliana landsberg
agtaaatctatgtacaaaactagaaatgatggattctttagaatcatcaatctttagacataatttttttaaggttgctgagctgaaatgtgaatgcatttatagaaagattttaaaacgcatgcagttttgtatgactattatttaatcataatcttttttttttgtcaaccattgattaatgatatcaatattcgtttgaagttatatcatagttaccaaattctgtaagtgtctttttcaaatggcaaaccatatacaaaataccaatcccgtaggtaatgattattgatattaaattttatgtgggtgtattagttggatacaatgtggaattaatgggtgtgaatgtggggtgctaactatatggcctctttataggtggggaataaagtgtgtgcaagctctttttccaaaagcaatagggaaaagaaaa

SEQ ID NO: 50525 - DNA, 1350 bp, Arabidopsis thaliana landsberg
ttcctattgtgcaaagtaagacaaatacattagacacaaatcaagtctcaataataaactgaaagaagtgctgctcctgtataagttcataagtgatggtccacatttggttgtaacaaaatctgcctctagaaaagataattctgtattctacgatacgatatccatctaaaagctaatttacgaacaaaacatgtcaaaaatatcatcaaacaactgagacaaatgataagaacagttattgattaagataaagtacaccaacatggaagcttaattccttcaagcaaacacacaagctttagaaacctagcatagactggtcatagttcttcaattcgaaaacgatggtagctgttcaagaaactacaatgataatttatccagaatcaaccatatagtcacaacttctttcaactcaaaacgatgagaacgaactagttttctaacataaacaattcatctagcaatgtaacttcaagtaattgagactaagtagctaaatctgccattaaaacttgtaatgaaataggttctctaattacctgaagagttctaggttcttgagcctccctaatagcttgaacaaggcaagcagtggctaaagcttcaacgcttctgtttcgcaagcaagtagctgagcaacaatccctaaacaactggaaagcatgctcagagatatcgcaatccaaccctaaaatcgatgccacatcgataatctgcatataagccctaagattatccaccacaacagtcgacgaattcgaattcgatgttgacgaagcgagttctagggttcgttcgagttcagcgagatgaccggagaaagagagggaagagcgagcgaaaatcgggcttggctcgagagaccaggtagagaaggcggtgatgaatccggtgggctcaaacggatcttcctcgtcttcaggagacggttgcgccgcagtttggagatcagaagtaacgagacagagcggagtgtcttgggcgcggagatgaaacaggtggtggttttgcgtctgccgttcttccattacgcgaccgcaagatgagcactccgttattgatctaccggagcttgtggtggcacaccgtccctgcgccgatgaacagtacggacacttcatttttgagtttctttacgtattttttttttctgttctctcacgtgtgagtgtggtaaagctcttttatactacaagagtaaacaaaccgcgcattttagtttagtcaacaactcttaatttggttaatctacggtggcaaaacagtggcactttgccaataactacacagattcaagagtcccaagttttgaagatatcagatgaagcaatatatcataaggga

SEQ ID NO: 50526 - DNA, 2709 bp, Arabidopsis thaliana landsberg
taacggtgcgatactttaagcaatctaaggtgaagaagaagttcacatggtcgattgggatataaaccaagggaaccaatacatgactctgatacgaagcattgctgagttgcctggtaaacgtcctcgcctgaggttaacaggaattgatgaccctgaatcaatccaacgctccattggagggttaagaatcatcggtctaagactcgagcaactcgcagaggataatggagtatccttcaaattcaaagcaatgccttcaaagacttcgattgtctctccatcaacacttggttgcaaacccggagaaaccttaatagtgaactttgcattccaacttcaccacatgcctgacgagagtgtcacaacagtaaaccagcgggacgagctactccacatggtcaaaagcttaaacccgatgcttggttacagtggttgaacaaagacgtgaacacaaacactttcaccattcttccccagattcatagcagcttacgaatactactcagcagttttcgagtctctagacatgacacttccgagagaaagccaggagaggatgaatgtagaaagacagtgtcttgctagagacatagtcaacattgttgcttgcgaaggagaagaacgaatagagagatacgaggctgcgggaaaatggagagcgagaatgatgatggctggattcaattcaaaaccaatgagtgctagagtaaccaacaatatacaaaacctcataaagcaacaatattgcaataagtgcaagcttaaagaagaaatgggtgagctccatttttgctgggaagagaaaagcttaatcgttgcttcagcttggaggtaagataagtgacaagagcatatagtctttatgtttcataaaacataattatgtttttactgtaatcttgggttattgtgtaactggttaaatcatctccatgtattattaccagaggttaggggtgatcacaggtactaaaagctaatctaacacttatggaagaatttttctttctttttttttctctattatgtaaaaataattagagttttggttctaaacctatttgctaagtgtgaatgagtctttacatgttcatatttcagttcaaatggttaaatttgctaaggttctcacttactattaggcttatcagttttaactcttaagctcaaaagctcattagatccataaaactcacaaaaggtatcgtcattcttcatcaatcactagtgtatcagtacgaaactaggaaacgttacatttttcagcatcattttttttacattccaacgaaacgaaaaggaaaactctagttaagcagagttaatacgaaatcacataaccaaatcatcctcaaaagctcttttaaacttgaaggtcttgctttccattaaccacattctgcttcttctcatcatctttcatctccactgacttctcatctttctgagcatctgcagatttctctcctttgtttccacagtagatgaagtatagtatcaattgcagtgtccctaatgcacatccaaacccatttgggatcttcgcaacaacaaaaacccaaagttagaaacaaagttttgatatttaccagagaaaacaacacaagaaggagaaattgtaacttactgcaacaaaagggtcacgaccgattagaccatagacgaaccacgaagtaccacagaggaagacaaagagtgacaaaaagaatggcataaactctacactcttcgtctttaccaccaatctctgtaaatcaatgaaccaaacacaaaatttaacaaaatgaatccaaaagtaaagagtagaactttaaaaagatccaatcctgagtttgcttaccatgatggagagtggagaagcgtacatgatgatggagaaaacagtagctgcgagaccacaaaagagttttctaccgtttccttgaagagcaaagagagagacgagagctactgttgcgaatacagccaaaacgcaagagaagataccaaagatcttaattttctccttctttggtgcgtagaaaagaaagattaacacgtagactgtttcgatcactgctcctgtgccattgattgtgctcacaagtgtgttgtcttttgacacaaagggaagtccatacctgaaaaaaacagagaaacgcagaaacagaggaagtaagaaacagagctatactctaatggaagattaaaaacgtaaaagagggaattttgtttaccaagcagagaggagacagttgaggagagtcattggataagggataccagagaattgttcagtggatttgttcttgatgattctcttgaatgttatcctaatttcattcacgaacaaaaaagaatcttgagttttttttttccagaacagaacaacaagaaatcgaacgaatcataaatcggttcactatagaagagagaagtgatacgtacgaaggagccaagaaaagaaacagagcagttgcatttcctgtaaaaagtagaaaaacgacaaaaacggattagtagtactctcagtgatttctcatggaagaaagacgaagaagatagaaagacagagagagaggttgaggaaatgagttgctaccgaaaacgccgaagatagtgtgagcgatgttcatcttttgatctcaaaggtggctaaaggttcttctttttttcttgttcgtaaaatgagagagaaagtgagagaatatgagctaagtgttttct

SEQ ID NO: 50527 - DNA, 772 bp, Arabidopsis thaliana landsberg
cgaagaagagaatttttgaactgtcgtacacctcttccgttagatctactgtcaattgcggttgttgtcttcttttaaagtataacaacggcctacgaccagaaaaaaataaaaagattaacatataaattatgattctttaacaagaaagcgtgaatttcgactcaaaaacagagaaaatcctaaagtagtactaaaatttagggaattagacgagagtaaagtaaactcacatagataagcaacacgaggatcatcagactcaaccaagtttgctacacgaagaaacctttgaatccctgaggctaatgtctccggaagcttctcgctgtcatagggctcccacacatattgttctttcaaagcgaggggtctcgtgaacaagctggttggcggcgaatcttccgggaggatgggatccatatcaagaaaaacattggtaggatccacaggggcgatttcgttagacgacattgggagatgaaagctgcttcttctattgttttagttggcatggagataacattggagatggaattaattatataaagcagcacttgcttagcgaggtggaattctataaaataaacaatgtaaagacggtgtttgaagtgttaattaaaagtgatttattggaggagaaaaatgctttctactagtttggtactagagaaagtggtttcctagcaaaagtttaccctttacacgataatatcaacgtgcatgggaaaagaaaaaccattaaaacaagttgagatagactagatcttat

SEQ ID NO: 50528 - DNA, 576 bp, Arabidopsis thaliana landsberg
ggccccaatgttttgatatgtcaacacggcttcgactttcgagcgcaccgcctaactaatgagaagctcaagatgtctgagaacactccgaatgaggaagcatattcgacaatcgacatcatccgatgccttgtgtcagacaaaaacagcaaaaacgacagtgtttcaaccaaagaaaagattgtgttgggcttaagtgattcagacccaaaccaaaagaagcccatgacattacaacggtcattcattctcaactaaagacaaaaacagatgaatgcgagttcttcttctacgcaatcggtttgagattctcatgtgtgaagaaaaaaactagtctaatatatgggaacgattgaaacaaaccgaattcaaacaccataatatattctcaaaaattaaactccagatggatctaataaaattcaagagatcttataatagattgaaggggctaggaaagatcaaaacgtgagtttctcactacttcaggctttctccggtgaaagattctctcaatgtcatctctctcttaatcattcaaagagtaataacatcccgcaagcttttgggtcacta

SEQ ID NO: 50529 - DNA, 862 bp, Arabidopsis thaliana landsberg
  unsure (1)..(862): unsure at all n locations
tatgcgtgacgtttgcatgcctaattataaactagttataaccaaaacttatttgttggaattttacatttatgggagagaactcacgttaacaaaatatatgctcaagtttaacatattgatcaatgttgtttatttacattagaatcagacgatgtccgattttccgtaatgatcaatgttatcacttcaatttttttatttcactaacatgtaagacatgataacattttatactgtgttaatctttttatgataaaatttnnnnttctgtacttgattttttttattttttatttactaaatactttgatggtttttctgtgagtaggaaaaagtgttattgttgcaaaatgaaaaaaagtagtatataaccaagaaaaaaaaaaaactaaatatatgtggaaaggaaaatgaatgtacgtacgtcgtaggaattaaaaagtatatgggcccattaagaggaaatggagacacttaaggcccattatgtttctctctaagccctacccctagtgtgtgtcctcttcttcaatcatcatcttttcgataccgaagcagcaaccttcgcgccgccgagagataacgagaaaaaatggggaagaggtcgaaaacatcaaggaaagggaaaaaagcatggagggctaacattagctccgaggacattgaagatttcttcgagaaaactaccagagatgctctctccggtggcaatctctccgctgctcccagcgaagacttgttccacgtcgataaatcccatggtttggtcttacttctctctctctttttcagctgcaaagtttcaatttttcgatacattagcatcagcagagtaagatttgatgaagattaggtattt

SEQ ID NO: 50530 - DNA, 540 bp, Arabidopsis thaliana landsberg
tttcagatattgggcgctgcttacaatcggcatgaaccgagggaaatgggcgtccataagagaaatggaaccatatatctagatgtgcataaactgcctgaaaggccgcagagtgacttagatcgccgcacgtaatcttcgctttaattgtatttgcggattggtgtgattctactagctttattatgaatggtgctaaagaatgtgtgtgcagaagacaatgctaatgtttagaaaaaaatgggtcataaagagtttataacactgctctgcatattttgctactaataaacttgatgttatgtttccatcagatgttactggggttattgtgttgaaagccttgctacggaagatccaggaagagcttatggagaagaaatacatcatgtggatgcaaatgttgaattttgttctgttgtcaggactaaactaggagctcaccgagttatgatgggtgctgaaatggactgctgtgatgtatctgataagggaaaaaggttttacgtagagttgaaaacaactcgtgaggtatgactc

SEQ ID NO: 50531 - DNA, 1052 bp, Arabidopsis thaliana landsberg
aacgtatacgttttccaaatttggagcctccaatagttttgaaagagtctgaaagatcaaatgacttcaagtttagtggcagggcctctagacataatcagattagcatttactagaatagccagggaaacaatatagttcaagattttttacctcagcttgatcacaaccagtacctaactggccaaattggtttccaccaaacgcataaacatcaccatccgatgaagcgcaggtcgtgtgccatagacctgcagccacttcttctatacggattcccaacaaagacgacacacatgtaggacttagttcatcatctgtacttccttggccacacttcacagagcaacaaaaataaaaataatcaattacttccacatacccaacagaaagtgaaaatattagctgcggatgtataacaaatgaaagtttcaattatcttttccagtcttattttaaatgcagactagcatttttccctaattctatgttttatcaaacctgaatcctgtgttgaatctatgttttggtatatataaaaaaacattttgagaattagttcaacactatgatgattagctttcctcaacatgtgtgttcagctggaagcaagaatcttaactcattcaagtttcaagcatatactgtaataaataaagccagggatcgatcgtgctcacctgtccataaagcccccaaccaaatgtaaggagcgctccagtatctgtccacaaaaaaactcattcgtattatatgcaaagcaagtattgttcttgtgataaatcctcagataagatatgtcaaattgtcaatcttttccaggttaaagggtcgagaattattggggtctgttcatagttatataaaggaccccgagaaggctaacaagtgaaccttaaccaaggcatagtgcggaaatgagatcatatttcaaaatcctaaatcctgatgacagagtataaagatttatctaaggttgaaatgcgttggtttcagtgatttggatttaaacaatcataaataaatgactaccacaaagcaatatgggagac

SEQ ID NO: 50532 - DNA, 611 bp, Arabidopsis thaliana landsberg
  unsure (1)..(611): unsure at all n locations
gggcatcatcgtctttagtgtttttggatacgctgtgtacaggttatttgctagggtaaacttttttttagcgattagaaataaaactaagcaaagaaatgaaaagtgtgattggaagtattgttgtaccaaattgatattctttgccaatgaactcatgttttggaaagtaaattaatgttcttagctttgtttgctatgattttgaggataactaacactgatgataactaccactgtggattagtccattgttagactagactgtttattggtattcttctatatatatgaaatgcattctacaggatcggatttgacgttgtaatttaggagacaagtaaaacaagaattcttccgatctcataatgtggtcaatcactaggctcgttttcatttttaatgaacacattgcatgcatatccgaccatatgctcttccgatgatacattttgaatgacacgacatacattattttacaatcacaattctctttttatacgaagtattgttttttttctcgacttgtagctctgttttagttntgtcaagtctttagacctgttacaccatttattattatcttcttaccacatataaacttacctttt

SEQ ID NO: 50533 - DNA, 503 bp, Arabidopsis thaliana landsberg
  unsure (1)..(503): unsure at all n locations
aaactaaaagactaattgaagatgccccactacttatttctaaatgcagctatgcacaggcctataacactatacacgatgcataaaaagaacaaagaaggaccgtagttggactgtgccaaacatcatcctattactatcgacctcacagctctataccaacacacaatagatcatattactcaaaaaaacaatagcgtccacggtatagataatcataacctggacacaaacaaaaactggatcacatggacaagagatatgagatcgagctatgacaacaatctggcagctgcacggactctatgcgtggacaaaacgagacgtcggcgaaacgaagctgcttatgatacaaatcagactttgcgactctcagctttatggcgctgcatactgtcaaagttcccaacacagacattatgngaacgtgtgttggagactgacaatcacatttagagagacatgatcaatcactttcatacactactatactgagatttatg

SEQ ID NO: 50534 - DNA, 768 bp, Arabidopsis thaliana landsberg
tctctatccagatacagaataatctcaaagaagataataaaaaagctttgtgttggacaatcatattatcatgctggcaaacaaagcaaccacacaaaattgggcttcatcttttatcatattttcaagattaaagccttacaggcccaatatgaatagcattgatgattagtaatgtgttgtagaatttttagcttttatcatctaaagtctaaaccctcttagatgattcaaaaagagagtagtaattcatgaacttttctctaaagcctaaataaatattacctcaattttcaaggcattttcaattctatcaatttgtaaccttaccatatgctatcatttaaaaatcatggtacactattttcttctaccttttcatttttaagtatttagtcagttaaattaaaattgcaataaatttaaaaaccaaccaaccaaccatgaaccacccaacgacatttctgaatatgtttggtttgaacttccttctttggttccactttcttttgttttggagcaaagacgaactaacacatttgtaatgaaagaatcaaatttataaaactgttaagagaaaaagagataaacagtaactccaaatcattacataaacagttatgacatcacacaacacaaaccaaatcacttcttcttgagtccaaaactcagctgccattgaagaactatcaaaatacttagacaaccaaaagatctttctctctttagagagatgctagctgctgaatatcataaggatgagcatca

SEQ ID NO: 50535 - DNA, 609 bp, Arabidopsis thaliana landsberg
tccttcgattcgatgcacatgtttttcaattgtcaaactaattcttcagggtccaatgctctactgaaattgaattgagagcatttgtgtcatggtttttataggtaccctatacatgaggtacccactcttgctaggtcaagataagaccccaatggatgccattaagggttcatgggtggccagcccaacacgggggtaaggcctactgtatgaagtcgtggcccagcctggactcgtttcctgggctagaccgccaccaccacaagcacccataaaaggaggaatcaacatcttcagctatagatatggattcttgcgagtggaacccggacctcctcatcggacccctttgagaaaggggtacaaagggtctccacgtccatgggaagaagacactctctggctgcagcactaaacctctgggatggttccgaccagttatatgccatccggatctcaagccaagtggggtctgatgctgccatgtgtctggaccgatgcagttggatccagcccctcggcacggtccggggcctagcagagaggcctaggaatgttgtgtcccacatattctgggcctgctctagtcaagacagaggtcagtgc

SEQ ID NO: 50536 - DNA, 524 bp, Arabidopsis thaliana landsberg
gccagaatcacagatctgtttttcaaagattttgctaaagctatgcttaagttgattctttatggtataaagactggtagaagaggagagatccgaagaaggtgcgatgctattaattgagtttatgtttttaatttatttaatttttggggattggattgtgaatcttctgagttattacactcatatgtttttgtgtaatgtaaaacatatatggttgattgttctaattaagagattggtttggtacaaagattgttaacctttgtgcagagattgaatttgatggttatgtaaaggaaatgatctgcatttgagctctaaaatttgagtccggttcagtgagagtaaaccaaactgaagtagttagtttgagtttggtaatcattcattagtggctgattgataattaatatgttggttgagataagagatgtgatttaatggatacggagtcggtagctcaacgagtgaacttttggaatctggagcatctagggggtttagagtttgagcaccaccaa

SEQ ID NO: 50537 - DNA, 413 bp, Arabidopsis thaliana landsberg
agctacgatctcaaatttcagaattatagcttgctcagccactgttatcacctccttgcttcattccctcctcaacgcaaccttcttgtcaaggctctcgaactcgcatcttctgtccctcaggatatttctgcgtacctctggtcttgcaatttcaactctcaactcgctaacacgttcattatccaagccgattttccttcttctctctccgctctcgagtctggttttctctctgcttcacacatatgttttcctgagctccaggtagatagtctcttttttatttttgcgttagaggttcaggtgatcgatctttgttgttaattatttgagtctttacagatgttcttcacagcttcaatgcttcacgttcatatcatgcaatggactgatgattattcagtggaaaa

SEQ ID NO: 50538 - DNA, 1165 bp, Arabidopsis thaliana landsberg
gcgcctccatcatcaacgagctaattttaacttaattacatgcacacatacgtaatatatagaagacaaaacgaaaaagaaaatgcgtaatagatagatgaaataattaaagtatatgttcatattgttgacttgacttcttgagattgcacagctcatataatatttagttgacttgacttattgagattccacagctcatattatatgcatcagcgtgcatatatctcgattttggttttagatcattgttaatttcaacagattaaccaactaatccgtcacatttaattggttatatataacaaattgttcccgacctaatgctaactacgtgaatctaaaatattttgtgagtacgtacgtatgccatgttagcctagtttatgtagtaatttaataatcagtttagacaattgtgaattcattaaatataaatatatgaaaatatacggcactcatggatatagatcctactatatgagtctaaataacatctacctatctttcctttttagtggtgtttaccgtgattcaataattattgtgttaaaaattactaaaaaaaaatataccttgttaaaatatattcatgcataagaatatcattataaaaattcattgataaaataagtgaaagataccttatatacacaattacacattatgtcagctttgttgtttgatgttatatttctaaatattatttgccaatatcttctaattaaaatggtcgattatttgaagggaacttgattatttaagaagaagaattggcacttgataggttttgtccaactcatcatttggttgacttagtaaaagttgacatatcgaagtcaatggctgcgtttgtattcttatataacacatagactttagagtaaacggctcacgttcatcttcttttattttataggtacattgtattagtataacatacacatgtgtatattttaatgaagtaaacaaaaaaattcaacatagtgcgaacaaagtggttgaataatttcatgtgttccgccgatctcttcgtatgatcaacgtcagtattattcataggttggaactggtgtagggctcaattgtaaaatttaaaaataaacgagaggaagcaagtgggatccaaaggatgtctctcatcctaataatctatctttgacat

SEQ ID NO: 50539 - DNA, 911 bp, Arabidopsis thaliana landsberg
gtacatgcgatttttatttgttatttacattagatagatgagctttcttaaaatgatctcttgcttttgttaatcaccctgttttattttccgtctgatttgagtcaatggataagatactcattagaagtttcctgcttgttgagagcttgtgtattatttccctgcctatgtatataattcaggtttctatagtagtattgatgttcgttccctcggtttgtgttgtttttactggttcttctcttcactagtatatgcgtctcttttgtaatgtataaaattggaaggaactctcttttgtcttcctaacgtggaaatggcatcttttacctaaactaagctttacacttaatcaattcagctgttcagctttgccatgaaagttgatgttttcccatattcaacgaatttctctttcagtatgacgggggagcaaattcaggcaccatctagccctagagatggggaagatatctccatcacgcaagggcacccaaaggtacctttattttcccattagtttctcactgctttgtaaatcatacaattgatgattgctgccgggctgttctgatctagccttgtttctgcattctctaaagaaaaagacctttaagtcacatcaggcttagtcaagagaggtatatgagagattttagggaacactcgaaaacaacttaaaagttaatacctttttatcctggcgatgcaggggcacgtcaggtgttcaagtgtcatgcactagaattcccccttttctcctccagttttcgctccttatttgtttggaaacgtttataaataattctaaatttaagacgcgcaaacattttctgtatggaagtatgatcggttacgttacaaagactgccttcctttatctgattgtttgctactttctgtttggc

SEQ ID NO: 50540 - DNA, 792 bp, Arabidopsis thaliana landsberg
aaaaacgattaagttttgaacgttctcgttaaagagtgagtatcttacatgactacataatttcatgcttgcattattttaagatattaaagagtaatagtctcgtcgaaattataacattaaaaagtggattattcgcctcgaagatatccgatgtcacaattttgtcttcttttagaacataatgttgaatccgagaatcgaggtatacctgaatatctcgccaatgtgataatgtgatataatcgagatacctgaatacccactgaaccagactcgtgaattgactttgtccttaagtttttcaaatttgatcagcaatacagatatgtcatttcctaggactataaaagatatcaaacaaatattaattaaagatatgtaaaacttatgggtgaatgatcggtgatgtatgtgtatatgttactggcattccataatacacgcgattcaactaggaaaaatatactataaaaagaggcgtatggaactacgttacacgtttcttgtacatttgagcttcgttacgatgatttgtatcaagagtgaaaaataactacgatttattatttacagtttcagaatatgatttgattcgatgtttaatatgatttcttgcacagctagaaacaaccataatttcaacatttcatattagcaattcctccgttaacagccgtttgacatttttaaagtaggctaaaatttgggtaaactgattttttaactaataatttttaattttatattaactacaactattattattattcgtttataaaaatatcgaaa

SEQ ID NO: 50541 - DNA, 614 bp, Arabidopsis thaliana landsberg
atgcatgaagtaataatacactgattgtagcaaaaaaaaaacatgaagtattactattttcggtttaaatatttaacttgatacgtactatatcagaatcaaatttagttacaaaatttaaatacgataacctatttcatttttgctatagtatatatctgatttgggaatttaaaatattttttcatgtagtttaatcatagaagcgagatgaaattttttagaaaaaatatatgtgattcgtattatatatatggttttagtttgaataataaactattttcttaaaagttttagttataaaagttttataacacggtaactttagtttctatttgtttgtatcaatattttaagataaatattaattaattatatgacatagtacacataatataatcctaaatcataatttattcttatgataactctttatgaattattaatatgccatatgccatttcgttataaagagtttcaggattaagtaaaaataattaattaatgaaattagatatacatttggttgcatattttataacatattatcaatagatatagtgacatagtatctagtactaccattttctactaaacataatttgatttatatg

SEQ ID NO: 50542 - DNA, 494 bp, Arabidopsis thaliana landsberg
agggcagtcatagattcttagtatgaatgaatatactataggtttggtggttatatattgtggatttgtgtgtgcgttttagtgggtataaaagataagggtcttttctaggtgtccccatgaaagagatttgtgtctatgtatgtaagacccaacttttcttccttttcattcaccagacatcacccaccacttcatcattgtgcacatttacgttgtatatatgcatgtatgactgtgtatacacataacacatgtaccatgtatgtatatggttatcaatgtgaatcaaagtgtcacacaacaggacgaaagtgagtataaattgatcggatttgacttatttaaagatcagtgtatcttgagctggttttattaagattaatatttgattgattatagggtatgataaacttttaggaatatttgaggttgtaacaaaactttcagaaaattttagtggctaatgatgtgtcacacacaacatgattcgt

SEQ ID NO: 50543 - DNA, 674 bp, Arabidopsis thaliana landsberg
gaaatctgtacattgttggtatttctagcagtatcttcaactcgaaattcatcttcttcagatgaaccaaacacttgcctctcggtttccacttcatcaccagtttcaatgttattaaaacacatttttagaatactaatatctcatgaaagtgtcaagaccagcctccatgaacaagatagaatagaagcagcatcaagtaacagctaagattctgcagaaacttcccctctacactgacataacacttgcacatttcttctttccccaaacttattctaatcccttcaccaaaacctcagcccaataagaaacgagaaacaaaaaaaaaagcaacattccgtaagaagatcacagtctcacaccagaaccaaaaaataaaaaactgaatttggataaatcatcaaacttgtccaaagaaaaactaaacaagccaaatcaaatttcaatagtagcacacactcagctttagaaaacaatctgaaacttgttgtttctaaaatcaaaagctatcaatgttccaatggaaaattatcacagtacttggtaagtagttaacaaactttgaacacagtttcttttattcattagatgattgtaaagatctcctactttctcaaatttcttataaactctacagaacccagatacaaaatcaaactctaaggctctaa

SEQ ID NO: 50544 - DNA, 538 bp, Arabidopsis thaliana landsberg
  unsure (1)..(538): unsure at all n locations
cgcaatattatatcaaacaaacttttcttaccttttacagattaccatgatcttggtgatgcaacacacatgtgtgagcattgtaatgctttcatgtggtatgatgagcgtgtcgacaaaagttttcaatttgctgcactcatggaaaaattcaactccctatatcaccaatgcctccacagctgctccttgacctgctttatggaaacgatgaaatcagcaaaaattttaaagagaacatcagaccttatgacaccatgtttgcatttacttctatgggtggaaggatagatacatctataaacagaggacgaggaccacctattttccgactgcaaggacaaaatgtccataagattggtagtttgcttccctgnnnnnnnnnnnnnnnnnaaatttcagtagatgtatatatatgatacttctaacgaagttcaaaacagaatcaacaacttcaggtaactcttaattcttaaacataatctacatacattctttaattttcaaatataatttngtttttcatatatactacttc

SEQ ID NO: 50545 - DNA, 473 bp, Arabidopsis thaliana landsberg
gatcctaacctactcgtctatggtccggtagacttgttggccactttgtgaggtgctacctttgatgccaaggattatcgacgatctgctcatactcatggtatagctgctgatgctaagtctatctatgtagtggatgtaaagaagcaagtcgcacaacacttctctagtctatctaatgctggtgcagcttatggatcggcagagcactatgcgacaaaagttcgggcgaatccgtgacactaatgaagtcatggataacctgaacgtacaaatctgcaccagcgcgtaattccgaaatacatatcctgatgctggtgatacatacgatctctctgatggcccgaggtgagggttgtatatagttagccctatatgtatcctctcaggtatctcctccccatacctatacagacatagactacctagagttagagtatttgggtattgatatcctacgcaatgtgttgggt

SEQ ID NO: 50546 - DNA, 991 bp, Arabidopsis thaliana landsberg
atgtccatgcatatgttacgtgtagattgaaagggcatcgagatcatctgtggagttggaagcaagtaaaaatagccacgtgtggaaaaagcaaaagaagagaagaagaagatataagcgacgaaaggagagaggatatgtttcctttgtgatgggaacatcacaactctgtctctattggtacttctagttcactacttgtctatgttttttctttcagtacttagtttcccccacgatttacacaactttcttctgctcgtatttacagattttgaagattatttatacatctttatatagaactacacatgaaatcgtatgaaagcatgcatgaatcatgattcatgtgtgtgaaaattgacggtatgaagatgtgtataaattttatacatctgcgaaaatcatatcttgtggccaaatatcgaccaattggaacggcttgcaaattctatgaaaacgatcgatatgaaaatctgatttacatatataatagtattttcaattaaaaatcattttcctcaatttctatatatgtgtatttagcatatatatatatatcaaataaaccaaataacttcaataataatttaaatatatgaaaattaaaaaaattcactactcatatgatataattcatcactatagaacttataaaataagatcctggtaaaaaaagcatcaatcttgtatttcagtagtttataatgttaaaatatatgtaatcaaacttctcatatttttattaaaaccacacatgggctatctagctaattcacacacacatatatatatattgttttcgattgtcatgatgatcatttatccacgtaagcagagacaagatgtaaaatgtcactagtttatagggagtggagtgggaataaggaggaaaagggataaaattaaaggaaagggttacataattttcaagtcgattttgggttgataattacaggagagaggggaaccaacacattactgctatacc

SEQ ID NO: 50547 - DNA, 229 bp, Arabidopsis thaliana landsberg
aggttgccgccgaggcgcctccgcacgctgtagtcgccgttgagctggacagacgccgaatgcagctttccccgcggcgctgacaggacgtcggcgagccgctgctcgctcttcgtcagcggcttcggcgccgtcgcgactttcatctcgtcgagcagctgcaatagcagcacctgtcctccttccagaccgtgtccatcagcgcaacgagctcctgtgacactgggta

SEQ ID NO: 50548 - DNA, 3022 bp, Arabidopsis thaliana landsberg
  unsure (1)..(3022): unsure at all n locations
aatctgtcttcttggaatgttttttatagatgaagtttattttgtttgctcaggacagtacaatatagtgattgaaattttacgtcttcgaggtgtgctaaaatcttacatcaattctaataaacatgctctctctctctctctcaccccttggcagagacgatgttactgagcgtgaagataaatggcatgtttatgtgactggtcatagcttgggtggcgcattagctacactcttggctctcgaactttcgtccagccaattagctaagtaagtactttgagaactcccttctcctacatatcaacctgacgacaagcagcttaatgggcatttaacatgatttgtgtgcttgttagacgtggggcaatcactgttaccatgtacaactttggatctccaagagtaggcaacaaacaatttgctgaaatttataatcaggtcatatgcttcttctaacataacaatttttagttgaaaagtgggagtgagatggcacgtcgtcataaaacctcatggtttatatgttttctacgttcgcagaaagtaaaagacagctggagagttgtaaaccatagagacataattcccacagtccctcgcttaatgggctattgtcatgttgctcatcctgtttatctcagtgctggagatgtggtaagcctgccctttgatcacactatctaatctactcagatcattatttcttatttttccttcgaggtgctattctatgcgattgtaaatgattcatgctcctagttgtgttgtcttgcctgttgtcactggaaacatttggtcttctatatagcaactgtcatttgtttgattctgtctggctaagtatctagtataacctgcaaaaacgatatgtgatatataatatttctttgaatgtgactacctttttggccttactctgcagtacgagctctgtaagttatacaatatgattttccaatataaggtgattaaaatgttgcaggaggatattgagttccagaaagatggttatcatgctgaggtgattggcgaagcgacacccgatattcttgttagtcgatttgtaagtgctctaacactctttctctggttacttcacattttccttttgatcatgattctagttttaattttcctgcttgtgtttctcataaattctgcatatgtttgttgttgggtttatgtatttttcatagctaataatttaatagggaaaaaaaaagagatctctaaactgaattatttcctaagagctgctcctaatactgtcctataattataggttcacatttactagcagctattttattgtgatggcttcatatgcgtcaatgaacttaaaacttgttttccttctgcgtagtctttttcatactatctatcttttctgggattcagaagcttatgtatgggtattattcagaagatgtagagaggcaaaaaatatagtgaaaaatattccttgaacaagaaaatgagtgatttcctgacatgagattaaatggatgttttctttcagatgaaaggtgagaaggaactcgttgagaagatacttcaaacggaaattaaaatattcaatgcacttcgtagtggaagtgcccttatgcagcacttggaggatttctattacatcacattgttagaggcaggtcttttgttgntgccacttaagcaattgctgattattgataagttgtcataacacaacgtataactccatgcattttttcctttttcttttcaagaattacactgtgacttaaagttagaaagattcagtccctcacaggatagtgacatttaaacatcgccaacccttttttggatggagcatgtgttggtttgagactgctagtaatttccatatctcattggcatcattttttgttgtcaatcttttcagagtgtgaagttatattacaaaactgttgaagatccgaaaggcgttgaaagtactactatccaatcagtgggagagagctaagtgagagcatgtagtggctcgcttcagctgtataggattcacactgtatactatatacaagagacaagcatccattgtaattattttatagtgatctgtggttcagtcgtgtaaacttaaacgtagacatggtatcaaaaggggacaagatggttggaatttatcacaatgcgtatagatgaaatttgaacattatactctcactgcatgctcagggagaccttgcagggaatgttatttttggctaacagggaccgttacacctcggacctcgcctctcggttggctagtttcagcattatttacatctgtgagcttttcaggagaacagctgcgggagaagtaagttatctcaatccttaagctttcgtttgttttggaacctttgcacgcagatcttatttttacgttctaagtttctacataatcgtagatcaatctggaaacaacaatcttaatccctgatcattcaccgtttttcttttccattagattttcttgatgctggatatgttacttgtcaagtatatacaactttctttagcgtcatgagataggaaacaaatggcttattattgcttgaagcttactgagtctacttatacagcaatccttgtggaaaagtaccttcaaatgactaaaacagttatttacacccgatgaattttgttttgaatactgtcaggtttctggtagtacatgatagtgccttgttcttcccgctgctaccgccgaggatacgcagactctgtctcagtaagtcaatctctctttccttcccattttgttgtttctccatcaaatttattctccctttgagtgtctcaatggtttctcccctagctttaacttcctttctgagttcttgcactgcctttgcaacttcttcttgcggtttctgtctcagtgcctctcctacaaaagaaaaaaaaaactcattaccttcctttctcaaaacatcaaagatgagattatttgtgaaaggtcttaccatatgctgtgtggatgagatcatcaagctcatttcttgatag

SEQ ID NO: 50549 - DNA, 394 bp, Arabidopsis thaliana landsberg
acccggttcctagctcttcgcatctcttaatttaatatgtatgcagctgcgcaaggaccgatatttcactgttgaaggccagcatatgccttttggtgcatctccacaggtaaagtctgtcccttgtcttattttgcttcttctttgatctttggaactaatcatttcgtgcttcgagcaggatgtatggactgaattaggtcgaccttgtgggatccacccaaagcaggtgatctataccgtatctctaaacttgtttgtatatcacgatcagatgcttccattagcttctcttactatgttacctgcgttatctgttacagttcaatactcaactggacatttgtatttctgcttctgaattgtcctttgctttccaggtagatcaaatggt

SEQ ID NO: 50550 - DNA, 453 bp, Arabidopsis thaliana landsberg
ggttgtcttggaaggtatgggaagagcacttcacaccaacttcaacgctcaattccaatgcgaggctctcaaggtttaaacctcacttgacagaaaatttcagctctagaactgttattgaaacttttggctgaaaccttctcttcctttttggcagctagcaatggttaaaaatcagagattggctgagaagttgataaaaggaaacatatatgattgtgtatgcagatacgagcctccctcgctttaacaatgttatgtatcatttcttcaacctttagactactgttgtatacagattaagcattcgtcatgtggcatatgtatttttatttagactacacttttactgtataaaattgtatttgaatgaatcaaaatcacttgctataaagagcatcatgagggttcagttacatttcaagaacaataacgtttagtctgaaattatcg

SEQ ID NO: 50551 - DNA, 478 bp, Arabidopsis thaliana landsberg
ctgggcatggctatcttcgagagactcattcgtacaaccactacttcaactactaactcagattcctcttcaagtcggggccttccgggtatggattctcgggtcgggtttaacggtgctgctactaaactcggttatcaatctcccaaggcaagtactttttcactttattcttctctaaaaataattcatagaataaagttcgtaacacacaaattccttaattgtcgcattattgtctacttactgttaattaaatgttgacacatttttgactaatctgattttgacacttagatgttaaactttggttttagatgggaaaattattgcttttccttaatagcttcgaaatttgtatttaatgaaccaaatgttggcttaagaagaaaaaagctccagtctttttgattaattatggctaaaggttgccattttaattttggagtaacttttgatttgatgtgaacacttcata

SEQ ID NO: 50552 - DNA, 585 bp, Arabidopsis thaliana landsberg
tataacctttagttaatttaatatgtatatagtatcatatgatttacccgtaataatagatagatttgcagctacttgacgtttatcataagtagatacttggtcaaaaggtttgccaggatacagatctgaaaagtgttgtataaatcctttgcatactgtattataacatcccgttttataaaatccatcgttctattcaaaacaaaagaaagatttcttttatatatattaaatttcatggaaatatatacactatacattatttaatatttttgacataaattttttcacagttttcttaccgaccaataagtcgtgaagtgagtcttgttatcaccgtaaaactttggttttatctaaaagcaaatgaaaaataaaaaattagtggtagccaaagtaggttttacccttcttaaaattttggtttacaggggaaaaaattgacttggtcttgtgatgatgatataccacatattaccgttttaaaaagtaagataaatagctaatagtattgtttagcccaattaaaaatagtaaatagtatagtaaaaaagtgaattcgtaaaatggcgaaaaccggaa

SEQ ID NO: 50553 - DNA, 275 bp, Arabidopsis thaliana landsberg
aagtccctaaaaaggaaaaaaaagaccaaaactcggtttgggccggcagccaacctattcagcccacccaagctttcctcacccgcgcagccaaccccgtcgctgctactgcgctgttgggcccacgcaccagtcgcacttaaactacccgcgcgcactgccttctccctctcgctctcgcgcactgacatctgggcccgcgttgccagggtcttcctcatcccgcggacttcggatgtcgttgccgccgccgcgcaaattccggccagctggtg

SEQ ID NO: 50554 - DNA, 610 bp, Arabidopsis thaliana landsberg
aaagcatagaacaaagtcaagcgtaaattgatttttaaagaacactaatgacatgagctaaatatttaaccagaagttgattaggatgaatctaaaaataacatagatagaagacacaaccttcaagggaaaatgacacagattgaagacgcactcttcaaggacatatgagtagacaattacgaatgagcatcattaggtctactattaaataattttatgtcactttcttgtgacgtggcagctattgttgaacactgctatataatttgagactaaaattctcaagagtctgaattttctaacgcatatgcatctagaatctgttatttccaaatgtatattcaggtgaagtttcaaccacatagatgtactatgggatgtacatagttttattcttttttaggaagcacctaagcacatgttaagagaggccttacattgtaataaatatatggtaacctctataattcatcagaatgtattgcaagctacagccgagatccaatgcgaattgttgtttggatggaagcatagcgtatcagtatcgtcaagcgagaatgggggactagaataggccccatgaaccatcctagggtttggggtgggg

SEQ ID NO: 50555 - DNA, 536 bp, Arabidopsis thaliana landsberg
actctacatgcaatgctaatcaacaaaacaagaatggtgacagagcttacgaacactccacagacaagtgccttatcaatgaaaccccaatttgctacgctgcttccctgtacgacgacctcttgtacctccttctcttctttctttgactttcccttgttatcatcttgtcctgagatatttccagaaatgttacacgcctctcctgatctctcttctccacagctctcagcagagcaagtgcaagtctcacaagtgctaacattcgacgaacaaggcagctttgtttcctctcgggattttgtttctctatttgcagagctaaatgtctcaatcacttccccaaatactgaccatctccccacagatgttatcctcgccatagctgaagtcccaagcatactttctggtccagtaactaagacctgtacatatcccttcgtatgtcaacctacaaattcaatttataaatgaaacagtgttggcaatcaaagatataaaaaaaatatagtagcattcagttttatttgatatgg

SEQ ID NO: 50556 - DNA, 993 bp, Arabidopsis thaliana landsberg
cgacacatgcgtggcgatgactcaccttatccatatttgatattactttttctagtactccttgtttttacatcactttctggtaatatttaattagaaatttagaaccctagactttgacacggtaaattttaataataataatatatagttgtattagaacagttaagaagtctcacgagttcataatcagttttgcttactagctaactgtataaataattatgctggaatctaacaattcaaaattaactttgcttgagagttttataccaaacacaaaagtacaatttagtctagactctagaaaagataaattcttattgcgaaaaataaaaattgcaatatatatacaatagaagttttgggagggatggtttggaagttttaactatctccatgactcgacatataaaaatgtaaatatcattgttcagctaaatgagctaccatcgattagttaaaaataacattcttttacgtcaaccaatctatggtttaggggttaaaattttcactctcaatataagaggaaaggtttaagtttttatcaaagttttccggttatagaaataacgtacgtacgactgttttctttttctgcttttttcagattttctaaaatcagtacttggtcttatatatagatcgatatgcaaatatgcaatggcgaagatacgtccctagcggctcctcttttgccaagaccatgtcacgatctatcttacaaacgttactcattttactatatctacttttttctccctaatataaatataacttcgcatatttattcatgaatatttatgctaagaaaagccatcacatgcatttatagtatgtaagcttatgtcgatgcagtacgaccatatccgtatatatgctgtgtgcgtatagatacgtgagatagttttgcttttgaggctcttttatctctcacatccgactgcccacgatcaatttcaaaatagacaattttaaagctaagaaata

SEQ ID NO: 50557 - DNA, 693 bp, Arabidopsis thaliana landsberg
tcatatatatgtaaatagattatatatatcaatatatgtttatatgttgctttcaaaatgtaacgtcgcttaccatcggcaatattattccaatttctttttgtctttccggtttcaatcacatgccaagccttagagctgattcaacatccaatctccaagcaaacccacctgatcttatcctccatacatcacacggcaccgtcatcttcctccacgtggacggctcgtacctaaccctaaccctgcacgtcaccgcaccgtataactccaccatgcatgctatctcctccataaggtccatggccaccaccagccacaccctgataacatccacgtcgggagctcccatcatcctccggtaggcccggtttacccaacagacccggtttgacccatccgacactaaccatggacacgtgtcaacctctaacatcctcatcactctctcctctgcctgatccatgcggcctagctgctccaggatgtgataccatcccaagtcagtacacgtgtcactcacacactccaccgtcaaccacgactccaccaccttgcgatcaaaagatgacgatagccctatgatcgaattatacaagctctcatttggatccatatcactcagatccgaacaaaactcaccaagctgatcgccattggtggctatatctctatgcttctctggcagcagct

SEQ ID NO: 50558 - DNA, 629 bp, Arabidopsis thaliana landsberg
aaaacctgcgggggtggttgccttacaaaaactaacgaactttcgtgttatttgtctatgtgataggggttggtacatgcatggggggggattaagttcttttgggacatctgataaaattgggaagatgttagcatggtctaaataaaaatgttcttgtattatacttaaaaaaaaaaaatcttttctttgtgtgtgtctcaatttcactatatgacaaaggaaaatgttataaaatgagaatcaataagctaatatatgattattcaaaattatattcggggtccaaattttgatttctctacgtacgtaatcttttgatatagaaattttaagttatggattacaaatactcgatttattttatgaattctcctattctataaataatcgtgagtaattgaattacttatattcaattgttattcatcattcattgattatatatctgaaattatttaataattatctataaatgtacaagattattacagcttacaattttgtttttgttgcttagtgacattacattttagacttttttctttgtcaaatacattttagactaaatggtgttttcttttgaaaaatcatatactttacgtcgaaccgcgacttagagagagaaa

SEQ ID NO: 50559 - DNA, 960 bp, Arabidopsis thaliana landsberg
tggggagaacatatatttagcttcttttttgtttttttctccaacaacatgcattggttaaaatatggattatgacttacaacgatagtaatacaaatcctggtcgattaacaatctaatagttgatcaatcatcactgctagaaacagtgccgcctaacagtacccctgaaaccataaatgggtttctagttaggtggtagctactgaaaacaatataaattagtaactacaacataccaatgtaaggacgtgaatttatatttgtcctatcaatctttaattttataagaatgaattagtatgaatcaatggtaaattaattgcaggattaataatgtcatattacaagatcttcataatatctcgaatggccatgcatctcgcatctaccctaaaagtttatatacaatgcatgctttttctcaattattgtcaaatttatattctttctctaatagaaaaaaaacttttaaatcaccaattgacttttcttttcgaaataatggaatcatatatattgacacctaataaattaaaatgattaagaaaaacttaatagtgaagaattccgttgctgttacgagcgaggaggagctctatggccaaatttaatatcaagaaattgaaaatattaaaatgaataccaataaatgtttttcttctctatataatgatggtgggactgactgggaacggagcttcgaatcaaagaagaaagccaactaccaaagacagtgtcggttcgacggcgatggcaaatctaacggcaggagaaacgtcgccgtttcagatcatttattaacgtcgaaaacgagttttattaaaaaaattattttatttgatccaaaacgagatttatttttatattatcaaatcatacgttacgactttttacgcgctttttcaccacacgtaccattagcaaatcatacgttatgacttttgcgtaaaaggtaaa

SEQ ID NO: 50560 - DNA, 810 bp, Arabidopsis thaliana landsberg
gctgcattgacttgaagtccctgtgtgtcattttatatccatagatcagagtagaccatgactcatgatgctttctgcttttggcatttggtgttattgatatcattcctattttaatggcatttatgatctggattttaatagctacagtccctcttggtgttgatattctgaattatatttttcctccaccaatttatttccatcgaagtcactacactttacactaatagtgatatttctgttgggacctgatcttcataggaagtgcctagttctagatctgatgcgatgaattgattaaactcttggtgaagcaatttctgaacgacataaataacctgaatgcgttgttgttcttgggatagtatgtgataacatgtttactctctcttttattttgaaggtttacactaagtgtggaaggcgtgctatgcctacaatgatgatggggtctgctgcaacttttattgattgtgacgatagctggaagttgttgcttgtacaagaaaaggatctctatatgcatgggatctattcaataggaaatgcgttcttcacgactctttatcttctttggtctcttccgatgtcaatttatcttgcacagtgaaaggtatgcttcaatacttgaatacattactggcttctcatagtgtaaaacacgtctcttgaggcaccatattatattttgaatcggatggtatgggtaactcattcaaaagaatgaagaactggtatttactaattctcctcgtgggtgacttggtcgtggagttactatcttggtatgaagatagctctgctatt

SEQ ID NO: 50561 - DNA, 2510 bp, Arabidopsis thaliana landsberg
tttactcagtgattggtgtgtaaatgtgtggttcttagaatgttaaaataataccaatgaatacctcgatagcattaggatgaagttggcagttgtgagctttgacatgatcagcaatcaggcgtacagcttgcacggtcagctcaccaccatgtttcccttcatttgagaaaagatacctgatagtagagcaacagagtctcctgcatacccaaaccggtgcaagaaatgagttagataggaacgaaatggatgcaattgcagtaaaatgacatgactatgacacaagagatattaacagttctactttaggttagattccatggtatatcagttagacattattcgtcactctgaaaaagggttaaaagaaccaggaccttacgacttcatctggggagctgatatttctgacaacagcaattaacaggttatcacggtagttgaagtgaggaactgcttccagcaatgtacaaaggcaccgattggcaatttggttatatactgactgcttttcaaatataatcaacttctgcagatatgactgttaaggacatcagaagcaaaggaaaacgtgttacaattatactcagagaaatcaagaataatatataactgacatgcacaccttgtaagcttttaataaagtcgactcatagaaccgagttttcttcacttcctttgagatcttcatctcgagctccttttctgtaggaagtctaatccgatagctggcaccacaaaaaaaataagaagagctaattaccaacataattaaagggggagaatgaagagaataattagcaaatcaaatgaggaaaaaaggtacatagaagattaataaaattacccaggaataatatctttaaatacggccaacagagataacaaggcaagtttcacaatcttcgtattctgatccttgcagatatctaacatatccttcaaagtttttatgtttgcctctggatcagaaagtagtagcattcccaattccgcgattttatttttcttattttcaaatgactcttcagcagatagttcttctttcacttctgcctgatgaaggaagagaatcattcacacgttaaaaaaaaaatgatgaatggatatggaaaacactaaaacgctccaaattacaaattacaaataccaatgattaaacgttcttataaattcttttaatggaaagatgttaaacgatgaagatgcagaaagctatcaaatatgatgctcaaaatgaaaaatgatgtcaaagaacgaacaatgaaatttttagcaacttatataatgaaccaagaaaaaaagagaaactcaaaacaggcaataccagaacagcggcttgggaagtttcttcttcctcttgtaatatctcatcaggcaaatctttctcatgtttctttgcctcccttttactctttttagctttttctcttctttgagatttgttcaatacatgttcatcttcaagaacatccttctctgcttcatctgtatcggcttcagctagttttgacttctttgactctgaaccagtagccacaaaacagaaaaacctccacttagaatgctacttaactcgagccattaaacaaaaaacaaaagagtcttctcatttctcacctgttcgatagtgaagttttccatctaaagtcttgacagggagcacatcaacaggatccacaaggatctcgccattccctttctcttcctgaagtgtcttcctctttgatcgttcttcttcatacttatcctccactgtcattactctaccaccacattgcctaacaacagcgtaacaagatattatcaatgcagagattcaaactcgattcggatatagcaagtattgattgtggtaaaatcaaccctaatactaaaaatcaccaaattgcaaaacaattcgaaaagagacgtaaacgcacttattgatagcggcggtgtcaatttgagagacgaattgggcgtaatctgtgttctctttgacatacttcaaatcctcgtcggaaaactcaatatccttttcgttttcatctggcggaagcagcggtggaggtataaccttctgtttacgcctatttttgcccattatcaccactgactcagaaccagcaacaaagaagaggcagtaatggaattggaaaatgaaaactgtctgcacacacacacaaggatatcgaatcgaacaacttcaaattagggtttagggtttttgtgaagagggtggaaataataaaataatattaaaagaaaaacaacatgggctaggcccatttattgatacggctatgtttaattgggccaaaaagaatctctctatggggattcatattgggccaaaaaatgtgctggtcaaacgttgtcgtacgtgcttcataatgaaaaacatggacaaataatgaactgttcacattttcggatatacgtatgacttataattacatgtaactatgagaaatcacattgttatacgatatcgttttctcgtcttattttgtttggtggttttc

SEQ ID NO: 50562 - DNA, 380 bp, Arabidopsis thaliana landsberg
  unsure (1)..(380): unsure at all n locations
tgactagaagcagcgtcaccagagggggaagctgcaatatccaagttcgtaagcttnnnnnnnnnnnnnnnnnnnnnnnnnnnnnnnnnnnnnnnnnnnnnnnnnnnnnnnnnnnnnnnnnnntcgtgagcggcccttcctccagttgttgtaaaccagggcatgagataccaagatgctgcttgcgtaaagtcgtctatttgcggtaggagtctcgatccaccttgccgggtgggcgcagagcgaggccggatgcgggattagctgtgagtagatgctcacggtcgagagccattgagaaagtacagctggagaggagatggctctcggtctgccccaatcagacgaagtggcggtatgcagggattaggcgtaccaac

SEQ ID NO: 50563 - DNA, 590 bp, Arabidopsis thaliana landsberg
ttcctaacaacagggaaatgttgcagaattctagaactatttctttgtgcccctggcattggaacatcaatctgaaagatcaaggagcacgcacatcatatgtcaagctactaatgtagacagaaagagtgtcttttgagcaagaaacaatcgtccaaaatgagcgttaatataaaaccacatggtacgaaaacctactggtgattggtaatgccatgatcatacatccgtattcttcacaaagacaacaacaacaacaacaaaaaaggctaagaagcattggttaaatgttgtagaacaaaccttggcgttgtgaaagcagagaacagatgcagaaacaatttcgcttatgttctgcttttcattgactatagtctttaaatttatggctgtaacaacagcaggagggtgaaccaccttttcctctgaaactaaaatagtgatatccttgggagattgaacagtaacctcaaacttgcaccaactcacctgcacaagtggcaagtcctctcattagcggagataaacagaactagaaaaatcactgattatatgattatagcacagatttaaggtcttactcctttccg

SEQ ID NO: 50564 - DNA, 679 bp, Arabidopsis thaliana landsberg
atagcgaaccaaatgttgtcggtctctgctttcatgatgtgtataggctttggctttgtataaaagttttccacctcaaatggtttaaacgtgaatcacgacacaaaagatgaaacttgaatcgaagttatgtataggacaggagtgaaatggtatataagcacaagtgaatgaaagaaatggtaagacgtattagaatgcacctaatgggggcaataaaatattaaaccgaattgattggtaaccaaaaaaagagtaaagagttttcagcaaatcccattcaggttttgtgctaacataagattcaatagaagaaaccaactaaacagaaccattaactcttcttcttcacaagcacctcctctgtttagaaaccaccaccaccatcaccaccttctccatagccaccacctcctcctccgtacccaccaccacctcctccgtagcctccacctccaccactgtatccaccaccacctccataagcccgtggagcacttggtctatcattagcaggattcactcggatgtgacgaccattcaattcctgaaattccaaacccccttaactttttttaagtaacccttttaaccagaacccattttccctttttcgctgttttaaacccaacgggggaaaccttttaaaaaaaaaacccttttttgccccccttttttt

SEQ ID NO: 50565 - DNA, 549 bp, Arabidopsis thaliana landsberg
  unsure (1)..(549): unsure at all n locations
aacaacgcatgagccttagcgttatcattctctacgcgaatcacaatcgttaactgcgtttgcaaaactccaactatatcatacctgatcaatcaaaccgagtaaaaaaaaagatatcgatcataaatgagagccaagattcatcatgatcaataaagagaagagttgcggaaaatataacaagtactttaagaagtcgaggtgagcatccgcgacactaatgatgggaactcgaggatgaatgaccaggtaaccaacgaagactataatgccaccaacgattacaacaatagagattatggcacaaatgatggctgcacaccagatgaaaggactagtaccatgacgagaagtcaatctgggcattattatggggtttaccggatcggattctagttcgggttcgatgagacagcattcaggctttgggaccaacgttcttggccttttggtgggtttggggtaatgtttgagagaggataattnnatttgaaggatttggtacttaaccctacttggtgggaaagtcttggtatctttctgtacttc

SEQ ID NO: 50566 - DNA, 964 bp, Arabidopsis thaliana landsberg
acatctagaggatccccaaatttaaataaacccattaaagcttcctaccaaaataaaaacctttaaagcttattttatttatcactaaaatcataaaaccactaattattacctaaaatcggtgaatacttcaatttgatgtaattttacttttaacgaattaaataataattataccaatgatgatgggccaagcaagtcgtgcaagcaaagagttaagctaggtcccactctcataataagtccagaaaatggacgatctagatctagtgtagtctctatccacctctaatcttcaccgtttgttattacacaagtcaaataaggataaaactgtaaattcacaacaaaatcgtcgaaatatcattcactggtggaggaaactggagaaaacgatccgataacagcattttctattttcttctgcgcctcaaaaaatcataattttctcgggaaaattaaaaatcatgtttaagattttctcgagaaagtataaaagggaagaagaagaagaaaccatgggaagagctttcgtgtatgtaattctcggaggaggtgttgctgctggttaccagcttctagaaattcacccgactaaggtgtctccgatgacgaactctgaatcatttccaaagaacccgtaagctctcgaaatatctctttctcaaatgaagcgattttcaatttttattgtgtttgataaccaaatcatcgttgttgttgtttggtccagcatcgttttattctggtttttcagatttttgagtgactctgtagttgattttactattagtagttttgattgaagatttggtggtttgatgattattagattgaaactgattatgtttgtatttgcttgagcttctgatacttataattagaaagtaaaaaacgaaaaagatataatcaggtgtaactaaacgtatttttagtgtgagtttcgttaaagattaggggtttc

SEQ ID NO: 50567 - DNA, 396 bp, Arabidopsis thaliana landsberg
tctatccaaatgatgcctctgtttactgtcatgttacatatatttggaaaagaatgctcgaacgggtcgattgaaccgtttcactagaacgcaccgggctactaacagggggactgtctgagaaaatacactggtacgtgcttgattttatactctcagtgatgccgtagcactacatgacctggaccgatatgggagcatacactgctaacggatgtatggatcatttataacagaggagcactggtggtcccctaccgctcggacgtatcccaaaaccagaacaaaaagtggctgccacgtctgatcatctctggatcgtaccatatatgcttctgtggcgcccattgagatcgaaccctagtatgctccagcggcgggcaccatgcttatgag

SEQ ID NO: 50568 - DNA, 458 bp, Arabidopsis thaliana landsberg
tttttttttttttcttttttttttttttatttttttttttttttttttttttttttttttttttttttttttttttttttttttttttttttttttttttttttttttttttttttttttttttttttttttttttttttttttttttttttttttttttttttttttttttttttttttttttttgttttttttatcttttacttctctttttatatttttttttttttatttttttttttttttttttctttttttttttttttttttttttttttttttttttcttttttttttttcttttttttttttttttttttttttttttttttttttttttttttttttttctttttttttttttttttttttttttttttttgtttttttttttttttttttctttttttttgttttttttttttttcgttttttcttttttttttttttttattttt

SEQ ID NO: 50569 - DNA, 429 bp, Arabidopsis thaliana landsberg
gtgtccttgttactagcttcttcttttctatgaaatgacgaaggggagggccgcgggggtgactccactagtacacagaagatctatactggcggtcgtaaactgatttttagtggcgtttatcgtaaccgccagtgctagggccagtaaaaatcatcatttttacatgcgggtaactgaagaccgccagtgaaaattaattttcactggcgatcgacgtaataaaaccgccagtgaaaatatatcgttccacaggtgttgagcctttttctactagtgctcttctcagatcccttggtctatgtaaatggggggagaagtagctaacacgtaaaaatgcacaagaagcaatcatacagatggataggcttgaaactcctttccctgtggggcaatctaggacgatttatatgggcagtgcgccttcca

SEQ ID NO: 50570 - DNA, 1014 bp, Arabidopsis thaliana landsberg
gtaaagaacatttaatactcacacgttagtaaggatatacctcgtggagctcgtgaggcatacatacgaaagaaccactcgcagaccttttccgtgaaagccacgcgctgcgtagaagaaacctgatgaccgaattcagtctatatagtaagagcacacagtctaaatgtaatttcaagaacccaaagatatcaatatgccacaactcatctaaatgtgatccagtctcatcaatgaagttgtcacacaagtaaacctggattagatcaaagccacatcaagtttattgagttctgattttggtaactcttaacttccacaaatgatagaaatgtaatggcataaaaacaagcaaacgattttacaaacatttacattagtaaaaataaatatatcctatttcttgattatggtatcagttagacaccaactttcacagaaacagaccatagcgaacagtgaccaacaccctagatcttgttgctctttaagattccacaaaccatgaacccaaaaaagatatagaacaaataattcatataactatgctcacacattgtcaaaccagtaccaaacatatgcactacatggtacccagaaatcaacattttcagacaactataaccaaaattacatacagaaactctaagttcatgacagaacagacccaggagaaaaattcttcctctaactggcgtagtgtattcataaagatcagcaacatacaaataaatgttgaaagccaatgaaaacaatggttaccaatcgtatgctagaatgagtctactccatgtattatatgatcatgcacaacaatgaacaagaacaagaatgtgaatgtgaatcatttcatagaatttagatttcttagagattctagcaattgttattgaacgcagaagtcaaaatgatttgagtttttaacttctgcgactgaagaacttggccaagcgtaaaactttctttttcttcttgattacaaagaaagttggagttccaacagatgagtatctc

SEQ ID NO: 50571 - DNA, 591 bp, Arabidopsis thaliana landsberg
ggctgtttcgttttgtaaggtatagtccaaattctggttctgttgattactcaatgtagctagatccaatctcaacgctcgatgaaatcttttttttgattcttttctggaatctagtagatttacagaaatctataccccacttttggtcgtttgtgatttaggtttaacgattttgtacagactagcaggaattcgcaattgttcgccgtctctgatgaagacggccatgtgagcttgtttaattcttccagtaagaagtttgcgtcttctgcaactcaccaagagaatacaggtattgtctcgtccctgttagaaccctgattttctctggagtttaagagattactgatttgtgtttgtttcaaatgtgtagagaaagctagatttcgtgactggattgctcattataatgctatctttgacatttcttggatcaaggtgtgttatattatgtctgcgaatgaaacaagaatttttttgtggatttaagaagaaactcatttgatgtttacttattgcaaattttgttgcagggagatagttgtcttctgactgcttctggtgatcaaactgtaagttgtgtactca

SEQ ID NO: 50572 - DNA, 876 bp, Arabidopsis thaliana landsberg
tttcttgtcatcgaatgaagtccttctgtgtttgaggttaaaagattgtttgttcttattttttttttaacttctgtgttacttttaggacgcttaccgacaacatggttgtgggagtatcaaagggatttgagaaaaagcttatacttgtgggtgttggctatcgtgcaacagtagacggaaaggagctggtgctaaatctcgggttttcacacccggtgaagatgcagataccggatagtctgaaagtgaaagtggaagagaacacaagaatcactgtgagtggatacgacaagagcgaaatcgggcagtttgctgcaacggttaggaagtggaggccaccagagccatacaaggggaaaggagtcaagtattccgatgagatagttcggaggaaggaaggaaaagctggaaagaagaaatgatcttcatttttcattattatctacttacttatctcttcctttcaatgtttatgtgtatttgctcaaatttgtttagaaatgaagatgtttgtgttgggattcttgagtaagtttttaaaggaacccattaattgtttttgatgctctgacaaaaatttctttagtgctttgattgaacaagaacttgggcacaaagtgcctcatcggtgcgattctattgttatgtttccttattgaaccaaaccaatccaaatcggacaaaaatcatggtagataaactttttaaaacaattttttaatctattcttcttttttttaattacaaatcttcttattttcttatatctaaaaaatcgtaacagtgagatattaatatctgtattcttaatttggtagataactttttaaaaaacgaaaatttcctataagaataataatagtcggaaataaa

SEQ ID NO: 50573 - DNA, 933 bp, Arabidopsis thaliana landsberg
tccaatatgagattcggaaaggaaccctttttcagttctcattgtcactccctggtggttttgtttttttttcattaagaacataagagttatgatgatattctcctgacaaaattctgtaactcctataattgaactatacgaatctatgtgtagaatataaaatggtgctatatactactacaggttatacgataaaaaccatgtggggagattcacttcaacatacactgctgagacaagaagatctaaatgttttcagcaacccctttagataaaaggggtcactactcacaatactctcacaagccacatagaatcactcaaagaacgagctcattaaacataacaatcgaacgactatgctaccagcatttcatcctaagagttgtatttctctcctaactaccagttgaagacagaacattgaggatgagaactaaaagtttcgacctttactcatccgcagcatgaaaagcaaagaacatagcgagtagattctagtactcatacaatctctttaactggtttaggttaacccaagcccatctcattaaccttcaaggacttgccaaaggaacacaagaacatgaactagtttttccaaagacttactataagctgcatcattatctctaaagctcacacagaatgaccaatccactaccagtttttttctaaatgtaaagtcacaagcaacgatctttaaagctcacacagaatggaagttacgcatcaagcgactaaagatcagaaagcataagaggcacaatggattgaattgcaagaacatcatagatatatataaagcccactttggtccaagcgtttgaaacatcaatagatataactaataatcactgaacagtgacaaactctcttttagaatcaaaggaactaaatctcaattttcttaatcactaacctcttaca

SEQ ID NO: 50574 - DNA, 560 bp, Arabidopsis thaliana landsberg
  unsure (1)..(560): unsure at all n locations
cccagcatatcctatgccaaacttacgtataaatgcggtttgtcgaaaactgatcgtcggctctgaatcaagtcactaaaggagtagtcttaaaagttgtaccccaaaaaaccaaaagactcatacagaaactccttagannnnnnnnnnnnnnnnnnnnnnnnnnnnnnnnnnnnnnnnnnnnnnnnnnnnnnnnnnnnnnnnnnnnnnnnnnnnnnnnnnnnnnnnnnnnnnnnnnnnnnnnnnnnnnnnnnnnnnnnnnnnnnnnnnnnnnnnnnnnnnnnnnnnnnnnnnnnnnnnnnnnnnnnnnnnnnnnnnnnnnnnnnnnnnnnnnnnnnnnnnnnnnnnnnnnnnnnnnnnnnnnnnnnnnnnnnnnnnnnnnnnnnnnnnnnnnnnnnnnnnnnnnnnnnnnnnnnnnnnnnnnnnnnnnnnnnnnnnnnnnnnnnnnnnnnnnnnnnnnnnnnnnnnnnnnnnnnnnnnnnnnnnnnnnnnnnnnnnnnnnnnnnnnnnnnnnnnnnnnnnnnnnnagtcttgatggcgcggcattgtcaatgttgtga

SEQ ID NO: 50575 - DNA, 718 bp, Arabidopsis thaliana landsberg
ctctatctcattggccggaatttgagaaaaccgtatcagttaatcaacaggtaaactccaattcatcagcagaacaatcttttgtgagaaatgtagagaaaagatctgttagggatttagaagaattattgaaagaagagagagcggctcgagcaacggtttgtgtcgagcttgacaaagagagaagcgctgcagcatcagcagcggatgaagcgatggcgatgatacataggctgcaagatgagaaggcggcaattgaaatggaagcgaggcagttccagagactggttgaagagagatcgacttttgatgctgaagagatggtcatactcaaagacattttgatacggcgtgagagagaaaaacatttcttggagaaagaagttgaagcttatagacaactactcgaagaaacagaggaattggaatgttctttaataaaagagaagaatgttccagaaccggaacacaaacaaaacaaagactgtcaagagagaagagctttgctcgttcaggaacttgatggaacggttctcgatatgccttatagagaagaaggaaacagagataaaaacagagatctgtataaatcagattcagaagtcgcgtactcacgtgtgcgtgatgtttatatggagaaggacgatacagagaacattagtaagacgaagaatcttgcagaatcctctgttggcaaaacctaaagactcgttggatg

SEQ ID NO: 50576 - DNA, 837 bp, Arabidopsis thaliana landsberg
  unsure (1)..(837): unsure at all n locations
taattgcttaaaatcttcgtgtcctcaaaagagatggattcaaggtcggcgcatataagatcattctccgacaaaacttccatgatatggttcctattgtcctgagtttggatcatgttcatgtcgcgttcaagctgcgatttccagctcactagatgagtctcatcctcaggaggtcttatgtcgatattataagggaaaacagcagagagcttctcatcaatttcttgagcgtcttcgcttgacaagtccacaattcttgaaccgagaatgaggaccggtccactgagtttctggagaagcttctggaacaagttgtaagttctctgtgagcggaacagaaagttctcgacgtctcgaagatataacacaatcggattcgccttggagacataggccaagacctgcacttcacgtttgcaagatattataaacaagatattacacataacacattacctttaaactctttatagttttacacataaccttatataaagattggacgagaagcttttcatcgaatgaccaactgctacttcgtttcaaaggcgctgaaactaagatcagatattagtcacgcgtctgaatgaacaaagagttatagttttaaatttctttgttgagatgcatatataataaccttgatttgaggaagatgcaaggttgctaatattagctgctgctgaagagtttcgacgaagctttggaggattactagagccttccattgagctgcatatatcacagatcacacggtgaacattaaaattatgcattaggttgattgcanaacattgatggatatatattcgcattgcattaatttgaagtaaa

SEQ ID NO: 50577 - DNA, 353 bp, Arabidopsis thaliana landsberg
tgagacggcacgcaacgcaattcagactcagctttatctacgaagaagaaagcgataattattgccgctatgactctcttggacagttcgatactggctcagcatgaccgctggcagcatgcgtaccacatgctagtcgcacggtaagtggtcgtcatactgcctgacgggtgactaacgcttctgcatctgcccttgtctcggtaacaacacatgcttgcggctgctaatgcgccgtaggctggaggagcaaaatgacacatacgcccgtggaggggctcgcgtgtgattagcccgcgtctttggcaatagctcaccagagccctagatcagtagattgcccggtcggatgg

SEQ ID NO: 50578 - DNA, 403 bp, Arabidopsis thaliana landsberg
  unsure (1)..(403): unsure at all n locations
ttgatttatttttaaaaatggtaggataggttcaataattaccaaaatggttggcaggaaccttaaattggaattgtggtcccaattcctttaccaatcctacctaacccaaatccgggatccaacttactaaaaacctaaaaggaactaggaccaaggagttaaaatccttaaggcccatggcctggagacggagatgagttccctggggcaccccaaaactggaggtctcccctaaccttaatcccccacggaaaatccctcagggggtgcgtcggtccggcaacggtcggttccaacttcggcttaggggccggagcggttgggnnnnnnnnnnnnnnnnnnnnnnnnnnnnnnnnnnnnnnnnnnnnnnnnnnnnnnnnnnnnnnnnnnnnnnnttggg

SEQ ID NO: 50579 - DNA, 441 bp, Arabidopsis thaliana landsberg
gcgtggtgatttctgatttgagacgctgccccgccctgccactgccaggaccaggagtaccgactgctgaggaaaacaaaaagggccggcaggaaggcgggtgggcttcgcgcacatgtccatggaccgggcgcaggggtggggggccttgggcgggcgcgacggcgacgggagctgcgtctcggccgcccgggcgtaacctaagctccagctgtctcccgttcactcccagctcagcttccactcttccgctctgctctgctcctctgccggcctggggcgcgcgcggtgggcccctactcccacccccactccagtcctctctgcctttttgattttggttagtacaactgctagtatataaactaatatcatatatctctatacgtacaataatataatgtttttttactagcgatcgaagacgcggccctcgagatg

SEQ ID NO: 50580 - DNA, 864 bp, Arabidopsis thaliana landsberg
  unsure (1)..(864): unsure at all n locations
tcggattctgttgattttgacttcttctttatatcctttaattgttgcaaaattcggaaattttgttacgagctggggattttttccacttccttgagattgttttagggtgaatctgaacaaagacaaattcgatcattgctgattgctttgttgccgttcctcaattccatgtatctggctcttacgattgtgtaattgaaatgagattatgatgaagaatgattcgtttgtttctttttgttctatctatacatttgtggtgatatatatatatatatctttgtttgaaacgttaatagataagctgctcatactagttatacaacagactccatagaaggtgacatttgtttaagatactcttgttcctggaacacatacgaagatgaagaaagtcttcggacaaactgttagagacctgtaagtattttcgtacccgaaatttaatgatattctcaatctgtgtgtggtttatttcttttttcattgacgggatgcttcattttatgttccatttattcagtaagagagaggtcaannnnnnnnnnnnnnnnnnnnnnngagtagaacagaaggtaatggatgctcttagcttcttctctctttttcttcttatcagaaattcttccgcagcagagatttagatactgttttccatttttatgcttgagtttatcaatttctttatttgtttctaaaaggcttttataaatagagagcttatcttggttgcattcatcgtcttgctaaacaatgtaaagcgagatatccaactttctcttatcttgttttgtctgtgctttctcttattcaggttctagatgctactagtaatgagccatggggtccacatggatcact

SEQ ID NO: 50581 - DNA, 628 bp, Arabidopsis thaliana landsberg
taatacggcgttgatcatcaaattagcctttcaagcctcagtctatcttgtgtggaaggagcggaaccaaagaatccattcctcctctcagaaaacttccttaactattgtcaaggagattaaggttatcttgaaggcgcgccttgatccgttggctcgtgcccaacggttagccagaccgggatcgtcggttctctcaacctggtttaggttgttcgggtaaggtctctatctccttttttccttcctctcttcctctttcttttggggcctgcgtgcctgtgttgggcttttgccttgttctgttcaggcctgtgtgcctttttagccttttggcattgtatgttctcttttaaaggaaatttaaaattaaaaaaaaaaaaaaaaaaactaaccgaacaaatttcgaatcaaccaaactcatatccatactaaacctaaattgtcaatgcaaccatacccataacacctttttattatcttgcccttgcaaacttcttgtctcttgggaaagaataatggcgtagttatatcaaaacaacttacccttttgtcaattacataaaattttacgagtttgaatctgaatagtacttaacacaatattagtataacctcactattttac

SEQ ID NO: 50582 - DNA, 1079 bp, Arabidopsis thaliana landsberg
ttatattctttatgattaaaaacgctaagtttcagagtattaagtacgcattttaatttcagaaaattggatcaaaagacattttcatcccaattacgtaaaaaaattcccttatttacaatttttgtcatgttagacatttaaaaaaaagaaaattagtttttatttagttaacttaactacagaaaatgtattcctcataatgtaattctttttgcaatcagcggtaggcgtgtttgtgagtttaatcgtttatgatgggttatttactaatttttaatgggctagcaatcaacaatcaaaagaataagcccaaatatatgaactggcccaacaaacgtattaacaagagttatatatcacttgatcggatgtacaaacaactaatccgctgtagcacttcaggctatcttcaaatcatgaaatattccgggttcaaagcccggcagcggaatacttttttcttttttgggaagttatgtttctctacattttgagtcttttaacttcgcaaatcattggagaaaggcagaattttgatccttgtgtatataaaaactttttttgtggttttactcagctaaggacagatcaacatccaatattagtctgaagtctgaaatttacatcggactaaaaacaacaaataaccaaataaaaaccattattgctgttttaaagagaaaccaatcaaaaggggttagagatttaaaattatgtgttccccttttcttttttaatcattctcttagcgcggtgtcccgcagaacgagcttttctcagactcccacgagtgatccttagtgtttcctccattatagtctctttcgacgatgacgctcgctgaatctcagacgctggttctggtaaagctgcgacagtctgtgacgcttcttctgcctctgttggtgatggctgtgctggatcagcgtttcgtttcgcggcggttgtgggcgatggtggcggtggtggtggtggtggtggtcctggtggagttagagtagtgagtttggtttgtgacacgcttgcttttgcttccttggtctctgtttgtagttgttgttgcttacgtggggatg

SEQ ID NO: 50583 - DNA, 787 bp, Arabidopsis thaliana landsberg
atatatatttagttcatatgccttcacttgaactcatataagcctaatctcattattatagtaaatcccaactcaaaatattggagaatccgtaaggagtgtgaagcagaatcatgtgtaaaggtgtgatcttttcaaaacgcagagccaccacttcttctggacattgtctgcataactccattcatcagtccttgaaccgacttcccaactccagctcctatgtcttctgcaaaatacttggcctgccaaaacatttgtggatttgtgcatgagaagatttcattccaatgttgtagatttgtatcaacaagaatgaagcatagcgagaaaggttttactttacctcttgtatgctcttcttaagatcaaaagcatctttgactctgtcatccaagaatgcccatgtatcgcgatgttctgctcaaaacgaaacgatatcaaactttgaacattttctttgacggcatagcaatgcatccaagagaggaagactaaaaaccaacctaaggagtcatcggtgagcatgtaaatctcggtagttgagtaaacgcctccaagaatagtacgcttgacataccaatctaaatccgaggctccatctccaacagcatgccatatctcatcaactaacattgcccgttgcttaaaactcgttgggacattcagaggatgcgcctgtttcaccaatgagataatacattaaacatcagaattggcttgagcttaacatgaaacagggaaagtcaaatacttacctgaatgctaagagcttggggccattttg

SEQ ID NO: 50584 - DNA, 593 bp, Arabidopsis thaliana landsberg
aaatctacaagaaggttaagctgaacagagagatgcgcagtaagataagtacattggctttgatagagtcagctttctttgtggtgattttgagcgctttggttgcgagtttaaccattaatgtcctgaaacatcacaccttctgggggctagaagtctggaaatggtgtgtgcttgtgatggttatattcagtggaatgttggtgacaaactggttcatgcgtttgattgtgttcctcatagaaacaaactttcttttgaggagaaaagtgctctactttgtgcacggcttgaagaagagcgtccaagttttcatttggctctgcttgattcttgttgcttggatattgttgttcaaccacgacgtgaaacggtcccccgcagccaccaaagtcctcaaatgtattaccaggactcttatttccattcttacaggggcattcttttggctggtgaaaacactcttgttgaaaatccttgcagcgaatttcaacgtcaataactttttcgataggattcaagattctgtttccaccagtatgttctacaaacgctctcgggtcttccacttatggaagaggcagagagggtcg

SEQ ID NO: 50585 - DNA, 612 bp, Arabidopsis thaliana landsberg
cagtttcaatccgaaatctagataatttattcaagagtgtggatgcatttaatgttatttggcccaaatttctcagtatatttgagagaagtaaaaatatttatattaagcaatgaattataagttcttaaaatataaagatagtcaaatcacaaagtaataattatgtaacgcatgggtgctcagggtccacatcatagggggcaaaatgatgagaatgatcttttcttatgtcccaaaaggtcattcactttcaacgggatttgtttttttaacctattttgtatcacacttttatctcgaaagattttattttattttttactacttgacgggttttttttcctgtttttattaaagccagaaggttgattgattgaactcagaatttggagttagaattctttttgatgttgatgaaagatcattattaaagaaatacattttataatttagtcctttttagcagaatttgagttagaattctttttgatgttgatgaaggattattgttcttggaagaatgaataattcgaagaagtgaagtccgcttttcaagggataaaattgattgattgagttttggagtcttggtatttgacactctctttc

SEQ ID NO: 50586 - DNA, 602 bp, Arabidopsis thaliana landsberg
gaaccttcctttcaggctctatctgcacatggatctgcagtatctttctccttttcagtaaacacatttttttctccttctcctccttcaagaacattccctgaaaccttcccttcagactctatctgcacagaatctgtagtatctttctccttttcagcaaactcaatattgtctcctccttcaagaacattctctgaaactttcccttcaggctgtatttgcacagaagaatctggaatatctttcttcttcttctcagcagatctaagggtggctttctttgacccgttcgaaagagaagaccttttgagactaggactgggcttctcatctttaatctccaaaggcgacccctcctttgagccgcttctactttttctcgaattgtgatttgctttgtcactctcatttctcaggggatctttactaagcgtggaagccttcctcacatttcgtttaggtttatttctttcagctgtaaaacggctagggccagttccactagttgtgccagatggtttcttgatacttcgctttggccttgtcttttctgcttcaaccactgcttggtagtttcgcttctttgactgagatttgga

SEQ ID NO: 50587 - DNA, 1157 bp, Arabidopsis thaliana landsberg
cataattataacagatttataaataatataatcaacttgaaccacaatatagtgtatgaaacgtacaatgattagttatatagatgtctaagtggtatttaattttatgcaaacaagttatatatgattcttgactaagatttaaggatcaaaatctataaactttaacctagaatggtctaaagtaaagctattccatgtcttgaaaggacaaatacaagaatatattagtaaagaaatatataaaagcatgtcatgcctagattttgaaactttccatgcacaatttcacatatataagtaatacaatattcatattgatacacaaacaaatgcgcaaaccgaagacatgtagtgagtttgtggtcactccactatacaaagcactcttaagttgcaaaaatgagtgtacttaaaaggtgggaataaaacaaaacaaaagcatctaacaccaaagctagaaaattttaaaccaaaaagatattgtatttttttttttttttttttttgatcaaaccaaaaagatattgtatatcaatagtatttaacaagaaaaaaaaaatcaatctcgcctccattaaaaacaatatatcacaaaaatacagcaaagattttttttttcccgaagtatctatcaaagagctaaaaataagaaatcagaaaaattaataaaggagaaaggaacaatttgattgacaccgaatggacaaaaagtggaataagaagggaccatcgcatccattttcgttagtccttttgtgttcgtggtacaatattagtatcactcacccattaatttaaaatcaatgtttgttgctttaagtgtttctatcaccgcatatatattcataaaatgattcaagtatgaagtacctgtatataagaatcaatgagaaatacctaccgattcccgaaacaatgcatatgataagtttcaccttaagaaatcaaagatattcgaaacggaatcttttacgaatttccgatgacattttgacggtttcattattcgtcgaagaaatttgatggttttttcggttgaaagtcgcctgttttcttgttatttttaacatcaccatttcaaaaaaccaatgtcacaaaaaaacaaatctcaacaaatgatcatttgactctagtcagatatgaggatggtgatc

SEQ ID NO: 50588 - DNA, 953 bp, Arabidopsis thaliana landsberg
aaaaacgaagtattcttctatatttaatttttgaactattgcattttgatttttaaacttacatatataaatgggattttgggattaaataatatgatagcttgcgtaattaaaaaaggattagatacattggattacctataaattatgatcatgtaaagtcaacttcgctttccatactttcttgctacatacggtaaattaattgtgtaataatatctcggcccaataagaataaatgggccgatgtttaaaaacctgcaaataacaacagtcaacacatttatataagaaagtcaataaatattcaatcaatcaaagaagcaaaataatttcccgctcacatttttgtctctctattttttcttcgttaaacctctttgactaactatcttatcagaatctctctttccttctcaaagattggatctttcttcaaacttcagaaaaagatcgcagagaaatttcttgatctgtgaaatcagaagaaaacgtttttctgaaaatgagtccgcatgttttagatcttcctaagggttgtgaaatctctaacgatctcacagatttcgtaagattcattcttattatatccaaatctcttttatctgaatgatccaaattcagattacaatttttctcttctttctttgctatgttttcaggttcactatagagtcgaggagtgtatacaaggctacatgagcaaagaagaaactgcgagttttatattcgatacatttggagtctgactaaagtttaccagacttcgtaaattcttcatctacgcagcttcatttttactcgatcatcaacgggtttgagacagaacgtttagacattgaatctttaatgtcataggtcggtatctgcttgacaaagcaaatccagatttcttcagatgttgcaaatcacattgcgagaatactcagaatgcaccaagtgcgctataacag

SEQ ID NO: 50589 - DNA, 461 bp, Arabidopsis thaliana landsberg
acgagcgtcactacgagtaagtcaagtcaatatatgattttgaacctaaaaacattactaatattgattcaattgtttattatctgatagctaaaaagtctttggccttactatttctgttttggtgtatatatgtatatagcaactctactgatgttacaacgcctgaggaagatggtgatgcgaacccgaagaggaggaaaaagagttcattgaaatgttcggaagctcgacgaacagcaccagacgaagcctaagaggtaaaggcaagggaaaatggagtaagctaaagggaccttgtaccgcaagtaaccccatagataaatgttggcgttgcgatcggattgggctaagcgtcggaagaagcttacacgttgtgtccgagggtttggtcacaggacgaccgggaggaaacgaggacgcatctatgtggttacaagcaacctcgacgaagacatggt

SEQ ID NO: 50590 - DNA, 334 bp, Arabidopsis thaliana landsberg
tctaatccacaaaatttgatatatatctccaaatggctagaatttttctttttctctttggtaaacagctaaaaaattttggggttaacgaacatgatcattacatttggcgcaaaagttactatatacaattgaacgcctatcgtaagattttatcaagaaacacaaaagaattttattgatatcgtagcattgttttggggagtttatattaacgtttctctttttccaagagaaaaaacagcagaaaatagtcttgtttacccaaatattttgtgtgtgtgccagtggacacatcttataagcatcgtaacaacactattatgtcacaagt

SEQ ID NO: 50591 - DNA, 979 bp, Arabidopsis thaliana landsberg
gggtaaacatatcttctttctctttgaaatctcagtctttggaaccacctcaagtttctaatggtgatcttctttaacttcaggtagctgacttgggcctctccagagaagaaatggtagacaacgatgcagctaacatcagaggaacatttggctacgtcgatcccgaatacatttcaacaagaacattcaccaataaaagcgatgtctatggcttcggagttttgcttttcgagcttatagcaggaaggaatcctcttcaaggtctaatggaattggttgagctggtaacataaaactaaaaagtcctcgaaatctccaattgttttgtttggagaattgcatgtaaagactgaacgttttgttgttgttgatgaacagccggctatgaatgcagaggaaaaagggggatgggaagagatagtagattcaagattagatgggagatatgatttacaagaagtgaatgaagtagcagcttttgcttacaaatgcatctctcgtgcacctagaaaacgtcctaacatgagggacattgttcaggttttgactcgtgttattaaagtgagacattgcagaaagcggcagaagaattctccgtcgccgtctccacggcttcctcctcctcctccgatagtggaggagtcagaaggtgagttaactgcaaacggatcattacgatcagaaattcatcggagggataattccttggacagtagtatagctgaagacgtgattttgtaaacaaaatgaaaaaaaagtctcaatttttttaattattattaacttttaaaatgtgattttgtttttcaattcttttgggtttttagaccctagattgtctatatttgggaatgaaaatttggtctttggtttttcgtgtttaaacgagttcaaaactggagaaccatattatatatttggggctttgaaaagaattgaatttaagggccaattaaaacctagcctagcccattaa

SEQ ID NO: 50592 - DNA, 717 bp, Arabidopsis thaliana landsberg
acgtgaacttgaggaacagcaaaggacaaaaagaaaatgcaaaatcttccatggaacaagttaatgtcaaaactaaaaaggccaatttaatttatctaaaatagttggactgcttattagactattagttatttgagggtgtattgactcatgtcagttttatcttcatcttcattagaattggcgaagccagcgcgagttcggcgcatgccaaagaagacgacctgagtacgaaccataatttactaaggttcataaatcaaaatgaattattttaatcactctgcagcagttagagtttactaactcgatcggtaagtttacttctcctattaccgtttgttgtagccatagtttgtaggcatttattgatttttattttggttggtttcttctctccattgtgattaatcctcggtaggttagagtttaagccacacttcataactatataccaatatatagagtatctacaaaaaaaagtcaggaacttgtttcttagtggatctgtctggtaaaagagtttttgccttaaaaagctcttcctctgtgttttggtttctgatttaacttcatggctagcaaatacaacaataaaactaattgatgtgatatacaacaataaaactaatacacatcaactgatatggtagcaagttgtaacaagtgaggccattttataaaataaatatatatcatttcaagcattttgactta

SEQ ID NO: 50593 - DNA, 260 bp, Arabidopsis thaliana landsberg
  unsure (1)..(260): unsure at all n locations
tcagtttggctgaacttaagcaggcagtagaggaggcggaaaatgaccaacataattcccggtcagtcccgttaatcttgaagaaggaatggtgcatggtgctgcggaggtcactggcatgaatgctgtcagagtccgcgaaaccgaaggtggacttgtcctgggaaagcnnnnnnnnnnnnnnnnnnnnnnnnnnnnnnnnnnnnnnnnnnnnnnnnnnnnnnnnnnnnnnnnnnnnnnnnnnnnnnnnnnnnnnnnnn

SEQ ID NO: 50594 - DNA, 573 bp, Arabidopsis thaliana landsberg
tgcggaaaatcctaaacggggttcaatccgaaactgtttaatcttttatcatgtgtatgttctacacagtgaatagttttattaaattttttcgtcccaactcgcctaaaagaatcgcaagattggttataatagcatcaaaaagttgaagtgttgaatcactaacagaaactctaaaggatttagttaggtttttttcgttagattcatcctattttaagtagtaccttattttaaagcccaattacatttgtatattcagttagtttttttcatttatcattttatttgtatgctaaaacattttaaacctttttctcttagtctacaaatttttgtcttgttgactcaagagtcaagatcattgtctcatgtaatcaccatcatatatattactacgaattctgataaaaaaaaaaagattactaggaataaatttattcatttttgataagtaagccaaaatgtatttgcttttaacaagaacttataaaaaatgtattactaaaaaagctgtgtctccaaacccgatgatcgattgaacaaagtagtctatttctcaaccaaaaaaaa

SEQ ID NO: 50595 - DNA, 823 bp, Arabidopsis thaliana landsberg
accaatacctgcgcaactacttggtttgttataacaacagccacttcaaacttgagccattaaacataagagagaagacttcaggatggtgtctcagagcaatattggaaaagaaacagttagtactgaatgttcacctcatctgctaacttctgaagacttctcaagaactttgcaagatgcatttgtcgagccgaaagctctccccttccagagaaatctgttctgtagagagcggtagcactatcgacaatcaggagagcaaacctgtgccaatagggtcatcgtaactttaaaagttagcactctcatgatagacataacggaactgaacaccaaaataaactcaacacaccttgtttcaatcatcattgatgctgcttcaagcaaaagccttgactgatgatctgtattatacgccctcgcataggcaacgttttctagtacatcagctccatttaatccaaacctgcatcatttcatttgatttcttacagatgattccgtctcaagaacgctattgtgatctcatgtgtgttacaagaataacatacctgtcagctatctgtaagagtctttgtggcctgaatgttccctcagcatcaatgtacatggcctttccctctccacctccttgatccatgggaagctaatcattcaaacgtgaaccttaatgtgaatatctttctcaggtttggaaattgtaagaagaaagacaagatcactgatttctgctagataagcaacaataactgagtggtataggaacagggttcttacttgacaagtcacacacagtgtatggcacagctgagtcttgggt

SEQ ID NO: 50596 - DNA, 1346 bp, Arabidopsis thaliana landsberg
  unsure (1)..(1346): unsure at all n locations
ggaaagaagtgaggtgtcagtcagttgaatctgtagaaaaggaagggaaccctttttcgattgaatgcgctgttggatttgttgttgaaatgttggctcagaatctccagaagctggaccagtttatacaggatagttcagagaatgaatcttgttgttctaaggaagctagttctaatgatagtccactcatctttaacatctgggaagctagaaaacttgacgtaaatggattcctcgggaacctgatgtttgccagagttggagatgtggcgtcaggtattggtggcttgacatctcacattagtgaagatggtgatgaaagtaatgtcagtactgctggtaaggaggaaagtgcagttgattctccgcagaacctggcatctggactactgagtatacctttatcaaatgtagagcgcttaaaatccacactgtccacgatttcattgacggaacttattgagcttttaccacagttaggacgaccttcaagagaccatccggacaagaaaaaactaatttctgttcaggattttttcagatacaccgagtctgaaggtatgaatcctcccatttttattaagaaccttaccgtttcctggcaacttagtaagcaaaaagagagcagcaggatgcattgcctataaatgttacttgtgcttgccaaagcttgtagttgactgttggaggcatttgtgttggttgaaatcattggaaagggatacctgttggttgaaattaccatgtcttcgtttttattgcctgccctagtcatcatcgcaactaatgtctgaactgttaaaacgtgtgtgttgcagtttctcaatactagattgtctgcttatataaggaacacattacttatttgcttttgaaatgtttacgtcctgtactataatttagtccatttcgtccaatataactctttgcggattccaggcaggaggttctttgaagaattagatagagatggtgatggcaaagtaactttggaagatctggaaattgcaatgaggagaagaaaattgccaagaagatacgccaaggaatttatgcgacgagctaggagtcatcttttctcgaaatcgtttggttggaagcaatttttgtccttgatggaacagaaagagccaaccatcctccgtgcctatacttctctctgcttgaccaagtctggtactcttaagaaaagtgagatattggcatcactaaataacgcaggacttcctgctaatgaagaaaatgctatagcaatgatgagatttttgaaggctgataccgangagtctatctcataccgacatttcccgaatttcatggttttgctgccatatgagccctta

SEQ ID NO: 50597 - DNA, 1362 bp, Arabidopsis thaliana landsberg
tgtacatcgctttcaaaatgtcacaaaacagaataattatgattttcatcatagagcatctcctgtttactttgtcttctaaccccacacccataacacatcacatacaactacgtacattatttctatttattgagtgtaatgtaggagcatatgtgtaggtatgtatgaaaatactatatggttgcatgaaagagcattaatatttatttcatggatggttatctaaatttcctatcataatttgtttttataaaatagaaacttcaataaaatggtgatatagtgatctgaatttgtattgctttaagatatcgatttttcttagaagaaataatttgttcataatttagcgaaatcaatatctgaatatcggattaaaaaaacaacgtcatcaaaaatgttgtacgattaaattatattgagtagtactttacatgtcaacataactgtagaacggtagaagcattgtactctagatttcgttttgggagtcttcgattcgcagttcttaattcaagaaaccaaaatcatgagttttcgtagatatgttttgagtgaaagtgattttcttgtacgtttcatatttatgaaaggaatgtagataaaggactttcatataataatttgtatttatacgaaagtgtaacgtataggttaattacaatgtttttttcatatataattacaatatgaatttggagatattacaaggggaaaataatatatatatatattcgtgacagacagaatgggatacttatctcttgggtttaagggatgtatacgtctttgacatggttgataatcatccacgtgtaattaaataaaccctatctggacttattaggggtttttgtttcttataactaaatgtacaaacgccacctagagttttggaattatatgtcggacctaattttaacagtggcatgtctcttactttaattttaagaacaagatttataatcatctttaattaaaatctaataaaaattttaaaaaagcaaagaaaagttaagatgcgtttgcttccaacgtcattggataccatcgttttctttgccataagcctgccccatatctttatccttaaccttacatggatcccgacattaattaacaccacacagacattttatcaaatctgttttcgttttctatctattacttgcaagtgttttatattcaaacgagtatgtactgtgtatgttgaaagaaattacaaaaaaagtttcaaacgagtatagacaaaaccaataaaacgacaatattgaaatatagcttttttaaacccaacatgctacgatcacgtcaaaccaaacgactctacaataatatatcagcgagttacttgatata

SEQ ID NO: 50598 - DNA, 1330 bp, Arabidopsis thaliana landsberg
gcaaatacgatgccggaatcgtcttcgtcgacgacggaaattgggtcatcaacgtcggaaactgtaacattcttcttctcttcctttttctctcttaacgaaaattgatggaaaagtaaataaagaccaaaaacacagtgcatttattattgggctttgatctgtttagcccattgttattgggtaaagataaatataattttgactatgagtagggactaaatgttaaatttgggcttgtaaaattacaaaagcataatttgaaacccattgggccactccctaccttccgcgcgtgacttaaatttgaaactaactaacaacgtcttaaaaattaaaactctaataacaaaaacgtaaataggcatctgatcttttgattggtgatggaatagtaacattccaaatattttgattacccataaaacatcgaatcttgcgaattcatagtactttttgtattatttttttaaagctatattaacattttcgtttatcatttatggtagtatttatgtatcttgttttaggttttcgaaataaacttgttcatgtcaaaagaaattgaagaaattcaaacgaataaaattaatcaactctaataattttcttatatttcaccagtctactatcataatgaacatacttaattgtaatgtttgttagtatgttttctaaaatccactatttaacttgcatgccattgctgtttatatacggtctctaacccccaaaggagccaattatagataaaatactgactatcaattttgcaaatttggtggtgtgaatagttgtaaaggctgtacattgcgtaaaaaaacttagggtaaaataaaaaagcatcacatagttattttaaaaaggccaaacacacctttaaaaaggataactctttacacctttttcccacaccccatttccttgtgagaaagaaactatgcatgcgggaatataacaatacggctttgcttctcaatacaacgacataaaaactctctttataagactctcacacacacatatgttgatatgtataatacacgtctctaaatttgtgtatctatctacattacaatatatatagtttgatatcaatctacaattgaaagcatatatatataagtatgtttcttgcttcagttcttcaccaaaaacctgtgttcttaatcttggtttatcacgatgaaattgttgtcgatgatgatgatgatggaagctattgtccctgctaactcaccttgaggtcctcgattccattgatgacgcctaatggggaataagcattcctggtccgatccatttcatgtcacttaaatcttattatttc

SEQ ID NO: 50599 - DNA, 103 bp, Arabidopsis thaliana landsberg
tgtgtatgtgtatatgtctgtatatgtatgtatatgctccactctatatatctctatgtatctcgttctatatatatatgtatctatgtatgtatatgtatgt

SEQ ID NO: 50600 - DNA, 815 bp, Arabidopsis thaliana landsberg
  unsure (1)..(815): unsure at all n locations
cagattcctaatgctgaaaagttatcttctttaaatcccattagcactaagttaacaggaataaataacaaataagtaagaaacctcatcgatttgatcccaccatcnnnnnnnnnnnnnnnnnnnnnnnnnnnngaggttgtacaaaagagttgggtaaaaaaggatccgaccaccagctccgattagagccctctttgctttatctcccttaaaacccttacccttattctttgaaacgccgtcgtttcgtgatgatcgctgctgcgtcgtgtcatcttcctccgtttcatcggtcatcgccgggaagaaaacaacttcaaagagtgagagttgttggtcaacgaatttcaccaaaaaacgttttcttcaacaatattagacatatttacaaaattaccctccattacaggaaaaacatattaaggcccattacataaggcctactaagatctttgtgttcttcttttctaccttcaaaatcttctcttttttcattttctttctaaaatattcatcatttcataataaatctcattaaacaacttcatatttgtgtttcacaaaaagtgtgaagttttctttgtaaataaataaattaagtactaaaatgacatttagtatgaacttttattcaataactttggatattgttgttatttttagattcttacacctacatcccccaagatttcatgtaataatgtgctttcacacttatgttgtaaaaattatcatagtcaaaaaagtctttcaattaatatagaaagaatgatggaacttaactatttaataacatccattcattttattgt

SEQ ID NO: 50601 - DNA, 1164 bp, Arabidopsis thaliana landsberg
cattttacctttacaatgcgagttaattcgacacctaagtaatcgtatcttaaactaaatctagatccctaatcgaatattttacattaaactaaagtgtatatatatatatatatatatatcgaaaatgtaagaaaaaaagatggagacaataaaggagaatgtaacaggtgaatctttcagagggatcgaggaacatcactcatcacgataagtgacattcttttgcatattgtggaattggagtgaatccctagacccacatcaccctatatatcaatcccacttccaactcttatattttaatttatatacattccaacaatcatattatatacacatatctatcatacaagctaataagctcactatatatagtttatacgcgtcggtttgaatattatatcgtactactccccctaaaataatactagttgcaacttttaagatgttagtaataattcaagagatttcttacaatattttagcaagctggagaatgtttagagatatagataatttatacatccaaggcaagaatgatagcaatgcacaatataataagaagtaaacaaataatgttcttttgtaaattaaatatttgagtttaaattcaaaggttattgtatagtagttacttcatattgattgacgtcacaaaatcaaatcgcgtttatgtgactacgacggtcttggaaaagtcatgcgatatattctgaaatagccaatattgtctaattataattgagactatatgcatggtagatcaaattatcacatcattactaagtcatgaaataggaaaaaaacaatgagaatctttaagaattaataagaaatggggttagattagagttgcaagaaaaacaaatgagaagaaggtttttgagaagtgaaagctccaagaggaaagtgacaaaatagagcataagtgcatgtgatgttccatctcactcactgccaaccccaaatgggttcacatttccaatctttactttattctccatcgtctctttccttacattatctttgcttttctttactttttaataaaataatataataagatcttaggactatgtatagaaactaaaacatatcacatcttactacatatttgcatatttttttttttaatagcatttaaactattactacagcaaa

SEQ ID NO: 50602 - DNA, 561 bp, Arabidopsis thaliana landsberg
ttaaactaacatgttgttaccaatcaaggcaagtccaattccaaagccattatgttcaaaatgtttatgtatgtaaatatttataagcaaaaataaaaataaaagagcttacaaggttagataattggggatcacagaaacattggaatatgtttgtatacctataaagttgcctatatgcatttaggatctgattctctttcggatgttcactgctttttttttacattacagagtatatatgtatgaaaagatgaaaatttgcaactgaagaacaacgactacctttttttttacttttactttgattgttcttaatcactttaagattttcccttttgatcatctccgggcctgtgattgattcggacgtgaaaatggtgatccggaagaccctttagagccttcagagtaaataggtgaatcaagcaaatcctttaaggcttgattctcagaaggaggatatggtgtttctgcaagaaagattgaatcttcataaaagttcataaccaaagtctgggttaaaaaaactcaagtcatttttaccgagagtgttttgag

SEQ ID NO: 50603 - DNA, 597 bp, Arabidopsis thaliana landsberg
caactctaaagcatccccgatttcaatcaaaccaaaaacaaagtctttctcgatataaggaaatgaaaaaggaaaaaccaccaagatcatcactttttcactatttcttgttctcttaggaaaaatttgggaactttcaagcattagcgaacttatgggtcaaaaaggctctaaaaaacactaacatagaccctaataacaaaaaccctgacaacaaaatcagacagaaagaagagaaacaaacagagaaacggcattgaatgtaagaaaggaaaaatgggtaagacctagaagaccaatgcgagatcgaagaggaggtgctgctatagtcttagattttttgagaagacagtagtaacgcaggcaaaagttcggaaagttcttcttcagtacctttttagtaaatggaaaacaagagagacgaagaagcaaaccgggtttagtagaatttttttacttaaaaacaatttatttcggtttggatcctcttgttggacagtgtttgttggaaaggcccaggaagtcgaaaagcccataataatattaaataaaatggctttatgatcatatgcgagtatgtgactgtattgagaaaca

SEQ ID NO: 50604 - DNA, 777 bp, Arabidopsis thaliana landsberg
  unsure (1)..(777): unsure at all n locations
aagatcagaaagcgtactctctgctttatctaggtctagcatggaaagtgcctttgtcgactgggacaatgtctcacgtatgtcggcgaggacatccatgtaagcattcttaagttgttgattctttaaatcaaagtttgaagtcagatctggatgtttttttaacatttggctgaccaaattttcctgtgatcaagtaaaatgtaaaccaaaaatggtcaagtatagtcgaattatcttaaaattaaagagatgataaataaatttttgttcgagcacatagaattggattatttagtacttacttgtgaaggaagaacatgaaacccattgacttcaacagtttcttcatcttccgacgaatcttgagaaggagaaaaatcaccatcgtcactgtcgttagcctcgcaactattttccttcaacattattcgatgagaatctctcagcttacaaaccgcagtgttggtacaaataagaagaagccagaggatcacaaaatgggtgttgaaacgtcgccacaacagaatatatatatatatatatatataaagaaaatgcaggcattcttaattagtaacatatttatgaaccttgactcatcgtgacttgatattcttttggcataactacgaataaactaatattggtaaccagctaatagatggaattaaattgtatccatcaacttgatccgcttgtttggtagcgactcttcgtgtgtcaaactatattcatttatcanggaaaaaacanaaactttcttcgtacacaaag

SEQ ID NO: 50605 - DNA, 617 bp, Arabidopsis thaliana landsberg
aatgacgtcttagaatttaatgctggtcgttgtttctaaatactgcatcgttaaggtaaataaaaaggtacatataattagcgacatctaaaagggtttcaagttgcaaacacaaagttaagacaaatttgttttttgtttttttttccgatgcagtgaaaaaaaaaaagagagagaagaaagaacaatcaaataacacaaaatcggtcctcaacagtaatcacttgggatctttcaaaacctagaagaaaaaactcatctttcttcttcttcttcccctgagacatctctcgattctttgtactcgcttgttttgttcgaactcaatcggattttcaatttcctgggcgtagtttacaacgaactgattccttggtttgatcaatcggtgtgttcttgtatcaatcgatttttttggttagtttttaggtttttgttgtttttcatggctgcggatctcgatgatttggaagaagagagttcttcctcattatcaccaccgcttcttccgccgcctcggtctccgttgaatcagccggagttgtggatgagagttgaggaagcaacccgtgaaattatagagcaggttcatccaactcttgtctccgaggatcgac

SEQ ID NO: 50606 - DNA, 1029 bp, Arabidopsis thaliana landsberg
ctggtccccttttggttgtttctgttttcatgtttgctacgtgtttatggaatggaaccgaccgatcatgttgtgaacattgacttttaattaaattatcgttaaaaaacaactatattgattttaaaaaaaagaattctaacatcatcatttggcctcatctacattattgtggaaccaatttctttataaatacatgttaatatgtaaattatttattttaacaaaaattttaatttggaagcaaagactcgaccattcctataaatttattatttctaaccacaatgtgttctctatatatatatggacctttttcttcgaaatattctcaaagttctatgtacacaaaagcagggttaggtataatatagccttggagactattggatcattattggcttcaagttcttggtgaccctcaaggcctcaaacaactagatatttcgtggtattgttttgcacccgttaacactatttttgcaaatattcgttatatacttgtgttaaattaaaaaagaatatacataattaatctaaaaattggagttttaagatagaaaatttggtaaacattgtattttatttacaaaaatctatatttgaataaaatttcttctgcacttgtccgaaacaggcagctactatgaacacgagagaacccatgacacggcctacccatgacggtcgaattggtgtagaatcaatgattggtttgtacagttttaggataagccaaaagtacaattacaataaagccatgcacgtgaagttactcccatgtcatgaatgagggcacgtgggtcttcattcaattacgtcatttatctgtccaaatctattggaaataattttaaatttccttgtccgaaatcaaatggcagtagtaacataaaaacataaataatttttatttttgaggaaagcgcaaatgattcataaatttcgaactcaatttaagtgtaccaaaatttcagtgtagaactcttctaaaaacggtttagactgttgtctagttctgagtaagca

SEQ ID NO: 50607 - DNA, 461 bp, Arabidopsis thaliana landsberg
aatataggagaagacctggaatgtgtcccaccaccttttttttatgcattgatcttcggagaaacactaaagaaaataaaaaaactttatgttacacatttacaattttataatgggttcgtgtgtggattctttgacaaacgaaagtccacttctcacacaaaaacaaattctccggacatcgcatttgtcaatttttctctccaaaaaaaaaacacattagacaagtcagaagaacccaaaagataccatctttccaaaaatttgatgtttcctttttaaccctttttaactttcatttcttttgaggtcagttttttttctgtcgtcttccaccttctttatctctgttgagcgagttacatttggaattttacactttctttccctgatcctgtgttggatgcttcgaccaaaaattgaatcgggtggattttatttaatgttattaagcggtgttt

SEQ ID NO: 50608 - DNA, 647 bp, Arabidopsis thaliana landsberg
actgctcctgcgtcccttggctctctctggaatcgggtttgcttcttttacgttttgatctgttaaactcgtgttacaccattcttctttgcattctcttactcttctcacttgtttccataggctggcacttgggaggagaagagtctcaccaaatgggctactgaccgattaaaggtttcttctttcttttctgttactctgtttttttgttgttgtttgcttttctcttgctaatttgatatcttttggtactttgaaatcgtgcccgcaggagctgttgggatcagtgggttcattgcagttctcttctggaaaagctgagattatagatgttaacagatgtgttggagatgtgagttcttttcttcgttttttggtatatgtgttctctatgtttgttcttgattgatgattccttcttccactgtttcgctaggctttcttagtcacagttcggaacaagaaaagagttggctatacttacgagctttcccttaaagttgagggtaaaactatccacggttttaaagacaagaatcttctactttatttgaggtgaccaaagaaaaaaacttttgcttacattctcatgaaatctagtggtttagctgaggatgtggtgcatttgagatatataattgtta

SEQ ID NO: 50609 - DNA, 538 bp, Arabidopsis thaliana landsberg
atgcactctgtcgtttaagcagcacatgcacgccgttttattatttacaaaaatatatcaaatatattttattgagttattccacgtaagctattatcaagggtccgagtttgagcccatataaagtgataatagtttaaaaaggctcattttaacggcccagtgtcgattaaacatatattaggcctaagtaaattgttacttaatagaaacgctcatttaacggccctgaatcgattaaacttcatatattaggcccagagaaactgatatttgttagaaaggttcatttaacggcccagtctcgattaaacttttatatactagccccagatcaactgatactttttaaaaaggctcatttaacggaccagtccattatattgagcccaggtaaactgattaaaacggctcatttaacggcccagacttgattaaactttcatatattaggcccagatgaactgatacttgataaaaaggctcattaaacggcccagactcaatttaactttcatatattgggccataaactgat

SEQ ID NO: 50610 - DNA, 1017 bp, Arabidopsis thaliana landsberg
actctctcaactttttttgctgaattttcttcaattacgagtttttctttgtgagtttgtttagctattcaaagcttcaatttgaagtcgttctctttctgtgttttctagttggtggtggatttttgattttgagttaaggaattgagtagcaaaaaggtgagatatggagcacggttcgttcacgaatgttagtcatgcttcgtttactttatcggaagaagatcacacacttgctaatgctgttagattcgtcttaaaccaagagtaagtatcttcttctttcaatccttttgaatctgttatgtatatatatagaagaagctatacactttcacagagaaaggctttagctttataatctcatacttagttcgtgacactctcaaattctgattattgagttcatagtttccctcattaggaatgaatctcttacctgtctttacctttgtttttggttagaattattgtgaagataatcaaattttgtttgaataatcagtgtgcacattgtatgtttgtgccattataaggtgattgtgaaggttgagttcgattcagattcatgttctgtggttagagactagaaaagatagtctagaattagctcttagatagagacagcagtgacgaggcattattgttccgatatctttcgttggatgagtttggtccattaagttcgccattatattgtgattgtgaaacttgagagttcgattaaatgttggtttacattcatgttatgttgttagagattctcattgtattcaatgaatgtcacattatcttatctttgaggttgatggagttgatatgctggtgtgtagacaatgatgattatgtcaataaccagtactgttttcaattctgcagtcccagagtaaccgtggctgcatacaccatcccacatccttcccttgaacaggtcaatatccgggtccagaacacaggtactgttttttcaaaaacctttgtttattagagataaatctatgttctttttgggataac

SEQ ID NO: 50611 - DNA, 578 bp, Arabidopsis thaliana landsberg
  unsure (1)..(578): unsure at all n locations
ctttattaccaaagggcggtgaggcaatttggggcgatctagactcgcacgctgaagatggactcaattgtatttactccaagagaaaatcatcgcagctatcgctaagtaatctccataaacaaaactacagccttaaaccggtgtctcgggtgaaagaacccgcaaagtacggaagaatcgtatctttcgggaaacgagcatcagaactgccttcctcacaactctctacgctaaacgtcaaggttatatcaaaaaactttccatggttctgccttttccgggtcgtcattggaatctaacagcacttcactctctttttttattgtctatgcttaacaggaactgtcaagagtagacggcaattcaaatgacagtacatcatgtgtagagttttggtcagagtacaatgaaatgagccgagaacgcatagtaaaagtagcagaaaacacagcttatacagccaccactgtncttgatcttcttcgatttatagccctaagatgatgagacgagccgaagctcatttctcttacggcattgctgatgatcttgatgaccctaagtatggacattat

SEQ ID NO: 50612 - DNA, 934 bp, Arabidopsis thaliana landsberg
  unsure (1)..(934): unsure at all n locations
caacagaacagacattgacataaagaaccattggaactcatgccttaagaaaagacttgctaaaaaaggaatcgatccaatgacccatgaggcaacaacaacaacaagcctcaccgtcgatgtcacctcctcatcaactacgtcgtctcctacaccgagccctacttcttcttctttttcctcctgttcctctactggctctgcacgtttccttaacaagctcgctgctggaatctcgtcaagaaaacacggactagagagtatcaagacagtgatattggcagaacaaccaagagaagccgttgatgaagagaagatgatgacaattaacatgaaagagaaggaattgattagttgttacatggagattgatgagacgatgagtattgatgaactaccttgtgatgactcgacgtctggcttcgtggcttttgacgactactcattaatcgacccatacagagacagtgtgtacgtatctgatttctacgatgagactgaacaccttgacctgttccttctttgaatcacatttcctttgtctaaataaatccgtttctttagtgtgacgagagagagacagtggagagagatgtctgaaaaaaacaagtgctgattagtactttgaatgacatgcatggtcaatgttgttttacagctttgagcctttgactgttactttttattttattttaggtacctgttttctcacacatgcctatgagcctacatatatttgagggtttcataccattttggtgatacaagcctatcggttactatattccttataggttttgtcataatggcgtggttaaaactttatcatatgtgtgtaagggttttatagtacttttttttttattaagatcatttaaattctaatgaaatttcaaatataaaaccaagataggtgaaactncacaatcaagag

SEQ ID NO: 50613 - DNA, 274 bp, Arabidopsis thaliana landsberg
aatataagccaagctaacaaaaaaaaaactaacatgcaatatggagtttttaatatgtattgtatgttaattactagttgttgccccacagaacaaaaaagaagaagaagaagaagaagaagaaaatatctagtttttgaatacaaaaaacaccggtcgttttgtccaacagaagagttacataagaaatatgcgattttcacaaagaaaatagttgtttcgttttagtactaattaagtattcaaattaacttgatcggttccaacgggatta

SEQ ID NO: 50614 - DNA, 286 bp, Arabidopsis thaliana landsberg
  unsure (1)..(286): unsure at all n locations
cccgtattcctatccatggtattttatatccaaaatataaccaataattctctaacattttagcatagctcaatgatttgtattgggctcctggcttctgagtataactatacgctatgggaacgtannnnnnnnnnnnnnnnnnnnnnnnnnnnnnnnnnnnnnnnnnnnnnnnnnnnnnnnnnnnnnnnnnnnnnnnnnnnnnnnnnnnnnnnnnnnnnnnnnnnncagtaagcagacaaccagccaaaacttctaagcatgtccaaggctctaagtttctgcg

SEQ ID NO: 50615 - DNA, 922 bp, Arabidopsis thaliana landsberg
tctaagggacaccattttgtaactgagaaacgccgccggtttgccattgtggaacatcaccgttttgcaactgaagaacgccgacgttttgccattgtggaacatcgctgttttgcaactgagaaacgctgccgttttgccaccaatgaggaacgccgccgttttgcaactgaggaacgtcatcgttttgccactgaggaacggcgccgtgttcccaatagtgaacacgatcatcgacgccgctagctcggtgaatgtagccgttttccaactgatcatcgacgccgctagctcggattatatgcatcttcttctgctccgagacaaaagtctgtatcgtcctacgaaactcctcgccgctgcttaaaccatccatagactgcgacctccacgaccccgttttcgtcactctctccgtttccgtcttccgatactccaccatcctctccgtcatcttcttctccgatctgctcgtcctcctgtaactcttcgaactcatctccaccacttcttgatcgtaactataactactctcctcaaccgccttaaccgcttgaaacgccggtacattctctctgtaagtcgagttattgtaatatccaacatcttcaaactttgacatattataggaatcgaacggcgtgacggtggagggtggagggacggcggctacatattgatcgtaaagatctggttccgttttttccgtggtttggattttgctaaagataacgtaaatcaggaagatgataatgcttacgacgacggaaaggaagaaaaggtttcttagaaccaaagtaaaccaatcgaaccaaatgaaaaacccgtgcagttggttgacgatcaccggtaaacagcagtaaccgaaggctacgacggcggacaatccaacggtgtatttacaattctggaagagattcct

SEQ ID NO: 50616 - DNA, 596 bp, Arabidopsis thaliana landsberg
agtctttctcatatacacttagctttgagtaggcagatcaaaaaagagcttgtgtctactgatttgatgttttcctaaactgttgattcgtttcaggtcaaccaatcacgtcaacgaaattcaggatcttacaacacttactctgagtatgattcagcaaatcatggccagcagtttaatgaaaactctaacattatgcagcagcaaccacttcaaggatcattcaaccctctccttgagtatgattttgcaaatcacggcggtcagtggctgagtgactatatcgacctgcaacagcaagttccttacttggcaccttatgaaaatgagtcggagatgatttggaagcatgtgattgaagaaaattttgagtttttggtagatgaaaggacatctatgcaacagcattacagtgatcaccggcccaaaaaacctgtgtctggggttttgcctgatgatagcagtgatactgaaactggatcaatggtaagctttttttactcatatataatcacaacctatatcgcttctatatctcacacgctgaattttggcttttaacagattttcgaagacacttcgagctccactgatag

SEQ ID NO: 50617 - DNA, 604 bp, Arabidopsis thaliana landsberg
  unsure (1)..(604): unsure at all n locations
caagcacaagtctaagggaggattcgacaaggaggtgctcaagaagaagtacctccagaaggccaagatcaaggagtgtgtcttcctcacctccctcggtgacctcgaccacaactccgacgatgcagtgtcctcgagcgatgaggagactgacaggcgagccgaggacaagttgaacggactctacttcctcactgacaccgcagacggcctttgcatcatagaccttggtgatgatgatgtgggaggcaacaactaggatatcggagacgactctacttctgaggtatcacactccaccgatgatctcgccgctgaggtagaggagccgacgactgctttggcaaggcaggataagttgcttaggcttgctgctcgtgagagtaaagattttaaattcaagtatgagagcatgcttagggagcactttccctttgtcttgttcaagtatgagagtctgttaggcttcaattgtggtgtttgacgagactgaatatgatgagtacgctctacacatgtcgaacatcacaactttgcagaccaagtacgccaccttgctagatgacacgacgagttgagactagatctagtntattaggtgcgt

SEQ ID NO: 50618 - DNA, 973 bp, Arabidopsis thaliana landsberg
gcttttttcgtcaaattcagttattcacattctctcaccagacacgaactccagattcatccgacaatggaaactttcagaacattccatctcttgctctgcttcttcttcttcacattcactactaccctgacgtcaccatctcagatcgcagactgtacaatgtgcacttcttgtgacaacccttgtttaccaaacccttctcctcctcctccaccgtcaaatccatctcctcctcctccagctcccaccaccaccgcctgtcctccacctcctagctccagtggtggtggtccttactactactaccctcctgcttctcaatctggctcttaccgtccaccaccttcttcctccagtggtggctactactatccacctcctaaaagtggaggaaactacccttatacaccgcctccaaaccctatcgttccatattttccgttttactattacaaccctccgccgcaatctgttatgtccggatccgatgcaaagatcagattctcttacggagtttcatttattttaattttctctctttatttcggttgcttctagtttaaaacataattaaagaagataattaaaggaagaagtagctttattactatatcaaccaaacaggttcatttcctcagatccttgcagagattttttgcagacaagaaggtagaagacaagactatgcatgagagatcttcacgctacaaatattgagacgatgagaatattgtttctccatttttctttttactacttttgcttgtacaagtagaaatatatttgtacttttatcttttacaaatttgtgtgttaatgaatgtaactctcttttttaatataagaaaaataataaattgggtttaattacttatgtgacttacattccatctcaacaactagttgacgcatatttggttaaaagacaaccaaaaaaaagctcattttttatctaaaatcattaggtacc

SEQ ID NO: 50619 - DNA, 1000 bp, Arabidopsis thaliana landsberg
gattattctcgttatgatcgaggaatctcgaagtgatactcaaaaaatatctatgtaattatagaagaagtggctaaccttagaattgaaacggtagtatacaagaacttaactttggttctacaatttttaattatggttaacatttctaccacaataccttgtgtaatttatttatacactctttccaatcaaacgtttaatattttgctaaaacaagtagcaatgagattttcttttgtttgggtccaaaatgagtatagtattgtctttatcttaagtagattaataacataataatttggatagtataaagataatatacttataaatatagacatacatacgcttgtcaggttatcagttagattctcttcgtcattataacactcaacaacacacacattctctcctctgtccgacaaagtcacttaaatggcattttcccggcatattcacggcggcaagactaccaccgcaaccgccgtgacaaagaagtccaatgtcccaactccgacgccaaactgctgcgtcacgtgccttgcaagactcatcagaaaactgaagaaaaaagggaggttgttgctggctacgttgacggctcggagacaagggagctctttgcaatgccggtacgatccaatgagctattcactcaacttcgacggaggggcgtgtggtacacttcctgatgatgaggactactacttgcggttttatgctttttcttcaagatacgttacgactactaacaatatcaggaagagaccaccacttcctcgtgaatccttctctagcgcttcacatgaattcatgtaatctaatttgtcattttactcttttgtttttgttatctacaaaaagaaaagactagtttctttattttctgtatttggttatttagttcttagatttaattaaattagtgaagggtaattgttatttaaaagaaaaagatgttcaaaatttttcttgtattttaatatatttgccaaggatg

SEQ ID NO: 50620 - DNA, 864 bp, Arabidopsis thaliana landsberg
aacgagcagggcggggcctgttggggacaaatatagtccagtcctcgttttcttatcgtttaatctcaaaaccatatcttaaaacaggtgggatttgaaaatgagcttccatctaattaagtgaacaaaagttattcacaaaaattaaaattaacctgtttaaatacatcatgagggtttcattaacattgagtgaaataaaacactatactataacccaacaacatatttggaaaaaatatcaacgaactcgtatatggtccggctctctgacagatattggacttgtatcattcaatcagtgtcctttttgtgtaacattcaatgtccaaatcttgtttctagagtgagtaaagatcttttgtctgtttcttctttttctctcggtagttgtacattcaatttaacgaatttactttatacggtttgtcttttttcccacacggttcattccaatattaggatatttagggatacgagaaatatcaacctagtcttttttattggggctagaaatcggataagatgttgaatattcaattatacacttagaaataaacaaaaagctatgtctaataataatgtggagttgtgtacatgtctagtttgaacagaaagattgaaatttgttaataatgaggtattacctttataggatttgcgtgattgaagggtacacacgaatccaatgtaatcaagagcaatagcaaaatctttagttatttaatttctgtatacgaaaatgatatttgaatcttgatagacaactcgggacaaaatactgacgtctagctagctagtctcattaattttaattttttctcgacaaatttagttgtttagttttggattttcttacaaatc

SEQ ID NO: 50621 - DNA, 1153 bp, Arabidopsis thaliana landsberg
aaaagtttaaaaataaatatttttttgagaaatatactttataaatatcacacactattagaaaagaaaaaaataacagagaggagtgagatggggaccacaaacaaaagtgccagctagacataatatttgaccgtgacagtgtcttgctttgactataagcgtcgatcgtctccgggtctaatctctttgccccctttgactgttccttttacccactcatatcccaccacgtgtccacatctgcctcttccccacccaaccttcatttgttaattaatttggttttcaaatttttcatatttttaacaaaacaaactctctaccaaatcaagataatttaataataaaacttggaaattgatgggagtggggatagagaaagagatagagatctgtaagagagaccatgtgttctttttgttgcagttgagtactgacccataacttgaaagtttgctgtccaaacatatatttttatttattatttcattgaaaaatatattgattacttattactggacccatttttgaaatgaaattgcagattcaaatgaaatgattttcagagttgttgataatgataaaaccaaaaattttgtgtctatgacgttttttttttctagtcaaactaagatgatatactaaagtggaccggcaagtgtttaaatgtgatatgacttgttttgtaatcaagtttttttagcctttgggatgatgggagattgatagtgatattataaaaatataataacaataactatatcaaaaaacaaaattgatttaacatatcatctaagtagtaatacggaccgagtgctaatgactggtgtgagtggtggtgactagaggtggacctacgaataaaagcgtaaccatttcatgaaaacgaagtgacgaaaattcaactactgtgtgtcgtattttcgttgttgggatcaacagtttttaatacgtgtgttgaatttgttcttgttttatgtttgttgagctagaaggtttcaaattatgaaagaatgaactgacactaaccaattaagtggtggtctagtggtagacgtctacatttcaaaagaggtagttatgaatttctgattcaagtcttggtttgggacaagatgattttacgccttgtcttgctttgtattacttc

SEQ ID NO: 50622 - DNA, 830 bp, Arabidopsis thaliana landsberg
cagtcatctttatcctgtccagctctacgacatcgtcttaggtctttcttgtttagtgtttttttttttctctgttttttcttcttttggattggattatataatttattttgtttggaaaagtattggattgtagtatataatacaaaaaacaaatacatttcgtataaaagaaatggtcctgcaagtgaagtaacatgcaccaatggatagcttgttgctctctcactatcacaatgtttggatcttcaatatctcacacttaggtatcgtttcaatcagctccctcggtcccactaagatagaactctatggtaagaaaaaaggtgcctcaatacattttctacagttttttttttctttttcaaatggttaattttaggagtttttttgtgtgcgtggatgagtatgtttagtttctatacaaataaaaatggatatacttttactttaggctagctattgaattcttgtttagaatcaatttttcaaaaatatagttacaatcatatgctaatcatagtattgctttttttactgttttttattatgcgttttacaccattccaatttgaactagtttgaacaaatatgaaaaatgagagaaaaatatatatgtatagatagagataagagattttgttttttgtaattttgttttaaaaaaatcgaaaagataaatatcgctttctgatattacattttaatgatacgtatcatgtcaggatacatttagatcatatcatttgagatatttttctacagaaaattgtttttgtactctttcaaataagatggtacgaaataaaacgacattccaaaacacattt

SEQ ID NO: 50623 - DNA, 987 bp, Arabidopsis thaliana landsberg
tattggcatttctctcttaaccactacaccttacttagaacttaaaaacaaagttacttctaccttgttttcaatgattgatgctttagtcattgagtcttccgaattcgatcatctagtgcaagtttcaacgggatattcgcaaataacattgctgtttagtgcaaagaagagtaattccaatcggtgaaacatcttatacctaggatcacatcattttatcgctagcttttttccgatctttttgttccgaatagttacgaatcaaatgcacaagttgcaacgggtattcgcaaataacattgctgtttagtacaaagaagagtgaaacatctccaaattctcttccaaaattatttatttacagattcttaaacgacaacacaaaaacgttcgttcaacaaacatttaaattccgtgtaaaatgttttcgatctcctttgcagcaacttgcatagttggtcgacattgtctcgtctctttcacacacaactccgccaaaactccaagcgccttcatagactcaatctccttctccgtcgctcctatcccaatcaccggatcaatcacatccatcaatctcccttccttcaaagccttcctcacaaacaccaccaaattcacatcttcctcctcacgattaaaatcaatcgccttcttacaagtcaataactcgaacaacacaaccccgaagctatacacgtcgctcttatccgtcaactgaaagttaagatagtactctggatctaaataacctaatgttccttgagcacaggtggtgacgtgactcacatcactcacacctaatcttgataatccaaaatcagcaaccttaacatcaagattctcgtcgaggagaatattacttgatttaacatctctgtgataaatcggcggcgatgaagacgagtgaagataatcaagtccttgagccgtttggtgtgcgatcataagacgccgccgcaacggtaaatgatcgtataatcc

SEQ ID NO: 50624 - DNA, 725 bp, Arabidopsis thaliana landsberg
tctcatgacaatgaaaccaactttgttgatcacagtgccaaagattatggtttgctttctcttttgttagaccaaaaaaaaaaaaaaaaaagagaaaaacaaagaaccgtttttgtttttcttcttcttacataaagatcagatcgtagcagccagacaaccaaagatactacaaggtggatttagatttgcttctcaaaaaagtttttttttttctttcatagaataaccaaacaaagatcgtagaattttcgatcaaagattcttcagagttctgtgctctgttttgtaattgtactttttttttcttgtttacaaaatgaattgttcatgaaaactttgttttcttaaaaaaaaaattagcgtgggagaaatattgtgtaagagagggatatgactattttgttgcatgtatccctaatgagatatatatatatatatttttttttaaagctatttttgttttaatttgtgcctttgtggaagaaaagtttgtgaaaactcttatttatatttatatctttcaaaaaaatgaaaaaaattcatatctttcatgtagttaaacattaatattacacactcgtatttggaaataaactaaaagtaactaggtcgtagtcatatgaccaaactatattttgagaaaatttaccaccattttttctttcttttttgggtaacaacttttattttttttggataaaatgtacattttttgattaatc

SEQ ID NO: 50625 - DNA, 738 bp, Arabidopsis thaliana landsberg
atcaatggtgagttattttagtcatctggttgttttgtttataaactaagaaaagttgaattatataccgtaaaggagaagataatactaaaaatccgaatacgacctacaatgaaactaagaaaatcagtagccaagaatgattttgagtcaatggtactaaatggcaaaaaacattacaaactaaataaatgacttttggtggacgtctaataaagtaatagcaatgaataaaagtaaagattttgcaatagagtctttcatttaattgtaaatggatgtcttgttaaccaaacaatattttgattgttttcattgctatgtgctttattgagaggatgagagcacatgcatgtcttgttttgtaagctgtacctttttttgtcataactcaacatgatagtaatggaatggaatctctttgatctcttgttaagttaccaaaacagaacaaccgtgagagagtggttcatctaatacaataacaagacatgtatctaccacaatcctcacatacacatgtacgcatcccattggccaattcacttccaccaacgaccccaattaacaaaaaccaacatgagttagttattagtagttgacctatactcacttcttttatcttccctccactctctccaatctataaaaccaaatccaacagagattcctaatcatcacacttcaaacacaaaaccacaaagctttaacttccaaaagaatcaacaaacagcatac

SEQ ID NO: 50626 - DNA, 595 bp, Arabidopsis thaliana landsberg
  unsure (1)..(595): unsure at all n locations
nnnnnnnnnnnnnnnnnnnnnnnnnnnnnnnnnnnnnnnnnnnnnnnnnnnnnnnnnnnnnnnnnnnnnnnnnnnnnnnnnnnnnnnnnnnnnnnnnnnnnnnnnnnnnnnnnnnnnnnnnnnnnnnnnnnnnnnnnnnnnnnnnnnnnnnnnnnnnnnnnnnnnnnnnnnnnnnnnnnnnnnnnnnnnnnnnnnnnnnnnnnnnnnnnnnnnnnnnnnnnnnnnnnnnnnnnnnnnnnnnnnnnnnnnnnnnnnnnnnnnnnnnnnnnnnnnnnnnnnnnnnnnnnnnnnnnnnnnnnnnnnnnnnnnnnnnnnnnnnnnnnnnnnnnnnnnnnnnnnntaaataagggggggacggtgggggggtttttttttaaaaaaaacccccctaaaagagtgggggggggggggggtttttttttttttccccccgggggcgggaaacacaccgccaaaaaaaaaaaaaggggggccacaaaaatttgtggggggtgttttctctccccaaaaaaacaaaaaggggggggaagaacacccccgggggggggggagggtttctccccccccccccccctttaaaggggggggggggggg

SEQ ID NO: 50627 - DNA, 397 bp, Arabidopsis thaliana landsberg
taactaacttattttatttagaaaaatataaagctattactaatttttaaacgttactaatctgtttatggtatatttagaattgttcacaacttatatattttcggtcatattgttttattgtttgtggtgtgcttattgtttatttaaaaacgaataatgtacaaacaactctaaatacaaaagtgataaatatacaacatttagaaaaatatagggatttttatgacccacaataaattagatataaatttgcagagactagaaaagattcttattttaataaataaaaacacctttaaaatcaatcaaagggcaaacgtgtctgatcttgacatctaatatcttattttatagtttatgattgaaacttggagattgaagtttgaacttgacc

SEQ ID NO: 50628 - DNA, 752 bp, Arabidopsis thaliana landsberg
aatgactaccatttagggtttcttttataaacaaagttttttttgctaattagaaatatatcttatagacaatgaagatggatctaatattttgactcaaaatcatatatttctctgaaatgttttcttaaaaagtggtctaattttgggctcaccaagagggttcacatagctagttgacaaagtttaaaaatagggtttataccttaatatggtatagtcccgtgaagcaaagataggatcgaatcttagacgttcaaggaaattaaccaccatagtggttaactacatactagtccaaaggtctttttatttttaaaattggttcaactatggtatagttttcttgtgtttaattatttttttcgttcactaactaaccaatatggcagtatatatgcaacgcaatcataagatttggtccaacaacttgaaaaactatagtaatctgaaaaggtgacgtgaaaaaactaaaataactgattttacatactcatattttcaaagcacaattatagttttgaaagtctgcactaaatctatagtaactgcgtaatagatgatcatataaagatcaggatataactaattaatatcgtataactgaagacaatttttcttttaatgcaacaaaatattgtggggctttttcaaatgatttgctaccatttgaagaaaataagatccacaaatctaaaacagacaagaaaatgggaagctcacggataaagctatccgatcattaaaaaaca

SEQ ID NO: 50629 - DNA, 564 bp, Arabidopsis thaliana landsberg
aggtgcatgtacgtattttagtattaatctatttggattgtaacgttaattttttgttaatttttgcctactactcattacgtgtgggttttaacaaagattatataacacggcaacggtattaatccaacaaaatatcaccgtttctaaagattaccaatgccaaccaaagttttaaaatatattatatactaataccatatatatgtaccatatgtttggatcattggattaacagaaaaaaatgaaattgcacgagatacacgataacctttatacaaaatattcacgacgccacgtcgccacctataaagttttgcacttgttacaattattgtagtaacaacttttgttggaccatcgtcacataatccaaagttagtgggtggtaaagtaaaaactagagaagccactttttcattttcttttttaaaacggatattaatcgtcattcacgtcattgcattttttctatttatagtgacaatgcatatcaattttctagactaatttttttgatactttattcggcgaaataattcgcttacatcattaattaacact

SEQ ID NO: 50630 - DNA, 754 bp, Arabidopsis thaliana landsberg
atcccgtgcagtctcactgaacagcttgattctatgaaaatttcttttgatgtatagaggcttctgcgctcaatggttttggaatgtaaaaaggtaagctctcacttttcttttacatgtgattcagtgcttttctgttggaagtatgcaatatttattgggttttcttgcatgatcttctgaagtggtatttccctagacacagcaatgctagggtagccaccgtaaagatgcagattaaattaataacaacccatccttggttgcattctctattccaataaaaggaaagaaaatcaaaaccaaagggggatgtactcttagaaacgccacaaaaggagaaatgttgatatgtgtccatataatcacatcatttgataaattgtgcatgttatacacaatcaatgagaattttgttattgtagtctcttcataagactgactgcgaaattcatatttccagcgccttgacacatcaggagaatcaagcaatgttttggagttgattaaaaccatgcattctctagcttctttaagagaaacaattataaaggaacttaatagcggcttgcgaaatgatgctcctgatactgccattgcaatgcgccagaaggtgagctattttaaacaatccagcattatcatgtaccaatttatttactaatatagtttcctcgtttcattagtggcgcctttgtgagatcggcctcgaggactacttttttgatctactaaccaggtgtgcataacattt

SEQ ID NO: 50631 - DNA, 715 bp, Arabidopsis thaliana landsberg
tgtccttgttaggattcatcttctaacattagtagaaacaaaatccttttcttgtttcatataattaacgatcaagttaaaaaaatccccgtccttaaattttcctttcgctaattttgcctgcaaatatcgccatgtttcagcattcatatctctatcttcaaacaacaaaggactcacttcacccacaacaacgggattgtttgatggccctgcagcaaacgtaaaattgtttgcattgtgctcattattttctctaaaaccaaacatgtattgtgggtcattatcactatcgttcacttgaggagaagctttatcattcccatcatcataacccaaagggcaatcttttttctttatgagtcagcataccataattaacacagaattattttaatcttttatagcgtaaactcagcactaactgttcatcattaccgaagtggaatctgtgctgaaaacgtaaaggattatcaacattccaatttactttcaccctgacaaaatccacacggtttgctgcttcatcaaaatcaacagctgccacatcccaatgtttatctccaatgtacttgatcattgggcgtgttagatattgaatgggaattcctcgaatttgaatccaaaaagcaattatcttcagcgctttgttgacatatttggagtccatctttgaacaagcaacatccaatcagtgaaagaccacagtcatctc

SEQ ID NO: 50632 - DNA, 506 bp, Arabidopsis thaliana landsberg
aaggtcctgaaagtggttgaattggaccacaaatgtctccctggattcgttccaagaaggtaggcatttcattctttactttcaaaggcgatggtctcactatcaattttcccatggcgcatccatggcatacaaaatcttcttgatttgggagtgtttcacatttatgcagtgtctttgtgagttcttgatgatatttctcatcattctaagaccagggtgccctagtcgacaatgccatggagagaataatttagaatgtctaaacaccgtttttagggaagtgtacattgcaggtgcactaatcttagtataatataaccctgattctagctatgggaatttttctatgacttctttgtcatgatccccatactttatgatgcataggtattctttaccattttcctctatagtttctacatgaaaaccatttgcacgaatgtccctaaaactcaagaggggttctggttgatccggggtcaatagtgcctctttgaattcga

SEQ ID NO: 50633 - DNA, 929 bp, Arabidopsis thaliana landsberg
attgcgtcactttcttgagctaaaaaacagattttttttttttaaaatttcaaaaaagtacatctgaatgtgcaggcaatttaatatctaaactcatacgtacatggccaaacttagctttcatgtcagaagatggataaaagttttcaatcccaagatagtatatctattcacacaaaacattccgattttaaattatgttgttactaaataataataataataacgacgcaactataattaattaggctaactataaccatatttgttttataaaaacaaattaagttagcatacgaaaaaggtgacaggccaaaacacattcaaacccatctgaattcacattttctatatttttttataacaaataattttcttgcatgttttatacacaaagaaattgacatcttatgtttctttttgtataaaataacatgtcaatttctacaaggtaaaggatttttccaagtaattatccatggattgaaccctagattcgtattctctaatcgttattctttatttcgagcacaagacatcgcataattttttttttgtcagttaattttttttcgcatatatagaaccaatcaatctatactctatatgtgaatacccgaacgcctaacctaataaaagcatactaaactgaaggcaaaaaaggttcaaaaccaggtccattagaatgcccaatagaaaaagtcacttagggaaatatcaactaactcaaaaggaataagaagaaatgggctccaaactcaatcactgacacactggtcctgatcggatgctctccatctcaaaacggcacgcccaaccacgtaggctagcaccctccctaaagagtaattagcgggcattttcccccatcatatttgaggtccaccgattagtgtgaactttagtttacgtgtttgtaatattttttt

SEQ ID NO: 50634 - DNA, 879 bp, Arabidopsis thaliana landsberg
aattgttaggtttatattttggtagtatttgatacatgtaggttctttttggctacctactcatcgccgtttcaaaggtatttcaaattatattattagatcaaagagtttagagtaatcaatgagttgatctgaagataatgttatttaattataacaaaatattgttaagcaaatatagagttataaacttgatgtctagatatcatttggtttattcatttccgtatatgatgatagatgagatggagacatgaataacattaaaacgctcagtttaatctttgaagaaacaaaaacataacaaatcgtatccttctttttgattatgcatatcttgtcaaactataaaaatgataccatttgaagcaaataaacaatattataaatgtaatttcaaggaaaatgaaaggggaaacgagtagacaaacgaaatacgttctttcctttatgctttttgttgttacttttttgtatttggcgtgagcggataagtatcgatatctatctaatgaattcatccacgggcttgctgtgtgtgagtatttctgtcttctttttatttttcaatatttatgacttatatgaaatttcggaacaaaacacaaatatttttcatgcagccgttgtgaaaagtcaatcaaaactaaagatatataggttatgtaatggtcttaggactggaattaattgacaattttagttataaactatgtgactatgtgttattgtgttgttgatttgctgacaaccttttttgtttcttaaatgaagaaaaaaagaaaaactaaaaatattgattttattgatagagaaaatagaaattttgatggtgaggttggtttgggatcgattgcttactcctgtacccgaaagcat

SEQ ID NO: 50635 - DNA, 269 bp, Arabidopsis thaliana landsberg
tgcactgcggaggtagaggctatgctctctctccttgacacatgaacgagtttctgttgctaggagaaagcactcctggtggcgaaatcatctataatatgctgattttctatatgtccagggcaaaagaatcactatggaggttaacacaatgtctctgctcgcaaatgccaggagacagagtgagttgttgcgcttgattgaaatccacatattacacttttcatcgatttcaccggtagtactactttcgtactcgcacgtattat

SEQ ID NO: 50636 - DNA, 685 bp, Arabidopsis thaliana landsberg
cgcttttatattagcattataaaaaattatagataaagataagtttttgaattcttcattgtcgctttgcaagttctctagatacacagtaaataccgacaattcggttagagaaaatatatctatttcgtataataatgttaactttgaggagattttgggtaaaataataacttttgttggatggatcatatcatgagccattaagaaaaagtccaaaacttttcttcttcaaagttggactcaagttagaaaaagaaaaaagagctagagagatataaaaatgaaaagaaagttcatggcaaaaaactgatatagacagagacacagagagagagaaacgtatctgaagaaaatctaaaaaattcgattcaatttttttcttacttttaaaagcaaaaaatctcactaaaacaaaagaagaagaaagaagaaagaaaatggaatacctacatttgaagtgatgagacgagattttgtgtataataataatgcaatgttcaatcctctcacaactcattacaggtaactaaaataatttctccatgtgcttgcttattagtcgttcttcctaatgttatgtttctctctgtgttctttctttctttggtcaaagctttaattttttttctattgttggatttgagacagtgaacatagctatgttcttgttccaataataaac

SEQ ID NO: 50637 - DNA, 728 bp, Arabidopsis thaliana landsberg
tatgtaacactagattttagaaaagaaaaaccatccaactcgatcattcatcaatattatatagagaaaacagtcataatgttagagagacacgtatgaatcgaaattcatattactgtatttcgattacctaaaaagaattaaaagtttgtgtggaagattccaatacacgttgctatcggaagaagacttggaaaattattcctcaagtcgttaatgcttggaattagtgactaacaatcatcattattccattgaaagagccgcccacgacgcgtttccattttccacaccagtcaaagttgatgtctcaaattagtaactgatttacaattttaaattacaaaatacaaagcccgtacaagctaatgtaaactgaagtaagaccaaatacattaacaacttttagtttagctgttcaaaggacagagatatgacctcaaccttaacccaatctttcgtctgtgtttgaaacttctgctcgtaaagagactctagtaaaacccttcggaagaaattttttaggtagtcgccatcatataatttaaagcttatgagacttgttatgttacaagcagagaccaaagactattcataatcacttatcagagtataaaatactctttttttgtcaatcgagtataaaatactctgatatcacttatacaaagttctacgaaactcattaaagatttgagagtgtacacgggccaaaaggtgctataaat

SEQ ID NO: 50638 - DNA, 277 bp, Arabidopsis thaliana landsberg
gttgcagtcttaaagggttttatgaaacgaaaacgaaacacaggaagcttacgtggatctattcactgggaacttgtcacataaacgggaagtttgatcaaaaggccatcgagttaatagtgtctacttaccaggtactgtatgtttctcagaaaatactgatatatattttctatctgtaaacggactctgatgccacgttctctgtctctataggctgctgtgcttctactctttaacacaactgacaagttaagttacactgagatcttggctc

SEQ ID NO: 50639 - DNA, 593 bp, Arabidopsis thaliana landsberg
ctaccttataatttggctatcatgtccatattcactccaatatttctatttggtgatcatcaaagtccatcactctttataattcctactaatatgacacacaaccacttactcttctcctaaaagaaattggctcctaattaaaatacttgccttttgcagagatcaaagatgaactatcgtgcttggtatcaccgttgctggttggtttcttacatgacaattgagcaggtgaatgattctctacatttcctcagatatccttatcttttgaacatatcgtttgagcttgtaaacatttcatatggtcagatttccttaagtttgcaacatttctctgatttcatgaaatgggttacttttgttagctaaacttgtgacagtttcagatggtctaagatacaccatattttttttctcatatgtgattccaagtaatatatacatgttgtctgttctaggtgatacaagagttgaacaaatctaaaagatgggctgggcttcatgtagccgatagttcttgcttacaatatcgaagagtaagggccgcatattcagttgacgtgattgtggtatagtgagcgtatacatca

SEQ ID NO: 50640 - DNA, 743 bp, Arabidopsis thaliana landsberg
aagtgagaggaggatacaaacttgatcatatatgttctcatcttccaaaaccttttttcacttttcactctggcaatatcataagaagatgcacttataccagacaaagactctattgcagagcagtttgaagcaacttgttcacgccgaggcagagttttgggcttcttttgagtttcattgttaaactcagcaaagtttcttctatatgattgagttttcatcacattgggagacccattctggttttcatcttccaaacgttctgacaaaaggatcttagaaccaacaacagcttctcctccgggtttactgctaccgctagtacaaaattggagtgacaaatctgtgtttgcttgtggatctatttctgagtgtataacaataggagacttaatagaatccaagctggtaaggttcttgaggtactcattttgttttattgaactaggcttagtattagtaactgatgatcctttaggacttgtataatttatgccttttttattcagcttcccctcaaactttgtgttgtagattggtgaaaactgattcttttcaggtccatcaatctgttacaaaaaagtattcaacaagtcataaagtgataatctaaatatgcattgtcaccattcttgtatataaatctgcagacacacaaaaccaagaaagttgaatgagtgaattaaaaggactcacgagacgggcattgtttggtggtggaaggaagagacaaagagaag

SEQ ID NO: 50641 - DNA, 791 bp, Arabidopsis thaliana landsberg
  unsure (1)..(791): unsure at all n locations
cagttttttatttaattctctttccgcaaaactggattttggaagctggttagcgattcaatcgattcgtggggaaatacccacgaatttgtttgcctaattgtcaaatgcttcaggaaaagaaaaatgagaatctgactcagtttgaaatgttgaaagcttgggtttttgtcttccttagtttcattaatgataatgtgttgtgaatcttgctctgtgttatttgttcagggagatgggttcaagctggagaatgcagtaccatgagatgttttgcttctgctactcgtggcaaaaagttagggtctttcttataacattgaaatcaacaagtttcaatctttctatgcttcatttcaatgaaactctttattgttctgtaacagcaaaaaacagagactagatgaggcatgtgttgaaaggtttaacgaatacagtcgcacgctaatacaatcgtggattatgcaaggtaggtgatttcttgttttcatatatccataatgcatacataggagcaagaggttcttggtgtagcttaatcttaagtgtgtattatatgttatgtaggcaaagttcttgtggatgggagaaagagttattaaagctggaatgcctgtatctactactgcagctataaagatcacagctgaagttccaaaatttgtatgtaggtgattattcttcgagttgccctatctttctacagtttctttatggtttagactctgtntgttgtcgactgtcctctactggtttttttgctgcagaggtggacttaactggaagctgca

SEQ ID NO: 50642 - DNA, 1198 bp, Arabidopsis thaliana landsberg
gaacaataaatcagattataacaaatgtgggagttggcgaaattagaaaggtggggttccgtcatttacgacgggtgttaggtgagataagctagctttactcagtctcatttaatctcgatcggttattaacttattcttatcaatcaatctacttataagtgtaattaatttattactatttcaaatatgtacaaattaatacacccatgttttttttaatataacacaacattcgaccaacttttataaataactaaatatacaaaatcttgaccatgaccatcttaaatttgtatatataagaccacgaccaacgccgtgtttatatttataaagactataagcggttaaagattatttttttaaaaaaacttttaataaataatgtttgatataactctataaaatatcccatactaattttgcttcaatattcaatataactttcttttagttttagttactttttttaattgaattacatcttttttctttatattcttatcgtataaaaaatttagtttttcagaattaaacattaataacttaacaatacaaagatgtcaaaaaaaaaacattacaattcgacctaatatcttcaatttcgacacatgtaaaataaaatttaaaaaatcttcatttttaataagaaaaacttgttttataatacaattgagtctccaaatcaataaaataaagtatacatgattataagaatttcaccgaacgttagcggcaaagacatgcccattcaacacgaagctaaaccggatacgtttttgattacggacacgttagccggttatcgtttgaatgaaaattgacaaatgtacccttctaacaatcgcaaacatggaattaccaataataccgttacaagtaaattacctaccacaactacaacaacacattagcgcttgttcttcaccaaacaccaccaccatctccgatttcgtttataaaaccctcaaattctcatctcaacacttttcaggtttcgtgtaacatttcacacacacatttgtcgaaatcttaacaccaaacccaaatcagaaaaaatcaaaactttttattttattttatcaaaatggcgcttatgaatggaagcatgaatctatcatcggtcaaatcatcgatgatcaaccacccgtaaccaaacttttctgcgccgtcttcaacccatttttttcggatc

SEQ ID NO: 50643 - DNA, 272 bp, Arabidopsis thaliana landsberg
ccgatttcgtcgagattaggccagagacgaccaagacgacgagatcaagccctctctctaaacaagagggttcttcttcttctttttcagataatttcgagttctctgtctcaaactacacaatgatgccagctgatgaacttttctctaaaggaaagcttttgcctttcaaggaaaccaatcaagtccagagaactttaagagaagagcttctcgttgaagaagacgaagaagaaggtccacgtgatgctaccaacatcttctctctcaag

SEQ ID NO: 50644 - DNA, 692 bp, Arabidopsis thaliana landsberg
ctctcccgcgatagtgtgatggcgatcactttcgcggaggtcaatccatggagcagcccacaggttcgttgcgcgaccgtcgcctggacgcggtacgcgcatggaccgcgttcgtcacagagggcgacgacgcggtacgggtgcggccggagattctctcgagttggcagcgctcggcacagggagctgcgctggacgtgaccggcgctcccctcgcggacgagcacgacaccgctgcgttctggcaggactcaccattacaggcggcggtgtcggcggtggagccggagttgcggcgcagcgcagaagacggcgacctcgtgcttgcgctcaccgacacccggacccgcatcctgtggacgtatggcggcagggtgatgcgtcgcaaggcggagtccgtcaacttcgtcgcgggcggacgctgggatgacacgagtgtgggcaccaacgcgttggatctggccagtcggctcgatgcgccggcgacggtcttctccgccgagcactattcgccgatcgtgcacaactgggtctgctgggccccacccgtgcacgacccggtgagcggcgaacgcctcggcgtgatcgacctgtcgacgacctgggaccgtgcgcacccgatcggtctggcgaccgcccggatgaaggcacggatgatcgaaagcgccaaccccgatacccggcaacatccc

SEQ ID NO: 50645 - DNA, 591 bp, Arabidopsis thaliana landsberg
tttcttattttccatcacttcaaagggcaagttttgattcataatataagaatattcatttcgaattcttttaaaaaaaatgaattacaaataatctatggcttaaagagaccaagatataaaccatttgtctcatataactctaatttaataataaaaactgtccaatccataaagcaaaacaaacttgtttatgtacactaaacaaaataattaagttcatccataaggcaaacggtatatggtcggggtgtggttgcgcatggccagaggttggcgcgagagagatttcaggcggtggtggcactaaaagttcctttagaacttccttcgttcttgtatcgtgagagataacagagtaaagacatctttttaagtgatagagaataagaaaataaaatacaaatagataaaataaagctggaatactattttagagaatattcattcttgcatattatttagagaagccaaaattgttaatactatgagtactttaatagcaaagatcactagaagctacacaaccacccgccctgtattgaataagagtacacgctacatggacattaccgtacatgtactgtggat

SEQ ID NO: 50646 - DNA, 803 bp, Arabidopsis thaliana landsberg
gaagacttctccaggaagaattggacattgagtaacaccttctactccatcgaaccatggagtcccaatcttaaacatatataaatcaatctttttcagtcattcaccgagtgttttgatttcagatcttacgaggatgtttacgtacctgtcggattccatgccaatggacagcgacattttcagtcatgaagctattcttgagctcgacaacaatggtgtcaccttgttgagctttaatggtgggacctggaaacttaccattgattgtgattactagcttctcgaaacaatccggtgacttgaactcgtacttcacttcccatttgaatctccggatctttccctgacagaggacggaagaaaaaaacagggcaatgaaacagaggaccataagattgaagacatgaactgtgtctgatgatctcttcggtctcatcatttttccaatcgtgtctccaagaatcaaagaagataagaagctgagatttcaatatatagttcgagattctttgtgtggtatgatcaattcatatatacataacgatagatcattgcatgtcatgtgtttacagataactcatttgtcttttggagaaaaactggagagaaaacgcgtttcacttttctacgatttagtgataatttctaataataatacatcgacttttattagcaaagtaaaattgtagtatatgattctgtgtacctcatgtgttttgtaagtcataaaagtcaagtatgttcgatgcttctacactgcttttcctttttccgtagtaaaaccacattatattttgatg

SEQ ID NO: 50647 - DNA, 469 bp, Arabidopsis thaliana landsberg
ttgctggttttgctgcatttgttgctgggtgttctgcatttgttgctggttttgctttatttgttgctgggtgttctggattggtgccagtgcttgttggagttgattcgcgaccgcttgttcaaacccttgcggaatattttgttgcaccaaaccattgacatttgctgccgacaaaatgccacactgaattgcgggaaagcggaaatttattcaaaaaataaaaaaaaaaagaactaaacgaatggccttggcccaaatcagcaaagcaattacactcacataccaggctttgacactgagctcccgaagttcagattcggcaacatcatcgtcggtcaaaatgttcatcttgcgataagactttcgttcgcgggtttcccgacatgcattggtcacgtcacccaatgctttcgcattccctgcggcgattgcaggagcgtggtatatcggcggataagctacttgt

SEQ ID NO: 50648 - DNA, 863 bp, Arabidopsis thaliana landsberg
ccaaaccttaattgataaccggtttggtttatgaggttggttaaaatactattatgactattgaattgtttggcctgatgattgaataacgggcctagtagttatatgaactggaccccattaactaactttttgaggacaagtcttcagatatttgctttgtttggccatggagtattgtttggtagtattaagactttagccgttggcagaaaataaatagaaagctaactttttgtttgtcatctaattttatcttgtcggttaattagttgaagtggtacgtcatgagtccataacatgatcaggaaaatttcatagagtacattgttttagaagaaagagttttttttgttaggtacatttttatgcattaaaatagatacatttttatgtgtatgtaagtttcatctaccgtttgtgatttgtaaatcgaaagttagtcattgtaaacttctctagtttgtttgaattatgaactcttgtatatgatatgtcgatcttgatatcatggttgcaattggttatcgcttattggatcggtaataggaagactctaactttttgtatggctttgtattagaatggatagagatttcttttggaacaaatgttaattcaaaccgaaattatttttttgggggcaaaaattcaaactgaaactatgacatgtagttataatagagaataaactatgtaatttgaagaggttaatagataagagtattgtaacagccatctaaaactgttagctagttaggtgcaaatttatacatgaactacaaactttggtcatttcataaacaaactacaaattttggccatttcatatataaattagcatatttcattttggaagccat

SEQ ID NO: 50649 - DNA, 577 bp, Arabidopsis thaliana landsberg
caaatggaccacctcagcgcgcctcattgtttggaaacaaggcaccgatacagccggtactcaatgtgggcaccaatattttcatggattacaggatccgtccaacgggagattatggttaccagttacccaatggcccgcgtgcaacaggggtaaatgcccaattgctggtgtcgtatgaagtgaaggagaacctgttcctggaagcttctgcgctgatcaggaattataaatcgggggttgctgaaatagcaaacaggaatatgtcggtatttacagctggtatacgaatgaatatgttcaggcgggagtatgattattaagaccgaacgataagaatattttaataaaaaggcaggcggcaaaattaccacctgctttttttcatcggtgatacaccgaccgggttatagggtatcaccattggaaccacctttttgagaaacgtgttacggatcagaacctttggtacagaatgatcttacactaaaccccgtgtatattgccttttccttttttgaccaccttgtttgaatacgggcgctaaactattgtgcagaatggtatgtacctgtcg

SEQ ID NO: 50650 - DNA, 692 bp, Arabidopsis thaliana landsberg
caccacatcctctctcattcgctcaggcatggtctatgatttccaaattgacggatgagaagacttctgctactcaacaaagtcagaagctccgtctcgaacttgtacgcgttgaccccagtgcactaagtgatctacttgttatttgtgtaatcttcataaacgaatacatgtatatattgtgtattcaggaaatgctgaggaaagaaacaagcaagaagcagtcgggtggtcattccttgctcttgatgctgctggtgggtctgctcggttgcgtgattggctacttattgaaccggatataaacgccatggggttagcttcatcatccttttaatcatcaaatcttgcaaagttcttaagatttttgaccagattttcgtaaaatggaggtggtttttttttaaaagtttcatatttaagctgtaaaatcagtagctgtagcacaggaacaggtgtgattttgtggcaggtttcttgttattgatttaaacacactttcgagtctgtagtaagatctcaagagtcgttcttatgattggaattaaatcagattgattaagaaaacaaaagcatcatacaaagtagaaagaaaacagttacatgttttagtcttggaagaaatctttgggcttggtctttgtctttcgatatctttcttccatctgcatgcccatggaataagctgcttg

SEQ ID NO: 50651 - DNA, 659 bp, Arabidopsis thaliana landsberg
cgttgttagatcatcaagacgatatcaaaaggcgggtcaaaagaaagaaatgggaagagaaaggttcagctttgaatgaaataatcgataaactgaacagagcaagaaccgaagaggatctcaaatcttgcttagagatgaaatcaaagctctgtggtcaagtttctcccactgctgcttccgagaagaacaagatctttccgggtgtagtccgaaaagttgagatgagtgaagaagcacttcaaaaaatcgctgagaatctccaatcttttgacaaagttggaatgttgtgaagtcgagaacatcctgtggatgaactgaaaagtttgagtggcaagaaaatttctagatccttcgtgaccacggtattgtacaatgatcaaacatccctcaaaactgatcctgaagactccaaagactcaagagattcttgtaaagtagtgttgagcatcatttagatattagaactcagccatggataaagctgttgattctatctcattggatttttttcactgtgtgttgttgctttgttagatttgaaattgctcattggattacctttgacttaataaatagttggtttggtttggtattggataaccgctcagtctaaatagaccggtttgtttttttggaaaaaaatgaattccttcatt

SEQ ID NO: 50652 - DNA, 1073 bp, Arabidopsis thaliana landsberg
cctccttgttgggtgcatcgggaaattgatttgaaggcgaggtgctcttagtattactggctctttttgtccaagaactctacatatttgtataaatgcaaaaccaatcaaaaatttataaaccgatttattcagacattgttattatctatagccatagaacagattacctgagttccactcccgttatcactcccaccatcttggttactcaaaccaccactactcccactttcattcctgtgttcatcactgatgctggcatcattttctgacccttcggtgctttcaggtttcaccgacttcttgtcatgtattccactctcacttccgcttccgctagactggtaaatcaataaacgcataagttagaaaaaaacacagagtaacttttgtaaaacaggtaaccaaatcagaactcttacgctgtgacatcttctccagacatgttgccaaagattctttagttcgttctttctaatgggtttcacgagaaaatcaacagcaccattcgacaaacacttaaagaccagaaccatagaatcatgtgatgacatccctacaaaaagaaacatcacatcttgagttacacaaacttgagcatggcatattgaagctggataaacaaaaatttaatcaaggatttgagtaaatacttatgacggggatgttcttaagtgtcttatggctcataatcttggacagcagaccggttcctgaatgcacaggcatgtcaacctttgttaagacaagatcaatgcaacttttctcatcttctagaattctccaggcttcaaggacatccggaacagcagtaactgacaaaaagtttccaaatttacaactgttagtcaaaagcaaaaatgtgattgctaaacaaggatgatcaattcaatataagaaaaccttcatagctgcaattccttaaaagggcagtaacaatatggcgtgttgagtcatcattctccaccagaagaaccttaagcgatctaactgtgagatacctttccacttcacaacatgagctagcggttgctgctgttgtggagaaactgtacattgttggtttttta

SEQ ID NO: 50653 - DNA, 966 bp, Arabidopsis thaliana landsberg
gaaaatcttaatttcttaacctaatgatcaatggagcctaatggatgtttatgccccaaagttgtggtctatcagtcgcattgttcagtacgatcttgtgatttacaaatggcaagatcatgaatcatgtccatgatgtatgtgctttttctaattaaggaaagaaaatatcttaataaatctctcttatgactatgactggtctttaatgcaattctctctctctcactctctggtcttcaattataattgagtttctatataagaaaaacatatgcatactacaaaagaccaagacggatgctttattttcttggctgcgtatatactgacaactctagtacgtctccatagtcatttcattcaaatttcattaagaggagaaatgaaaacgcttttgtattggggttggagtagtctcgcaggactcattctcttcagcattcttgcacatggggaaatgaacaccttcaacgagtccaatggaacaaatgcaaatgtactgatggtaggactcacgctcgtccaagccgctgctgctaaaggagcgggtaacaattttcttaccattcatttcgattgagatttagatttctgatatgcatgttagatctccaatgtttcaaacgttagttttcaagttttttttacgaaatttcgtttgtaccgtgtcattatttttcatcattattacaaagtttttgattgtcattttcatgacgcatggagaaataattaaatttttgtggcagtgtgtctggatgggtcagtgcctggatatcatttgtgtcgcgggtatggttcaggagcaaacaactggatcattcagttgcaggttcttacttaagatatagcaagctctttgtatataaactatagagatacttaattatcgccataaccatataaataagggtaataaattttgttgaaagggaggtgcatggtgtgacagcatacaaaact

SEQ ID NO: 50654 - DNA, 257 bp, Arabidopsis thaliana landsberg
ttttttttccctataaactggttttggaatggttacatcaaactgaacatttgaaatcttggttacattgtaggcatctcgtactaagaagtatcagccttcaaaacctgtggttagcttctccaccgcagttgttgttggggtgctcggttcagttccaactgttgatggagatattgtaaagacgattttgccatttgtggactctggtcttcaatctggtgtgaaaggatgtttagatcaacaggttttttagt

SEQ ID NO: 50655 - DNA, 931 bp, Arabidopsis thaliana landsberg
  unsure (1)..(931): unsure at all n locations
tcagattataagatgcatggaataattgaaattaagaatatacggatagaaagcaaattggtgaaataaaaccctaccacgaccacttgtttattacacattgtacataactgttgaatcaaatcaattgatttgggaaccattgtgaagatgatcatgaccattcatctatctctatattttattagattttattttcaatatatgttgatactctttcgtaggaccatgatgcatactgctgcatatatgataatactgtatatttgagcataaagacagttaataatcctagtgtaaaatagaagaccagaccagaaacaccactttctcaatggtatcatatgttacacattttatcactcaaatctgtttatgaatcttatgatagactcaattatttcaacagatttatggtggtagtacaatggctaatgatgattcgacatatgtaaataggttatagtgagagtcttgtggttttaacttgtgcattgtaaacgttttaagtggcaaattttatagatgtcggagattaagatgtgtttcgatcttggattcataaatttacataagaagaaaaacatgaagttatatataagatttgatacataaaaaggcaaagtataaatgctaatatatggctttgcaagctggaaactaggcgggttcggcggatcctgtccatgaaagctcaccacacaaaattaaaatttaagaatcccttagggttgtttgtatatatataggtagggagcatcctaagctttttcttttgttcctttcctcttccaatttccaactattttcttataagaaaatctgcttttgttttatagtctagaatatcattttgactttaattntctttcttttttaatgacaatttttgattctagtcatattcatccaattcattcttttgtttttt

SEQ ID NO: 50656 - DNA, 1006 bp, Arabidopsis thaliana landsberg
attctctcggttaatatggcagtactataaacacttatccataataggaagaacatttgtaacaacagtttttggttattatgatgacggggtgtcatgatgaacaaaccttctagcctctgatcgctcagcagataactttcttgtcttagtagcagggaccacagcttcgcttgtcaatataactttagcaccagcgtccagagaagagtgggctatggctggtggaatgttgctggtcatctcaaattgtccagcaagctctgttgcctcgggatatcctaaaccacggtttcctgtagcatgccattaattttgtacatcagttctggtaacaataccctcgcaagaagaatgcgaggagaagtacaaaaactaaacaatcaggccattgtatcttcttctgtaatatgaagttctaagccacaaggaacgcacagaagaagatatgattttaccatcattaagtagggtgattccattttctgtgccattagttaaactgggtgaatccaacggtaaaaagcatactttaagtctcctggtgttatttctgccacctctttgtctccgcttacgaggtttcgagctgcaaaacattatggttggatttacagagatgtactgacaagagaagcaaggagttactgctattaaggtatttaatcgaaggggttctgagggttaccagagagagaagggctcaaatttatcgtcatcacttccttcttcctagtacaaataaggatggaatataaacaaaattttcaccagctatcggatttcccaattaaccaagtttaaagtaactgacctcaaatatgaaggaattaagttttacagaaacattaactgtctggtattctttcgaaagctacaataggaaagacccttttttaactataacctcattaataaaggcatagcaaatcaagatttccataaaacacataccttgaactcaaaatcaataaattatgagatgattcaaatgaaattgcgcccc

SEQ ID NO: 50657 - DNA, 2668 bp, Arabidopsis thaliana landsberg
actcgagtaataaatttactcaaggagaaaaatatcttctccaattaatgaaatgccggtgaatgatgttacttttgaaactaatattgaagcggtgcgtaatggatctgtagttaatttcctgtgagcttttaatgcagtgtgccataaaaatggatgattgggatacttttgttgagattaataaatgatagggttctctatgtaaaagaccaaaagaaatgagataaataagcaatatagatacattatgtagccgacttcgaatcgggtgagaagaaaaaggagggaaaaaatctggttggttgggattgagattctggatgaccttagtatgaagcgtgtgggttccaccaagaaaaagcggccgccgcagctaatcttgtttcacacgtgtctctcagtattttatttttggttaagatttaaaatgaattattattcccactcgaatattataatgctaatatatttttaattaagatgtgatcctgatatccatatctgcaactaacctgtattttattaattctacacatgacccatcacccatgtgtataattagtatgcctatttctctgcatattcttcttctttttattttttttaatgtaaaaattaatcttattgtctaaagtttctggtattgaaaaattgtgggaggtggggtttctttgggacaagatgatgagatgaggggccaaaatgaaattacctcaatttacggagtccttcacgtaaacaaataaggctagtaaatatataataaatcaatgaaatgaaaagaaagacagtgagaatcaaactttatcggacggtggagatgcacgtgaagacaacccaatatcccgacataaacctcgtcaacacggaatttacatcccatgccactttcacacgcgccatatgctcaaccacacacatcttctgtaaaaattccggttttcacttaagaaatatgttaacagagtcaatcgaaccggatttttaaggcatattaggtcaattataattggtggacttctacttggataactaccaataggaaaagtaaatattaatttttttattttaagtgattttatcttcatgaactgttacgggcatacaatgttttcctctgcaaaattgtctctcttttaaaaacaggagtttaacttatcaaattaacttctaaaatatacctcaactattctgtctgagtgaaattatttgaatacgataaaagatgcgtaaaaacattctttatttctagatatatatatatatttgtaaacataatttactcgctataaatactctctttgagaggacaaagactttgaaataatactactaaaaagtcttattctcataaatatattattaaaaaaaatgggaatgtgggcgccaccgtctctgattcggtctcttctgaaaaggatgatgatgactcgcgctgcttggccgtcggtgccgcttcactctttttttttttttgcgtagttaataaacatgaaagtgtatgatccagacacgtggataagaatagaatctagccgttggatctacacgagaatcacgaaaggatagttattgactctttctgattgcggagttggagacaagaatccaatcaaaaacctctcttctctgcctctcattatgaagccgctttctatttcacaccctcttatacgtcgtcgttttctttcaaacttttaacatcattgttttgtacctatatttacattttcaacacatcacgccatcattcaataaaaaatttcgcaagttaaatttactttccgcacaaatttaaaacaacgaaataaaattcaaaaagaccagccatctagaaataattggccaaaagaatatctataaataacactattgttagcttaacgggtcaaatgatgttggtttagtccaattcaactccgaatcaattcaatgtcatagtttaaagaaaattaattttgcactataagctatatattctaaaagctttcagataaaaaaaaccaatatctagactagtcatagttgtttctttagagactttgtgtactctttttccattttttgccgacaaaaatttgtttacgaaactagagatctttcttaaaaaaaattgaacaaaatcttatctttgttttgtggcagtttcttttccaaatttaagaatctatcaaattaaaaatctaggttctctctgtcagacctaaagagtgttaactctcagcttcaagactcttccaagttagctagaaagaaaagaaatgagtatgtccgtactctgtgagtggaccctactactaagtgacgtaagcgcaaagaattttctaacttacgccgcagagagcaaaacgagggcccacacacgccggctgcgtgtctgctggaaacttggaccattgttaaaagccgacgatactcaactaccattttattaatctcactttgaattttagtttttcttatacttcaacttacaattattttgttttgtcaaataagtaattttagtcccttcaatttttttaatttggtggtaacgatagaaaaggaaagccaatagaaggagccgccacaactcacaagtagtaataatcaaaatttcggaaattggattgtgcaagataattctgaagattaccaaattattgattgaaaatttggaaga

SEQ ID NO: 50658 - DNA, 888 bp, Arabidopsis thaliana landsberg
aaacaacagtgtcataatcattaaagtttatcggaagtaagcttgcccaagtctttccactagcacatatttctagatcaacttttgaaatctccagaaaacagaactaaaataagtaattgaaaataggtgaagaggctactttataaaatcagatgtcctttcatacatgccacggccaacatagtgtctctcctgaaaaaatgaaacaagtaagcatcagagattaaaagaaattattcaagtttcaagcattaaaaaagaaagagaaacataggcttaaaacctggcgcatccacttaaagaatcgaatcacaggccaccgatcacatttattagcaatgttgtgacaagttgggatacgcatcaggatactaaaaaagaactgaacacctccatagatggctatgacgatcaaataaagctgaactataggtgaatcagaatttggtgctttaagtgatttcctgcacacaaaaaaaaactatcaaacaaagtaatgccaaaagctatgccaagattaaggaaaatagcaaatgcaaaatgaaagctgaagaaggtacaagaaaagaatattaacatacacatagaggaaagagatgaagacggaagcaaggccaaaccaaatgaaacgaagaaaaatgcgagaaacagccagacgtcttgttgtagaataggcaccgtacatcatgataacttccaaaacacctattaacattaaacatttgcttattcttcactaattcataacaataaatgaagataaagtaaagagtatgaggcttaagactgactctcagaaaacttcatcactacaaaagtcggacccaggctgagaatttgaagtaaagtctttctggaagtaaggtcatctttattgactcgcgt

SEQ ID NO: 50659 - DNA, 977 bp, Arabidopsis thaliana landsberg
gctttaaacaaattataggtgaaggttgtagcaaaggtgtattggggagatccaagggagaaactttgtgatgctgtcgaaaatctaaaactcgattccattgttcttggcagtcgaggtttgggttctctcaaaaggtaaattcttatgcttacttgctatatatagtctagtttcgttggttaaaaaatttcgaatttcagtaaatttaggcaatatagcttcaaataattgaaactgatttggcttttctcaaattaattttagtatcacttatttcgttattctgtggttaatcaaaaggagaattggagtgataattaataattacgttatctgtgggtttttttgttgttgttgtaggatcttgctgggtagtgtgagcaatcatgtggtgacaaatgcaacatgtcctgtcacagttgttaaggctaattaaagtgtctcttgttctttaattggacccagttaataacattagtagttacgtgtgtcactcatgcattgttttgacatttatacgtttgttgccttctacaaatttgtgtgaaactgattggtactgtttcattaataaatttcagttaaatgatatttactctctttttgtttgtgatttgtgaacgttacgtaaaaatcacaaaaaaaataattagtttttctaattcattcatgaaaaatcttcgtggactaaacaaaaaagatgtgaaaaaacaatccccatgtttgatccagattaattcgatccgttaatcaaaagatggtcttaatgagcataattcggggataaagtcgaatatagaaatagttgttgaaaagagaaatgtttggattgaatcttgtcagcttgatgtgtggttgatcacatgaccaatctatgtatggaatatggatgtcgtgtgtgctgattcattcagatatgacaagtggtggatgggataattcacgatatgggccagattatgagtttgttttaa

SEQ ID NO: 50660 - DNA, 1003 bp, Arabidopsis thaliana landsberg
gctactggatactagctcgtgatgcaagtacactgaaacttttagtctatggtccttatatttttattatgttttaaatatgacccataacttttgtaattacaactattgccccattatcctcgagcttaattaactaagactagtaaaatcatttgtgagccctttcgtaatcaaatttcagaccaggtttacccgaactccattatattatgcgaaccgtatttcagtgacaaaatgttgaaaagtttttctcatcgaatttcggggttgagggccttgtgttgaaatgatttggttgaagatttcggatgatgatctccataatcaattgtgggcttcaggtggatggacggagaagaccactgcgttatgggcttcgttgatttcaaattgggcgttttcgtgagattaggcccattgttgaatagtcagcttgattttgttgccttagtattttacaaaaattgttgactggtcagctgatactacattattcatcgaatgtttatgaatctattacgaatgaaccttgagagaaagatagtttgttatgaattcattccacattggtattacaatagattgattggaacttatacttattatatctaataagtacatattagaagttaactaatagttagctaacttggaaggcgagtcatgtgacagtagcatatttttaatattgattaataacatgtttacaaagttaatagtctacttttattaatgtggcaagtacgtgaatgtgttcctaatcctaattattcgtaaatatatttaaattttattagttaaactaccttttaattaatcaaacaatacgaaactccatcaaacaactttatacaaaagaacgacacttacatcccaaattagacaaccatgttaaaaaatgctgtatgcaaattagctcattagaccatgatgaagagcaaaccaaacaaatccatattgttttaaaatcaattccatgtgtcatctgatgattcaacat

SEQ ID NO: 50661 - DNA, 766 bp, Arabidopsis thaliana landsberg
gcatgtgtaagttttgggtttagtatctatgatgatgttaagtatgaaagatagctaatctcgtaagagtttagaagagtgaagtcaggaaatgtgaatcagtgaatggagtatgaagtagggtttgtgctggtaatattacaataaaactcgtataaataaatgagatggtggtttgtgtttctctttgttcagcccatattcactgtatttcgtgtaacaatttatttgtgactatagtttggtacattatatggttcgttccatctagatattctagaacaaaacgaaatttttaggaataattaaaaattgttcaggggattcggtaatatgtaaagtgtagagaaaaagatctaaaactatagtgaagtagtttgaaaaggggacataagatacaactttcggctgtatatttaataaacagaatggatttagtattaaggagtttataaaatatatattcgaccgttcagaaggatatatagccaatgaaagcccaaaagcttgtgattggtgaaaatttgttacaattttttggtgaagttaagcttagacaaaagtaaccaaaagtcttaaaggtttattgtgcaaaaagaagagaaaagaaaacgaagagatggagttctaatacatattgtatatctgatgaagacggcgaaataaaaagatgaggcaaaagtatttaggagaaaaatgtaaatgaagacttttatatttcgagttaattttcaatgtacatactgttcagatccaatctaacaac

SEQ ID NO: 50662 - DNA, 485 bp, Arabidopsis thaliana landsberg
  unsure (1)..(485): unsure at all n locations
tctctatttatagattcacatgtggatgtactacaatgttttatnnnnnnnnnnnnnnnnnnnnnnnnatttaatacatttaatgacctccttgaatgggaagttaggattggtgctttgtcatatttgcttttgcagccgaagttaggattgtcaattctgctctagatgcagaggcagtcacaatcaatagatcactattaatgatgctcatagatcaccatttctctcagattaatggtataaggctaatcgaaaatgacagagtgatgcaagtatagccgttcgttatagttacgagtgttagaggtaagactgtccattgttggtatgacgcatgaaagatttgtcagtaggagattcgagtactacacgtgtagaattgtttgcggagtcgttcatcataattgcatgatttagatatagctagatctgataaattgatcatcatatntgtaatatgattatatcacagtatctatgat

SEQ ID NO: 50663 - DNA, 469 bp, Arabidopsis thaliana landsberg
ccccatctcttgttcttctgcagtgcctgcgtttcatgatgttattgatattccccttgttgttaggtcatttcataaatctagacaagaggttagttttcatgtcttttgtcagatcttaccagagtccaattttattgctgaattatagacatgtcttttgtcagatttaaccaaatttttaattcatttcaggttaggagagagcttggagttccagacaacgtgaaactacttatctttaactttggtgggcaagtaagcacattcttttatagcttttgatctcaatatgcaaattcgagttattgtttatgatatattgctggtgtgatttgcagccaactggttggacactgaaggaggaatatttaccagctggttggttatgcctggtaaatcgagattcgggtttgtaatttcgggttgggttggtttggtttcaaaccccaattaccaaatggaaatt

SEQ ID NO: 50664 - DNA, 626 bp, Arabidopsis thaliana landsberg
agaaaaaatgttcaccggagaagaatgtcctccatgatcttcttctacaggttctctctatgtctgtctgcattgagtatcgcattcaccattttatgtatttcattgctcatcaaaggatgttagatttatccatgtatttgaggaaccgatttctgttgaacgggatcgaatgattcatgtttgtagattactatgtcatcaagttttcaaatttcaaaccttttctatctgggattattgagatgtcgttaaagtgagttttgttctagattccttttgtgttgggctgctttcgggtatcggttgatatcgattggtcactggtttatctatcttttgattgtcaatgacagataaagcaatgtgtgttcgtccattatatgtgacatattgactgcgtttactctcttgtattgcaggtttctgtactgcttttgggctgttttgagaacggatgattccgtttgtgaaggaacaagtgggaattggggagggagggttggtgtttgtgtgttttgattactgatgttttctgctggagagggaaagaaatggactcgtcggaaagctggtcttgtaagtctacaaaaagtggcatctttggttcgggatctgagagagcc

SEQ ID NO: 50665 - DNA, 558 bp, Arabidopsis thaliana landsberg
gaaggtacatattcctgtagttgagagctctatccaacctcaacgatcccctcgtaaggaagtcgagaagccaaagcttggcgttgagaagacaagggaatcatcatatccgctggttcatgaaactgcagaagaacctgtgaatgtttgtgatgaaatgaaggagcacgaaatttccgaacagcctgaggaggaggtacatgctcttgagatggaagtacatactcctggaccattagaaactaatgaagcacttgattcctcactggtcaaccaaattgacagcaatgaaaaagccatggttgaggaaaaaccctcaatggacaaggataccaaagaagaaaagactcccaaaccaaacaataaagagaattccgctgggaaggagaaccagaaatccaggaaaaagggttcagctactagcaagactgagcgtgaagagagtaatgggcatcacgagactagcccatcaatcccaagctatatgcaagcaactaaaatcgcgaaagcaaagcttaggcttcaaggctcaccaaagtctgcggagccagatggaac

SEQ ID NO: 50666 - DNA, 851 bp, Arabidopsis thaliana landsberg
ccaactcaagttgtatgtaattagttgtgtgtgtgttttgtttttttaatgaaacaaattattttgcgggaaatatggcatagagatctgaaattagaaaacacattgcttgatggaagcccagcaccacgtttaaaaatttgtgattttggctactcaaaggttttttttttttttttttgttcttttagtaaattccatttttttcttctaatttttgtaacataatctaaatttctgaatggataataatttctaaattttgtatacagtcttctgttctgcactccaacccaaaatcaacggggggaactccggcatatatagcaccggaagttttttgtcgatcggaatacgacggaaaggtatttaaattattacatacatcactagtttccattatttaatcgtagtaaataagatatttgtgtttattttaccccataacgaagatatttacaagtgattcatataattccactttcaatagttttttaggtggacattccactttcaatagttataaaaccataattcgtggaaaagagtagtaaacgacaaaagcttgcctcacttatccactcacatgacatttgttactaatcttctatactaattactatatacatcgactttatccaatatctattcaaattaaatggccactgtcaaataaccaacgtcatcaaaatgttcattagtcaacttaatactatttgttttcggaagtaacatgcaccatttcgtggtgtttaccttttgaaatatatttattaatatactttgctaagaagacatttgtccgtttcgaatcgaccgctaattaatctgggagctaaatgaaaacatac

SEQ ID NO: 50667 - DNA, 1003 bp, Arabidopsis thaliana landsberg
aagagcagtcgaactgactaatttgttcaatgcgaataactatcaaagccaacaaatcttaacaccaccactttgaataaattttgtcgatttctaagacaccattacgatcacacgcagatacagaaattgaatttatatttattaagaacatagttgttatgctctgtttattatggaacatcgaacaaaatttcaaccccagattacaaaaccatcacatcacacagccaaaattattagcatctttctttctctctgcccccaacactccacattcatttacataaaccagatctacaatttctcagattccgacaaccggaattagaaaactagttatctccgatccatagaaagatcaatagaaacagagcaaatcttttagaggctttggagatataagtggttttaggagggtttatagattttagacaaaaaggtatttatatagaagaaaaaaagactatttgcttgattatgtaactgaagcttctactaagccacgacgagagttcctgtccgtactttgtttccggcggcttattctttagtttcaggggaatttttccggggagatcttgaagattttttccactttctctccttagcttcatcagattcaatctgttcttctctacactcgctgctacaaaaagccttgtctcctctgtaaatcaaaaaaaccgtggacaatcagaccaaataaatgaattatagaaaaaaaccagatctagaaactcaattgaaagtttaatgctttagtttgaatcgaatcaatacctgtacatgaagatatcggagttaagaccatggtgtttccggcaaagagaacacgattccaaaaagtgtggctcttcacaacccaaaaaaccagagttatacgaagccatttgcttaattaaatacgaaagctttcgaatttacgatgactaaatagactgcgaaaagcagattcgagaggaagaagaagaagcgagaggaggaggaggaagaaggaggt

SEQ ID NO: 50668 - DNA, 683 bp, Arabidopsis thaliana landsberg
  unsure (1)..(683): unsure at all n locations
tactgaaaaggttaaacaaacatattatgggttgcattgattttcctctttactttagttatcaccaaacgattattgatcaaccaaacttgccacattaattgaaacaaaatatgggattagagagttgccttgttcttcctttttaattttgtatatctatcactaaaggcttttttttttttcttgctctataagatcagaaactttcatagatacattaagatcaatgaaaaaataataaatttcttgctgattagagaggttcattgaacttatatatgtgtgtagccataatttcatttgtagccataatttattactaaacgaatttatgtatgtgtgttacctgaaggtgagggagcagatgatgaagttgacctttgtctcccaaagactttaagatgttgaccagaaataaatttatccaaagaaaatcccttgagaggtccatcttggaaggattccattgtacaagccaccatggaatcatccaagtatgtgagctcatccgcattcaagaaactcgacccactaaccctaattctcccataatcatcgtntccttcttcagcccacaagttatccgattcctcccaagttagccgtatttttccaatacggcgaagatctctcagcgaggaagacgagaagatgaagaaggatcatctcaaaaaagggat

SEQ ID NO: 50669 - DNA, 628 bp, Arabidopsis thaliana landsberg
  unsure (1)..(628): unsure at all n locations
cttttctttctccttttttccttcttcacgcttttattctatcgaatagatgcctaagttatcgttattttgaactttcccgggcgctagcgctcgctggtctctggcggagcatctaaatacagagatgaagtgactaagccatacattcaacaataaaatcaacaaccccaaagttagcgcacgctccggcacctcaatttgacttagagtgcttccttgtctatgtcatacatcagatgcttttgcacagcccccacgccaaaagcccaaggaacacacatgtatgtccaaataccgagctctttaagccgcaaaccccagggtccagcctttttcctaacttccgcatttcgtgaagcaagtttagcgatttcgtcaactcgaggtcttctaatctggtcaaatcgcttataaatatcgcctagaggacgattctgatcctctagaaggcgtgagagcagaaatgcatcttctagtgccatggagacgccctggcccgcatgaggctgcatagcatgagcagcatctccgaggagcaaacaccgacctctgaaccaagtgcctncaagaggtaacctataaataggatagaaaacttatacagaagtcgtttcaacgatcagtc

SEQ ID NO: 50670 - DNA, 326 bp, Arabidopsis thaliana landsberg
gatcgcagcttcgccgcttcggcgcccatcacaccatgggctgccagcagcgttgcgcttcgattcgaccggtcatttccgtttgggttaaaaaaaccggcgcgggcaaccagaactaaaccttccgtccaacggaacgcgtttcagctctgagcccggcggtcacccaagaccgaaggaacgcttccgttgtgcacattcctcccatgcacacgatgatccagaacctccccaccaaccgtcgcgcgactgcttcggcgcacgtttccgcggaagcgtttggtcagccggcctacgactgcaaggaccaggccgaggccatgaaa

SEQ ID NO: 50671 - DNA, 580 bp, Arabidopsis thaliana landsberg
  unsure (1)..(580): unsure at all n locations
tgcaaagagactaagtatgcttgaagaggtcgaacgggaatttgattttactttgtttatatatataccacaaactgtctcaatcctatgattcataaagaaagttttgtgttacttaataatatgtttctgtgttctgtttctcatagctgcttcaaaaggtcttgaacaactaagggctagcgattcaaccgcggacaataacgaagaagaacacggtatgaaacgtttgcgttttgtcccatcttctttatctaattccttttcctgcatacagttttctgaatcagattgaatatactgtcataaaaacagctgcaaagggacaaagtttgttagaagagatcgaacgggagttcgaaggtatctcctacataacatttactaagagtcttaattagttcacatcccaaccctgagtaatatctgagagtcttatatcttcatttatcacttgaagctgctacagagagccttaagcaacttcaagttgatgattctactgaagacaaagaacactgtacgacactcttcttctgattatatgctatgctttctctatggntatctgaatcacgct

SEQ ID NO: 50672 - DNA, 896 bp, Arabidopsis thaliana landsberg
acagctggcaacccatgatgaaacacagatacaaaagcataattttacaacctaatacaaagacttacaagagaagctcaaatgataaattttgccttcgggcgacagcgcgggatatcaatctaggattgattgaaattactagctaaatttttatgaattatagtttaaattagaaattaaataagatatgtcaaattgctaaagaaaattcaaaattttgattggatatgacagattttgtcaccttttatgtatagtcggtactcttatgtgcattcatcgaatcaagttcataacagaattagtggtgatgagaatatagcaaccaaggagcgactagtcattcctatcgtgaaagatgttattgggcggccttacaattgtcactcagtgccttcaatttatgcagtcatgtatatgtacgtggatatggaacattgtaagaaaatcgttgttatttacaatacatatataatattagataattaatgattgtaatatgttcatcagggttagttaaaccatatggtgtgcttgttgtattgtgtccttggtgtagaagatgcatgtaaaaagtccttccagtccaaacatgtcgattaggaccagagggggcgcggcttcgcatcttccttggtcatgatgatatgtattttttgcatttcatatactttcgaaggcgtggacaactggacatagcaatgatggtgacaattggttggatgtttatatactatcggtacttttgttcatgtaactttcttgtccgttagaagatttctcaccaaaacatttggacaccatggtattagggctcgtgtatggttgtgtaggtggaataggagccaactcatatggctttattgtaattctcgcatgctcctttatttata

SEQ ID NO: 50673 - DNA, 628 bp, Arabidopsis thaliana landsberg
catgccaaattcatcggtggccaatttgttaggttcggtttttaagagtcaattaagatagtcctaattaaatacactaactagtttaaatacacgtatagtgtattaacgtgactacacgtgtttatgtattttttttgagaaaatgcatcaaggatttcaatgaaatatttgacaaaacaaaaaaaaggatttcaacgaaatatcaactcaacaagttacagaaactaaaactgtataaatcatcttgtaattttgtaaacggtgattactagttaattttagtaaatctaatatgttatctacagtctaataacatggaactccatgaccaatgataaagcggttctagtagtttctcttacaacaatcttttacacattgaaaacatataaatttagggaatatatatatatgtatgtatattggatcctgatattccatacaaaagagtttcgaagtgtttttttttttattttattaggaaaaagggctttaattctaaatttgaatccttaattaatattttgagttgaatgaatccttagtaaaggttgcctaaatttggacaaaaaactataattaattccctggtccattaaggggggtcccaatttaaatttttttt

SEQ ID NO: 50674 - DNA, 651 bp, Arabidopsis thaliana landsberg
agaaaccactaaacctagatagggaagtagttttggccaaacaatatgtgacatcaaggtaaataggacataggttatgaaatacttgtgttccatactactcagaatcttcctgaccttctaaacacttgcactccttcgattctattcgaaccaaacatacaaactacaaacacaaaataaggaaaacattacactaaacaatgaaaacatagagcaaaaaggttttgagaatattttacatgttaagactatttcggtgtgaccaaaatcatcaaaaacatgtttaaaataatttatatattcattttatgagaaattaggggattgtattcaatttattcataaaggctgaggtaagtaaaattctagtccctagttataacttaggtagactacgggttgatttggtcaaatccgagggttttttaacaaaattgacatcacccgcacagttattgatcgtgctcaaatgcactgtggtcattggatctcagatctatggctcagattagttcaagtgttggggcggtggtgttctcgtggcggcccagagacaaagaccgatgctctgagtgctccacaatgggatctctagaaaaacaagacaggattgagaaccattgatggaaattaaggtacagagtacta

SEQ ID NO: 50675 - DNA, 448 bp, Arabidopsis thaliana landsberg
acacaaagcacatcaacggattcgctgctcatctagaccacgaccttgcttatgaaatttccagtaattatacaaacataaccattttatcttcttctctctttgtgcttcacaagatttgactcttttctcttttcttgattattcctcaagaacaccctgaagttgtgtctgtcttcccaaacaaagctttaaagcttcacacgactcgatcatgggactttttgggtttggaacataactcttacgttccttcctcttccatttggagaaaggctaggttcggagaagataccattattgcaaatctcgatacaggttcgttttctcatcttttttttttttttatctctctctttggattttatatttctttatttcttgggcaacctttgcaactttgagagccttgagatgggtttttgggaagatacgtacctacttttaa

SEQ ID NO: 50676 - DNA, 774 bp, Arabidopsis thaliana landsberg
  unsure (1)..(774): unsure at all n locations
aataaaatttgaaggttttacaggaaattatattaactttcctaaaataatcaaaatcatataaaatttactaaaattcaaatcatttggattttacgagatgaagtaaatttgattgcatgggacagatttggatatcaacgagatgaactatatagcacgcatgaactaaggcacatttttttatcaaaaaagaaagaaaaagatatgagataacccaaagcacactttatgtgacggttttaaagatcaatggcatgttggtgttttataatcttttattaatcatgtgttcgtttgaatatttttttatactaaaactgattaaaaatattggttaggtcaataatcttcgtcgatctgtaatttaactcagtaatattatttgatgtatatctgactaataacatataaaaatattattttatttgttctcacgccaaaacaaaagagtcatgtcacgtaacgtaagaactaagaaatccagttcgaaaagttggctaggattaaaccatgtataaaggatttatacttatttaatttaattaataaaataataaagatatatctaaaactaaaaggctatctaaaacaagacttacaaattttaataaacaaacaagtgacataataatgggaacatatacaaaagaagtaagagataaaagaatcgtgagactacaaaagagccaaataatcagataaatatgacgaccgtagtgtgttcgcaaggcatcagcgantcagtaatgagactggcacgagctcaagtgg

SEQ ID NO: 50677 - DNA, 626 bp, Arabidopsis thaliana landsberg
aactaatataatttatgtaattggtttcccccatatatatatatatatatatatattcataattcaaataagaatacatctttaaaatccaaaattatagacatcataaatctcaaatactccccctcctaccaactgtatgttcgtgcaaaatttacgtaaccacgtggttttttaaatcgtcaggattcaaacgttgaaaataaaattaaacagaccatcttcatccctaaatctttaagacacccataaggccataaaggtttagggatgaagacacatgattacgatgttcattgcgaaagtgatttctcaaaaactctccaacgtgcgagtcatagaaggtccgaccgtccaggaaaggattagaaagctagcagatgtctcatgtgttatatatgtggatgtgtgagtgtttcaaatgattgtgagtgtttaatttttcttttctaaaaaaaataaaaaaatagaagttcatacccgaaaaaatgaaatcgatgcttgttctcttgtacttattattttagaatatggtatgcttatctatatttttgttcataaattataaaaactaaaatcgatgatagataaattgtatatttgccaattgttttgttcttgtttct

SEQ ID NO: 50678 - DNA, 867 bp, Arabidopsis thaliana landsberg
attggctctaggatgcaatcgtaggctattgttcgatctagtgaacgagattctgattgaaaccgtggcgaaacgacgcggaaactatcagggatcggagctaatcagcgagctctgttccgctgtagcgagatatagtactaagtgttatccagttcctgaagagattgctttagtagacgtgaaacgtcttctagagaagaagaagaagcttgaagaggaaggagaagagatcatcgtagagattgagcgggagatcatagacgcgcttgtgcgagaaactttgtccgaattaagtcttaacaagagatcaaacaaaacgacgtcggacggaaagttgaatcattatgtactattagaatagtttctttattgggccatttgtattatttctgtaattcccacatttgtgttatttgtataaaaacattttcctcaaaaccaaaaaaaaagaagatggattaaaaaaccgcagaaaaagaacaagttttgaatatagtagaataaataaaaatcgattttacttaatgaagaatagaaaacagaaacttaagagtttacattacattacatccacaaacaaaagcatagttagaactcttacacattacattattctgagtttatacaaaaagacaagtgattgaaattttgaaacactattactcgtatacataacattaattgagatagatagctagaaatgacgtttaatgaccaaggacgattttatggtcggttcttcagaaatccaataaatagatcagtttcaacatcctctttctctttgcttcccgacggcatccccattggtctttctccaacctggcataagtgagtataaattgttttcttaatttgcataaa

SEQ ID NO: 50679 - DNA, 580 bp, Arabidopsis thaliana landsberg
atgttatgttcatcttaataaaatcgtcacttgtgaaaaaaaaaaaatgactctggcctttctagtttctacaattagactctctctactcaataatttataatctggttcaaaaggatcctctgagtgtaaaagcatgattcacgttctaacatgtagatgatttgggaataatacaacaagtgtggatcggaggatgttattagacacgcaagaggatccacacacccactaggacacgtgtttacaagtccgagctctgacatgcttcacgttcccgcgacagttcgttgtcaccgtgtaagaggaggtctctcagatctctgagctggccggggaggaccacgtaccttacccgttagccaattggtaacacttacgattataaaataaattactttgttatgataaaaataatattggttcatgcgatgaagatatatcacgttcgattaaggttacagaggaaattgaattttcaagaattgattcttttttgtttgtcaatatataatttggatatctagatttgccatggaatataaaatcattaatttgagtttggaggaggacgtcgaca

SEQ ID NO: 50680 - DNA, 552 bp, Arabidopsis thaliana landsberg
  unsure (1)..(552): unsure at all n locations
tagtccccaacgttgtagcggccaggtatgtgcaataagctttgtaagttgcaaagggtgcatgttcgaggcgagaatnnnnnnnnnnnnnnnnnnnnnnnnnnnnnnnnnnnggccatgcacacaatcgccgaccaatagaaaccttgacgtatgactttagtagcaagggcccttggtcccgaatgtgatccgcatatacccctgtggacttcgcgaagaagttctatgcctttgggtttagttattcatttcaacatgggttgacttatccccttgttttagagatgtccgttgactatagtgaagtctctgcttctgtgtgataatctgttggcgttcgctttggtcagaggggtggtagtggccttgaagacaaagggtgattggtgccgccagtcttcgaccattatcagatttactatccgatgcacgttggcgtcttgtgtcattttcagaccctcgggatttcttacggctggtgtgctgactatgtgataagatacatcggatggcaagggtttgctcttcgctgctgctacagctagtgtg

SEQ ID NO: 50681 - DNA, 127 bp, Arabidopsis thaliana landsberg
aagagtccgtagaaaatctattaatcctatcttggttgggatttcttaccaaggagacaatttttcttttatataccaaaccagctaaattctgtacaggtgagagaacactaaataattaataatg

SEQ ID NO: 50682 - DNA, 589 bp, Arabidopsis thaliana landsberg
ggaagtatcgtagtactttgcaaggagttgctttcttcctttccttctttgttagtatgcaattgggttccttatccttccaccttgaagccttacaggttgtgcaaaaatcatcattttttttgtccttccggtacaattggcaattatttcggcatgcatcaatagtttcatatcccagtccaaatttagaaattactttcttagcctcataaaaattctttggcaggtcctttccattaggaatagccatatgcagaacctcaagaagatcaccaaaagatttatctgaccatttgtttgaggatttcacattaaacaacaacacaaataaggttacctctgtgagttcacaaccttcccataaaggcttttttgattcttcgacccgtttgtaaaactgttcaacttctgaattgggtccggtcactggtgcatctccatctaccataggtgtgtcatcatatatatgcccaatggcatcttcaatcatttgcccaatgttaacatgcctttcatcgctttgtgttttttttatctagaccactaatatgcactgaaggatcgcatgaaaatccattcacataat

SEQ ID NO: 50683 - DNA, 502 bp, Arabidopsis thaliana landsberg
  unsure (1)..(502): unsure at all n locations
ttggtgccagcgctgcgtgcggcggcggtaccgccggtggtggcgactaggggcgtgtgatggcaacgcggaacgcggtgattcccgtgatggcaggaggctcatgatgttcggttattacctcgacttggcgtggcgcatcctgaagcgcacgcccgtactcactggcctgatggtgctggccatcggcctgngcatcggtgcgtcgatgacgatgctggcggtgttgcacgtgatgactgacgacccgatgccggggcgcagtgcgcacttgtacacgccacatctggatcccttgccgcgggactacaagctgcgggacggcagtccgaaccccaccgacgacatgacctggcccgatgcgatggcgctgctcaaggcgcatcgcggtgtgcggcaggcggcgatgtcgggcggctcgttgctgctgcgtccggcgcgcgcggatctgcgcccgttctacgtgagcgggcgctacgccacgacggatttcttcgcgctg

SEQ ID NO: 50684 - DNA, 473 bp, Arabidopsis thaliana landsberg
cgtatatgtacgtttgattaagaacggtggtctcagagccaaaccaatgtttgctgtgaaattcaacaagtctgatattcctggtaggaatagagcatttggttcctatgttgttccagaacctcggtcaagcggtaagaagaaacaactaggagttatttgttggatttgcagtgagagtttcagatttatatgcttactgtgagaatgccttcgtttcacagagtttgtggaggacatagatctcttgatcagaaaggctgaacggtgtttagaagccggggcagacactattatgatagatgcggatgatgtctgcaaatacgcggattcccttcgagcagacataattgctaaagtcataggacgtttgggaatagagaagactatgtttgaagcatctgatgcgaagttggttgagtggttcatcaaacgttatggtccaaatgtatttgctgatactctagtcctct

SEQ ID NO: 50685 - DNA, 755 bp, Arabidopsis thaliana landsberg
gtgtggagaagcatataccgatgatacatatcatatgataaaggtgaaaaaatctcttgcatatattctcctcagatatttttgaaactttaaaatgatcaaatctcgtggtatcttaggaagagtcagagaaactaaggaagcatcatgaggagctggaatcaaagaactattcagaagaatgtgcagctgaaatgaagaatcagtcacttatattgtataaggagaatttgaaacaaatgtcagagcaggtaaaagatatgatcataaatcttatatgactacttccggttttccaatattaacaagctctgagtatattttgttaagttggagaagaagctcaaagatgctgcggaggcgcaagaaaaagcgctaagcaagatgacacaagaaaacaacgagctgaacctggcgcttaagattcacatcccgttgccgccaattactccatgcaacattctttgaaaaatgtcttctttctaacaaaggggtttctcaagaaatatcagtaactattatcgtccaaagggattttgggttgccataagaagatacaatcaaggaggttttgtttgtcaaaatttcaaatgttttaccaaacctttctgtttttttcccattttgtatttcagattacatgttctgtccaaaactatattgtggtttcttttgttgtgtgtggacttttgtataactatgtttgcttccatgtttgaataagtgtatggtcacatatactttgtgaataaaga

SEQ ID NO: 50686 - DNA, 1436 bp, Arabidopsis thaliana landsberg
cccgaaattaaccaaacaagtttctgcattttgtttcatatttctttccgaattactttttaccccggaattattaaaattaccactttcgtttaataatttaagaaggaagctcatatccaacaatttacttgtttcaatgtccggtttatggttcaaggctttgaatactactaacatgtggttaaagatcgagacaagtaatcatcattcacaatcatatgtttatctattctttcacacgcgcgaatatatattgtgaactcccaaataatgtcaatttaaactttaaaagacaactttaccaccatgttttttactgcaaaattggtgtgtagcattttcgtaaactttatgattcatttttagcgcatgatttttatttgatcaaaacataacgtgttatattgtccgataatatgttatttttaagaaaatccacgataaagcacactattttatatagagaaatgtcactgtttcgttttagcaaattataaatttatcatctatggtttagttatatagcttcatcctaaaatgtttttagtctggataaattacgattttaaagaaaataactatagaaaaggctttaaaaaaaaaatcctaagaacttatactggttagtattatcaacagaatataattatatccgaagagatatctaatgcaaatatcttgctcattcgagcaatggaaaagatgtttttgtctcatcaactctctactgttttattagttactctatcaaaatctgagatttgcaagttgtaaccttttttcgtgtggctgaatagaatatccataagtcaagccacttataaccacaaagtctcaaaaaccaatttgataataccctgccgttcttattgttacaataaattactgctaattagtggtaactatcgaatcattaagtgtttagtttgcgattgattaccaaaaaaaaaagtgtttagtttacgatttggtcttcgtaagtggcttatctctacatggggttcacaaatctacttttaattaacaaatcttggttttgacattttaagcaatgagtagccagtttttttataagaattaaatacaatcaactgaggaataaggtgagagcaaaattgcaatttctctttatacgatcataaacaaatcataaatctaatcgtatttatgtgtaacagctcacatcttctaacaaaaaaacggagcttcttacgaatttgccacggttttacaatctctctcattcaaaaacatcatatatatacacaaacacactttgatacaacaaaaaaaaacagaacacaaacaaaaacacattgtaacattagtttaagcattaagcttctttatgtcgaataataataattctccgaccaccgtgaatcaagaaacgacgacgtcttgtgaagtctcaatcacattgcctactgatc

SEQ ID NO: 50687 - DNA, 635 bp, Arabidopsis thaliana landsberg
  unsure (1)..(635): unsure at all n locations
attcttttaccctagagtgacagagcgcatttactaccaatttcttatttacattttttttattaaaaaaacttcaaaccaataattcatagattttgtttttgttgtcattgctttaaatgtttttttgtttgttaatgctagactttgaatgcttgctgcagcacataaactactaatggtgagttttagactattttttttggtaaactacgttatttgtaagttggaatttgaaacacagataagaaacagttcaaattttctagacgttgtgtcattttcgaaagctcttataatagaccacgaatatctcgtgagagaggaacaaatacttgactaactgagatctagtcaaagtacactatttacctgagaacggtttattcttttacacttaagcctaatattgatttgcatatactttaaatcttttactctgccaaaaaaagaaactcctctgataaactttagactatttggtatacctaacttttaattacaaataaatgtattgcaaatggcagaacaaaaaataggtataaattcacatggaggtgcatttgcggaaaaacgagttggaataattttataaggaggcacgttgcactccatganacatgatatccttcgat

SEQ ID NO: 50688 - DNA, 549 bp, Arabidopsis thaliana landsberg
tctcttgttcaatctctcagttttctgatcaagtgtttagctttttcctactatcagtttcaactgacttagagattcatcttggtgagtctgattctttgttaaagtctgatactttctgcattaatgtttcacctcttgaagatgcaagatttattatatatgtaccatatgatggttgcctttgtcttcgatgaaatttggatttgaggcgacgtttttattttaacactcattgtttgattggtggcttgatatgatcaaagggatcatgccggtggaaacgagaagattaagcagttggttcctgatatcaaagtatatggaggttctctggataaggtgaagggttgcactgatgccgttgataatggtgacaagctgactttgggtcaggatattaacatattggctctccacactccttggtttgtttgttttttttttttttccagatgaatttaaatgcatctaatctacttgatgtttaactcagccattttctcttgacatcgctgattcctctgatatatctacttgttacagtca

SEQ ID NO: 50689 - DNA, 468 bp, Arabidopsis thaliana landsberg
cgtctcgtgtatgcagctgcaatacggcatctatgcgtccatgcctgtgatacctggacaatacactttgttttctgcaataatccaagaaaatgaaaaccctggaggtcgatttcctatgtggaatatgcttcccctcagaaacagaagagacagaataatctagagaaaaactcattaaagagtttcccataacactaacactttcggtccagacaagagactttttcactttactccactgcagcttcccatgccttgatatcacttttttgtaaactttatagatcctctcgcgatagagaacaaatattcatgatttttattttcgctactacatgttaaaaaacttcacattattactaatcatataacacatagtctaccctagtagatatggaaatcaatacaataacgcatatataccctacctttttcggatagctttatttttcttgacttgatata

SEQ ID NO: 50690 - DNA, 533 bp, Arabidopsis thaliana landsberg
  unsure (1)..(533): unsure at all n locations
gctttcttaacatttggattagtagccgtagctcccattttcgtttcggctgcagccgtgtttgcaccgaataatgggaagttcgaataagaagannnnnnnnnnnnnnnnnnnnnnnnnnnnnnnnnnnnnnnntcgagaacaatgttgtaaaaattagtctggttgttacaggtcagcgcgttgcttgtcgatccgcggaagtacaccgttgcaaagcccgaagtagccccaagtgtcgtaggcggaaaagcattgtatacaggataaggaatgtttgaaaaattgaccgtcccattattgacgaaatctccatagatcactatgcggtgtgaatgattgtcgtaataatcgataaacggtcctgctacagttgtagtgattgttgtgggatctgttacagtgttggttacgcctgtacctactgtaatcgccgcaccactattgactgttacgtttccggcaatgcttagctgacgtttcgcgtttgtattgtcattgatctggaacgtaccgctcttcacgaggagatt

SEQ ID NO: 50691 - DNA, 590 bp, Arabidopsis thaliana landsberg
catagtcagtagcccaaaatcacgtcgcaaacctcactgtcacacttaatcctatgcttctcaatcctacatttttccaatttttcatactgaaacctaggtggatgttttctttatttcaattgggtaatggaggtggataacaattgtattttccaacttgtactccatcttcttagggcagttgaagtctgtaacatatcaaagcatagattttttagtatgcttcttcatgcttggagtaactcatttttatctataggtgtggttggtgcaaggtgattcttcacggcgacgacaacgccaacagcgaactgagaggtgttgcggctctgcacaacccttggttagccttattcaacctttgcatcccctattgcttgctttttctaactgtagggatttgtttttttctgtgcttttacatgcatagcatattcccgattgagctgttacagacatatcatatttaggatgggctcaatcactagctttgtttatagaatttttgttactctgaaactattaatctgaataagaaaatattgcttacatgctagaagattacaaatgtgatcttggctcatttg

SEQ ID NO: 50692 - DNA, 516 bp, Arabidopsis thaliana landsberg
taatgatgcataacatagtgtctttacaaattctttttttgttacgttatgtaatgatgaatgaaaatgcttaagggatttttacatgtcttgcatgcgaagtagctagaatatattgactgtgagattgaagaaatgtgtatgctggcttcgtttaatccagacgccagcttcgtctttatagttttatgtgtttgtgagagcatacccggattgagcatcgcaacacgccgcaccaaatctctctttgacgccgttttggtttgtcctcatacatgattgtgtcataatattacactgcctggatgacaaagtacatgatcacgattatctattgatttttttttcctgcttagctcgttagaatgctactttagatatagattttcatcagtaaaattgtgtaattctagtctaccatatatatatatatatatatattctttggtaatgataagtaaattgtatgttataaaaatatattgttgtgtcaaccttaatggtatttgtaaatta

SEQ ID NO: 50693 - DNA, 874 bp, Arabidopsis thaliana landsberg
ttataagtttgaatgtggggtcaggaatttaatgaccttaattttgatgataattacggttttggaattgattttgtctacttttgtagttttgtttcttctgttcgttacagattggttgattttctacttaaacaaaatatcattaaaaaggcttcattgttgagattattacataaatagtatcattcttctgaggaagcatattttctttcgaatttcgttacgtgtcataggtttgttggatatgaagatattattcaatctagatgttacatttgttatatagtttttttaaaaatcatcgaccgatagaatcatataagtcaacttggaatgtttaatgattatttaaacccacgtaccagttgtacaactacaaaccactggtatcaaacaaccatataaataaaacatatgtaattaaaatgattataaacactaacactaacggtaacgtgtttatgcattattaacacgttagaaaccgtatgaatttaatattttctctcttgtgtaaaataatcacaatgaccaaactttttcaagtacaaaatttattgtatctaacaaatggaataatgttattatgattgaaaagaaagattggctagatctagtggagaaaaagtagtaataagaagagataagactttaagtgcttcgtcttgtaaaccacaagtacatcatcatgtctttgagagagccgatgcaataattgattaaatgtttcgatggctctgatttattcgtttgactttacaaaaatgtaattagtttcgagcagagttacttgttctataatcgctaaataaccaataaaccaaggtgaatctcggtagcaccaacaccacgtgcaactccgatgataaca

SEQ ID NO: 50694 - DNA, 560 bp, Arabidopsis thaliana landsberg
tttcgagctgtattattaaggtggaagaagagattaggaatccgataagtacttaaattgttttaagttatgattcgattatacgtatctcttgaaaagaagcatgttagagcaaaatatcaaacttgacaattacaagattgctttatagataaagcagattagctaaataagtatagggagacgataacatgtggtgagacaaagatgtgtcagattgattgtttaacatcatttagttgagaaaactttggacgacgactgacttcatcatatgagaaaacaccaagaaaatgtactactagtctctaatggagagacttggttatagaagttcattgtttaacttgcatatctaccccaattcaggaaaatatcaaaacctgaaaatcactatagatggtagctttgcaatggttattgtccggttggatattttcattgacatttaggattcagattatctctttcatcattatcagtttgctaatgcatgagttttctaatacatgcttatgtcctaatcatcagatatttctttttcaaaccttttttgtttc

SEQ ID NO: 50695 - DNA, 756 bp, Arabidopsis thaliana landsberg
  unsure (1)..(756): unsure at all n locations
agtgattgtatccagttgaagtcggtttggacataaccatcaccggtatttttcgaagctggagtaaagcggaattgaagttaaatccaaatttattttaattctatttaatttaattttgttttagtagaaaagttaaagcaatctattattcattaactaaacgttgaaaattacaaacaaactcatattattaaaaatttctctatcatatactgatatacgtcgttttaccaaaactatatatatacgtaatttgcatggaaagtgattgcgcacatgttggccaaaaaagggatttaaagttactaaacgcgtttttgctttcttctaagttattaatatatcttttttgttcaaaactatatactttagtatgatcatattcactcaactaaattaacagtgactggatccaaacttaattaaattcgatttgcacataaccagctccggtttttctcgaagctgagaaaaaagcaaaattagattagacgttgaaaatacgctacgaattaaaagtatctctatcataggatttttttaaaaacgctacgtatcttagaacgagataaaattttgacaacaaaaatgcatgcattagacaacgataaattgaccaagagattggaattgagacccaccaaggttactaacagtgtaacacanaaacaagtgtgatttgaaatgtgaggcaccgacgcatgactccacaactctttttccccaatttaaaaaccgacatttctgctttct

SEQ ID NO: 50696 - DNA, 1098 bp, Arabidopsis thaliana landsberg
ctgaaattggtggattgaagagtctaacttatctgtgagtaatcctagctcatttcaggatggttgaaggtgttttcttgtggctctgtaacatgctcttaatattgcaggtacctgagttttaacaatttcaaaggagaaatccccaaagaacttgcaaatctccatgagctccaatacttacatattcaggagaatcattttactgggcgaattccagcagagctgggaacattacaaaaacttcgccacttgtaatctttgacattcagtgctctttattgtagatcatgatcaagcaactgacttcagatatgcttaatatctctgtcatgaatctgtagggatgctggcaacaataacttagtggggagtataagcaatctttttcgcattgaaggatgctttccagctcttagaaacctgtaagtgagtttaagagttagccatcaaaagtagtattttgtctaagctcacttttggctgtaggtttttaaacaataattacttgactggaggactcccaaacaagcttgcaaatctaacaaacctggagatcttgtgagtacttgatcacttcttttgatttattaacatcatttacatgttttttctctccctatcttatcttttttatgtttaggtacttatctttcaacaaaatgactggagcaatacccgctgcacttgccagtataccaagactaactaacttgtaggcctctctcctctactaaatacataactaagaactgatctgaaaaacgacctatatgttcttctgcatccttagagcatgttttgatttaacttcaggcacttggaccacaatctattcaatggaagtatacctgaagccttctacaagcatccaaacctaaaagatatgtatgttcataagctctctaaggtctcattgtgtaagacgatatataacacacatgttctaatttaattcttgatgggatgtatcatgtatgtggcaggtacatagaagggaatgctttcaaatcagacgtgaaggcgattggtgcacataaggtcctcgaactttctgacacagacttccttgtttagttatgtatagcacaactttgt

SEQ ID NO: 50697 - DNA, 731 bp, Arabidopsis thaliana landsberg
tgtctttcaccaccacagaatctggcagcggagtatcaagcttaatcacaactttaaccttagtggtgccaatgttgatggggtccaatttggacttctccgtgtgtaggggctctccgataccacttgcgataacactgattccgtcaaggaaatagagttgaggaggcacattctttaggatcgcccaagtatgggcagactgaagctctttgagttcgcgatgtccctccgaagaccaatggtaaaccgtacaagaacaatttcctgcctgccatagcagcggtctgcgaaatcactctaaccgtgatacctccataacaaccccaaataggatttaaatcattgaagatcttggcaggaaagggagaaagaccatggaattgggccaccaaatggcccttccacatctccacagacttcagaagaacactgggaggagcaatgaccaccggagtaccatcttcgcataaaagtaggagagttcatttgttgtacgttacgaatcgttacgaagagaagctttaaactttgaagcccaggggagatcaaccttaggctcgctattcgtcagcttccacaaggcgtatgacctaactggccgcccggattgaacgggtcccaaacacatcaggagaacccactgacacgccgattgagaaggagccaacaaccaaggatccctgaacgataggtggcggagcctaatctgaattcaggaggagctctca

SEQ ID NO: 50698 - DNA, 480 bp, Arabidopsis thaliana landsberg
ctggttcaatatgcttggcacatagcaaacaacagcatgcgactcttgcgctgaatgtatctaaaactctctgttctaaagattaagattatccagtgataagtggaggcgacatagacatacggattcaggcttgaagatcacactagttataaaatctgccataattatataatgattcatggcagaaaataagaggtctctttctctctctgtctatcctaaattggaacgaggaacgatagtatgcacatatagaagcagaataaaaaccatcgaacatataaggaacaccaaccattctaactcatcaaagtgagaagactttctttctatgtctgtatctatccatctcactctcttactgttgctcttgaagccactcatccttggcctctatgatagagtccattcaagaaaaccgagtatcaatgctactacttcgatcgatgccatatgtgcgtttatttctaccaacca

SEQ ID NO: 50699 - DNA, 776 bp, Arabidopsis thaliana landsberg
atggccgtttataaattggcataagggtatgtgtacaatgaatcttacaacggtgcaagtaagtaacttacaccaaacatttttgttaccaataagatctattaattgtcaggtttgaccatccataaaattaaagacgaagcagaaaagagaagagttaggcgaaaaaagagagaaataggaagtttaaagtaaaaaaaccagagaaagtaaaagagcagatatagaaattatgattttgaccgtaacctctgaaccaaagattttacagctgtccttgtcaaagtttttttttgtttaattctctcatgaagaaacgctggaaaaggcaactactttaatggtcactggtcagccggatataaccgaagaatcctcatgcttaattaaaattattaaaaaaattgatagtagaaaacaacaaaatgccaattacagaaaaataaataaaataaaacatcacatcttcctctctgttctctataaattggcagacaagagtgtgttgggttctgctttgatatttgttttttagtttctccttctctctgcagaaaccgtaattaaaaacccccacaacttcttcaacataacgtcttcttcttccatctttcgttgcattcacgtttttaaaggttctctgaatcactccattaaaaatagctttgaacaagttttctcaatagtcaacaaaaacaatggccgttgaagctcaccatctaaatcctctgttctcttccaacaggtacagaaaatttcttattataatctcctct

SEQ ID NO: 50700 - DNA, 1212 bp, Arabidopsis thaliana landsberg
tgcaacttataacattcttatgggtgggtatgctagaaggatgcaggctgatatcattgagacacttctgcgggagatggaggatttaggtttagagccaaatgtgaaatcgtacacgtgtttgattagtgcgtatgggaggacgaagaagatgagtgatatggctgctgatgctttcctgcggatgaagaaagtaggtttgaaaccttcttcacattcttacacagctcttattcatgcttactcggttagcgggtggcacgaaaaagcttatgcttcctttgaagagatgtgtaaagaggggattaaaccggcggttgaaacatacacatcagttcttgatgcattcagacgatcaggcgacactggaaagctgatggaaatttggaaactaatgctgagagaaaaaatcaaagggacacggataacatataacactcttctcgatgggtttgccaagcaaggactctacattgaagcaagggatgttgtatctgagtttagtaaaatgggtttgcagccgagtgtcatgacttacaatatgctgatgaatgcatacgcacggggaggacaagatgcaaaactgccgcaactgttgaaggaaatggctgctcttaacttaaaacctgattccatcacatattcaacaatgatctacgcgtttgttcgtgttcgagacttcaaaagggcattcttttaccacaagatgatggttaaaagcgggcaagtaccagacccaaggtcctatgagaaacttagggcgattctggaagacaaggcaaagacaaagaacagaaaggataagactgccatacttggtataattaatagcaaattcggtcgggttaaagctaagacgaaggggaagaaagatgagttttggaagtacaagacgaatcgaactacttctcctggtcgtcaccgatcttgaaggtagcctaaaagctatataaatgctttagtggtacatagtgaggattctcaagctatacgaatctagttgtattcaatatatgttcctctgatctttgtacttatagccttatttattagcattctaattttttatgttcctaggacataccttggtcatgtgtagtaaaaagtgcaaaagtttagctatattattccgacaagcgaagtatctcttaagtagcaagcaatctgtagatataactcttagctctctgcatcaaagatcacacacatcac

SEQ ID NO: 50701 - DNA, 523 bp, Arabidopsis thaliana landsberg
tgatggagatggtatgttccttgttaattttactagatttaggtggtggcatctcgatgagtttaaggtgtttatagttcttgtgaatggtttatctttatagggtgtgctaagaatgtgaaagaggaagatgttgatgagacatcaggggaaagagacgagaaagatgtaaagatcgaagaagcgctagagaataacgaagaagagagtagagaagaagaagatcatagtgtccgaaaacgcaaacgcaagaaaagaaagttagttgtttctttcttttaatttcgtgtgttttgtatggttatatactaacggtcaagagaaactaagccctgtctaacgaattagaccagccaagtccgaggagaaaccgaagaaaaagggaggtggtttaccaaagtttgcagtctttcaccagaacttcaggcttttactggaacgcctcagttagctggaacagaggtacacataactgatatttagtgaataaattacaaaacttaagaaggggtatattatatgc

SEQ ID NO: 50702 - DNA, 591 bp, Arabidopsis thaliana landsberg
  unsure (1)..(591): unsure at all n locations
ctatttgttagcttgctaattctactaacaactttttagctaactaactattatctctagtgtatagaaacaccttctttatatattacagcgtcggtggatgaatcacgagctggtggccgtggcggtgccgtgtgccacgtgcccgggtatgctggcagagaaacacggtggactcggtcaccgaggtgggcagtcagcattggactcatctgtcatctccgggcaaaacgtgctccatcaaccatcgcaggctcgcagcctaggaaaaattaacttttttgctatataaataaaacttcgttagtgagtgagttgtatgattaactatacgtttggttgaggaggcagttccatttcggtttctaggaattaagacattttattctgtgtttgacgagcagaacaaaaccgcttcatttttgtttggttgaaaagtagaatagagtgaagcagtttcgttcgttgtttgattggagaccatataaatgtagagtggaggagagggagaagagcgctcgcgtccgtgagagagntcgcatccgattgatttggtggagcgagacatcccaaatatttccatatatagat

SEQ ID NO: 50703 - DNA, 743 bp, Arabidopsis thaliana landsberg
ctgaatgatgagaagaccataaccgcagcataccaatataaattatcaggtcataaccgagaccggaaaaccaaagggtagtatatgtttagggtttagatttggatgtatttttaggggacaaatcagaggatgtaattcggatattgctagggttcatgagggttgtagattaggagtttggggaaatattagacatgagccatcagctccttgtgaagatgatatctatgcttagaaattgattacttcgattatttccaataattttatatcttgttattgttgtattatttgatatgtatttcatcatactgatcatagtcaacaagatagaaagaactcaaacgcgttagaaaacgaaaacaaaaatctcaacataaatgatttaactttgacgtattgagttgagccaagaaacccgagtgagatggttttgactttgacgtattgagttgaaacccatgcacgcataatttttagaaggtttatcaagattccatcaatttacaaaatgacaaagaacactgaaaattcagtttctgtttaatatagtcaaaaagatttggacattgttgaccattagttattgtgttatttaaggattgtttgtttcaaatatttaatgcttagcagtgtaaactagctactcccacagatggtatccattcccgtttacgtttttttctccgtttatgttcacgtctatttttatttttgttcaacatctaaaatgtttaatt

SEQ ID NO: 50704 - DNA, 492 bp, Arabidopsis thaliana landsberg
caaggtctgacccatgtaatctagagatcagagcaagttatataagtcttgtcttccttgtagatatctgaactcataaccttaattaaaagttccctttttatgtggccagcttgccatagtcggtctcagtccaattggtctaaaggttaaaagcaaatttatcaaattcaggccaataaatcaaaatattttaatgtactttttctatcatataatcatcaattctagaaatatttgaaatatataaattattcgttcgaaggtttaaactttaaactagtaacctattttattttaaaatttttaagtgtagtttgaaataatgattagcaaatttattagattaacatacataagagggaacaggtttatataatgttagaactaaaaggaaaaaattaaaaaattaaaaaatgaaaaaaaaaaccatagggataaaaagaacattatatgggaaagacaaaccataaatgtaaaacaaatggattg

SEQ ID NO: 50705 - DNA, 571 bp, Arabidopsis thaliana landsberg
tcgaggacaagacgacgacgctggcaacaaggttgtgctggacgaaggcgaagaggtaggcatgacgacacatcgaggttcttggagttgccgcagtgggagagtcacgacgcataggaagaagatcctccacagcgccactatagcgtgatgacgctacttgaagtcggtgactcgaacagttggagaagaccatgtgcgagagacgtgcaccgacaagagtcgatggcgtgtagatgctacgacgaggatgataacagacgacgatgttgttgcctgaggaggtgatgcagcggcaaccctcttgtttggcgacgatcgcacgatggacgacaaacgtctcaggagggtggttcgccctcgatcggttgatccgcctatagcgtgcgaggcggagatgacaatgtcgacgtcgatggtggagcttccgatcggtggtgacgacgatgagccgacgtagattcacgtgcagacgaagggacgtgacacatggaggcgcttcagttacattgcagtccacgccagacgttgaagaagatgaagccggtgttgtcaaagctgatgttgatga

SEQ ID NO: 50706 - DNA, 1119 bp, Arabidopsis thaliana landsberg
agatcaaatcaacatacaagttttttttttctgtcaaaaatacatttttgatcaacacacttggacttcttctgcaagttatgccatacagatagcaattcaccgataatcacaagtccttgtttttaattattatatcaatcttacatagctgcaacggaagaggtagtactaatgggttgagaagacttggtattgccaatgccattgcagacattaaagccgtaccaaacagagttaggcaagaaaaggttgtagtagaaagtgactgatctgatggatgagccgtagatcttaacattctctggtttccagccggcggatccttgcctgaggaggtagagataacaaacgtcgggcatacacggacccgatatcttgtatgtgtctgatgaacacttttcgaacgtcctcgacgatggatcgtctagtctcttcacatacacctgaacaaaacaaaacaattttttttaagccaaaaatattcattccttttccctaatttagacaaataaacaagataatttaacattttataacctcttgaatatgcagcatcgttactgctaaaacgcaagctactactatactttgttttatgggatgaacttaaaattgttcaaaataataaacaaatccaagtttcttggcttggtcaaacactcaaacctaagcccgagtttcttggatctcaagatccagaagctattcaagtttcttggcaaaccaaaaatctacttggataatctgaaccgggttgttgtaaactaagattccagaaaatttgtggaaaatcatattcgattgattacggatttatttagcagtgaaggaagctatccgaattatggatattttgtagatcaaaaccaagaattgactttaaagaaggaaaaaactaacctcgttgccgtagacatcaccaaacgatatactgatcttatctctagtgtaagacacagaggaacagcatgtcttaatgatcacacgtgtaagaacacgcagccgcattctgaattgaaaataaataaaatcaatcaatctgaattgaaaataaatgcaatgaatcgagaatatggtatttacctctagctttgcgttacgaataaatgaatcaat

SEQ ID NO: 50707 - DNA, 454 bp, Arabidopsis thaliana landsberg
ctaatctctttgcagaagagtaacaacagcacacaaatatccgaagcagatgcttttcttcgtttcacgttcgtattacatatcaaacatcttccatgtttgttgtctgtcccttttcatggtttttaacttcttaatatatatatttttccccaccttttagactttaggagcaatagtttgtgattttagagacatagtttgtttttgtttacgtgtttcctacgaaatgctacaacgtgttcataaggagttaaaggccaaaggtcaatagctttaaggaggttaatcaacatttactgctgaggttaataaacaaaatacgcttactttctataaatcaaaaaaatggtggaaggtattttaaagtattgttttagccacaagttcgttgagtggtctcttaaatcttagagttttaattacaattggaattgattcggaagctggaaag

SEQ ID NO: 50708 - DNA, 515 bp, Arabidopsis thaliana landsberg
tgaaaggtgcgtccgtgttcaaagcaatcatcatcattcgcaaggaagggacatctatgcaatgagagacatgttgctagacattgctctctagaagggttctttggtttctgtgttttatttgcttgtggcttaagtaaagttcttattttagttgatgatgacttgctgctaacttttggaatgtcacaagttgatgacttatgagagacttgtaaacttggttcaagaatgttctgtgttaggttcaatttaaaaagtgtttgcatcaattccggttatttgtgtttgtaccaaccggttcaattcgtaattctaatttaaccggaaggagtccgatatcgttatctctctctgtgccactcaaagaaaacgtaatccaagccaatggaggagacgacatggggacagagaatacaagcggtgacacatatcctcacaaacccaacaacgaaaccatcactttactctcaattcttcatcggagccataattccaaactacgtatcgtggga

SEQ ID NO: 50709 - DNA, 308 bp, Arabidopsis thaliana landsberg
aagaaaaaataaacaatacaaaaaaaagaaaaaataaaaaaaaaaaaaaaaaaataaacaagaaaaaaaaaaaaaaaagaagaaaaaaaaaaaaaaaaaaaaaaaaaaaaataaaaaaaaaaaaaaaaaaaaaaaaaaaaaaaaaaaaaaaaacaaaaaaaaaaaaaaaaaaaaaaaacaaaaaaaaaaaaaaaaaaaaaaaaaaaaaaaaataataaaacaaaaaaaaaagaaaaaacaaaaaaaaaaaaaaaaaaactaaaaacagtaataaaaaaaaataacaaaaaaaaaaaaaaaaaaaaaat

SEQ ID NO: 50710 - DNA, 519 bp, Arabidopsis thaliana landsberg
ggtggccaatgacttttgtcaataaaactcaaagatttgttttctagttggcaaagcatcattcctctaaagtaggtgttgacaaagcaaaattatattatttgtctagacgagtatctatgtgataatcaacacttatattccttattgatttaactatggtattaaactaataacaatattttaatattttgacttactacaataatttatcatttcatttcttatccttgctatataagatgaacttttttgtccatcaatcttgttttgtcgttttcgaaattatatgcatttttatttattttttcgaaaactatatacattatcgacgatcattcatgcattgcgcaaaaataatctaaaatacttagcgggttggtctgcactactcatattacgtatatttatacatacacacactcgaaaataaatattaatttagttactttatgaagaaatatcaattttgtagtacagtataaattatgcagcaagacgatactctctcggaatcac

SEQ ID NO: 50711 - DNA, 1119 bp, Arabidopsis thaliana landsberg
aagataaaacatagtcaaatgaatttatacacttacctttaagacagatattgcggaacatgtcttaactagtacctagcaatgtgaacgtggccaagtgattaggttgtctctctgtaattaaaatatgtaattaagggactaattccgctgtgtccacgtggtgagagaatcgtattatagagagtcattgacctctccttctccactaatcaaaaccgaccattcacaagattaatggccgtcgtgactatttctctctcgttttaattctgttgccatttgaatacttgaaggctcatgcagtcaaaagatcagatttatacagtcattgaaaacttgaaatggcttttctccttcctaaatgtaatacttttaagggttttggagtaatccacgttattaattagtctcgagaggccaacactttctatcaccttttcaatttgtggcgctccacttctctagctttttcatttcatttcaaatttaatgcatttaaaatgtcattctatatcattaattattgatataaaattacgtatgttgaccaaacaaaatatatatactataactttttataaagagatatctctaagatatatgaagatgatgtaaacacaaagaaaattattctgccaatgtgtaagcgactagattttagattacatttctttttcatgaaggttgtcaacacctgattttaatttctttttcaccaaacagacattgttcaacaaatgttattagagatattagactttttgaataaatataattaaaaatctgttttatttcatacacacaaatagagaatattatcttgcaaatctcaatatcttctagttagaatcatataattaaaattaagtagatttgtaactatcaagttttcatattaaaatctatattttatatttaaaaggaaatctatagatgcaacatgtaagagtctttatttcagtttcactgtctattcttcttatgtaatttttgaaaactagaaatctcaataaaaaaaacttatagcgtagaaaataagaagtgtcagtggtgtggactcattagttgaaggagtaaatctcaattcaaaaaaacataaaacatgtacggtacata

SEQ ID NO: 50712 - DNA, 745 bp, Arabidopsis thaliana landsberg
ataattcctcaccttgtctcattcggcaaatatttcctataggttcaacttattaagtagaaatgacaatgtcttggctgacacttatcaagaactctccttgtaatcactttctagttactttcattatggaaaagttgaccgatcgaaaaaaagtattttaaaaaaaaaatagaaaaattaagattttcatagtgtaattgtaaaaaataaaatcaaattattttcagatattccgtatcgggaataaatctcagccgttgattacaatcaacgctgtacaattactgcctctgcctgttacttgttctgctccgtcgctcagataggatctcaacaaggacaccacaaaccctaaatttcgtcaactccacagcaactcgattcgatcaaggaaatggcgtacgcttctcgttttctctccagatctaagcaggtctatactctctctccctcgattcttctgattctcttcttcgttctgtttgattccttttgtttttcctcccatttctgggttttatgtgtttcgatgcgatggttagagtgagattatcgattttactgtatctctatcaccgaatcacatcatagggtgtgccatttcaatgtcgtagtcgaatttttggtatcttgcgtacgatctcaatcggagaggttgttgaaatcaaatgataaatttaatggggtttttttctactcgctgttgatttctaatacagttcgaaatgataagatgatttgc

SEQ ID NO: 50713 - DNA, 459 bp, Arabidopsis thaliana landsberg
tgggggggcccgaaaccctgggggggaaggtgttgaaggaaacacgcacgcgcaagggcttaagcggcgcggtcgactggaaacctatcgaccagctgacgatacgcgccgataccttgtattcgagctaccaggtcgacccgctggaacacgagttcgggcaatactggtatacaccgggaggaggcagtcgctgacgaccgatgccaataataccgtgacgagcttcacgcgcagcggcacgggatcgggcgtgatggccaacgattacgtgatgtcatatacgccggtctacgaaaagagctatcagaacgggctgaacttcagctacgacatcgacgagtcgaccaacctgagcctggacgtctccaactccaaggcctggaacaagcagagtcccaacggttacttcctggtgatcggcggcaagaattttggcgtcaacccggtatggaccaa

SEQ ID NO: 50714 - DNA, 495 bp, Arabidopsis thaliana landsberg
gtgtcatagtgattacttgactgactcacgacgatgtcactcgacctgaatgatagagttactggaccagttgatggttatacgtgctaatccagcactatatgcaaaatgacatgtctggtgatgatgatggtatacacgtcacctgaagatgcgttagctcatatttgatgaactttatctcagaattatcgtgtaggagactgtatgcgtcatttcttcgcaggtctacagaaggacgctgtattgcttttgtcttcgacaatatcgactttgcaactccagaagctagagaaacaacttacaggtttcaatttgatactctgagtttgaggcatggtttgcctttcaacaccgtattttgaagtttgtgcttttcagtcgtgacaattgggatttgttccaatgcagagaaaagagagcagatttttgtagttgatgcctatgttttaaaagggatgtctgagcttcttgatggaaacttaatggtatata

SEQ ID NO: 50715 - DNA, 569 bp, Arabidopsis thaliana landsberg
  unsure (1)..(569): unsure at all n locations
gcaccaaattttgctagttcctctacaactgctctcctgaatattatacgccggaaaacaaaaacagagattatgcattcatatctatattcatgcaatcacagagatgccataaattcgattcaaatcttgttataaattgtcaatacagagactcaaaagttttatcaaacaaacacaaaatcgctgtaaaagagcttcgaaacaatcacatgagaaaccaaatctcttatgccaatttgaattctaatatttatcaaaacaacannnnnnnnnnnnnnnnnnnnnnnnnnnnnnnnnnnnnnnnnnnnacggtggtaaagaatttagtcagtcgtaagataatggaagcgaattatacaaaagagaggagcgacaaacccgattccacgagtccnnnnnnnnnnnnnnnnnnnnnnnnnnnnnnnngaccatcttttgtcagtttccattgtcacgctcacgcactctcctccttggaatctctaactctctttntgtggatgtgtgagtgaactaaactggntggctcaaactccagtgagatattaccattgggcctaaaatac

SEQ ID NO: 50716 - DNA, 624 bp, Arabidopsis thaliana landsberg
  unsure (1)..(624): unsure at all n locations
ggtggacagggaatgttacgtgtgactgttcgctaacatctggcttaggaagcgattgatttttgccttgtttggacgctgtctcaatttcaatggctgttaccaaaagaaaacagaagctgaatcaaaactaaaaactacttcaatgaaaaatttgaggcaaactaaaaattcatgaaaaaaagtaaaataccttgatctgactggctannnnnnnnnnnnnnnnnnatcaaagaaggatcatcttgagctttatgattgctgacctcactcagaatactagcaggaccagaaaccctgtaaaagttatcctataatacttagcaacctaatagaaggaaaataaaaaagcatccataatcttggagacatagaagaatgatatggaaacatactttgtttcattaggtactgtgatgttgcttgctttgttagtggcaggctgagcagttctagaacctcttgttacatgattagctccattttcccttttaaaagaagcatttcttccactacctatatcggaacgttaacaaagagcttaatacaggaaagagcacgacaattgatatttgaaaggtatcaacaaaagacacaaactaccttgataagagtacttgaagc

SEQ ID NO: 50717 - DNA, 773 bp, Arabidopsis thaliana landsberg
gttttagtttatcgtgatcgactgattgtcaattcgtaaaagtagttatctatcaaagataagtaacgatgatttttcctaaacaagaaaattttctttttatttgattaatttttttccaagatattatatattgagatttgagaacatgaaaagatcacaaaggactttgtggaatggacataacatgttgagtagcatacagatggattcactttggagatgaccaaaagtgtcaataaagataagaaaataaatatatttatcatatataaaataattttaccttaccttaaaaagagttttttcatttattatttgctatgaatgagcccttttgaaagttaaagaggttaaaaaaatggactttgatgccaaaaaaaaaaaaataatctatgacaaaattttgtaatatcaaatgaaaaagaaattgcaacataacaaataaaaaaataagacaataaaaaaataaaagaggatgtgaaaccaaatcactggcactgcaactattggcctaaaactattcaccctttctgtttttcttatttatttacattcactcctcatatttcctagattctctcagagaagcccctaatgttttaatagtcacatttcatccccaagaaatccaaagaccttcatacgaagaacctatatgagttacttcataaaaattgaaataaccgatgtattcagaccatttttttctctataatcaaatgattgaatataaaaccaaatcaatatgttgccaaaaaagaaaccaaatc

SEQ ID NO: 50718 - DNA, 1082 bp, Arabidopsis thaliana landsberg
ttgaaaaacgaggatacggaaaatatttgtttggcaagtttatatcaaaataaataaattacagtttttcatttcaaaagatatattttctaataacaaacattctataataataaaaataaaaatttgataaactttacaatagatttaaaatagctaagtttgcaacaaaataaaaataaaaatgaatgtggcgtttaattgaaaaagaccaaaaaaggagaaaaatgtgaggaaagcggaaaacttttgagaacatgcacggcccactagaggcccacctactgtctatgacgtctctctcttcatttcacagctgatttggcatcggtatattcctcgaggattccccaccataacaatgttgccatttttataattattattagaacaacaataacaactcacttacataagttttcgaaaaagacagtaaattatggtgatcaaaagttgctcaaggcattaagaaaatgtatgattctgaaaattgtttgttctaaatcacataaagtctgtttgttctaaatcacataaagttttgggcttttagcaattactatatatataacccggacgttaaaagaagagtacacttgtttcttctttgacttggaggaaatattcttttaagaatttaatttatttgtgtacgtttttctttttgttaaatttgtatttgtgtacgttgtggtaccacttggtagaaagtagagccgtatatgtaatatgtgtcacttgcatgttcatcaaatttcaacaactactaccaccaagtcttaaagagtaatcctatgggaggctcgaggagctaagaaaaatgcttattaagatttgcgattagcatttaattgggagcgtgtgacatgttaccgttaccattaataaaagactttcgttgacttgttatgaaggaaatttaatcagtccgtgttattttcaactattattggatcggtcttgaagttagcatccatacctctcttcacgtgggtttatctattaggttcacacccggtttatacatacatgagtgtctaaatagaaacattattagggtctgatttgataacattaaagta

SEQ ID NO: 50719 - DNA, 645 bp, Arabidopsis thaliana landsberg
  unsure (1)..(645): unsure at all n locations
catagtctagttttgctccgattgatgtaaataacaaaaattctagctcccttttctttttaggatttagtttgcctaatgtgtaattggattagcttattaattaaaaaaaaagtatataatttgtaaacgataaatattaaacgctcaaaatacaatgattctttaaatttaaattttgaaactcttgcagaccaacttgacgcgccaagtctcacctccgtcttcactactgtccgcggttagtttttttgtgaactgacgtcaaaatctaacctcgtcggttgaagttagagccttctactaaattcagaactagaaagtctataatgaattttannnnnnnnnnnnnnnnnnnnnnnnnnactttgaattaagaatctcaccccatttactttgcttcatggaatgagattcactagtataaagatgctttctcttgaaatctctcggagtctctgacaacaaaacttactaggaggttctctcttttgaatcccatccggataaactacacgttattcctctgagttgtctcattgtaggtcatacgacttgttgttgtaaaggtttaaaaaagggcttggaaagtcctacgtgacgccatgcatggtgggtacagtaactatgacagtgatcttacat

SEQ ID NO: 50720 - DNA, 586 bp, Arabidopsis thaliana landsberg
  unsure (1)..(586): unsure at all n locations
ttcctcagtactcatgaaccatatttaaatttatattatacatgttgtttattaaataaaacaaattgtaggacgttttccctcaattaacagaattatgatcttattcttttataatcattgtgattgtgtggtgttaaatttgtcaatctgtattttatctttccatactgcttctgaccaacaattattaaaataagagaatatttgtactgcttataaaataaatacacgtatatccttacaaaaataaagaaaaacaaatgtgtattttatcaccaatgcaaaaaattaatttaggattacgctcagagcatgattgtaaagggatgccatttccgagattataacagctttttccgatttaacaattgatttgtaatgataaaaggactctttatattattaatcatctatttctttntacttgttaaataaataataaattatattctatacgtttgctttaaagcaattagcaactatcagttcattagaccgcattaagtaagttccttggaatcatcttcgagaaaatatctcatatgatttagatnggtcacataatgtactatagaaaataaca

SEQ ID NO: 50721 - DNA, 634 bp, Arabidopsis thaliana landsberg
acatgtcaaaaagagacatacacgtcgcacctcacttgttctcgactactccccattcagtttacatgcaagttctctgttctatatccactgacgtcaacctctcttgcagacgctgacgttgagctttatctccacgtgcactcgaactctcataacttctcttccacttcgaccaaggcattgacaaattactgtttttttttgtttgcatcttaatttctctagccaagaattactctgtatgttattttcgttttcttaagattagaaaaaagaaacaagtcaaatcgtattttgtgaacgttcatatatcatattgcccccgcatttcctactttgagacttacgaattgttcctaactatcgcacaattaaaataatacaactcataacattcaaaatttaaggcagatagcatatatatagtgtgtgctgtgccaaccagtcaaatttgtaattacatgattattttttttggttttccattaattaccacaacactcacccaccggtatatattaaatacatttctttatcgccaatattacctactgcgtctctatgtcactgcaagagcccaaagaccatatcttatgttacaaattgtgtgatcaactcggctaacaatcaa

SEQ ID NO: 50722 - DNA, 482 bp, Arabidopsis thaliana landsberg
  unsure (1)..(482): unsure at all n locations
atcttagaccgttgggatggatcggaggctacgtacttgatctagtaggcannnnnnnnnnnnnnnnnnnnnnnnnnnnnnnnnnnnnnnnnnnnnacacctttcgtcctcacgaacccaccgatcggtaatgcatatggtcctagctcccaacagctgagttggatcacgatcgctggaaatggaaacagagccagaggcttcatcttgttcttcttcttgctctggttagcaggacttgtgtgctctcttatttcttacactttttatggcttgtctttgagtggggtattgatggactcataataaatgatcataacggatggggaaaatagcattaatctcatttaaggtagagttatacacgcatactcatgtgttagggattcttctctttgttcgtatgatgagtgggtggatattaagtataagctgtgatgctctctcttactcaaatcagctagagtaacagcacttcatac

SEQ ID NO: 50723 - DNA, 740 bp, Arabidopsis thaliana landsberg
ctactttgtcagcttttaaaagtatttgctcgtcgtggagcccaatccactattgactcactcagcaacagagaccagccaagacggccatgctgctgccacttgcttccgctctgcatcctttggactaacaatgcttgaacccctcttcagttcccgatgaaccactcgaaccgaagcttcaacctcaggtttctctactcccttctctatctgatgatgctcagaaaacatgctagaactcaacttttcagattcaatcaaccgaactttggaatctttgctattccatctatctagcttggccttaacaacctttggatcaatatccaagtccgagtctacaacagcactagaggcccttctcaattcctgatcatgcacaactctatccatatgagcaactgtcgcaggattctctaatatcttcccaatctgatgatcatgacacctacttgtactaaacatttcggattcaatcaacctaactttagcatctccactgttactcaatctatcaaacccatcttccggttgaatccaatcatcaatcctcctcgacgaatcaatccgagaggaacgtttctcctctgatgactctttcagtgttgttgactttcttctaaaaggcctatgcctagaattcacacaacccattcgtatgctctctagaacatgaatctacacacataaccaatctacagaaaaacttaacctttattattcacaacccaatccat

SEQ ID NO: 50724 - DNA, 1216 bp, Arabidopsis thaliana landsberg
cacatgactgatcactagtcattgtttttgttaccactgatattgcgaatcgtggaattgtcagagtaacatgtaggatcattatatcaaaatccaatactgagagttcgaatatattgtgtttcttctggttgttcgaatatttttttggacataacacaattcagattcaaatgatcagattttagatttatggtactcctaagaaaaaaaaatgcttagcaaatctgaaaacccttattacattactactataccttttttgtttgagggcaaaactagtcctatactttagaatgattactttcgctgatataaaaaaactaatcgtgatctaaactttcatataatttactggaatttaaaaaaagctacgtaacaaaattgataaagtgatgagcatgttacgttgccacgtttcattgttttctataataaatagaattctttcgacaatgggttagtggttgtacgtatatataaatatgctcgctaattggacggtgcgcaacttcaagctttttaaattatgtggcacttaacttgtctgtcgcattagcaattactttcactgatatatatcactctccgagcataatttcatgctatcaataacaaatttcatgttatacttggtttggttgaacagaaactgcgtgaacattaaattgatagataactttataaaaataagaaacttacactgcaaatataaattgttgatgtctccaaaaagacaaagtaacacacatcttaaattctgtgttgtggttgtcattgatacacgtataaacaaagtgtagttaatccaattaattaaaggaggagaaagtggtacaatggaccaatatggatatagtttatgctttttacaccgattgatgcaaaggtatcttcgtgttatacttcattattacatttatagattggacttgggcctttactgactgaggaccgatgagaagcatattggctgggtttcatttgaatcataaagaaattaaaagagattatatataattgcattttgtaaacaagaaaaaatataattgaataacttggtattaaatttctgagaatacttataatatttgatactatttttagccgaatataatgaccaacctaaatttggggcataaattttgcacgatcatgacttagaacttatcgtagttaattctgtagtaattaatattttaaatatggcattttc

SEQ ID NO: 50725 - DNA, 1154 bp, Arabidopsis thaliana landsberg
aatcaaacgaaaagatcattttaccatgaaaaaaaaaactgtaaataacgtaaagaagagaagaaatataaattcccgctaataatgatcaagtgtttttaacaataccctttgttggaaggtgtttaaacaattgttttcgttcttgtgaattcttttcaagattctattaaatcatgtgcatgtatgtgtttcagttcagagacagactttgtcctaaatcaaggtaaaatatgtgattatgcggcatgatatgccttactggcttgtaagttataacatatggattccttatgtgcttaaatgcatatgtatgcttgtcatatgaggcatattactacacttccttgctaatcttttttgagtttccttaattctccttcatgttcattgtgcttttgtcctgtcatgtattagctagctatgtgttcttgttattcattcttgctaaaattacgaacacaatttagtaagaagcgttgttgctctttcttccaattcccggcagcttacttccaaactctccctttttggctaatggaatctctacgatcaaattgcaaaactctcatcaatgtgagcgacccggagaaccaaattgatttctttcccagtagatcaaacatattagaccatagtaacaaatgattgacataatgttcaatctttcagagcataaactgtttcggatgctgcaacagagaaaggcgtttagttgtggaagtcgatgagccatcaaagggactcaaaatccaaggaaagatagtgaagaaagatagtgcttcatcagatgacttctggagcacaagtacgtgtgatatggaccacaatataacgattcagtcccaatcttcaaacccgccttttgatccccaatgcagcacaagcaactctaccgaatttgtaaaccatggtaacttttgaatgttctaacttctaaggcctaggttgttttggatgccaaaaacttatgttatgaagcaagcagtatttattactcattcagttattctatacactaaaagatacactactacttattcatttccttccataaaaggacttattttgtggaaccacacgagacaacaatggcgtgaatgcttaaccagacaacaatgtctagttccagaacctgctataggtgacaacca

SEQ ID NO: 50726 - DNA, 1239 bp, Arabidopsis thaliana landsberg
cgacctcttgaaccgtataattgaatcgcgtttccatagtttcctctcgatttttgaatcgcgttatacaattgtctactttatgtacatttcgcttcggattcgtaaccgtagcttcgatttttgtgtttgaatcggtttgattagataatttatgcctttaggatctgcatcgattcgaatttcgatcttgaaatctatactactggtgattgttgcttgagatttatattgatctctgagaattgacgtgatctatttcgactaaatctttgttgatacatgtgtctggtgagatatgttgctcattgcttgagcaagcgaagtgaaaataagaaagatgttattatacttcactaagattgaaatccattggaagagatgtgaattacccactattgatcatcaaattcgtttcctgtgttccttttcaacttgcataccgtagcttatgtcttattgtttatatagtttcctgttggaactggcggagaatcacttagttgagtttttctgtggcagatgcgattgttttgaaagtgttataattgatcttgcttctgctgtgttggatcttgtacttacatgtgatgtatgagtatcgaagttgttgtgacagatagcatatgagcctttacattgtttcaactattagctgtgagatatttgtgaaccttgtagtttatgatctctgcttttcttccatgagctgtgttttacaggctattttgctgtgtgtgttgttccacacagatgatctcattcaacaattttgcaattttacttctatttgcagggacaatcatttcggaaacatgccaggtcagaagattgaaacgggtcatgaggacattgtccatgatgtgcagatggattactatggaaagcgaattgcaactgcatcatctgactgcaccatcaagataaccggtgtcagcaacaacggtggatcgcagcaactagccacattaaccggccaccgtggtcctgtctgggaagtcgcgtgggcacacccaaagtatggatcaatccttgcttcatgctcctatgatggtcaagtcatactctggaaagaaggcaaccagaaccaatggacccaagatcatgttttcacagaccacaaatcttcagtcaactccattgcatgggctcctcatgatatcggactatccttggcctgcgggtcatctgatggcaacatttcggtttcacagcccgtgctgacggtggctgggacac

SEQ ID NO: 50727 - DNA, 602 bp, Arabidopsis thaliana landsberg
  unsure (1)..(602): unsure at all n locations
tgaagggataagggggttctaatcttgaccgcacaatctacatctggcggtcgaaacactatcaaccgcagatctaatcttggcccttcgaccaagcgatcaatgatcccgagatcgtcaccttcattccggtcagacatgcgaccaagaaccaagtgttgcgacggcgccatcacctggaacctggttagtcggccccagctaccccaacctacgcatggttttgcagaaaatagagaggagggtatgtggaaaatgttggtggttgacttacgagtgatcgagctatggtgaaaactgtccatgcgacacgacgacatggggaggaagcccgccaccggcaagaaattggcgtccaggagacggggctctcgccaatagggactnnnnnnnnnnnnnnnnnnnnnnnnnnnnnnnnnnnggtaccccaggatggtcaaatcctcccagaaatcgtgatctccccacggcgggtctcaccaccttcccttttgctgtttctcctcacggtgctctctgtgcttcaggcggcaatggcctaggggaggcgcagggcgggtttatatgctccggtcggagcacaaggcggcggatgtagccaa

SEQ ID NO: 50728 - DNA, 528 bp, Arabidopsis thaliana landsberg
  unsure (1)..(528): unsure at all n locations
atcgatcatgtgacatgttatgaacggaaacataccagtaaaaactactcgagcatgggagatcatgaaaagagccaagaatgagaaaagcatcatcacaaggagcttcgatgaactacttggcgttttagccattaaacaaatatctctctctctcttatttttatctatttatttgattaatgtactctacttattaagaacacatttgggaaatttacaataatatcctccgtccttcccaatccctcgggagataatagaccttgtggtggatctttgtctatttacaatcacatacttatgtgagatattttgtagatcatctaactgatccttacatgagatatagatatatntttagtgtaactattttaaacgattaaatttcttgtgaaattaattttgtatttttaagggttatttttcttgtgtggtggcttttcattttagacgatttatttggaactacatgcattttcaaaactgtagngactaatcgacatggacatatcaatgctgctatcg

SEQ ID NO: 50729 - DNA, 634 bp, Arabidopsis thaliana landsberg
gaaaacaaacccaaagattaatgtctccaaaggtcaaaattaatgtcttgttttgattttgtttaacaaaatgtccagagactcgaattgattacagaattcacatgatgaataccagaaaccagaagacattcatttctggcaaaactagaaattagtcagtacgcctaaccaacaatgttattgcctctcaactaattaccaatttcagcaacttactataaaactttcacaggataagctataaaacttaaaaagctaagaaataaattgtaacaattgacaagagaggtaagagacctttttgtctcactctaagcatatcaaggaccacagaattctaaaacgcatgggctcataattgttcacctacttattgagtccacaagattctttcaaaaatatgaaaagtaggtggcaatgaataataatactatactgaatttaagaaaccaaatgggtaaagaataatgattgcttgccaaaaatatcagattcaagaaaactgttggatcacaagataacatcagcatctggtgattcagttatatatagagagaaaacttacccatgacagagctcaacgagttgtggaacagggtcagtatcacgaagacggatgatggcagtagat

SEQ ID NO: 50730 - DNA, 963 bp, Arabidopsis thaliana landsberg
gaatttttaagttgttgactaataactgggatagttccgtaccaagtcttctcaaccatgttctatttgaactttcatgtgtcaggtaagcattcattgttgggacagaaattcggcatacagagttacagaagaattacatcaaccatggcttaagagactattaatcggttttgcacgaacgtcagaagctaatggacccaggaagcctaacagctttccaatccttttaatccaagaaattgattcagaacttccagttgtgcagcctgcgcttcaactgacacacagaatatttggttcttgccctccaatgcaaagttttgacccagcaaagttgctcacggtagtttcttttctgttgcaacttccttttaaatttagttgctttaatatgagcccatgtttctaatcacaaatttggattgtaggactctgggaagctgcagacacttgatatattattgaagcggcttcgagctggaaatcacagggtgctcctgtttgcacaaatgacaaagatgctgaacattctcgaggtagtatctagacacaagtctttgacctcactgtacaaatgaatttgtaattacatataacaagcatccctatctacacctttgctttacatttcttttattttatgtttatgcaggattatatgaactatagaaagtacaagtacctcaggcttgatggatcctccaccatcatggatcgccgagatatggttagggattttcagcataggtaggatttaactttctcaagcttttttttttacgttcccatgaggctttctgtgcacaattgtaaaccatatatggttgcaggagcgatatttttgtattcttgctgagcaccagagctggaggacttggtatcaacttgacggctgcagacactgtcattttctatgaaagtgattggaatcccaccttggatttacaagctatggacagg

SEQ ID NO: 50731 - DNA, 510 bp, Arabidopsis thaliana landsberg
tattatcctgacgatactcataacttcataaggatcatcatcggttgattcttacgcggtaaactctctctctctctctctgcaggtgattccacaatcacgatcaatacaagagccatcaagtagaactgatgatgtgtaagattacaaacctgctcatgagccaaagaaagcttcattttccattttcctaatttcgctacctctgccattttatcagaagcaatggttcttcaaaagatcagccatcatcaagaaagagaggacgacattcatcctaggattcaactacaagactcacaactctagcccgaaaatcacattgaaatgcacaagaatatgtagtgccatttcgattgtacggtgatggagaagttgttgtgatattgtaggatgttcattttgactggtggtaaatagaacccagaagcctgtggctaataatttcttctagggattgcccaaacatgtacagtttcaacttcaaatatggcaacatggaacttttgg

SEQ ID NO: 50732 - DNA, 734 bp, Arabidopsis thaliana landsberg
aaacccagtttttttgttttcttcattccatctttttcagctgtagatcgataatatcctctcccaaggtaatgaatagaatacatgagttgtagagattatattgatgatgtcgtaccattgcatgtacattatagatatatgttaagtcaagaggagaagaaggaagagaaattattcgaatctcgaagatgtcttgataagatctcatgacacttcaggtacattacaaagctattcttggatacccaaagaaatttctcttcaaaatataatttgaaatctcaccatcgatttcacgaaacctgaatcatgtagacagagaggtctgtttttgggctcgattatgcataaaaataggactacatatcaaaggccaatatttttttggttaggatgaatctttgagttggtgatgaaaatttatattaagagtatgagagcatttgttttctaaaccctaaaaataaacttatataaaacatttattagaatgtgatctgtattcatatctctcaatccgataagctattataatacaacgaatacaaatctgaaattctatactttattgacatgtacatctaatcattggggtacctttatatatcacctaatcacaaccattcataaatatacaaattgtttccataaatatcaacctaattaaattgtaaatatatatttttaacaaaatatttgctgtagcacatggactaaaacttcggttgatc

SEQ ID NO: 50733 - DNA, 440 bp, Arabidopsis thaliana landsberg
ggaatgctacaagcttgtttaacgtttggagatggttttcccacatgctcgcttgaaaagtgcggtggatgcgtcagtgtggcagcagcgcaggtttccgtagctccgtagccttccacaaccagaataccgaacacggctcggtaaaaatctagaacagcgccagcaattggagcagagccagtcacaataaggcggcatctctcaaatccgagcatcttcttcaactttttgaaaacgagcgcatcccaaaccggatgagtgagctcgttcttcttcaagttggcaactttggtgtcgagagccttggtgaagagtttaagcttgatgccgcccgctgcacgcaccttgttcatgatcttgtcatagattaggttaagcaatctcggaacggaggggaaaacggtaggcttgagggtgctcaagtcattcaacagctc

SEQ ID NO: 50734 - DNA, 308 bp, Arabidopsis thaliana landsberg
tggaggtattatgattggaagatagtttagccgcattaatattatctgcatcttcaacttgtattgctttgttttgaaattttgcctgctttcaggccttctttggaatacgagatttttgcagagtggatttcactgtaacttcacacgagagtgaattcaattttgcaagagtcaggcactgttggaacaaaaaaaaaacccccagcaatttagggagattccaaacgcatagggaaatttcctatatacctctttggaacagaggattattgtatgaaatctcattcctattctaaatgcccccg

SEQ ID NO: 50735 - DNA, 645 bp, Arabidopsis thaliana landsberg
gagagatttgaattttgagaaaattaagaggattttggtgcactctgtttctttttaaaaagtatttgagggctctgttttcttaacaccatgaaatggccgacatgtctcattccaagttttattaactccttccacgcctttcttttttatatgattacatcaatccgacgtcgttttggtttatgtgaatcgaatcgacgtcgttttgggatcaatttggtaataaattgcttgcgcacgttttcttctgcggtttttgcatcgcgtgtattcgtgtatttcgcattaactgttgagttacactgttacctcatgcgtttctttcttaaatgtcatcaatatttgaagcttcgtatggtcgaccaaacttaaccgaattcaacattttgatttaaatttataaacacttcttcttcgaatttatttatttccccccaaataatcacttgtttctgatgcacatcagacctcacccaaccaaaaacgcgttctaatggtgaagtcacacggaattcatttttttatttaacagctatatacattatgtatctttgtcagctatgaaaaagaccgaataagtagctaaattcgtaaaccagttaaatataacttgttccaaacccaatttgaaattttcaaata

SEQ ID NO: 50736 - DNA, 691 bp, Arabidopsis thaliana landsberg
acacttgttctaagaccgcagcttagattccgaccacacgagccaccgtacagtagattccatgtcccacgagccgccgcttccacagccacagaatccttattggaaccaacatatagttggttttaatcaaccgacatatactggtaatgataataacctcctgatgagtttctggaacggcaacggtggagatttcataggagactcagcaagttgggatgaacttagatctgttatagatggcaacactaaaccctagtaataaagtttccttttttcagctttgtacaaaaagataaaacaaacgattgcttttgttttagacaataaattaataattaatgatatatctctagtgagtaaattacacttttgatatttttgatctatagtttgcatcatatgttaagaagaagtaatttgtttcttctcgacaggaataataaaaatcacatatatgatgaaattactacaaatgaattcttaacacgccagaggaaaagtttttttctgatacttattgctcaagaaacaagtcatttctctgctctttttcattcatctttatttgatcaaatcctctggacttttcacattttttcgaggcttaaatcttcgaaattgaatttaactattgtaaaggtactgataagaaactatataggaatttaggaacaatgaaacagat

SEQ ID NO: 50737 - DNA, 1036 bp, Arabidopsis thaliana landsberg
  unsure (1)..(1036): unsure at all n locations
ttgcctgactacgtcgtaggtgatgatagaaaggtctttcaagcgattttgcatatgcttggggttctaatgaatcgaaagatcaaagggaatgtgactttctgggtttttccggaaagcgggaactcagacgtatcagagaggaaagatattcaagaagcggtttggcgacattgctattcgaaagaatacatggaagttagattcggnnnnnnnnnnnnnnnnnnnnnnnnnnnnagtagtagtagtagtagtggtagtaacctggaggaggaggaagagaatccgagtctcaacgcttgccaaaacattgtaaaggttggtcatttgtgttttgtatgtaaatgtgctaatgacttggtttaacacttttatcttgttttgtgacagtatatgcaagggaatattcgggttgttgaggacggtctaggtttggtgaaaagcgtctcagttgttttccggtttcaactccggcgatcgatgatgtcgagaggcggtggatattctggagaaacgtttagaacctcaactcctccgtctactagccactgatcattgacgtcaggaagggggggaggggaatgtagtgcaaaagaaagatttaaggggtggaatctgagaatttgtaaaaacagtaggggctttaatgagattaacagagagagtactaaaacgttgtcgttcggttgtaaaaacctgaaagttaactaggttttaacctatcgtgtaggcaaaaggtatgatgcagacttgttgtaacttgctggtgataacagaattcaaagtaaaaaaatgtgtcggaggatgttccttacggatttgtgatttacaagcctaccaactcctttgtcaaatattgtgacgttttagatgaagcttataaatttattgatttctgatccagaaaccgtatacaacttgtatccacaatatgtatccaggtacatattaacttcgaccttttaattaacttttgtttttaaaagagaatatgtgattttttttttttaacattgaggtgattcgtgcggcctat

SEQ ID NO: 50738 - DNA, 420 bp, Arabidopsis thaliana landsberg
tggccgcgcggctcggcccgcgcacggagctgtgttgtttgccgtgtgagagcggcgcctataaggggaggtatctgatgttcgtgaccggaccggaggggtcgaatccacgcctagcgaccctgcctgaccccgaccccgcgaccgccgccgccgtatcccagggatgggaggacgaggccctcaccaaccccgtctacgacgccgccacccgcgtgctgtcgcacttcccccacggccggggcctgggcgactgcggcctgatccagtcgtggacctggacggagcgaggcttccagccgcgcgagacgcgggcgatggacgaatgctggggcatgccgccggatctctggccgaccacctggcgcagccggtgaccgatcccgaggttctgatcatcggggccggcccggctggtct

SEQ ID NO: 50739 - DNA, 919 bp, Arabidopsis thaliana landsberg
acttaaccttcagggttccataacagttcttttgctctatccatggcgtaagatgatggaccttttcaaagtttgatccttttttcatatctgatcaaaggagagttttgggtttgatttctaattgttaaagttttaatctttttatttgggtttgtgttcgattatgtggatggctactcaatcaaattctgggttcgattctttgagttctatgatgagtcgtcacgctattaatttccaatctaacacttcttcggagatgactccaatgagtccgtacttggggatgaatatgaatatgatcaatgttggttctcctggttttcttcaaaccgggaattcttcgaatggttccgattcgggttctggtctaaagcttgatacttccatggttagtgaatggtcaaatgaagaacaatacatattggatgctggtcttgaaaagagagtctttcttgttttgtgatttcttaacattaatgaggatatgaagatagctttttgttctgtggaattcgatatgatctgattctgtgttctttcgagatataaggatatgccaagtattgatatgtatattcaaattggaaacactttacctgataaaagtattcgagatattgctccgcggagtacgtggctgagggtaagtatctctcttcacatatctgccttgttctgacggtttttgtagctttcttgtgaccatttttcagtcatgtagttctacgcttatgccatgaatgatatatgtatagcaaagaaaaatgatacacagggaacagtttctacatgttctgatttcatacatagcttcttaaactacagtacacagaatgaaatggttttgccttaggatggactttttggtcttattgatgcctgagttggatcaatattggagtcttgagatgag

SEQ ID NO: 50740 - DNA, 1809 bp, Arabidopsis thaliana landsberg
ttctcctaccggacatcttggcttgcaatcagagattcagttagatcgacgtcctttttgtctgcttttgttgggatttttcaggtagctggtttttacatttgatttgtgtcccctcatttcatacaattcacatagtttcctaaaaccattcccaaatgtatgtgccttcatcccatttgcattaggctttcatatgtgcccatagaaaagttgcaaccaaagaccacaagctcgtttattggtttgcgggtggtgcagcagctctctcagttatgctggagaagaaaccgagacgctctgagcttgctctatatgttcttccccgagcaggagattctctgtgggagatacttgttaatcgccaccttcttcccgacattaaaaatgctgaggtacaatacaattacaaaccacttttgttatttccaactttcttcccctttgagcaatggaactgatgttttatacaattaatggaaacaggtggctttattctgtggatgcatgggaggaataatgtactacctcgaatatgaacctgatacaatggctccgtttctgaggggactcatccgtcggtttcttgctagccaaataagcaatcctagcagcaaataccctcatagttcgtcctattcttatctccagaccctagatgcattgaagaaaccgaaaacgcaggagagccgagaaggcgaaactccgaaagccgaagaaaagtataacttggaagcaattcccggtctttagaagtataagcagaagctgtctgatactatattagcacctgacgttgaaattgagcaaaccaaaaaggaccctttacggaatcatgattttgattgtgtttcaggaagttaatgtgaaactttccagaaagaaagggttcctccacacagaaaacttaagagattgaagtgattcataggatttaggagcctgttttttattttctttcacgtaataacaacaactccactgtctcttctttatttcaatgagaagtagcagaatgaagaagatttatggcaagcgagtcaagctgtcttgatttgttaacaccaacacagtgttgaaacttgaaacagatcactagatatattcctttttgtcttgttataatcttgatctattgcttaaaaactcacttcaagaaaaacacagttttgtttagtttcctaatgcaagttctctcaaccgatggagaaaaagtcaattcgtctaagatttgactctcatacccaaaaactattgtattactcaaattgttgaaatttcatctgtattggtcggagcggatatgaatttgcacatacgatgatctcagggtcagaaaaatcaaaagataaagtaatgcaaacaactgacacttgtaagcatttgttccactttaaggaatacttcatatgctacaaagtcaaatgtcaaagggagttttgtaatagaaaatttcaaacaagcgtcgtgatggtacacaccttcattgtatattcaactcgatcttctctctctctttcttctgcatcatcaccaaaatggatgcttttgagactcatttaccgaaggagatcgtctctgatcctctttataactccttcaacccaaggagtgaagagtatgtcgtcgccggaaagattctcaggcagcggtcagtctttgacttggacaaaaacgggtttagccctcttcatgcagctgcggcagccggacaagtagagactgtgagggcaactttgggggttgaaaagaagctttgccgcttaaaagatagagatggaaagactcctctacatgtggcaacgatga

SEQ ID NO: 50741 - DNA, 620 bp, Arabidopsis thaliana landsberg
ttagtacggtggaacgaacccaacaatttaatgcccctcataaaatcatgatgactatttttcattctcctcactctttgttttttttttaaattaatttgacaaatatttactcagtttggtattttttttcctatgtaaattactccctctgttttaaaaataaaagatttttaagctaacaaaaaccataaattaaaaatatttagtttaaattttttaaaccaattatagaaaacattgcaaaatacaaatagtcgacactcgtcgacacaacaccagaagcaagccatcaacatgctgttttggtccctctaaaaaatagttcacgatcgtgtcctatctttgagctactctggagatagtttgtatgaaagtttacttgctcaatgatcttcatgttgcaggacgtaattcaacgcagttatacttcggataagtgattctagattattttttagagcatgaaataattttgttttccttccaagtcgcacatcaaatttatcattaggctaaatcctaacatctcatacactactgaatgaattatttatttatttacataaagttaaatttgcacttttggaaaacttatgtttacagatcaaaccataaca

SEQ ID NO: 50742 - DNA, 629 bp, Arabidopsis thaliana landsberg
  unsure (1)..(629): unsure at all n locations
tgctttgtctatgaggggtctcacatctctatataaggaatctgtataccctctcataatagggagatgagaaagaggtcaaaggaccaaatatacatgtgtatcgtgcgttttctctgttgtgcttctgagaagggatacgggtctttcacgacttctgacgggagggaagggtgtatgatgatgcgtggtaacgtaattctcaacaccgccgagccatagcaatcatcaccgtcgtagtcgccacctcctctcccggcgtggagtggaagagaacccgtctgcactcataggctggttttgttcggtggtatggaaccttaatttttcctcgtttgatttttctcagaattccgttttctcccgcgacattattcgctcctgcgagcaattaattccaaacgtttgtttctctctatcggttccccgggtctgtttgttgcttggtggagtactgatctggcactcaatccatccgcgattgtgttgggctcgattaactcctgagaacacgctaggtccatctcagttggtgcagtaggctttgtgtgctgatgcggtttaatttccagataagaaaaaatggggngtcaaatccgtaggctttctttgtagcattgattgaaatg

SEQ ID NO: 50743 - DNA, 662 bp, Arabidopsis thaliana landsberg
ggatatacttcagattaatcgggtcgggtcacaaatgattatccttgttgccttgcctttgccaatcgtttgtttccaaagtaaaaatcatggcgagacttttcgtctctatccctatgcaacccacacaaataagcttccctgcgtcttcttctcagccactattatctccgccggcgaacaatttcaccgatggtggagctgggggattatgtcttacacggagaatcagagacagttccgtggtgacgcgagcagggcctagtacgagcagctacttgctcgcgttcgccattcctgctactcttatcgccgccactgtcttcacttcaatcaaaatcgctgacaaactcgacgaagatttccttgaggatgtaagatccttcaatcttcgtcatatctaattcagattcgatttttgtctagctctctagtgttttaccttgctttaggtctagtttgtctcagtcttagtttaggtaatcggggttaagcaaattttatttgggggaaacaattaagcaaacgactaactattgaattttgggttgaattggttcaagtttttgaattaacggcatcgttagaaagtaagagataatcacatcctctaacaagtaagagcgcattgcattctattagaattgaatctctctctctct

SEQ ID NO: 50744 - DNA, 802 bp, Arabidopsis thaliana landsberg
tcggctcgggtagttaatgaccggtttacccctgaaacttaattaggaaccttaaacccgccacgtggacctcacactccacttcatcgtagcccattagtgagagaccttttctcccggcccagaaggtcataatgatattttgataacaaatataatggatatctagcccaacattacaagtaaagcccaacatttagcaatgatgcacatggcaggcaaactctcttctttggatgctctgttttttataaaaaccataatctatattttcaacagaagagaacattgtaattatgcaaatattgattctcgtgtttatgaatagggtgcgtcaaaacttttctttcaaattttacaaatgccaaagtgtcataaaacaagctacaaaagaatgtttatggaggagagaaagaataaactttgggatgaaaagaaaaaaaaaactaagataattgtgaagatgttagttaaatgaaattgagaagatgggcaaggaaataaaaacaacattaaaccaaggccactagtagagttttgagagttgctttcaactacttctcgaccaccaattttttaaatggctggtgatatttggcccacccacctctttgtcttttttttttaattccttttgtggctcttattttttcccccttttttatttattttagtttatatttttacttttaaaaatagtcacacgtcctaaatcttagcacattatgttgcctaaaactatttcagctgccgtcaaaaaaaggaagaaaaaaaatcagatataggatccaagagatcatac

SEQ ID NO: 50745 - DNA, 922 bp, Arabidopsis thaliana landsberg
caacacagcttgttacatcgtcgcaatcaatagttttccggtgaaccgtcaagtcgccgtggggatcacggcaagttatcaaggtttgagtgggaaaatctacaccgacatggtccactctttttttcacacgtctcaacgtgaagaagcttcgggttatctcttgctcaactctcttgttccattggtcgcttgtctcgtgacggctcctatgttgatgagacacggaggagacaaaacgatgtcgtattctaaggatgttaaagttggttttatcgttttgttcgtcttgactattgctacggggatttatgcggtggctacgagtcttgtctcggttcctgcggttttagtacttgtaggcattgctctgtttcttcttgctcctcttgctataccaattggagttggatttaaagagcttatgtcctctagaaaaactcaacaaaaggtgcacgatcttgaagctcctgtcgataaattttatttcgtagaagaagatcacacgaaagaagaagaagagtttgagaaggcaataattggagttaaagaagaggtcgagtggacacaactatggaagaaactcgatttttggatatactttggactctatttgttcggtccaacggtcgggctagtgtttacgaacaatcttggtcagatcgctgagtctcgtggctccaccgccaccagttccttggtcgctctctcgtcgtcgttcgggtttttcggccgcttgttaccattattactcgactactttttttctaggtaaaaatcacttactttttttttacccttttgattaattagcatgatactaattaaaacctaattaattaatttttttattatacaactacgttgacctagtacggtttattataacatatgttgcactctttgcattatctacgagttt

SEQ ID NO: 50746 - DNA, 491 bp, Arabidopsis thaliana landsberg
  unsure (1)..(491): unsure at all n locations
tttctccatggaattaacagcaagggaagggagaaggaggcagcacggccatgggaagaggcggcggttagcactgggggctggccacggccagggatggaagctgtgtgaggctgcaggccgctcgccgacgacccaccagccggcggacacgcgcacacaagacgtgcagggagacacgagtgcacgactgctcgagctcggccatgggcaccaggggcgctcctcggcannnnnnnnnnnnnnnnnnnnggacgcgccgggatccacaaccagggggcgagccgtccatgggcacggccatgggaaggcttggccaagagggtgcgtcgagggggagataggatggggaatgcgagagaagggagaggactcacctggaaccgccatgtgcagggacgtctgcttctacgcgacttggatctggacagggagacgagaggttatgcgatgtcggggtggggatatagaagagaacgttagaggttggt

SEQ ID NO: 50747 - DNA, 872 bp, Arabidopsis thaliana landsberg
tcttgtagaggaattttatcgagcaacttagctgcaacagagtactgagattctctacctaaaatcctaacaaagatttcgataacttgatgatctagcttcaaagctccagaatttgaagacaaaactaaccattcaaacaaaaaaacagctctttcccaatgcccagaatcatctagacccttaaccaaactaaccaaatcagttctaagcaattccgatttcacagaatcaaaaaacctactcaaaccagtcaaaggctgttcaacaatggaattaaccaagacaacttctttcttacacaagagtttcaaagacccatttctctcgttctcaatttcaatacccagaatgggtttcgacgatgatgaatcagtcgagacttcgagagaagggaaacgagcggcggcggagttggagtgtctaggaggcggggaagagaggtgaacgagatggtgaagaagagaatcgagagggaaagaaggaggagaaggaggaggtaagtgaagagtagcggaactgaatttgatagattggttagaggattgagatggtggaggtctcttggattgaattgggtatggaggtttgtgagggaagagtgctccgtccattgaaagacgttatccgaaattgggattgaaggagaagaagagtgagtgaaagttagcgcctttgggttgaagttgagattttgaatggccgtaaaagggactcgtccctatcggcacaagattggcctttccagatgatgcgttacgaacatttttgttctaatccgtatgactgaatatcttaactaaaccgaaccgaaccgaatttgaactaaccgggatgtatcacgaagtaaaacaatagataaaatgtgaaaa

SEQ ID NO: 50748 - DNA, 898 bp, Arabidopsis thaliana landsberg
tttttttgtccatccctagttttatggtcaaaacaggatcggtttagcaaaatctgaagactatttggttttcattgaaccaaaagatttcaggaccatggaaacagagaaaaagtaaaaattatgttgggaaacggtagagaaatcatgagaaatcatattgttcccttatgtaaatgtcttatctttttcacccaccagattattattatcaatcccaagcaacaaccactttatttcacatcaccttataaataccaactttcttcatagtctcaacaaatacactacactactcaacttataacctttctacactttcaagaaaccaaacagaagctgagttagagaaatgacttcgaaaacatgcctcgtcttcttcttctcttctctaatcttaacaaacttcgccttagcgcaagaccgagctcctcacgggttggcttatgagaccccagtggcattttcaccttctgcatttgacttctttcacacacaaccagaaaacccggatcccactttcaacccttgctcggaatccggctgctcacctcttcccgttgctgcaaaggtccaaggagcttctgcgaaagcacaggaaagcgatatagtatcaatttcaactggtacaagaagcggaatagaagaacatggtgtggttggaatcatctttggacttgcgtttgcggtgatgatgtgaaccattatagatcattttagcaagactttgagtttgaatgtgtgcatttttcttcacttttttcttgaagcagagtattcaagtgatcaagtctttatcgccaaggctgtgtttgaagggttaagtttgagtcccaaactatataaaacttttggagatccaatttagttaaagtgtgtaatatagagtctatgtagt

SEQ ID NO: 50749 - DNA, 670 bp, Arabidopsis thaliana landsberg
cgcattggtatccaggctgcagtgccataggatctcatggccaatgtggatccagatggtcaaacttctactgcttctaagtacatatagatagagacatcgagtgtgttcctgttttcgcgtttccgggatcgtgtctttaacatgctgtgtcttggcataaacatgaacatgacgatgttctctttctctcttatattctgtccccatgactgttgagatttccagtcacttgttctctaagttaaaatttctgagaatacgtttattactatttctaagaatatgctatgtgttgaccataaacatgaacatggtagaacatgttctgacttctcttttgctctgtccccagtctgttaaaacttcagtcacttgttctctaagttaaaaattcgcaagaacatgtctatgtttctctccctttttaacacttttcttgcattctagttcgataatttcaattatgaatgtctcccttatgttattcaaaaccctactcataaaatgggagggaaaattggtaatgagaaatctgttaaaaccaaaccgaaatttatgaaatggatcacaaaaagaaaagaaaagccaaactcaagataaattacaacaagcccactaattttctacacaaactattgacagtttccttttccccccttgtttttct

SEQ ID NO: 50750 - DNA, 1155 bp, Arabidopsis thaliana landsberg
  unsure (1)..(1155): unsure at all n locations
ttcagataccagctggattcaccaaatgccaagaaacgaagcgttaggtacaaacatctgcactagaatcaattctgcccaagcagcatactttgttggaaccaagataccatacacacttgagtaatcctcagcttgagaattaagaacaactttcatagcaaagagaacacccgagaacccaaccgcatactcgttgtagtaagctctgtcatagtcaaacaagagaagaagcgatttggctaacaacaatgtgactccttgagacataccaataagagtaaagaccattgaagcaaactcactgcttcccattgatgtctcaagcttgatacctttccagagaagtgacatcatgttatagactaagtgaggctcgttaacatggtagaacgctgatagaaataaacgcttcaagtccttatgctgttcaacaaatacacatcaagattaaaaaaaaaaactttaacagagaatagaattaatcaatcaagaatgatctaattagatatcgaagaacaaaatccctaattctccagatattggtacaaatttcccaggaaactcaaattcgaatttcagatcgaaatcggtcaaattgcaatcaatttctcttggcgaatgaaggaatttattaagattggtttaccttgaagatgaggtgaggattgaaccagacctcactgatgtgaggaataacgggatcgataaacgccggcctgagataaacgagagtgttcgcggccaggagactcgccgtcaccggtggtttccacggtagtctatagtactccgcgacggcgcttagagccagcaacggcaacattccgcctccacttcttctcccttcaccaaaattctccatttcttcgtaattattcttttcttctgatctctctgaatcacttacaagtaattaaaatctcatctctttcacaatatttatatagcagcagcttggtctctacgaaaacaaattctccagagacttcttcgtttcactcgcataagaacatgtgggaccaccacggcattttagactctagtttttatantaatctcttcttgccttttttcgttttttttttactttattttgcaaatctgaatgacaatgatgctcaaagtgaatgttattcgaacaaaagtgtatca

SEQ ID NO: 50751 - DNA, 1010 bp, Arabidopsis thaliana landsberg
ctcaatcaagatctgagttttagggttttgtagattttaaagtttctctttttaaggacacatttccatttttttttgttaatcaggttaatcttgaattgattaaagacaacaatgtctagtcgtttggaccaattggtgaacaagtacaacaaatcgtgtgaaaatgtttcatttgctgaacacatgattttgaaagacaagtatgagagtctggtgatagagcatgagagcctaattaaaacgctcgagttgctagagaaaactcatggattcactgttgaagatctggtgactaagcaaaaagaagcattggagaagaaggaagtgattgaaaagtgggagaacaagtttggtgaaatggagaagaagctaaagactgtcgaaaggagtatcgaatacataatgtctgttgatgttcaaaccggtgtggattcaggtagtgcaaatagacctaatgtgaagaatagttatcaaagagggatattttagtgtttttgatatgtggtgtgtccacttactctatcaaaccatgttctctgactaaatctctatgcagatatgtcgactagtgaggacgatgatggaaaccgaagacaaagaaaaggaagactcattaactcatcagatcatgaccacttcattctttgatcaagatctgaaatcaatttaggagatggagaagaagcacagagtcagaagtggtgataatgggaaatttcaaatctttttaagttagtagttcttgttgcttttatttctagtaggtgtatatgactatgaatatccgctgcattgttcttgctattggagtaaggagattaagatatgaaagttagtatgttaagtggatttagtatcacataagttaggtagtaaagagaagcagattccatcttatatctactctcacattgttccataaacccgtgaaaaagaattagtttagtgcatgacatgttctgcgtccttaatgatatctgagatgagagcataagagatctgatcac

SEQ ID NO: 50752 - DNA, 795 bp, Arabidopsis thaliana landsberg
tacaagctcagaaccttgtgagagaccgtcaatgtcagaagtggtgaagatgttagaaggtaagattatggtggaggtggagaaacttgaagaagcttcagtccatagagaaacaaagagacttgaaaacatgaacacgatgaagaagtactacgaaatgatagggcaagagataagtacaagcatgagcatgatcatgagtgatcgtagtgaatcatcagcagatcattagcagttgtgtaaataacatatcaagatggaaacccaaaaaactgtctttagcatttcagaagcaatctaagtaagtacaagtcagagggagagagatgtgggaatcaatctttttaataagtgtttaaatagacaaaagcagagaatcctaatgtaactacttacacacaagatttacatttggttctttcttttcttgtcttttcgaatattcttgatcttaaatcaattttcttcctccaagttggtaggctcgcttagaacatacttaggtagctcatacttagcacctgcagcgcaaaaacagtactagtcagggaaatgaagaacaatcatatgacgcaagtaaaacaagatttagattttgacctctctcgtcatagcagactgtgagatctgtgttctgaacaatgactcctgcactgtccacaattgcttgtgcaagagatatgtcagcttctgcagcagcgcgaagtgcgtcccatatctctgcgattaccaagtgtaaaacacaacatgttgacactaagatcagatgcaaccagccaaaacacataacaaagc

SEQ ID NO: 50753 - DNA, 824 bp, Arabidopsis thaliana landsberg
ctggaatctggaagagcaacactatgagcaaacatacttaaaggcgaaagaagaaaacaagatgatcgatctaataaatcatcaaatagcacaaatccagaatataaatgtgaatcaaactcagattcagctcaaatcattacgtattcagattttcagaaaaaaaaacaaacaatttttcagaagattatcttcttcactaagcagatccaaacgaagaagaagaagaaagagaatctacgaacctagagaaaatgatccttgttgtcttcttgtaggtgaagcgagctcagaagattcagaagaaatccacaacagtgaagacgcgaaatcaaaaattaaacaaaggttagttatagttttattagttaattgttttccggaaataatcaaacgaatttagtggtaatttattccttaaattaatcatttgtttcttcttccggagcccattaatgccgtctgtgatctcatcggcgcgtatacgaccacgcgatgatgtaaagttacgaaactacccttcggtcaacaccaccataacattgcgtatatttcgaattttgtaacattgtaacattgctaatatttcgaattgtttgtttgtcacttcgcgttatatgacacaacgattgttgttttcacataataaaaaaaaacctactagtcatcatttaatgtaacactccagcatatgacaaaatcgccgaaatattatttattattatataggtaaaatagaatacaatatgctcttttattgtatatagaatctaaaaacttgcatcataaaattaatttatagaaaaagatcgaaaaaggtgata

SEQ ID NO: 50754 - DNA, 660 bp, Arabidopsis thaliana landsberg
gacttttttgatacaagacattgtgtcttttctagccatatattataatacactaattatcttcatagattcttattaaaatatgtgttttagtaggcacagaaattgatggactatgttatcttaattaagtactattagtcgtcaattgtatgtttgagattaatagattatgattgagtatcattaatagcagtcgacataatagtatgctttcaattgttcttattcaaggagaaacaaacgacgtatagtacacttatttaaataaataaaaattctaaatcaatcataatctattaatctcaaacatagtatcgagttatatagtacaaaaagataagctaacctaatattctcttattgattataattatgtaccctttaaacatgtgtatcatttgcaccaacaaaaaaaaaacatgtcaaaattacataattgagcaaattcggattttcatttaattcttcttgatcagaataatcaatccgagtttaattcgtcttccattatgcaaaaaaaaaacaaaaattaagaagtctttatattaaaagcatacatatatatgtttgtagtgaccgagaaaacgagatactctctatggtcaaataaatacccgtcttctcaagtaccatctttagttttgtttgattttttgg

SEQ ID NO: 50755 - DNA, 994 bp, Arabidopsis thaliana landsberg
  unsure (1)..(994): unsure at all n locations
agattacaccttttcctcgtctcattctcttcctttaacaccaatcatcaacctcagcatttgttgatcttggatagccgtaagatcattcggcatcaggatcatcatcatcaccatgacatcaaagatggtggtgctactactggtgagtggataggtcagacggatcatgatgatagcgataatcatcatcaacatcatcatcatcatccatggtgtagtgatgaagttcttgctcttcttaggttcacatctacagtggagaattggttccctgaattcacttgggagcatacttcaaggtaatacatatcacacacatatataaatatacttctttatatatgcatcaacacatttatatttttcttcatatgcatatggacatgaacattagtatttattttataagagtacatttacaacaattacaattatcatgttactcaatttgatttgatagactagagatctttttcttttgaataagcattttttgggatatttaattttgatgttaacaaatgattggccattaataactatttatatttatacataattgacatttttgtgccattttaatgcatttttaaaaataaactaacgatgaaattgtaagatatcaatacatatatgtgtatattattggtagaagtgtgtatatatatatatgtatattcgtatatatatatatgtatattcgtattattaatgacgttatgtcgtttatgaaattatgatgttgtagaaagttggcagaagttggttttaagaggagtccacaagaatgcaaagagaaatttgaagaagaagagagaagatatttcaatagcaacaacaacaacaacaacactaatgatcatcaacacatcggcaattataacaaacagggaaataattataggatatttagtgaggttgaagagttctatcatcatggtcatgancatgaacatgtttcatcagaagtnggggataacccaaacaagag

SEQ ID NO: 50756 - DNA, 1150 bp, Arabidopsis thaliana landsberg
tacagaaaaacaagtgaaagaaacagagaatattcctctctttggaaaacaaaataaaaattaaaataaagaaaccgaaagatagggaaatccagcaaagccacagaaaattaaaaaaacagctaattcctatctttcaatgtatcttcagacttaagacttttgaccacaaaaaatctctttacatgctcaacacacacgtctttgtgacttaatataaatacacaacacacacgaacacgaatctttaagcttcacagattctaaaaacatctctaaaaatctaaactttaaccttttttctcggaacaccacaaatctcatttttagctttttccgattccaaatctttttgcttatttagtcttcttcaagaactcgatttctttcgcgtttatgtcgacgacgatgaagagacagggctgcagctcagattccggtgatctacggcggcacgcagtcgtctacaaaaacgacccccggcgttaaaaatcgttccggcgactccggcggcgaataactggaatacggctatacctctcctctcgccgttagctctttctcccgaatcatcaccggtagaccaaccaccggttgagaaaaatcagtcgacggcggtggcggttgagaaaacgccggttttcaagaaatggcaacatcccgcggcgccgttttattacgagtcatcgacgtttgttccaccgtttgttccggtttagtattggtttagagatccaacggttcaaaagtacagtttgtttgttttttgattctatgtagatctaacggcccagaaaacgcgttttgtgcgtttctactattttgtggttggaacaaactcgattttcgtaaagaatttaataaatcaaaagattattaaattaataagcatgtttctgttactgtttttttatggtccgaaatgtaaaagctaaagtccaatttagttattgtggatgtttatgtatataagtgtaacgttgtgaaatgtgtgaacacaagattaatgtagccaaaaatgaaatacattattcattaaaacctctacaaattaataatgttgagaccaatttcttttgttaatttatagtgaaatgttactaatttatagagtctgttttttctttttttagccatcaacactctcttt

SEQ ID NO: 50757 - DNA, 738 bp, Arabidopsis thaliana landsberg
gcatgcatatataagtagaagcatactaatgactaaagagaagagcggagacaaattgttaaagtattggaggatggccagtgcggggtggtgaatagatatgagagtttgtgcaatttacatatgatattttattgatcgtttctatctatacacataaatatttgtatctatattatattttgagacaaacatggaattttgtgtatataggatcatttctttttatatatactcataaatcataatcgccagatttagtttctatgttttcttcatctttctccgatgctgaaattacatcgtttaatccgataattttaatcatgtgttagactgtaagtgtagatgaaaattttgaagatattagaatacaccacttgctttaagcacatattatacaacataccgaattgtttttgtatacacaagctggaaaattttcatctccacttcttgattttcatacagagttcgtatataatagtagctactaacaaagtactggtatatcgtcttacgaagtattgtatggacgagcatgtcagacacccttgtattgaacatcggtggacgaacaaatgctatttggttcagaaaatgtggacgaaacaaataaaaagatgaaattcctttaaagttaagttaaaaagaagtataagaccgataaaaaagttatgcatattgacatcggaagaagctaaaattgaaggtggcagatttagtgtacttagagac

SEQ ID NO: 50758 - DNA, 436 bp, Arabidopsis thaliana landsberg
  unsure (1)..(436): unsure at all n locations
gcgctcgccgttgcttcccctaagcggaactccctacgatgcattttgacatcgacacttggagatcgcgagccgttcactcgcgctaaggtcgatnnnnnnnnnnnnnnnnnnnnnnnnnnnnnnnnnnnnnnnnnnnnnnnnnnnnnnnnnnnnnnnnnnnnnnnnnnnnnnnnnnnnnnnnnnnnnnnnnnnnnnnnnnnnnnnnnnnnnnnnnnnnnnnnnnnnnnnnnnnnnnnnnnnnnnnnnnnnnnnnnnnnnnnnnnnnnnnnnnnnnnnnnnnnnnnnnnnnnnnnnnnnnnnnnnnnnnnnnnnnnnnnnnnnnnnnnnnnnnnnnnnnnnnnnnnnnnnnnnnnnnnnnnnnnnnnnnnnnnnnnnnnnnnnnnnnnnnnnnnnnnnnnnnnnnnnnnnnnnnnnnnnnnnnnnnnnnnnnnnn

SEQ ID NO: 50759 - DNA, 2337 bp, Arabidopsis thaliana landsberg
gtctgaaactaaatttaatgaagagttaaatttgaggtttaggaaattaaatgttctcaagtttggacaaacccaccccacgtcttaccttaaatgacccgtacatttcggatccataactttcttttactctatcacttaaacattattcattttttcatcgtttttattaatctttcttcatctaaacattatttgagaaaataattaaacatcttaattttattggattaatagactcttttttttctggacaaatattggattaatagactacacaacaacaagtgtacaaacaattgagtcgcaaaataaagcctttttccgggaaaataaggctttaatatgggccaaaggcccagtcagaggccaaagcttgaagccgtgagccttaacttgaaaccttccttaagaagaagaggcatcggtttggccattcatctaggcaccataactaacgatcttcctctcttcttcagcagattctccaaattcctcttcctgtttagttcttaactggaaccggaattaaccatcagcttctcttttgccaactccggtctgagtcagcctcattgactcggctcctccggtttcaggtcttagaagagaagacattgtttgatcaactcaatctgatcaaaattcaaataattttttttttctcaaactttgctctgtatttgcaaatccatctcttgtagaatttcatgaatcctttcgacttgaggatgcgtaagatcccctgaaatgaatttgtatactctgttttcaacttctatggagctttcaccagccatcttcttcacaccaatccctttcatcatgttcctcatcatcctcgactcatcccaccttcctaaattcgagtataaattagctaaaagcatatagttaccgctgttattcggttctaacttaatcagctcactcaaagctctttctccaagctcaagatcatgatgaacatttgaagcagcaagaagagatccccatattgcagcattggccttaaagggcatgcttttaataacttcatccgcctctcggagtttacctgctcgtcctagcaaatcaatcatgcatccgtaatgctcaatgtttggatgaatcccgtatttcgatctcattgagttaaacaaacgttttccaagatcaacccaaccgacatgactgcaagctgaaaggattgcaatgaaagtaacatcgttcggtctcacgccagctttaaccatacggttaaacatcgctaaggcttcagctccgtgcccgtgcgtagctagccctgcgattatagtcgtccaagtaacaacatttctctcattaacacactcaaacacatccaacgcctttgttatattccctgatttcgcatacatatcaatgaccgcattgttcaatgaaaccgctctgttcatccctcggtgatcaacatagctacatattctttcacccaattcaagtgaaccaagatcagcacaagctgagagcacagccaaaagcgtaacttcatcaggctcaacattctccatcagcattctctgaaacacttcaatagcttcgctagctcgtccacttttcgcatatccagagatcacacaagtccaagaaacctcattccttacccaacaaggcatcatctcaagcaaactcctagcttcatccatctcaccaactttcccataccctgctaacaacgcattccaaacattcacatccttgacaagcatttcatcgaacatcttacgtgcatctcccaaaccaccacacgaaaaatacatctgaatcaaacctgttacaacatgaacgctcgaatcaaacccaaaaaccacaacttgtccatgaatctgtctcccaaaccaaacatcagaaaccctaacagcaatcttcaacacaaacgggaaagtaaacgtgtcaggcttagcacacaaagcccataactttctataaaccgtgatcgcaatcgaatgcgcattgggttcgtcgaggagagacaaagctctaatcatggtgttgtggagataagtattgggacatggctggtgggtgaatacagagtaagcatatcggagatgtcctgcatttgaacatgcttcgatgaatttggcaacgttgaggttgtctctgtttaaaccggttatgatcatgtaacaatgagattgctttaatgttttgaggttatttccatggattttcaatgaggtaacgaaccaatttagaccagagcttaagctcaaggcattgattctctgaatcattctcttatcatcggaacaataatgagaattattacatgagtttgttaacttgtattgggtcataagattggtcctgtgt

SEQ ID NO: 50760 - DNA, 959 bp, Arabidopsis thaliana landsberg
tgttgtatttttaagtttttaaatacatatactttctttgatttttatttattgctataacaatatttatgtttggtggggtacaccattttttcaaaaattataataattgatgtgcaccgctacaacgacagtagatatttttagaaggtaatgcaaattggttgcatctattgtccgtaagaaagtaaaattttattaacaagaataaatatcaaagaagcttacaaaacatgttaggtgatgttcaaatattttggctccgtactataatggtcttcctgattttccaaatgaattatgcttcgaataaataaatgactaatttgtacatttttttcttcagttctaggtctggcttgcaattgcaaagtcaacatattcaggaacggcggcatcacaaaagtactatattacacaattcgttataaaatcaaacttctatataataaataaataaacattcaagatcggtattattgattagaacatttgctttattcctataaatacaaggacgtgataaagtgtaggaagtgacatcattgtacatttacgctacacgtgaacccccccttgcaagcgtctaaccccatattgccgaatctttgaaaataggagaggttaaaatctcacacgtcaaaatgtttccattacaaatccatctctcttttttcctttaaacattttcgaatcaaatgttcttatcaacatgcgaacttcgaaattgaatcaaaattataacacaccaacgaccctaggtcaaatttcaattatttaatctctctcggcacacacaaaatttttattatatacttgaaagatagacaagaaaaagaaagaaaaaaaaacatattcaaaaaagacaaaagagagagtggcttcatctcgtggtttatttaaaaggtgccaaaggggaatcttggagtattatggcttaactacatgtcacgggtatt

SEQ ID NO: 50761 - DNA, 1230 bp, Arabidopsis thaliana landsberg
  unsure (1)..(1230): unsure at all n locations
tattattacttcaattgaatatcaagttttattaagtttatataataatttgaatatgaattcatgttatatgttagtatttatctgtagcttctatatgataaacaaacttcaattcatgcatgacaactcaacttcaaattagttcaaacttgtaaatatagacgctttaacttttccgaattaacaatttcgaatttagttcaagcatgtaaatatacaagtattagattcactttaataaaatcataaaatataccaagatataatgttgggttaatatttattgccaattttcattgcttgtaataagctattattgccatgtaaaccataaatatccatggccatattaataggacaaggtgacaaaacttacatccatgtcactactgctgcaaacttgcacttccaaaagaatgtacatgtcatcatcacgtcatgcatacacattacatatatacacatttacatatacgtatgtggaattgcatatatcagtccacttatgggtattttagtttcattgtttatataagtggcgtgacgccttattgacactaagaaaaaaagtgttggcaaaagcaataaaatctgtagtttaatcgcatccataaataatacgaataattaaagttaaaccctcgtactttgggagacattgacacattgtatacaataatacggggaccatgactcatatttcatgtgactgattttacttttatagtatacaccctaatagatattattggtttttaaaaatttattagcatcggtatccaagtcaaatcatactattgacatgagttctcggcaaatttataagcagaagtccaatagttttagtggccaatctagcaacgatgttgtttgatattgaaacaattctgaaacttccgcgacaaattcatgaaactcagatctctaaaccaccccatcgctacgtaaggtttaattatatcacaaaagttatcttttaagcttgtggaagtttttaacattgaataaaaatacgaaataccacgaaatagtcacagccgcaacacaacaacaattgaacaaaaatattagtcacgaacgtgaactcatgatgtcgaataccacaacgnaccctatcgtctttcacagtactactgatttgcactctcacgagctttgtcaatttcttgccgcaatcggacagagatcgagataatgctaaaaagacgaaactctattctaatctta

SEQ ID NO: 50762 - DNA, 968 bp, Arabidopsis thaliana landsberg
ctcatgatcactaattcactatgtattatattgatcaagatatacaaaaatatgaactgctgggtatagtttcaattatcccatgtggacttcattttgcaagagaaatttagtcaactagaaagaaaaatattaggaattattagtcatacacccatattataagattataacgtggaagaaaaactgtatagagttctaacaaactttcggtgaaacttcatgtacatccttaattcaaaagcaacccactagtcaaatctttaatatatctttcagaaaacaagacttcacatatatgaatcaatctcttcaattatttttggaacactcgaatatatttgatgaaagagcttaaagatcacgttgtagtgatcacttatggaccatcatcggaggcttcagtaacggcgtcacctgtctctcaacagacgccgtctttgtttgcatactccgtaacgccgtcagcatcaagattcagctcacggcgagcatcggttcatgttatcggtttggttctccggtttataactatggttctatgtttcgtctctgctctttcgttggcagtgaatgttcaacggccttcgaagagacatctgacacaaaactcctcgagttttgcttcatatcctgaactgttgtaagaaactaaagaaccttatcttctttaattcattgtttaatactaatattttatatagaatatgatgttgttatttccaagcaaatctggattatcgttgttcacttactaaaataataagggatacttgaaaaaaaaaagtctaaaaaataaaatgaaaagattggctgatttctgttaaattaaagatatatgaaccgaaaattgtaatggaaatgaattaaattgggatttttgataaattaaattaaagtattagttatctttaatatgcatggaaatgaatactttgatagtttatatatggacggaaaatattgtg

SEQ ID NO: 50763 - DNA, 617 bp, Arabidopsis thaliana landsberg
ctcgtaggtcgagtacatgtaaggcgtggtcgccaggaactcggcggcgcagctgtcgatgcgcttgtagaccgggcgcacgtcgagcgcccggcgggcagcgcggacttgcttctcggtcgaccccaccagtttcgccaagcgggcgtccgagaagccggcggccttcagcttgcggaacgccagtgcgtccttcgacacggccgccgaggcggcctgctcaggatgacgagcattgttgttttcgtcatgcccaccgtgttcgtcatgctgagcagcgccatcggcgcgtgtcgaagcacgcacccccggcagcccatccagcttcacatcttcctccatgcgcacgatctcctcgatctggcgcaggaaccacggctcgtaagaactcgccgcattgacgtcctcgaccgagaggccgtggcggaaggcctgggcgatgacgcgcaggcggtcgggcgtcggattgccgagcgcgcggatgatcgccgagcggccggtctcggggtcgtgcgcgccctcgatctcgatgtcatccaggccggtcaggcccgtctccagcccgcgcaggggcttttgcaggcttatccttgaaggtccggccgatggccatgacc

SEQ ID NO: 50764 - DNA, 2081 bp, Arabidopsis thaliana landsberg
agtctcttaaatgtagtctaacaattaggttttttcgttaaattacggaacaaaagaaccaataaaaatgaatggtagtatacatagttacataccagaaccatcaagtagaaaacataatttcaccaaaaatagtcacggattaatgggtttgcatctttcatgtttatagtcattaatcttataaaatcggaaaatgatttcgcatattttgctattaggtacattatcagttggattaaacacgtgataaatctagctacacctctcttggatccacaaagagcgaagacggcgatttcgatctctcactcaaatcaaacttatttttctcacatttcaacggcttgatacaccacatatcatcgtcacacgaaagcattttccaatgcggaatacaactttgcaaagaatcatcgccgttacttcctttgtcgacctccaccaccacgactttacacgcgcaaccgtcatttaacgcagccatgttatgaacgtgctcacacaaagccctaactagtttcccacaatgtggaccttccgagtgaaccccataaaggaaatagaacccaaacggagaaaacaaatcaggcaaaactgttaatcccaataatgacaagaatttaccaaataatttggaaactttagtgagaagcaaatagctcaaaggagctctctcgatcctaagtttgaagactttgctactatcccaaacactaagcattgcccagcttctggtgttgtcgacattattgtagtaagccacccatgtcccgatacttaacttgttccgcaagattttgttaatgtcgtccgggaaaaattctgtcgtagctgccacatttctccggtacaatgactcggcttctttcacctgtcatttattttttttggttagtgttagtgtgttaattttatgcaatagaaaaatgtttgtagttttcctacattaccaaattttaaaagagattcaaaatataatacattaccaaattttaaccgaattgaaacgttccaaattttaccaactccattttaactttcttattgtggtatgggtgatttttaaaatatatattacgcaatgagagattaatactaatgcaatgtgtaataaaatcacctttagcttccttattccgatgtcagaaggcaattttaaaccacggccggggttgacgggattgaccaggattgcggggtttctaaagacgacgtagccaagtctcccgatgaagagaccgtgagaggcctcattgtccttttcagtggccatgtaagcatagtcagcattgtgagactcgaaccattcctcaagttttctcaccagaatcgatccaatgccacggcgtcgatacgacggcacaactctgagacctaggacataacccactctcactgacttatcatgaaactccactggctttactgagccttgtatggaacctaccagcttgttcccaacccctgccacctattaattaaggtacattaatttgataaacgttatttatatcaatcctattagtacttcacttaataatccgtattactatatatacatatataaattaacacatttcaaagctaacaaacctagcgtctttcggctaatagaatcatatatgtttgtatagccaaaaacaacaactatatatcttacataataaagtagtttattacatatatttaaaaagatgatgttttacattttttaaagattaattaagatgcatgtatgacatgtttaatacatctcactttttccatctctctatttgatatagctcatctagtaaaactatacaattaataggaaattgaaaagcacattcaagcaaaagagtgatttcataacactctttaaaaaaaataaaggaaaaatctatcacgcgcgaatatatatatttgtgtcgttcaaaaatgtatatattttctttaatcaaattttaggcttttgaaagaagagaactatctcatattttgatataatttttaaaaactttaaagtataataatccttaagagaatagaaagaaaaggagagtgagaaattaaccagcataatgaagaaaggacta

SEQ ID NO: 50765 - DNA, 709 bp, Arabidopsis thaliana landsberg
ttcaaaaaaaaaaaaaaacgaaagttcttggccgaaactcgtaaatcctcgctccgaaaaaaacagcagggtttagtcctcttccaaaagaatagaactatgctttgtttctctctttagaacccccactaagccccatcattttttttttggtaatattttctttttgttaacaaaagaaaatttgaaatttcaactaaaaaaaaaagataggaaaaactttaaaaaaaaaaaaaaaaaatttacattgttttaggacaatgtaatatggaataatagctatggaaattatacattctaagagaaaagtaaattgtacaatattcaacttctttttccttggaaaccctctcgtgaaactccaaatatatagcatagctgcatagtagtattagtatatacaagcaattacactgaaaatatttttcttttcaaagccatggccgagaagggtaaggagaaggtaaataaacgctctcttctttttcttttgtgtgcttctctttgaaaccgttactactaattgttacaaaagtgtgtattaaaagctatgagaacattatatgatgaaattaaactaggtaacatggatgaaattgaagacggagcctcttagtaacgaaaagaatttctcgaaaataaagaaaactctttcgagcatacctcgtatgttattgtaatatctttctctctttttaagtctcttttg

SEQ ID NO: 50766 - DNA, 648 bp, Arabidopsis thaliana landsberg
ggatctgaagtttcgaatgtctgtcatgcatattttccaaaatttaggcaacatctggaattttgttggcttattttggtttgtgatcgataatgtttttaattagttattatagacaaataattcaatacactaatctctccatacaaggtcataaaaaaaaacaatctgatatatgaagagttgtcctcaacggtttcacactagattttcatacaaaagtattgtttgtgtcaaaagcaaaactgctttgcccaaaaactaaagggtttcgaccttctttgctggtaaaagaatatacaaatccaactccaatattgaaaaaaaaaaaaaaaaacagttcttcgtagaaaaacaaataaacaaatatgtaaacaagttttctccctattcggatctttcccaagcagccattttaccataatcaaacagtcagtataacacattgagtaaccgtcgttgctctgcttcatcagagtgtaatgagtagatatccggtggagcggtgatacctccttgcttcaccaatttactattcgatgaactggttttgttttgatctagataaactacaataacgcttatgtcgtcatggaaatgtcgtcgaattcctttggctattttctttatatctccatatctcatttc

SEQ ID NO: 50767 - DNA, 265 bp, Arabidopsis thaliana landsberg
gaaaccatccgggggctggggggaatattatttttatgggaactgcataacaacaagctgttccgatcccttcataaaatgcattttcggcaaccagaccatcttacaaaaaattatttcttacaatcattaaccgcaatggctgataaaaatggccatattacctgtaccagcgtgctgaacagaattttcaggggacatggaggatcgatggaaatgactgatcatttcccccatcatataatacagacctggaccctggatc

SEQ ID NO: 50768 - DNA, 678 bp, Arabidopsis thaliana landsberg
ataaaaaaatatgaccgatttggtttaacgatgtagctactggtcggatggtttggttggctagatcggtggctctatgaccatgatggttgatcgatgcgggttatttagttggctccagggatattggatctgcatttgactgatgggcacggccaatgtggcttatgagggttgtttgaggagtcctagatcagtcattggtgagaccgatcccatggccgatactggttctgttatttctttgttccccggtccttctttgaccaaaactccgtcttttccgcaaactctaggcacaagttaggatatctaaagacacccgaaatccttaacatagataagaaaacaaaaataaagcttcaaactcaaatttttcttactatttttaatctccactaaaccaacattaagtcataaatccactatcagttgttcattattatcgaataatttaacttttgtacttgatcaattattttggaatatttttgatgttaatcatgattcatgattaatatgtgggctggataatcatgggtctctctatttttctagtctgtaaagtttgatcgaaactgagagcatattaaaatatttaaatcgagatatagaaataacttgtctcatatactactaatatcaaatgcctttgttcttattctacacacatctcag

SEQ ID NO: 50769 - DNA, 458 bp, Arabidopsis thaliana landsberg
agctacctttcagtatttcgatcaatatcttccagccgttgccttctttcatcagctttctcaaaaacacggcaaaataattaccaaaaacgggatatttatatatatatatgcatgtgtacgagaattagagtagaaaaaaatattttgaaacaaaatcttataccaattccagcagcatccatagattcaccaactttactgatatcatcagatccatcttgtttatttagactatcgagaatggctacaaaatacaaacgaacatcgggccatcttcaataagtagatagctttaaccctattaataaacagctttgacaggactatacccctttttcaaaaagggggattcaaccccgggcccttttttaaaccctttttttcccggggttggtcccccccaaattttttaaaaccccctctttttccgcggggggaaaaaaaaaaaaaccccc

SEQ ID NO: 50770 - DNA, 554 bp, Arabidopsis thaliana landsberg
agcgcgctcctgaggtggcgctatcccggtcggtacgcgccttttcctttcacaattgccggtttcgcgcccgaaggaaaccccgactgatgtacgtagcacagggctttggccggcccgccctttcctgctaagagggcgcccgatgctcaatcccgtccccgccacctacgactatcgcccgcccactgacccctggctcacggtggtgcatgccgacgaggatatcgtggtgctcgacaagccctcgggcctgctcagcgtccccggcaaggacccggcactggccgattgcctcgaagcgcgcgtgcgcgagcgctggcccagtgccgccatggcgcaccggctcgacaaggatacgtcgggggtcatcgtcatgtgcctcaacaagcgggcgctcggccacgtgggccatgagttcgagcagcgccgggcgaaaaagtcatacgtggcaagggtctggggcgacatggcggaggagtccggcctcatcgacctgccgctcgccaccgactgtgagaacaagccgcgccagcgcgtcgactacgagcgcg

SEQ ID NO: 50771 - DNA, 622 bp, Arabidopsis thaliana landsberg
aatattcattacgagtggcatgaattttttccaaatggtaattgattatttcgttcattctttcttgggtgagatctccattgagggaatccttttctttatataatataaaactattacctttgcagcatcctataatattggtgccatcatgtctctatgggctcctgttctactggtatacacttaccctatatatatatatatatattcatcagctagggtgatggacccaacagtccatcacctggatcaccctagtgcccgaccgcgcacgccctcccatgcggccctgcacctcgcacggctcgtgccgcgtggctcgtgcctgcgcggctcgcacccgcgtggctctcgtgcatgtgcgactccgccccgtgcggctcgttttttagccacattaagtcattccaatcaacattaagtcattctcagtaatattaagtcattttcagaaaaaacattaagttattattggttcagccatttttctgggttttctcagacattttctatgttattggaatcaacattaaggttattctagtaaatagtaattcatttttcagtaaacattaagtgattgagtgtttcagcaattttttgggtttttcaagcattc

SEQ ID NO: 50772 - DNA, 512 bp, Arabidopsis thaliana landsberg
  unsure (1)..(512): unsure at all n locations
attctaattcgaaacttccatacagccagatcctatggaggcattgaggtnttttttttttacacgcctctagcttgtgtcaagtgaacagacacacacacacacacacacacacacacacacacacacacaaaccagaacagggagtaagggcaagcaaaacagattttaaccatgtatgaaattgtcaaaacttaaatttaattaataaaaacattaaaaatagaggataatgatgactaaatttggctcttcacctacaacattcattccatatacgtatagtcataagactgtttagtcaaggtcaagcagtttgtaggatttttaatataaatgtaggaacttgaattcatatgaacatcatttatggagtatttttttaacgtaccagacatcaagattaatgctctagattccctaaattaccaaagtgcaagtccctctactcaagtaacttataccatgtacagtacataagtatgataatgtaaattgactatatttcatgt

SEQ ID NO: 50773 - DNA, 591 bp, Arabidopsis thaliana landsberg
cttgttttaggcccaaaatctgcattgatcatggtctggctcgggggtgttaagcacacttttttctagtgattatatgtctaattgggacatcggtatacctccatgcacctagtaatgtgaccatccgtataatatgtgttctatctcttctccagctaaaggttaacgagcataatctggttaagccctatgtttggtttgcattataacaatctctctgaaattttgtagtattttcatcaatttaaattagtatattttcgacaatttgaattgttctttgagtctgatcacagtcaagtacacgaactatatgctgatctgatcgaattcattctactatatacacacacatacacaaacattttacagtacaccactaatactataatcccaataacaagaaaacctaaaatataagtacacattaacaaaagaaaacagtttgcaagttcttaagtggtttttggatttggtttatagtttttagatttttgcattaattatatatatatatatatatatataatatttgaaactaaatatgataaagttatagcgttaaaaagtgaaaaaccaatgaaacat

SEQ ID NO: 50774 - DNA, 736 bp, Arabidopsis thaliana landsberg
gcgcgttgtaagacaatgactgccaaagaaaaaattcagtttcagtgaaccagataaacattattgagtacatgcaaacaataaccagcaactgcagataaataaacatatatacctaagtttttagtattaacattgaacaaacctgatgcttgaagaacccttccagcaaactgaaggtagcattggcgtgtacggtattcacaatgtgtaaggcccgtgatgttacataggcattgtcatggtagctgcaatttccaaaatccaagaaaaaagattcaatacaagaacgaataatccgacataacacaaaggaatcattcacatttccatggaacaaatcataaaacagacagtgaaacatattttaaagtccagacctttcttaagccacttgtcgattgatcaatacatgaattaagctcagagcaaagaatgaaggcaaagagagaattttagatcactgacggtaaaggaaggagatggaggagaagggcaacgcgagatccatagtgatgaagagcttgcttcagtggcggccaagagtctctactgtccgggcaaaccgggtcaaaatacgcctcaattagtatagtatccgggtcgaaacgatgacccggtgggtaaacgaaaccatcttgcctcaccggcggcactagctgcgcttgtactctcgtctcaacgacgaagacaaggaacaggagaaccgctcgaatcattattctctgactcacac

SEQ ID NO: 50775 - DNA, 1697 bp, Arabidopsis thaliana landsberg
tcattgtcctcttactcctctttttttcttactttccattatcagccatagattcattttataccaaatccgaatgtatgttcttgaatctgcaagcaacactagaggctagccattttgaaaattagtgattccgggcatcttttattcactatcaaatgaccagctgtatctttgagaataaacctgttggtagatatgtgttgtctcccgactttttgtcccaccctttcttttctcaaaaacaaaatttcatatccatttcaggtgtgtagaaatggctcattccatttgaagggcaatgtatatgtccactacagatcactagaatcagctattcttgcttaccagtccattaatggtcgatactttgcgggtaaacaggtacactgtttctctggagacgtttaccacttcctttcattgaaaaatgtgattaacgatttcgtctagtggaccttcctctgtaatattggcactagtttgtcagatctttggtagcacacatcatatttgcgtcttcactatttgtatcttcgtggcataatgttggagacccatatctaggtttcagttatcttagcctttgtgtaggacgttttgtcagaggtctcatctttccgatctgtggcagtttttgttaacatctattggttgaatataggtcttggtgtatcgtagaatagaatgtcaaaggatttgtgttactttgctgatgtgtactttgaggcttgatttctgatactttcagcttgctgacatttatatccatgataattacacatcctcatcaggtgaattgcgagtttgtcaacatctcaagatggaaagttgccatatgtggggagtacatgaagtccaggcttaaagtatgactcttcatcatttgagattccaacttcttgcttatctctagttcatgattttcatctacttttcagacttgttctcgtggatctgcctgcaattttatccattgtttccgaaatcctggtggagactatgaatgggctgaccatgacagaccacctccaagattctggattcacaaaatgacctctttatttggttattcagatgaaaagcacatggaacatgaatcttcagggtcgttaaatgattcaatatcagatctatcaacagattcacacaggtaggttgctttatatttggaattctaacttttgaggatcctcatctttaactaacttatcagcgtatttcctacttaatttggttatggagcgtcatgctcatgtgttttgtttccatgtcaggcaaccttcaagaagatctagatcgagggaccatgatcatgctaatgttggatctacgccttcttataggagccgtaaatatcatggtgatactcaggacagcactcgtgaagacaagcttcgcaggcatgccgagaactgtcatgatggtgatgacagtccgagcagagatggtagtttagagagggagatgtataaagagcgacggtatgctaaggacacattgcatcgtgatagcagatggtctgaacactctcctggacatcgggtgggaaggaagagaatccatgggaggtattctgatgatgattctgctgatggagatgactatggtaggagagggacgggttacaaacgaaaacccagaagagggacagattcaggagtacaagaccagatggacaatgaaaaggacagaaa

SEQ ID NO: 50776 - DNA, 677 bp, Arabidopsis thaliana landsberg
gcctaaaggaagttacgcaaagcttcaaccggataaccttggtttctcggatttgcctaaccataaagcaatacttgaaactattcttcgtcaacatgctacactttctttagacgatgttctcttggttaattatgggcaggtctcttacaagcttcaggttcttgagttaagacctgccactagcatttcagttctggagactgacattgaggttgatattgttagtccagatatagtttcagatcaaccgaatcagcatgtgttaaagctgttacaatatgggaaatctgaatctggaacagttgaggaaggacggtatgattactataagtttgtaattgacgaggctactgtagaaaaagtaatggcaggaagcgtaaaagtcattgtaaaggtcgatgtggagaaagatggagcagataccgatctctatgtgtcaaagcacccggttctattcccatctcttcaccagcacgagtggtcttcacacgacgtgggttcaaagaccttgatcttgggatcaaaggagagggctttgaactcagggacttacagtataggtgtgtacggcttcaaaggaacagtcaagtaccaggtctcagtactggtccaagaaagcatcgatggagctaaggttggggaacgtgctgtatcatcttcgtcagatgttgata

SEQ ID NO: 50777 - DNA, 570 bp, Arabidopsis thaliana landsberg
tcatggttgtgagctgcgcgatgatgcggtccagcttcaccgaatcaggctcaggatcgcccgcgacgctggacatggtcggggcacttgtctccgataccaatttgttgtggctgctgcgtggtggtcggcgaggggaacgcaggggagagtggagaaggagagtggcttgagaacaagaacgcagagctagcacgttaggtctgtcgtcgccggcggctgaaggcgccaccgtcgaagaacagcccacctctaggaggtaactgtattattcttcgatgccttcttacaaactagcagccagcctttatagtctaggcggcagggaacacacccaatcatcttattgctttccataatggaaataggaaactctactgtctgctacagcagaaataggaaactactgatatagcagaaataggaaactactgattgatatactggagataggactggcctgatcctcttcccttaattcggctgcctgattgttgcttccttttcctgttcttccagctcagttgccttcctgagcctgcgcccataggtgttctcgtagaagaatga

SEQ ID NO: 50778 - DNA, 450 bp, Arabidopsis thaliana landsberg
agttatcacttatcaaaacatataaattacagaaatgaatggtcaaattcaaaattgccctacagctgatagctctaaggctgaatccaaccattccccctctcaaatccccctattcatattctctattcatatttaaatacctccctcttccctctatttcactttctctccaaccattccccctatacattttaactgagctatttgacttttagacatcagtttttgtagttttaaaagcactgattaacgaatggggaagattagagctcccccttataaaggggaattccattctctctccttcaactgtgtgtggcagagggggctcttccgggcactgtcgtacaccgagatactagggggtatctctgcattgtttagactttataactaattaactattgcatatgaaattgaagttttagttgacaatccctttacatt

SEQ ID NO: 50779 - DNA, 516 bp, Arabidopsis thaliana landsberg
  unsure (1)..(516): unsure at all n locations
actctnnnnnnnnnnnnnnnnnnnnnnnnnnnnnnnnnnaagcctctagttaacctaattgttgtatagaaccggtagccagaagtgtggagagcactgttgctacagcgggcgacgcttgggatcccgactccttgtcgtttttgcgcctaggagaggagcagatggagttcgccatgtggcagccatgtggacacgtggagctcgtgccctggcacgcgcagcgtcctcctcgcgtgcacgcctagtccgcaccgtgccttgctgcttaggccgaagtggagcacgcctcacgtctcacacactccagcgcctcatttcctccactcgtcactcatcttcctcctctcctctccacgaagagccgccatggccgatgtgatctaagctcatggccacactcccaccgtccaccattgtccaaaccgagcgccaaccttgcttcacagtcgtgagccgagaacatggagcctgcgcttgagcatggaggaaccccagacgcacacaccaacattg

SEQ ID NO: 50780 - DNA, 606 bp, Arabidopsis thaliana landsberg
  unsure (1)..(606): unsure at all n locations
ccgttgggaaggacaaaattgtggtagttttaatttcataattttacaatacaaagtagttatatagctctaattattttcgaacattactttaaaatatatactagaaaataaatcaaattatattttgcgataatgccaatataaattttaaaatgaatatggtaaccatcaaacacaagtagagtgtactatagtatatagaacaataatatgaacaaactacaaagagaatcatcaatcacatacgtcattcaatcatttcaaaagatgattaccaaaaagggctaataagctaatatctttcatatgcagaagacgaaaaaaacattgtttcggtccggaaatgattgtgggggtagttttttcatctattagtgtaaacgtttaacatgtaatctaatttttttagtaattaactaacgaaacacaaacttggttgaagatttatcaactttttagatatatttttggggttctaaccaaaattgattagcttttcctatttgtataggtagagacacaaactaaaacccaaaagaaattgcctaaaatccttataaaaaagaaagtggacctacctcgcnaggaacaagaaataaaaga

SEQ ID NO: 50781 - DNA, 945 bp, Arabidopsis thaliana landsberg
  unsure (1)..(945): unsure at all n locations
aatagattagtgtggtttaaatcttagaaaatacgaattaaatattgaaaatctgagttttgttaagtgaaaccttgagggtgattgggaaacaagaagatgataataatgagcgaggctcacgaggatcttgagagagacgaggagatgaatctggaccgttcatttgattttcaacgccgtcaaaagctgacattagtgttcctttgtaaaattcagacggaaaatttaaacggagttaaaaaaaacacagagagagagaggtgaaaatggagaaagctgaagaagagattgtgagagctgtatttatggagaagaagtggaacgtgaagcaagtgggtgccacgtcattagattactggtcattgagaaaataacacgtggcaaaacgtataatgccagctggcgactgctgaaaggaataaataaaaagtgttttagttttgtgtcttttttctgcttagccactttaaaattcttctttttttgccaaccttttttttcttcttcttctgattgttattttttatttttattttgtcgaatatactttctttctctttacagaaatttcaattagtgttttccactctaattgtcaaattgagaatccacctgatttttattttattttgaaaagaggaaagatatatttgtaagactgactattaatcatcatgaaaaatgtgcaaaaactttattttgtgtttgtatgtgtttatgtccttttcctttttttagttaacaatgtaattagtaattaccacataattaattttgaaatcatggtataattaaaaagtatctatatattttatttctaataattataaaatgaaaaagtatcaaaagcatttattattagtgtaattcgaaataagacccaaaatanaatatgttttcacttaaaaactctgacactctttagtagatacaagcccaatt

SEQ ID NO: 50782 - DNA, 1332 bp, Arabidopsis thaliana landsberg
attttggtttttagagatatatatcaaatgggggccatgtaatgtatcagaaaattttggttttataataagcacgttgacaaaagaatgtggtagggccacggagaattaatgggatataaaatttacccaaatattattagtttgatttatgtttctaagaaaccggtgaacttggatcactacaacatgcaatttgatatgtttactatttggaggggatggtcggaaggaattgttatctctgatttttttaactttcgagtgttgggagaagattctagctaggttactggtcaagagaagccgatcaaactgatcttcatcaccttctagctagctagttatagttcagagagttttcggataagtaatgttaaatatatactatgaaggaagactggaagaggttctttaattggtggatataattacagatgtgtgcaagaactctaaccaaatatgtatcacaaactaatcatatctctaacttcatctcaaaattatacttattacatcctgccttactcgcattttcgaatatctctaccacgatgaccagctattggagaagagaagtggcgggcgcagaaagggaaaacacacaatcgagtttagatttgtgtgttacggatccaatctcacacaagtcccacaaagagggaaaacctcataggagatggcgatacgatttgataagaagatacgaattactatgcttaacgtaaatgttattaagctatttcatatatataattattattttatatatgatggtgaggtttaagaatcaagcctaataacatttacgttatataatgaataacttggtggaatctttggcaaaatctgcttttatatatattatcgcctctaatagtagtaataagaagaacaaggaacaatcattagtcaaatcttttataataatattatacgttatcaagaattttattactattgcaaaagaagatttaattaaggcgggagtacttacagcaccaactaaaactcccctggagaattatgtggttggtgtgataaattagtgccatgcaaataggattaatgtataaaataagaaaatgaacttattctcccttttatccgatccgttgctaccaggtgacaattttatatatatagttttatacgaatgtcgatgaacatatttatacactttacagtgttacctttaggttatataccgaccgatcgattagtagttaaataatctactactgctgtttaataccttagatgcattctgtcttcaatatgattctcattttgcaagatattaaattgggcatatacgttgtcaataaatga

SEQ ID NO: 50783 - DNA, 2052 bp, Arabidopsis thaliana landsberg
catgttaaaggtttttttatttttgtattggagcaataatatgcgtgaagtgaaaaatcttgagataccttgaaagtatcagtcgtacacacaattgaagcgttacgaagatgagaaacgttatcaaccttgttaaaacacaactgtggagagtttagaattgatgatagatgaaaagttatagggatcaaaatagagagctaatatctttggtgtggtggcgagaaaaatcatctgaaaagatgtttcatagatttgaggtacgaatctgattggttgggttagataaaggtcaggtcaggtggctaagactgaattcgactgtcatcaaaaagttgtgtccactacggtcagcaaaagaaaaaggactatgtaggtgaagtgaatccgatgggaaataaaacaaatgtgatagagagagaacagagacgccaattatgagtagagctgacacgttggagctgactctgtttctatctctatatctctgtctttctctatttatagatggagtacgtacagctgctccacactatatatacagtacatactttgaaaagtatatttgagttacgtcttcaacttcaaagcgtttcttactactaaagtggtacgtttccctaattcgatctcattttccatcttcttcttctccttcttttgaaaacacacacacaagctcgatttattttcttagaaaatcaatgtggtaaccatatttctagatgacatatcttgcctaatgcttcaattaattggagacatgatgaattttaactgtaaaaaaaaaacaaatgaaacattgaacaattgatataggaatgaataatttttttttgaaaaacaaaagaaataagggaaaaagctctatttggtagtatataataacctaagattatattcattattgtatttgcctaaaattagatttagtagtatattaatataattgactgattttatggtaaaatatatacacattctaagtattactaaaatattcaacatacaatagagagtataaatacaatcattatatatgagttagaggatcaccgtttgtgtgtgaatactgaagaaggtatgttttcaaagtagatctctcgatgtgtttttgttttataggcatgatttctcacatagtcacatttttgtgtataggttacgtacgtgtgtttgtaatgtcattaaacaactcgtttgggtgttttcatatacgttttttttgtttttgttttgagtttagaatattatctaattttcatttagtatatataagggatgaaatgtgaccggacaccttagaatttccacggtatctgaatcaatttactaattgaaaatttgatttgacattaacgaatgataaagctttggttcatcgatgagtcagagagtaataagaagacaacattctcgtgaattacttctgcattgggacacgtatctacgtgtgtttcccacatagaactcagtttcatccttttctcgtgaacattactttcttgataatagttagtttctttgtctttatcaaaccaaacaaagaatttgtcgttttcgataatatttcattttcgtcgtttctttctttctaagtttcgatgtcagttcctaatctctatggcgttcatgatagccaaatggtaactttggtggcctaatgtatgtcacgtaaattatccacgtggcactcacttttttgcatctttctcaaaatatatcaaaggagacttcataaagaaagaatctttagtgtggagagactaaaaggttctgtttcagattctcaaattttttttttttattgaaaaagatctttgaatctcccacacccattcgaatttcctcttatgatttaggagattctgtgttagtatccttctttttgttggttatttctttatttctctgccatgtcgaaggaacatacaaatctgaaattcttcttcattatatattagcttcacggcccatgttttttctgctctaatttttattattatgtgctaatttgatctcacgacaccacaagcttatttcataagaaac

SEQ ID NO: 50784 - DNA, 851 bp, Arabidopsis thaliana landsberg
ctacccatttcccctacacctaatataagaggcgatttttaaggttcatttctgcacgggctctgttgcaatataacaaaccatgtaaagcaagagaaatcgactcattcaagataatcaattatacttttccatattcgctaatcattcgaataatcctgtcataactcaatttctgaaagataactgtttcgatctttagatgaaatgagaggatattagcgttagaaaagataaacagtaaacaagtgagtagataacattacctttcttactgtcatccacactttcgcgactttctgatccgtcaaaactcagcatgctagacacacctgatcgaacatagacaccattcatattggcgtcctgtgacagatgagtgctcatttcaactcagagattacgcagctcccagaattatagtagcgagaagaccctaaagcaaatgaaccaattagccagcaacaaagtaagcatcaatgttaattgttttcacatacacttcctaattcctaatccatggttaaatcatgaaagaccttactttatcattctacaccaaatcctcatatgataatatgggcctatcaaatgctgtcaattccagataagactagttccccaattaaagagataaacagccaaaatttgctttaaattggaaacgatgatgaagcgtgccaaacatttcaacatctagctgagcaaacaaccacaatgtctaccaaatcaaccataaaatcagctctatattccaccaaaatcacgcagatgctgtgaaaaaccctaagaagcccacaacgcttttgtaacacagagacgatggccaaaaaaacaaaaacgataccaac

SEQ ID NO: 50785 - DNA, 244 bp, Arabidopsis thaliana landsberg
tgtatctagttctgtatctgtctgtatagttctgtgtgtatatatatatgtatgtctctgtagttgtctatgtgtatgtgtgtatatgtatctatctattgtgtgtatttctgtgtatatgtgtatatatatatatatatatctcgttgtgtgtatctctgtatgtgtgtgtgtatattttctgtatatctatatatgttatatatattttctctgtgtgtatctgtgtctattatgtatatat

SEQ ID NO: 50786 - DNA, 968 bp, Arabidopsis thaliana landsberg
tcttcttgtttacaatatttcgtagtggtaggtctagttgttgtatacagtataatatttttattatgatattattgtcaacaatattgattcttgtttaaaacctactagagaggttagcaaaagatgctgcattacgatgaaacataaaatactagggaaacaatgtatacagaaaaaaaaacacaagtttgtcttaaagaattttagatttaatctttacaaagaatacatgtgttaaatatagactgatttttttccttatttttggacaaagttaagctgattttggaatggtaaactcaatttaaaaacaagttatccaaaaataactaaatatttatccagtgttaatttctttgacaagattttgtttggattttttcacttttgatatataaaggcaatataaataataattaaacaaatattggaaaaaatctaaactattcaacatatcgatggtgtagagggaaagaaatcatcaacttttggtatggattgattttggtatatctatatttagagagctatcatgtgccttttggtaactatcacttaaatgacttattggattgatgaataatttatgaagctattttggtcaaacctaattgattactattgagtattcaaactaactaacagctgtcagtctctggttggagcttaaagtgagattattttatattttatgattgattttttactaacgtacccaatactgagcttattaacgtttagttttgtacagtggaaacagatcaaaacacggaaaagattatcgtcaaatgcaagatattaacggtcaaaagggctaaggtttgactacttgtaggggacaattatacaatcgtgacgtattagttgtatacttagtgtcactcattatctcattattctttcctcatttactaatccctatttttttaaatacttgtatttcctatatcaaatctcgaataagc

SEQ ID NO: 50787 - DNA, 264 bp, Arabidopsis thaliana landsberg
cttttcccggcaccaggaggaccagccaaaccgtttctacttctacacgagtcaacacacaattcatagcactgatctaataactcgggtgcagctaacagaacagaacaacatttaaagagtagcaaacttacttaagattggggctaaacatctgccgctgttgtagggacaagacgttcctccaacttaccatacatttcatccatacaatcttccgaagcaaatttagaatgctttactttctttgtcagtttctctttt

SEQ ID NO: 50788 - DNA, 660 bp, Arabidopsis thaliana landsberg
  unsure (1)..(660): unsure at all n locations
ttatgtgagcaactccatggtcttgtagtcaaagttggctttgatttggatatctatgatctttattgctcttattgatgtatatgccaaatgggagaaaatggataccgttgtgaagttatttgctgagctatcaagtaaaaatgaggtaagctggaacacagtcattgtcgggtatgagaatctagnnnnnnnnnnnnnnnnnnnnnnnnnnnnnnnnnnnnnnctcagaaatcaggtgtcggtaactgaagtaactttctcaagtgctcttggagcttgtgcttcattggcgagcatggacctcggtgtccaagttcatggactggcgataaaaaccaataatgccaaaaaagttgcagtgagtaactcattgatagatatgtatgcaaaatgtggtgatatcaaattcgcacaatcggtgttcaacgagatggaaacgatagatgtcgcttcatggaatgcgttgatctcaggctattccacacatggactgggtagacaggcattgagaatcctcgacattatgaaggatagagattgcaagccaaatggtttaacatttcttggtgttctttctggatgcagcaatgcaggattattagatcaaggtcaagaatgttttgaatcaatgattcgtgatcatggtattgaaccatg

SEQ ID NO: 50789 - DNA, 511 bp, Arabidopsis thaliana landsberg
tcttgctcttcccccatctatctcctgagttctggcgttcacaggtgggctctactatacttgactgaaggagagcaacttaaccataagctgagggaattataaagaaaaccagtgcatcctgggagtgtgatgttttgggaattcggctatggcagagaggattccagaataacagggacatgtgttcaggtcctggccttcccatgagtccttaagtgagttagatgacgttcctgcagccagctcagcaatccacaatgcagagaggatcgtacctctctcatgggtggctgtgtggatggatgacctactctcctgtgtcaggactcaggaaaatgcttactgcgtactaataggtagttatgctgccttttggaaatgacggcacatggtaattgactttgttgtccatgctttagcaagacacaacgagaatttaggcgatgctttgtttcatacaccagacacagcagatcacctgcacaggaaggccacacaaacaaaggca

SEQ ID NO: 50790 - DNA, 626 bp, Arabidopsis thaliana landsberg
  unsure (1)..(626): unsure at all n locations
aacgactaacacataatgtttcagcgtgggttcaattgcatagtcaagcctcatgctatcaaagaaattaagtcccaggtcaacttcgcttgagttcaagcatgcagttagaaccgcgagaaacacaacctcatctggcttctctcctgcatgcacaccacaacttaaaggaacaaaactcgatgaataataattaaaaaaaaatgagaataagctaaattcttagactggacaaaatcttttaccggaatacatcatttgtctaaaacattggatagcctgatgaaagcgtccatgaaccgcccaaccttgtatcatagcagtccaagaaagaatatccttatggttcatattactgaacacagtagccgcacagtcaagttccccacattttgcatacatgtctacgagagctgtccctatggctctatccaacttaatcccattgtccaaaatataaccatgaattcttattcctgatccaagagcaccagattttgaacatgcagagagcacagcagcaattgtgtaatcattaggctttaagccgttctctagcatctcgaaataggtagaagcgcnnnnnnnnnnnnnnnnnnnnnngaaacccattaattaatgttgtc

SEQ ID NO: 50791 - DNA, 511 bp, Arabidopsis thaliana landsberg
ttcgacttctgggtaacgattctcttcttccccaatgccatttttatcaatctgtaactttcaaaagcacaaaaaatcagatctttccgcaaatttcagagaatccccaaaacagaggatttggataaagagaaaatgaaaagtgaatctaagagcaagaaacaaacttacaaataaataagatttttccgaagattttccgagatttgttgatgtaagtcttgaaagtatatgtttgtgggaaatgaacaaaagctgagagaaaaatgagtaatttttcttttttggtgttaatattatgacaaagaaaaatgaactactacttcttctctacttatagtagattaattatctttctttttctttttaagtcaatttattattatttaaatgaaaacgagtaaagtagaaaatactgggaaatttcctaagcaaaaaaaaatatctaaattttttaaattttggtggtctccctatcttccctcccttttgctggtaaagcaaagacggc

SEQ ID NO: 50792 - DNA, 835 bp, Arabidopsis thaliana landsberg
aagatatatacaatctctgattagttgaaatatagctgtcaacaatttaatatcttttaaataattatactgagttcttatctaaatattagtaatgaactatctcaaagaaatataagaacataaacaaaaacaaggtcctaattatagaaaaaaatcttgataatcaaataaaacgaacatctatgatcacattttcacaaaaacaaaagggaacgaatatatttttatcatgccgaagctaggaattaagaaacatatataaacaaaataaatgctttttcaaaggcttatatgttgttccttcccccataatgatctctttgcctctctctccatatagctctccctctctctctttttctctctctttctctccattctagttcatagcacatagactcatttaagtacgtcgcctgtgttgtctttctcaaccattagtcctttgcttcgataaaggtattctctctctacacatttagacacacacatagattctctagaacaaagacatattgtactatctgactaatcactattactgctctttttttccttgattttgcaggctaaggaaaaaaagaaatctctctttctaattttcttgttttcattttgggtgagacttgagatcaatgtcttcgacattggaacagtaacctttctctttgattcaaactttctttcattctcttctctatattcttggtgtgtctgaagaagattatagtacaagtgccattctcaaaattttggcttagggttttgtaattttaacttaattttgttacttcaaaacacccctaaaggcatgaaccacaacattttcagt

SEQ ID NO: 50793 - DNA, 468 bp, Arabidopsis thaliana landsberg
  unsure (1)..(468): unsure at all n locations
nnnnnnnnnnnnnnnnnnnnnnnnnnnnnnnnnnnnnnnnnnnnnnnnnnnnnnnnnnnnnnnnnnnnnnnnnnnnnnnnnnnnnnnnnnnnnnnnnnnnnnnnnnnnnnnnnnnnnnnnnnnnnnnnnnnnnnnnnnnnnnnnnnnnnnnnnnnnnnnnnnnnnnnnnnnnnnnnnnnnnnnnnnnnnnnnnnnnnnnnnnnnnnnnnnnnnnnnnnnnnnnnnnnnnnnnnnnnnnnnnnnnnnnnnnnnnnnnnnnnnnnnnnnnnnnnnnnnnnnnnnnnnnnnnnnnnnnnnnnnnnnnnnnnnnnnnnnnnnnnnnnnnnnnnnnnnnntcaaagtttggacctgtaagtattttttcgggcgttcccgggatgtgtgctatatcacgcgcccatcatgactcgatcaagcatcgatatcggataaatcccatgcatctcagctcgataagacgagataggg

SEQ ID NO: 50794 - DNA, 1188 bp, Arabidopsis thaliana landsberg
tacatgttattgatcatgtcttacgctttgaaaggactatgcaaatatagaagtgaaactgtaatgcacattatcgatcgggctctcatatgtctcgtagtattgatattggagtctattgcaatattaaaaacatgtgacatgatgccaatgcaaatcgactaatcacaacacgattttgagtaaactcgactaacacaacaacacgattttgaacacattatttattcttcattaatctcgtataaaatggtaaaaaagattatggaaactgatgataataaacccattacattactatataggctaattacatatggaccaagatgtggatctgggcttttaaaacttccatgatctcataacaaagtctcttcctcgctcacgtcgaaaacatctccccgaagtttcttattacttaccttgttcaaatcgttaattgtcctttaaaacttcgatctttgttcaacaaaaataatctcagactctcggtcaacggaatcgaagcaaaactctgcctctagttccgtagaattcaccggagactgaacaaaaatcccgtgagttttttagttttccgttacattctctgtctcaattctgaaacttttcacatgggttgtgctcaaatttcctttttaatggttgtcgagatttatctataaagtcaatgatctgggtttgatcaaagcctcaatctttctcttaaatttcgaatatttgatgatcccacgagttagtctctctaaatctgatctggctatgcttaatccgccacattgttgctctcaagctctggatttgattgtatcatgaaaagttatccaattggatcgagtaaggcatttcatgcgtactcaagaagtggtgatttcgatttagaatcaggaggaactatcagaaaatctagaaagcctaagacttcgttttcgaagatgatcaaatctcttgggaatcgtcttcaccacatgttcaaattgcacccggttctcgttttcgtcgtttgtgtctcgtttggtatcacagttctgatacttgtatcgtcgatttacgggaaccgtttaggatcaacggttagttattataagaagaatgatttggatagcgatggttatccatttgctaatctgaagaaccttgtgatggttgctggacattctgtttatacgagtagtgattgtggtaaag

SEQ ID NO: 50795 - DNA, 718 bp, Arabidopsis thaliana landsberg
  unsure (1)..(718): unsure at all n locations
ttcagttaatttatcggttcggtcttaataaagtggttttaattgtagaaaaggcgaatggaaagagggggcgtggtaaacataggagacagatagagagggaaggacccgttttaggttttttgattgaggtataaatagatttcgatcagtagacgtttttttaagttgcctttacacattctcttttgctcctcctccttctctcttactctcttctcgccgcaaaacctcacttgctctctctttctctctggtatatctcattatctctctatcttctgtgttgttgtatatatgtatagctctaacttcgattctttacgagctcattttctttgtttagatggttccaaatgttttacctttttactttttttaatacctttttgtctttgttgctgccatgtgagctcaagctctgttcttgttagtgggttaaattcctttcttttatggatattctgattctttgagcataattgttgagaattgaagtcagttttgtctcggttactcaaaagtttcgagctttgtatattgctagtgatagaggcagcttcaaatccgaacaataggaatacttagagtggactttgattgtggtgcccctgagattactctgtttctttggttgcaaatattgtacttttgcttttacctgccatgtgagctccaactccngtctttgtcgtttgctagcttccctttttttaat

SEQ ID NO: 50796 - DNA, 612 bp, Arabidopsis thaliana landsberg
  unsure (1)..(612): unsure at all n locations
tacaggaaaaatcaaaacttgaagcgataagagagaaacataccaggaagacaacaggagggagtgtggtaaccatacttcgaaacctcgaaattgaatactcggaatcatggggaatgtcactctgagtcgtagcagtaacaacaacaacattatcatcactttgagtgttctgaatatcttcatctggagtcgaggaatcaccaatcgctttacacacgaaacttcctttagtttcgaattgaacccagttcagatttacgggtctccgtctgaaaataaccaaacttgaannnnnnnnnnnnnnnnnnnnnnnnnnnnnnnnnnnnnnnnnnnnnnnnnnnnnnnnnnnnnnnnnaaatttcagaaatgaatcacccaaggaggaagcaaagcagtaccggtataagtgtaagtgaagaagaagagatgggttcgatttttacctggagattgcagagagaatggaattggagagaatcaatggatgccatttctcatgctaatggaaatggaccagcaaattccaatgttttattcaccaaccaatgtattttggtataaataatattacatgtagcagataagcaaggggcatcgtggcgcaatggt

SEQ ID NO: 50797 - DNA, 744 bp, Arabidopsis thaliana landsberg
  unsure (1)..(744): unsure at all n locations
atccacaacaataacttttttgtaccttctggattcggtttcggcctacaaaagtaaattcagtcgggtaatgtgtagtgtaacggatcctagcttggaaggttttttcctggtcatcagatggatcaaacacttgaaacgtgatgagaaacatatatccacaagatccgtgaaaattggctttgacaacctcgtgaaattcatatttgttcgtaccctgtttcaaacaaggaatcattcagttcagttgagttgctgtgtacaaaaaagaacattaggaacgtaaatggattattattttcttacacattcgtcattgtaacgcttaagagattcttgagaaaacctcttcatgaaatccccgttggtttcttctgattcatcatcaaggaaatcgtaatcatcggggtcaacaagatggtagttgaacagacatcggaacaacgagaaatcaatatcgaacccctaattcacacagaacctacattacttcattatgacaacaactttgaaacaaaaacaaaaaccataatctcaaaaacctcgctcttcgtgatttgttcgttcatcaaagcaatttcttcatctactgtgtactgaggctcgtctttctcagttcgtgtgatatagtgatgcttcaagcactcangatcttcaggtgtacatagcanatatgcatcttcgagccacgcattccagcctgagataacanatcgaaatcaaggggatttaattgattgatcg

SEQ ID NO: 50798 - DNA, 918 bp, Arabidopsis thaliana landsberg
  unsure (1)..(918): unsure at all n locations
tcttctataactctctgtgctttaggatggattagtcttgtaggcttactaatagacctagcaggtacatgcgtagtcgctacagaggatgatgatgattcagccatttccaagctctgaagcaaacagagaagtcaaaaagccttaaacttggaaatgggttttggtgggttataaaggttcagagacttcaaaggtatataatagaggagaacttaacagataaatccaaaataaccctttaattaaaaaggttttaatgtaagagcaaattgggcatgtgtttaaaaaaccttataaagaggatatctgcacaattatccctttttgctaaatttaataatctctttgtggttataaatggagcaacgtcaagctttattttgattatctttgtctcctaacttgtccctctttgcctcattcatcatcgctggcaaactcaaagatctgtttcatcaggaaaaaaaaaaacacaacaactcagagaacgttttccaaggagagatttaaacttataaagaaatatttgtggagagaaaaaagagctaaggccattattccaagaatctaggtttttaaaacaatacgagtagtaggagaatcttgttcaataaggnnnnnnnnnnnnnnnnnnnctagtcatgtgtgtagttatttccgtagctatctattattttaatgtgagacaaggagacagaagttttaattcacaaatctattgagaatatgacagaagagagaagaaatagagtagaaaaaaaaaggaatttatttagccaaatgatttgaagagagtcatcaaaaatgaatagagtattaatataatgttgaccacttgtcctttgtaaatcttctctaattgatcccatgaacattttcttctcttttggctctcaatgattagcaatctaattt

SEQ ID NO: 50799 - DNA, 778 bp, Arabidopsis thaliana landsberg
atcctctgtgacaataattactttagcttttgtattgtgaagttgagaataagtaaattaattaagctaaaatgtctaaattatcaaattgtttggttagtctgtccatgtcgtttacacttctaaagatttacgtatttgtaagggattttagtcaactaaactgaatcattagatgatatgcatttaatttaattagccgtatttattataatccacgcgtctatcatgttcagatacggtcaaatttaatctttaaatgtaaaagtatagttcatgaccaccaattaagcaatgtatcaaaatatataattgtgtaaatattttttttacaaaaacaaaaagacaagaaatattaaagctaatttattttctgttttgtcgacaaaaataactgtaatttaaccataacgaaaaagagaatagcaatttaactttggttctctttattttaacattttaattccatgtatttctacaggtattgttacataagataccaaatccgaacattggttttcattcatacttatctcttaacattaattgtaaatccagccaagcatggtcatagtttcaattaaatgaaattaattgtaaggttgtcagcttttattatactagtagttcggaagatattacctcttccgtgttattattatctttattatctattgtttttaataggaaaatttataaatttgtgtctaccaatttcttcttacaaaaaataaaataaaaaatcattaaataacttcacatgggaaattaactcaca

SEQ ID NO: 50800 - DNA, 962 bp, Arabidopsis thaliana landsberg
gagcctggcaagcccaagcaacactctacttcttcttcctcctcttcctcttcctcaccattaacttcttattcttcatctccttttgaaacccacaagtccttagagctaccaccaaggcttcacttacttgaaaaagatggaggatcagtaaccaaacttcactcgcctataacagtctttgatggaccttatagcatgacgacatcaaaaaggatggattcaccttcctttaggatgatggtgaaaggtagtgctgattgttatgggtctttcaggagtgatatcgatggtgatttagaggatgtggaagtggactctaagcagcaggagaacttgagtagtggctctttggctgttgtgaagaagagagggagattagggttttttgggtttaggaggaggagagcattgaaagggaaaacagagtttggtagaggtagttatgtgttcccatcttctgtagacagagagagtgaatacagtagaaaggaagaggaagaagaaaaagaagacaaaaggtttggttatgatgatactgatggtattagttgcagccaaagcagcaggttttgtgatgtgaagatctcaagcattagtagaacaggcagcttctctactctgcctgcaccaccttcttcttcttcaaagtctcacttttgggtaagtcctctgttttttatgttctgtttctacatatgtttttttaaagtcgcagaaatgtttgaaaaattagtgttactaaaccctatgaaaatatttttgaaagatcatgaatgagagctttttgtgtgtgtatgtgtgtatatttatatacatatatcgattatgtcctaaaagtggatgtagaataatatgtcagaacttaacattgttttgtggttggatcagacgaatgtgtatgcaggactaaagcaagtggttccatggaagagcaagaagactacagtttgagattctgc

SEQ ID NO: 50801 - DNA, 618 bp, Arabidopsis thaliana landsberg
tttactttttctttggtaggcttttatcttcctcttctcttcttgttgctccatctttggccaaaaccctagttttttcaggcttttcgacctcttcatattattctaactcatttttaagatatgtaaataatacgaatacacacgttggagattttatgtgattatctatagactatagtttccactttccagaagatagtttccattttgtttcaaaataaaaacggaaagtatatagaagatttcttgggattatagaaacttcgcaatataacgattttatattggattcacaatgtagcgataaaccaaatcattcatagatttttatttatttgctttgttaaataaataaaatataacatttaaaacataacttattaatcattaaaattataatttaccaaataattttttactttacttctcataacttataagcatattttttttacaaatttgagaagtagaaaaaaaaaaaaaaagttttactaatgatccattgatttcgaaatctggataatgaatcagaaatttaacaaccatgtattaatgcgtaagctagtattagtggttactaatgaccaatgtcacaaaaaccacaagataataata

SEQ ID NO: 50802 - DNA, 826 bp, Arabidopsis thaliana landsberg
aatatggacccaaaaatatattgaagttggagtttatagtttttgctaatgaaaattttgtaatggaggtgataagaaaaaagaagatgtcggctatgattatatgccgatgacgtaacgatcatgcaatttctttggttttagtattcttacgattcacatgtaatatgattataagaaaatattgaatttttgttcaaccattctgtcaatttagtgataaaatttaaatagctgtaaaataataatactattaccacattgaaaatttatttttttcttcatattttaaaattctcatctttaatatctcatcgtggactattttgatgtgcgaacatttttttttttttttttcgggtaaaaatgaacaatattttttatgaaatcgtacataaaaccattcattttttctttaaatacagtcgaaaattagattgtcattgcaaatgagtaaactatcagttttactataaaaaatgtatgtatatttattttgaattgaaatgttaatgccccaacaacattaatataaaccattatactattatgttgtaaacttgtgattattgtatctcacatctatggactcaaataattttaaattctggtggaaaaattagatagcgaactctttgttttttcatgccaactcatcctagatgaatacgtatgttgattatattaatcatacaaaaactgccaaataagattaaataaaacttttataatatcaactattttgttatcccaacccccgaaatggagttttggttagtagttaaaagcaaaagcgaagtattagggtggaagagctgtaccatca

SEQ ID NO: 50803 - DNA, 871 bp, Arabidopsis thaliana landsberg
ggcaatcaatttttgtatgatgttgtgcaccaccaatattgtccatgagtcctttaagtttagggtcattcacttccataattgcattattttgaaacccataagttatccattttaccaaactatgatctccttcgaagctctcgtccattgggcttttcccactaaaaagctctaacaacaccactccaaagctatacacatctcctgcttgtgatggcttttctccaagcccatactctgccatgtaccacataattcatcaaatatgataccatactagcatgaggttattgaatcttggattagtgctttttttttttgttaaaacgaaacagactttaatgaaattagatcaatttttctactttttaacaatcgattatttttaaaaaggtcattaggttttctaaaaatattacaatacactaatcaaaacagtttttttttttcaaaacaaaaatagtcttgaaaaaaaaaatctatatagttgacttaacttacctaatcaagaccatctcaaagactcaaactaattgaacaaaatgtgcaaaacaataatctagaccctatattagtaatatgtgaaatattacatgctccaaatcatatacatattaatagctttttatataataataattctatttttggatcagaactatgttgagagcactaatcgcaaattaattaaaatgacactaaatttaataatttttctgttacttatgagattggaaaattaataaactaacctgggggaatatagccaatggagcctttcaagacgtgtgtggagcttatagaagcgtgacaacgaccattctaggcatcaaacaacacacgagccaacccaaaatcgccaactttt

SEQ ID NO: 50804 - DNA, 859 bp, Arabidopsis thaliana landsberg
tttaattatttccctcaacaactaacactgcacaatatcggatttaatattttttttatgcatcatattatataatatgataatgctgatatgaattagactattgttgtatttctcaaaaggggttattcacaaccaccatttgcatattttggcactgtttaggatttgtttaagcacttcttacatctgctaattcgatcgggtttgtctatcgtacacaacacatatgatgatgttttgttaggtttagtctcggtttacgcttcaagcatgttcatgaatcttaaacctctgatgaacttgtgtgtattagatgtgaagctgtgacagcccatttcgtatcggtggtccagaagtgaagtggatgagtagttggagttatgttgtatatatgcgtataacgtaagctgttaaagacgatataatttggcttcacttgtatatcgttataatttggcatcacctatctttcattttgtcacaccacttgttaatttgcaacttgcaaccatttgaaacttaactaacaattttactcaaagataacttaggcactgtcaagagacttttattaactatttcaatttggaattaaaacaatggacgtttattatacaattgccaaatatgattgtttcgtccatatgaaaaattaagaatttaacttacactttttaattagagagatggatcttcattagctatagttgaaacattgtgttttgggcgtcatagcaagaatctgcattgttataccctccaatcataacctggccgtatgaatgaacgccactaatagcgtttccaatcgttatattgaaagcgtctgcatgtgttccattgttgtccgtttggt

SEQ ID NO: 50805 - DNA, 392 bp, Arabidopsis thaliana landsberg
tccctattgaattcttcgatttttgctccgtatcgtcggagatcccacaccggaacctaacggcgtcaagttttatgccggagtagtcagacgggagatgaacacgccgaataacaccggtcttgatagaataatgttggttcttgaagaagttgagagtgtaatctcttagaatgagatcaagaagccttgaggattcattgagagcttcttgagtagtagtagtagaagtcgaaccctctagatgagagggaaggaagaggaataatacgattattattagttgaatagagggaggatagagtgttagtgttaccattttcgatattggtggagtaattgttcacgtttgaatgttgaggtgatgagaagatgcgatgaagaagtgtaga

SEQ ID NO: 50806 - DNA, 640 bp, Arabidopsis thaliana landsberg
taatctacatatcagatatttatagtataggtttccacaaaacaaccaaaagaagaacaataaaaactgatttaaaaatgattttatatggatattttgctattatcgaaaaaatctgaaaaaaactaaactgaaaccaaacctaatctttaactacactgcccatccctaaatcaaactacagtgatcaaacaaaacaattaaacacagcgggaaggagattttagacatttttgtggactatattcatcatcttcttcacatattgtagtaacacccttttcgatgtttagatgattttagcaaggacaattcttaaaataccacatttaagtatttgttttttaaaataccacttaaatatagagtactagaaataccattgaatgttttacgtttcaaaagtacaacaaaactaaaatttaactttcaagattcaaaactaatccttgaagcctaaactaagcatgccacttcgaattaaccaaaccgaaccaatcagatattttggttattatatcgggtaattgcattttaaaattcttccgaaattaatctctatggttagtgtaaaaaaaatcacactaaaccgaaattaacccgaaattattttgcgttctaaatcacaattttatgaaac

SEQ ID NO: 50807 - DNA, 751 bp, Arabidopsis thaliana landsberg
tccggtagaattgtgaggctctaaactttgatcgctgtctctttctttggtgtgttttgttgaattttcttggtgaattatgttgaatggtaggtatccttcagatccatttgatcgaatatgggatccggatcaaagttattcaccgtttcacgcctcttggagcttcaatggactcacaaaattgaattccttcaatattactgagaatccaccagcttctgttcttaagacagcaagaattcttgctcgcaaagaaagtctttcatatactctttctctacatacaccaggggactactacattatcctctactttgctgggatactctcactctccccttcttttagtgtgacgatcaatgatgaagtcaaacaatctgattacaccgtaactagctcagaagctggtaccttgtactttacgcaaaaaggaatcagtaagttaaacatcaccctcagaaaaatcaagttcaatcctcaagtgagtgctcttgaggtatatgaaatcctccaaatccctcctgaagcttcttctaccacaggtactctcttttgaggttgtctggataaagcaaactacacaagagccgaagttcacctttcaagtttatatttttgcagtttcggcacttaaagtcatagagcaatttaccgggcaagaccttggatggcaagacgacccatgcacaccgcttccttggaaccacatcgaatgtgaaggaaaccggggatccgctatcctctagag

SEQ ID NO: 50808 - DNA, 957 bp, Arabidopsis thaliana landsberg
agacttcattttgaaaatcagaggtcaatagaggatttatagaaaatcaagcaggtaaaaacgagttacctgatgaattacagccatcataatctcccaaagcagaactatgttgagcataaactgagagtttcttctgtgacctgtgttttgttcccctgtgtttgacttccaaacctcgaggcttaaaacagaaagcaaacatcgctggcttctcagtaggtgactgtttcttctgcgacccacaggaatttggagtgtttgctttgctcataaccaactcccagtctttgagctccctttgatatttttcccatagaggtggctgaattgcaagggtagaaaacaagtgtttacgttaggcaaaattaaaaatattgcagcagagtaactacattattgttgagctagcaagtaagactaatcaacaaggagtaaaatcaacagactatagaagatgctacagttatggacttccagacatcttcgtgcacaacaaactggaatgcaaaaagatgcaattttccccctaatagacgttccatttgcataaaacacccacatcattcaatatcctgaaaagaacactaagtaatacctactactagacatagccttattgtccacaattctgcatttcccccgattccaaaaagatctatgttgagcctagtcatgcagatttttaaatctcaagaaaaacatgaaaaccaaataaataataaaagatgaaaaggcatcagagattgtacctgaagatgcctgatcaatggcattcccttcctctgcctctttgttctccaaagctcatatattgtttccattgcttccaaggatccaactccagccgtcaattcttgaatttcgattaaggtaaagttatcacgctgctttacaaatgaagccttctcaaacatgtccattgccttctcaacatgtcctcagtgatctcacaag

SEQ ID NO: 50809 - DNA, 2574 bp, Arabidopsis thaliana landsberg
cacccacatcattcatatacagaatgtgaaatttagtcatgtacttggatggtaatatagtatggttaaattgtccggtaaaaattgccaaattttaccaccaatgctaagaaaatgttagctttctttttgctgaagaaaccaatcgaaagattggttcttagaagacattagtttagtggggaaaactgatattcaatttctcatagagagtgaactgtacacagggaaaaatgaataacaatatatctcctttggatttacagtggatgttgtccttttatctacgcaaaagttctttgtttcatcggttttttagatgaatccacaaactccagatcttttactcggcaaagctctttcttcggtgagaataaaccagattaataacctacacttgtctgaggttgctggtgaataaggagctgcaaaaacttccattagatttctttaataacagttagccggagaaaggtagtttatcatcgccacgatctactgcgttcctccatagtctataccgaactccgagcttgtcataagcaactggtaaattccatatgtttgctccgtttaacatccgttcttgttgtcctaaaactagccgtagatcttcgtttaagacctggaaatatagaaacggtaacttaagaaacaagactgacgatggttgaagatgatcgatccatttgtgatgtacttttacctgttcagcgaaatgtctccagagatgttccatgaatggaagattctttaatataggagcaaagtctagtgacattcggtatagaagtcttgtcttgtttttagaagaaggtaaacagacatggagttgatgaagatgtgttgcacactgctgtgtgcttttgccttctagtttcccgggttttgatatcccgattgtcgataaaacaatacacggtggtttaaattccatatcgattggatatggatcccagtatccttggagacccgaggtaggtgttaaaaacttcaccaaactgcagtaccaaaaacagaaagcttaaaccaagtttcatcttagcactgaacagagtaatgagagttaaaacaaaccttgggacactccagccttttgcaaaagtggatgtatgagtgaatggggcatgagcaagatccaagagattatctagaagtaaaccgtgttcccccgggaggtccattacaagctgagagttatataagagaacaaatgagaaaatgcggcatacatatgagatgattggattggagatatacttgaaatgtaagaattacctcagcatgaattaaaaaccctgatggaggctgtaaagaaggaagtataggtgcaggtggctcatcaccgggccaaatccagatcataccttcttgttcaagacaaggtaatgatttgatcttcaccttcagtaactttgtagacggcatcttcttacattctccatcggttgagtattcccatcctacaaaatcacatttaataagatatggtttctcacttgttatcaacattgtagactaaagaaagagttactaaccatggtacggacattgaatacgtccctcgttcactgtgccaagatcaagaggacatgctctatgcgcacatgtattccgtacacatcctggtttcccgtcttcacccctaaagataacccatggttgttcaaagcattcaattggtaccttaagaaataaacaatagcatttctcagaagcttgtaactaatggaagacgcttaaatcaaacaagaaccactatacataccattgtatcatgcttgagatctgcagtgaaagcaacgggataccaaaaattcttcaagtgtggactataagggggaaccggaccagaaacattcaagcttttcgcacccgtgtttgtcttttccctatctaactcgacagcagaagcagtggttgaagaggagggtttatctaattccgttacaactctgccaggtaacaacctatcattaaccaattcttccatgtgagctaacttgtctaaagcagtcgaaacccttgcttcagatatatgaacctgtttcatttcaactaagagttagaggaagtctcataagaaaactaatcattctcagtgaatagcattgttaaaaacctgttggtgtgctttcgataattcttcctgcaatccagctagttctttcttcactgtaccgatggacttgtactcacgagctagaggattaagtacatcaacaacctaacatacattcattccacaaacttagcatcaaagcactaaacataaaccattaatgattgtcaaatgtcaatactataaagagtgctacaaaaacaacatttgaagaacttgagctactagaggcatagctatacgtctactatatataccctagaactaaatgtagcagattatagctatgtccttaactacaactcgataaaacacaactttaccaactaactagacataaacaagttcaaaagagatcaatgtagaaacaaaccttgtcatgaagaatacatatggtaagaagatcttgacgagcacgccaattcaagtattgaatatcaaacctagcaacc

SEQ ID NO: 50810 - DNA, 886 bp, Arabidopsis thaliana landsberg
tgtgctgctgaaaccaggaagcaacccattgacacagatcgtgcaagatgattcttttagagaattcgagtttagacagtatctctttgcctgtcaatctagggttggtgcacacaagagacatcatatcgatcacagtgtccttttctcctttcaaaactgtagctttacttttacaaccttttcattagcttacctctatgtggttctttgcagctgttgttcaagttgaatcgtccatttgaagttgcatctaggggatattcttttgttattagttttgcaaaggccttgacccttcatgaggtagcctatactgttactaaagaaacgcttatcttacttttggttagttgatttgaccgaccttatttcctctcttcttttgatatttttgtagagtgtactgcccttctgtatgcgagaagtttgggtaattactgcatgtttagcgctgatcgaagcaactgcttctcatcaccatgatggcgttgttgcacctgatattgagaaggaatttttccgtcttcagggtgatctctattcactttcacgggttaaggtagaaatctgcttgctttcaaaatatgtacaatgaacaaaacttcctatttgctgacatcctctttcaattattgactggaatttgaaccgaggtctctgttgagtaatttcttttgagttgatattgcatttgtctgtgtcatagttcggtaattgtcttatgtgatgtctactagtttcttcatgtccaatcacttaaaaagtttttttgttggttgcatataactacaatatgaaaattattttcaagtgcttatacccattgaaatgcctttatgtcatggcagttcatgagactttgatatctgataggatatggaac

SEQ ID NO: 50811 - DNA, 640 bp, Arabidopsis thaliana landsberg
gattataaattacattttacctctcaaaattcaaatgatttatgtggtatagtgacgctagtttcatcttagaaactttggtttacgagtaaaggataagattaaccggagtatatgtatgtattaactaatattatgcattgaatacaaatgttttagggtttgatgtaatcgatggaaaaccaaattatggtgtgatctaatgataaaaagatttacgccaaggttggaggatcaaaacacgaagttatcttctacgatttcaatcattattgaccatgctataaaactaataagaacacttaattttttcctagaaaaattatccgaatttcacatactttgaaaagtataatctttcgttcgattataaaagaaaaaatgtagttaaaaagggtaacatttatggtatgttataattggagtttgctaatcaaaatagttcaacaatcattgaaagacaacaacaacaagtatgctatttcttgttttattaaccaaaccatttaaccaacctataacttgataaataaaaatagtagtaagtctataaaaattaatatccagtaaacataattcatttgtggagcactataattatagacggcgtccagtaacctgcttctagcaccgtcgatga

SEQ ID NO: 50812 - DNA, 1012 bp, Arabidopsis thaliana landsberg
tgtcttcttcaccctcaccttcacctccttgtgttgctttttcttctccttcctcagccgcgtaaactactttcttcactctacttcgtaagcgtattctcctccctcttcttcatatccttcttcgtaatagtactctccgtttagctcatcgccttcataagcttgctcgtcttcatttccttcatacacttcctccccaacaatttcttcttcctccataaccgttccttcttcttctacttcagctttgggttcagagacaacctcggctttctcttcggatatgagtctgatctcatctccagcttcctctttcgatatcgcctcgtccttgttgtagttactgctaccaccagatgcggccgctttttttctcttgagaatctcactgaaaggcaacggagctgcaaatgaatcccttgatcgcttatgactatgatgatcctcttcaaagcttttcctcttcccaagagatggctctggcttactttcctctctgctgcttttaggagctgattttctttcgtcttccatttctcttcttctcgcccatggagccccgaaacctctttcctgattaccactatggttttcctctaacctacccttaattctatctcggagtctaccctgagaaggtaactcgcttctgtcccttcccctctcacttctcctgtcaaagtggtgaccctcttcgccattgcttctctcacgaagcttaattctaccctgaagacgactactgctaatggagttttccctcggtgtatccctacgagactctctatatcctctgtccatcgaagagtcaggagcagcatagtcatggcctcctactgataatctcataccattgccttttctctgcttagccaaacgatatctcagatccgattccagtatgttctctgatctctcatcttctgcgtaaacccttctgtccaaacgatcctctctctcagaagaaactcgaggatggccccatcccctgtcttccctccatcatatg

SEQ ID NO: 50813 - DNA, 513 bp, Arabidopsis thaliana landsberg
tttaatgagaaaacaaaaatttaccacgaaatttgtatttgaatgagaatttaaattatgaagttaaaaaataaagaaaataaaatgaaaaaggaaaatacaaaagaatagagaaaaaggaaggaaaggctctacctatgcgtgccaaagctctcgggcggcccattaccttcctccctctcccgctggcccactcttgcgccatctcactgacaggccgctcccagttctcagctgtactttccacgcgttcgtgttctgggtcgcagacatcgcgtccccatgggtagaatcgcacgcgcgctcgatttgggaaactcctacaccgtcgggtggggccctatgccagcctctgggcgtccggtgtgtatccgctgacgcatggggccatgcacatagaaccgcctcctccctcgcgacgaacacggtcgtgtgacacgcgcacatcgcaaacgaatcgatcgagatatcgtaggaatccggcgatgcgtgctcgactgactgtaaaccgcc

SEQ ID NO: 50814 - DNA, 593 bp, Arabidopsis thaliana landsberg
  unsure (1)..(593): unsure at all n locations
gacgcttcctgatgagcacattgcccaggaggtcaaccaccgccacacgttgcatgttctcgctgccttttatggtgatataagtattggcaggatttgggtaaacactcaggaaatcgttggccttttgctctttgatccccgtggttgatccgctcaggtggatcactactgttgaagtagacacacgcgatggaaccccattatcagtagcgctgatggtcacataataatacccatctgacaaggacgaaacgtccaccgagcaatcatacgctttgaacacatcggtattttgcgtttgggtcactgtaagcgcaccaggtgccgagcaggtaatgttggcggtcacgatctggtcgatctcaggtgtgctcaccattatggggaactcaatggttgaaacacctgcccttaaagtatcgccnnnnnnnnnnnnnnnnnnnnnnnnnnnnnnnnnnnnnnnnnnnnnnnnnnnnnnnnnnnnnnnnnnnnnnnnnnnnnnnnnnnnnnnnnnnnnnnnnnnnnnnnnnnnnnnnnnnnnnnnnnnnnnnnnnnnnnnnnaacttccaccggcatgatcgaagtgccta

SEQ ID NO: 50815 - DNA, 672 bp, Arabidopsis thaliana landsberg
tatttcatcacttatttgagtttgcccttttcgcacgggcagagttccctggctctgcttgaaactcccttgaaatgaatttccttgacctcgactttgccattgtccaggaatagacattcgccttccttcaccttgcccttgtccaaggatagacattccacttctttgaccttggccttgtactagagcacgagctccttgtctttccttgacactcctctgatctggaagcgttagacttccttgaccttgcacttgtcctgaggttttaccctcatctggaggcgttagaattatttcagcttcctcttggctccggcttactctccttctttaaagaatcaaacccctctttagtagggacaggaacaggcccaggtgtgatcactccattctcatatttgtctcctgaaaaacaaaaccaaaataaaagttcaaaaatgcaacttctttatacacaattcccacaatgagataagacttccaaaatcaataacttattacctccataaaccttattctcaacatcaatatacgattcaggtattatgtattgaacaccaggcaaatctgttcataaacaacaccaaaaatcaaatcaaaatgtcaacaaagcaaaaactaattccattcacaaaaatgttgtcataataaaacttaccttaaact

SEQ ID NO: 50816 - DNA, 684 bp, Arabidopsis thaliana landsberg
atgagcacataaagttattaaaatattcgaaaacattgaaacatatgaatagagtatctcaaaactgatttgagatgcaacatacattgtgaatacttactctatctgaataccttcttcgatttttgcctcatggtgttgaaaacatcgcggagtcgagaactatatatatcattttctgaccaaactttagaacatttacatccatggatcacatgaatctctgatacttggacacatcagggaaagacgtgctgtgttttctttggcaaccaaattgcttatgataaagaattctattttgaaacgaaaatagaggaagtggtgcgaattcttacggaaccaaattcagattgaaatataaacagattctctgttcggattttattctatgggccacaacttttgtctatgcattgacaaaaagaaaacaatcaatatatcattagatacgagtcacacaaactcactcaatatttacacatctctctctttatccatcccacgactttatacacaagaagatgcatatctgttgctgtattaaaccagggagggactcagactctagcattactgtctatctaatactatctccatcaagacacaaagctaaaacttcttgtgcatctctcctttcgatacctacttttttcttgttacacctactagaggaacaaagtt

SEQ ID NO: 50817 - DNA, 304 bp, Arabidopsis thaliana landsberg
tcagctctctcttcttagacaacaacacgccgacgatattttgttttgactttcactgttaaattgcactttggggactcttttgtactttaagttcactcctaattattggagattacaaatttacaacttataattttttaaaaagtgacaactgacgtgagatttgtttagtcttaagacagaaataaataaataagagaacgagcagcatattggccaatagaaatataatgggcctaatgggctaacttctgttgttgctcttcagttaaatagataagacctcttgaaaacatgatgg

SEQ ID NO: 50818 - DNA, 210 bp, Arabidopsis thaliana landsberg
  unsure (1)..(210): unsure at all n locations
nnnnnnnnnnnnnnnnnnnnnnnnnnnnnnnnnnnnnnnnnnnnnnnnnnnnnncaagaacctagttgaaagttgttgaattcttaaaagatcgagtacgattcaagtcaattagagcccgcattcgagcaggtgcgcttttcggagggacttcggtgacctgtaagagtttgcgtgctaagcaagtcactggagacgcatagtggacca

SEQ ID NO: 50819 - DNA, 808 bp, Arabidopsis thaliana landsberg
ccattacctacatcgatcttaatctgctcaacccgtattgttcctgaaacagaaattgaaacaccatgcacgctaatcaattgatggatatacatatataaaccgaaaaattgaaaacgtataaattaaaggactttaactgtataatatataaacaaaaatactacattataagttaatggtaattaccagaacaaagtagatttctttgagaataggtgtcaacaatgagctcaaggtatcaatgtcttctcttaagttatcatagctctcgtctcttgcaccgatcgcttccatgaacgtcttgttgtcaggcaccagcttcaaacacaccttcattattacatattctcacgatatcaacacatgtaatatatgttcccaagaaaagtttaatttatatgttcatacctatttcataataataaaaaataagtttgctgggatataacaagaaaatgatgttagtaagtatgacatagctagaatgagagggatcacggtgtatactttgaaagcagcagacgcgatccatccatgatgcggttttacagtcgtcatgtagcattcttctacaagttcttccattttagacgacatctcttacggcaacaatcgtagtaaacccgcagtagaatccattgtcctatgtcatagaatatagtaagagagagtcatacacctaattaagcactaaatagtacattaactaatcattagttccatatatggtaaagtccaaagttgtaactagtagtcggagtgctataaagtatatattcgtgatggaacggacaacctaattcga

SEQ ID NO: 50820 - DNA, 1237 bp, Arabidopsis thaliana landsberg
atctgctaaaaaacataatattattgcaccccataaataaagcggagcccaagaacaacccccactgggtggatttacttaagaaaaaattggatacacaaaacttatgatatatattattttacatcgtagctagagaatatctatcttatccaaaatcaaaattaataaaagtatgagatagaattatgcttaagatttgatacatatagctgaaagactaaacttatgtttaagatttctatttaggtgtgcaacaatttaaatatatatatatatatatatttaatatattgtttattcagttgaaaaatgtaaaaagcattatataacacaatgagtaatagtcacaacttgcacaataggtatatagtttgctgatgcttttgttggatatatattaattctgaaagtttgtaaaatgattgaattacgtctgcgttatataatcaattctaagtcataaaattaagctgtagcgttatgtattaatttgagattgaaaatacaaatacataaataatacatccatccgtctttgaaataaaaaatttaggtttcttataattgtttccataaaaattgattccttagattttctatataatttaaatgaatttatgttaatattttgtagactttaaaaaatataatgaattactattggttcgtaaaaatggaaaaatgttttagtgtaggaaatgaggcatgttttaagagttacatgcatgtttcttaattgtgtgataactttatacgtaatttataatttaaatttaaattttgtgaaaattataaaaaatacacttatattaaacaaaggaagtatcagtaaaattatttcttcctatcgacgagtgtgtttacaagagtgttttactatccaatttcaattgttcttttttttttttttttgaaaaagggttcctctaatttccattgttgcacttcaattattttctctctttgttttttttgagcaaaagttttgcatgtatattgaaaattttattgttttctaaaataatattaaatattttcaatattttcaaatcttgcaaagaaagtacacttgtactataacatcgttacttagtgatctgtcatgtgtgacatcagtctttcgatctcgaacgcgagagatatgtccatgcatgcatgcatgtgatcagtggatctgtactctttaaaaacataaccagtttcgtaacgacaaatttattaccagaaacaaaac

SEQ ID NO: 50821 - DNA, 541 bp, Arabidopsis thaliana landsberg
tttgtttttcgttagattcctattccgtgaatctagctgataaattcttaattcattttgtctgaatgtatatcacaaccgttcttatatctagtagaccttcgtttgtttcaatcagcgtcttcaactactgcaatttcctcagaagatcgaacgttaggccacgatcggtcctcatgttccactacctcacatacacatgctacacccaaagaattttcgatgtggaaccaattatcatagctagacaaaaccctggatttatatccctagagatctcgtgtgatagaaatcttgatttggtacaaagaaaaacaataacatggttcaaaagtctttgtttaagtagcacgaaaccaatcaatgatttgattgatgatttgggtaatgtaatacaaaatggacgaattgatcagttaacgagagttacggacaaagaataaagtcggcaagaaaaaaaatacaagtatgaaacacgttgtaacatcactgatgttcactggaagacaacacaaaacaaatatggtaagacaggcaaaac

SEQ ID NO: 50822 - DNA, 763 bp, Arabidopsis thaliana landsberg
  unsure (1)..(763): unsure at all n locations
acatgcataaccttttgtatatgtataatggttattactaaggaagacattggtgattggtgtagctttgatatgttttctcggagagattataaggttttctatttaaactctgtttattacacactcttttggccaagctgtttattacatatagcattgctctaagtacaaaaaaataacagactaagggaaaatgaaaagatattgatgagttttttctttgtctgaaaaattatacaacaaaagtgaaatacaaaagtcggcatgattttattttccggaaactaagccgtcagaactttaaccctcaaaaacggaacacatattcatacatcttctctaatggcgtgttacgaaaactatcacatcaaaaattgttaaacatgttgtttttgtagaaaaacaagaaatacagaattcatatatgtaagatcgagatatcacaaaggacaaaaaaagtaatcacttaagtctgattttacaagaaaatctcgtttatttaattttaactcgacaattataagagaaaaagagatcacatcatcagtgaacgagctaataaattaaaagctttgaaagttgcggtcaatctcttaggcatattagatttctttttgcaaatgtgtccatgaatccatcgatatgagcctttctttttttttatgaagaggtgatcaagtgcttatctggcgaatatccctattntatagatactttgggttgattatatatatatatntatttatttatttatttatgg

SEQ ID NO: 50823 - DNA, 651 bp, Arabidopsis thaliana landsberg
ttcgaaatacttaaatgattattaattattaccatatagtcaatattcttaatgtatcatatcgaaaaatctaaagtggattttacttttaaaatttgaattgaaagaataaacaagtctataattagtaattttaaaattaccaagcttctactacaatttttgaattataacaagtacaatgaatcattttgtttcagcaaatttaaatttcgaattagaacaagtattgtctccaaattttattttatactaaaccaccaatgtataattagtttaaattaaatgaaactaaaatataatataatacctattttgtaagatcaatgtcattatgggcccgatggtaagcccaggtcgatttgcacacagtcaaatacatgacgtcatataacatatatgacgtttgtcagcattttctggtccgggacaaaagatcagcaatcactcgtactgtagtcagtactagtaatgtaatgctcaagtgtttagcatgtgggaaaaataaaacacattttcaggtggttagtgacgtggattggttaataattaacaatcgctagtgctctcttttttaaagatttcttgaaattaaatggaacaccttttttgtcaatcaaatggaacacctaactactaatttaccggtcc

SEQ ID NO: 50824 - DNA, 1169 bp, Arabidopsis thaliana landsberg
  unsure (1)..(1169): unsure at all n locations
agctacaaaagtagtaacacttgggtgcttcttccaaactctatgttcggcagcatcgcacatcccatgtcaaccctcttagtcgtttagccaaattaccagctcttttaaagccatgacgggttctctctggagactcattaatgtgaagaatacctcacatagtacgtttactgacattttaggttcttgaaacaagagaaaggtgaatttctctttccttacacagataggccactggatgcttgggaccatgacgctgttttctgtaacaaatgtcttcaaacaaacactcaatgcctattgagacccgcaatgtgaacacaacagcccttggggtcatgtacgttactgcagtaaacatgaacctcttctctctcccatttccattgtagaggtttggatccaagtacacaaattggcaagtttcatcgtttcatgatattctcagccataaacaggtatctcttggcacattaaacagtgtgatctcgcacggtatagccaccgggagaccaggcacaaaggaaatcggactgtaaggaccattaccaggaacctctacctctgcactgacacactgcagattaacagaaaacgtaaactgttccggagagaagcatttgaatatcttgatgagatcaagcagtctacagctatttatatcgtcagagctcccaaactcttccaatgacttcttagtttcagttagaaaatctgatggtttggtgcattgttgttcatggtggagctctaattgagatattgttgaagatagcttctccatgcagctaaggcggcagcaaatctcaaatttatatagccttaacaagcaaccaaaaattactagctccaatactaatgactcctccgtagacaggcctgtgaatctacaccttatctccatgagttttatctctacctcttccatcagtagttccacttctacagaactacacgtgctgatgtgtctttgagtaattaaaatgaggccatacttgaannnnnnnnnnnnnnnnnnnnacgtactgacaaataaagtccaatgtacctttggagattgaagaatcggctgtcaaagttgctaacttctgtttgccagccttggcaggatgacaagaaacacattagtttagagttcacatgaaacagaatttcagaggctggga

SEQ ID NO: 50825 - DNA, 716 bp, Arabidopsis thaliana landsberg
  unsure (1)..(716): unsure at all n locations
aattgttatcaaaagaaaaagggaccctataaaagttaaacagaaatacattttggttaagcttatcggtttccggttaaatcatctttcaccttctgaaggagtaagtgatgctattttgggcttcaaatggatctttaatctgtaggctcattgggcctgttctcaacttggcgtttaaagatatgtccttccctctctcatctgntcttggtttttttttttttttttttttttcttcattccgtcaagtttttatcaacaaaaacaatgtctataaatgtgtggtaaataagtgtggttcgtatgaacgaaatcgaaaacgtggatctattacatgccactagtttttccacaatccatgtcataaccctccaaatttaaccgaaatacattcttcattacaatgacgttacaaaacaaatgtgcattctaaagtttacaatttatttaaatatattttacggacaaatatatagccatatgcctatatattgtcaccatatgctacacatcctacactgattaatcagtctttcttttaaagcatttttttggttttatgtgcatattacaatgtattcttttaaaaaatatatacactttgaatttcttttatcatcttatgttatacaaatcaacaaagtttttcttactttatattacattcatattttgcagaaaacaccaaaaaatgacaactcatattttttttt

SEQ ID NO: 50826 - DNA, 856 bp, Arabidopsis thaliana landsberg
cttttgaatagacaccaaaaccctagtttttggtttcgtttcttattgtcggttttagggttttgatgactttcgtctctcttttttttttggttttccatatttcgatttcgtgaatgattttatattttggcttattcaagtggtgtgattgatgactttgatttcgttgttagttctttaccttactctctattatggtgatcaataaatagatgctttagcaatcttgttcgttttagagtgaaaatcgaatcgtccactaaaaacctccggctattcggaatcttctccggcgtagaatagaacataatatcgccgccgttctctttttttttgttgggaactaaatgattggccctgcctagggtttctccgtatctttgaatatccttcttaatttgtttattaaactatataatagcgataagaaattactatttatttttaggctcctatttaatatttatatatagttatacgtacaaaataatttagtttatattatttgttttgtttttttttccttttccttcccaaatctaggatgggaataaaatacttcgttttaatattcttttttttcttttcgggttgataattgagaggttaagattttcttagagcgatttattattttatgatattaaaatatacggacgatatactgaaagaaaattcatgcgagaggatgttaatatgcaaattaatactattcagttgaattttgccatgcaatctttttggtcgtaaattttgttgaaaacttatccaatctcatatgaagcgtcccaaggcccatatcaacacttattacgtagaaaacatcataaagcgagagaaaaagagagagagg

SEQ ID NO: 50827 - DNA, 907 bp, Arabidopsis thaliana landsberg
taactgatttttcattaacatgataccagaaatgaatctagatggattaattcttttccatccacgacatctggaaacacttatctcctaattaaccttactttttttttagtttgtgtgctccttcataaaatctatattgtttaaaacaaaggtcaataaatataaatatggataagtataataaatctttattggatatttctttttaaaaaaaagaaataaatcttttttggatattttcgtggcagcatcataatgagagactacgtcgaaactgtggcaaccacttttgccgcgtttaatttctttctgaggcttatataaatagatcaaaggggaaagtgagatataatacagacaaaacaagagaaaagataaagaaaatgggtttgagaagaacatggttggttttgttcattctcttcatctttcatcttcagcacaatcttccttccgtgagctcacgaccttcctcagtcgatacaaaccacgagactctcccttttagtgtttcaaagccagacgttgttgtgtttgaaggaaaggctcgggaattagctgtcgttatcaaaaaaggaggaggtggaggaggtggaggacgcggaggcggtggagcacgaagcggcggtaggagcaggggaggaggaggtggcagcagtagtagccgcagccgtgactggaaacgcggcggaggggtggttccgattcatacgggtggtggtaatggcagtctgggtggtggatcggcaggatcacatagatcaagcggcagcatgaatcttcgaggaacaatgtgtgcggtctgttggttggctttgtcggttttagccggtttagtcttggttcagtagggttcagagtaattattggccatttatttattggttttgtaacgtttatgttt

SEQ ID NO: 50828 - DNA, 712 bp, Arabidopsis thaliana landsberg
tattggtattttttttttcgttttttttccttctaataatctccaaagaaaatgttggcaagttagctgttacagaaaaaccattggggttgttgtcaatagaacttgcagtttagaccacatacagaaaaaatcgaaaatacccctttgttacatgatctaacatataaagtacgtggcaaataagattttttttttaataagaatttgttcaaacaaaaatgaatgcagatctaactgagaagtgagaatcattaatcatatgtacatagatgcacatataaatggataaataccatcggtgggaggcatagctttcatgagacaaaataatatatctttgaacggtgttaattaatttagctaggaaaaaaatgaacgtgaatatgtacgttttttttttcctcgttgccattaagcgtcttcttccttagctgaatactaaatgatgctgattgatgaaacgtggagtatatacgaaaaagactgatttttacacgtgctgtcttattggttgttttgttctagtagactagtactatcctttcaaaccaagtctttaacccaaaaaaaaacataagcaaagagtcaaatatatattggacaactcatatgagctaattaacattgaaaatctgaaaaaaaaagcagaaaaaaaactcacatgagctagtatatatcatttgttttgggttgacatgttaaatgaagc

SEQ ID NO: 50829 - DNA, 1027 bp, Arabidopsis thaliana landsberg
gatgagctcttgattgctggggagcttaagagtcaagtatttaacagtagccaggattatatccgctcaggtactgagttgtatgtttaagtcatcgacatgaaaatattagtgtagtagttttttcttgagaaatgacagtctctgtctgttatgttgtcaaaggatcaactggtggaggttgcaaaagaggaggccagttcgataagtaatataatcgctcaggctactaatcgttaagtagtcttattcatcatctatgcattcttatgcagttaaagtatgttccctgtctctggctgcagtaattgttttgagaaatctttatccatttgatttttcttgcggagggattttcgtcttaaagcgtaacttggagagaagaaatatgttatgatttggttcataaacaagtaaagattatatcgtttgtaatctttgatttcatgttttccaatcccattctttcattgtgaatccacatgactactatttcagaccaatcttatttgcacatattctctagtccaagagttatggaagaacagtagataaatagccttgctcgactaatgaggcaatgcagtcatcgaacatctcttcaagggacttgaacttgagcccgagactttgtatcttcgaggtgtcaaagtcgtaatgcaacctatttagtttctcaaacctgaaattttcaaacagagtatcatcatgatctatgattttaaaattttacaaggtttgagagatggtttagtttaaagggtcagtgtcaaacctcttggggatagggagtgatgggtaacgagcagataggaatgaaacgagttcctctagactgataacgttagagctacaaatgtatctgccttgagctgcttcgtgttcgaaaacgactatgttgggttcgtgcaacgtcatcgatatgaacataccccatttgtccatgccattggaacttctctggttctcctggtgggttatatgacaagttataaccaactgtaagagatgaatattggacccaaaa

SEQ ID NO: 50830 - DNA, 834 bp, Arabidopsis thaliana landsberg
atgctgattttatgctccgtaatggacttggaaacatggatggaattcggatccatacttgcctcaacattgagagtctattgtctttgtaacaaattgattcagtttttttcattatggttagtttttatctttttttttttgtttttgtcccataactttatcattccttcatagaatttctatttcattaccaaccttcttttgtgatttaatagtaaccgatattgcaaaacataaatgcaccatacaccgtttttgaagttgaagttgaagttatcagtatgatcaaatgtatagtagctttcattgactcaaaagtatcgtataccaatgttttttgttttggtgtgattcacaagtgaaagaatcatatctgtacaatgtaatgtcttccaaacattctacgtgtcaaaatgttggatctcgatgttccaattagatgctaactcgaccaaaagatgatcgggagctagaccttcccagtcctctggaggatctgttgtcgacaaagcttcatgtagattcaacaaaagctccttcttcaactccaacggtattcccataaagtctgctccgttttctacacttacttctagcagctggataatttataaacaaagatataagcattattgttggagtatctgaaacatgaaatcttgaaaacaaaagaagaatcttgttttacctgttgaatccaagatagacagatatcatatagagtatgatccaggagaaactgtgcaatagaatggatagcctcgttacccatatcactcgatagttgatcaagaacaggaccggttttgtccattagcttgacgagtaaat

SEQ ID NO: 50831 - DNA, 850 bp, Arabidopsis thaliana landsberg
gtttgctagtacaattagcattagtaacttaatgagatcatttgttttacgagaggatacacataaaagcttcttcaaacacttcggcaacaaaatcctttcgatttttactgtaatgtgtcaactatcatgtccactctcaaataaagactacaaaaaactaacgcagtatgtatgcccaataatatgaaagatgcgatgtagaaaagaagagaaaaaggcttggatcataatacatgaaaaaccaatgatccttcaagagaaccatagattatcacagtgacaataggcacaagtcccactccagctaataaaacatcgttagtaaaagtttaggttggagtgtgggacaacagatcacaccatgcatttagtctttcacgacaatccaccaaatagaagagatcgaagatcagctggaagaaaagttagttttaacaaaaaactgcttactagatttgaacataataccaatatgattaatgtgtctcaaaagtatacagcgaatggccataaatgtgagaaggatccaaatgacataatttttacgagaacaaagaccagcaaatccaagaatgtgtggcatttggatgggaggtccaaaatattcttagaaattagtaactcaaacttttaaaactcatacacatatgagatatgttgaaaaatcataattcaataaaggatcatatataactatttctaatatgtttttgaggtctttgtttttagttatttatttttattttgttaactcgaggtatttgttttaacaaattttctaatttcattatcttacaacaaaactcaaatattaatatataaatatttgtcataggtacgggaagag

SEQ ID NO: 50832 - DNA, 644 bp, Arabidopsis thaliana landsberg
  unsure (1)..(644): unsure at all n locations
gactccgcctttccgattgcctccggtatctgctttatgagtccggtcaggaaaaagtgccattggccaatgagattaatttactacaggattatatcgccattgagaaaatgcgcctcgcacaccccgaaaagataaatttacaagtgaatggctccataaatgactatgttgttagtccggctttgttgctgccttttgttgaaaatgccgtcaaacatggttttaatcgcattgctaacgattgttgggcgcaaatcggggtttatattcgtccggtggacgatacacnnnnnnnnnnnnnnnnnnnnnnnnnnnnnnnntctccggataagaagagaaccggaggcgtcggcctgcaaaatgtccgcaagcgcctggagctgtgttatcccggtcaacatgacttgatgatccagacaaaaaacaatatttttgaagtgaacctgaatctgaaattaagcgcacaataaatggtcatttagtgacctgtagtttcagatgagcagttgctgctcccgtagtgaaatggataaaataactacccgccgaaaggttgttggtttctatttcaatgatattttttccggcctgggacttttgcttttcatgtgtcaatcttctgcctgtcatgtcttgaacgg

SEQ ID NO: 50833 - DNA, 720 bp, Arabidopsis thaliana landsberg
tatctttcatatcaagctgcatcagtatatagctaaaaattagatatcaaccaaaaccatcagatactaggccaatcttgtcatcaaaggtaggtggagaagaagatgagcaagctcaaacaaggttcatgtggacaaactctttcctagaaatcaaaagtttgtagtgctttttggaaattattctatatgcttatatctatgttatttagtcatatagaattctatcagtccgctctgattagcttcccgaatcgtcatacaagattagatttccaagaagaagccagcaacttacctttgttatcaaaactcaaggtataaaatttggtccattggtgtttcctatacgaatacaacaaatctcagctttgcttgtgcctcacaaccttttattttagcttgagttataaagtttcaaaaagtaggcataaagttttttttgttggttctttgtttcaatagaagtaacacgtttcctctttttaatggatactttttgtaacatttttggtgtcgagaattcatgaacatgttccaagattcaggtcaattagttggaactatcttattactcggtgtcgttggaggttggagtcacggaacaatggggcgggcggatttgacccgttagcaagtatgaacgcgagaccttttggggtcgagctttgagcaaaccgtttgatggtccatattatggttttcaaagttttaatacct

SEQ ID NO: 50834 - DNA, 188 bp, Arabidopsis thaliana landsberg
caaagcctccttgattacttttccacaacgcttcatggatcaatgacttgatcaattttgcttcttgagatatcctcttctcggttgtttgagcacacaccatttcttgaacgagcttcttcaactagtatagaacacctccttgaatactttagcaagatccatctccgcataaccatctttatgtt

SEQ ID NO: 50835 - DNA, 1241 bp, Arabidopsis thaliana landsberg
ctatacctgctcaaccgagtagctatcatcattttgtatctgtatctctcgctgaaccaaaaaaataacatcataaagagaactcagtgtacaaggttgggctttaaatgatgtacaaacacttttgaggatacaatcaactaaaaagctatatagacatcaagtatggtaaactaacctcgagctcatgaattatggcagcagttcgccaaccagcttttgaaggccctcttagatcactaaataagtgatctccgaaataaatcacctatgaataaaacatgtggtagtctgtctttaaatgcattcaaaagcatgaagttacagaatggaatatatcagcttgttgtaaagagtacctcagggccatgccactttgtgatttcaaggaaggatttaagacaaccatgataataaactttctttgggtcaaatgcatccacttttgtaaatgccaaacttatccctctccgaatcataacaactacaaggattaatagcaataaaagagttaagcgatcaattccacaagaaaatattatgttttacacaagaacatagtgtttctggttatatcgtaatgacaactaaccggaaagggtgtttagatgtgtaaaattctggtttatttgctttagcaatcacaacatcaaagagttctcgccaggaatctccgaagccaaaagattcctaacgaacaataagcacaacccaataaaggtcatgaaccacttaaacaaaaaagaaaatatggaactggccgtaagaagattatggacaactaattaaaataaaaaaagtgttgaaatgattgtccctagtgatattccaacgagaaaataaaagagttttagatctattcaataatgtgaattacctccattagaaagcgcattccgccatcaacaaaattatacggagagttggtcagcaaaaaaagcttctttcctttatcttttagcattctcaggaaacgtagaagctgaccctgagaagcaaattgctgtttcagtaatataccaatcaaaggtaatataacaagtgaagataatttgaaggactttcacttgcattttttagcaaatatctgttgggatcagcaagaattcctctatgaaccaatccacttctatggacatgttgaatagcacgattgacatcattgtagatgttagaggcatcaaactcaagtttgcgtcaacaaaatattgcaccatgtctgctataagacacgcctgaaa

SEQ ID NO: 50836 - DNA, 189 bp, Arabidopsis thaliana landsberg
catttattggatgaagaacgtaacaaagctaaagcggacgttaaagatcaagatggtgatcatagaaaaagagaaattacgtataatttgtgtgtattggtttgtttcgtgtacattgtacttgtgtgtatatatatgaataaatttagcttaatcaaccgtatacaattataaactaacgtagttaac

SEQ ID NO: 50837 - DNA, 1155 bp, Arabidopsis thaliana landsberg
tcattttttcctctactatttaaatttttaaacggataatctagcatagagtggtagacagtatatgttagatattttaatgtcagatttgtacttctattttaactttctaaattattttagttaaagtatacttgttgacggtgcaaataaagaaaacgtatatttgttgacaaaaataagttagctaaagcgatgtatttattatgggtgagttaaacaaactacctaagaagaaaaacattgaaagtttgaatgattactaggatagacaaatctgtcaactggttaatcttttctatttttaggatagacaacaacgccgataatttttatttgtgtataaaaacagtttgtgattggtctatattaaatttatgttattttattttaagtctgtattactataaatataatttgtgaaccaaaaataaaaagcagtatagtctacaaacagatttctccgctttaaccgatgcaaccattcagatcctaaaataaactaccgaatatttattaattggttttgaaatgaggtaactaatccttttttaataaactttattcatattatcaaaaaagattaaacgtgattgatttatatataaaaaagaacattataagaaacacaatattatgaagctttaaaaataattgttttatttctaatgaactttattcacaataataatgcaaaacagttattatttttattttttttacaaaacagttatatagagtggcaatatggcattcttcacaaatcattttacaatagttttattgtatcaattcattttcttaataagaacgattaattttgttattatcatgtacgaacctaagaatccatattcggtctatatgaaagtatcaatatggcaattattaatttgatggtggtgatgatggtgacagaggcggtgaaggtggcggtggcggcggtttttttggcgcaaatgaaggacttcgtggacttcttgatgaccgtactggtattaatttccttctccactctacatatagtaataaaaaataacttaaattcagtttttttttcccatgaattaaatttttaaaactattaacaaaacttattggtattatagtggttaaatgtcaaaacactggtgtcagtgtctaaataatagtccc

SEQ ID NO: 50838 - DNA, 613 bp, Arabidopsis thaliana landsberg
tctagtgataaattttataagactcatgtcaatcgaataaaaatatcgaattgttgttttgctgaacgaataagtttgtctatattagacgcgattagttcttctaaaccacattatccaaaaaaatcgtgattgactacatggtgtaatgatacctatcataccatctcaagaatatggcatgactcatccaattaacaattgtatttgcgcataattgtaagatgtgtaaattccttttccgcttattaacggtgatttgcgataagttaattcagaagacgagtttcgattctcccatcataataggttgtactacgaaataatttcccaacatgtacacataatctcgacaaaaatccagtgatatgggttacttgtagttgaatagatattacaccacaatgacttgtggtttggtatgtaagaaaaggcaaaagtatagtttgcagttaaaaaactgaaggaaatgatgtccttggtattaaattacgattaaacccatattctctctctcgcatagtctcttcctcttttcttctttcttcgtcaatttcagaacaagtcactacagatctgaagtgaaccaagctcaggttttgtcttctcttga

SEQ ID NO: 50839 - DNA, 527 bp, Arabidopsis thaliana landsberg
cgaaaaacccagacgtgagagctataaacatccaaaagcccatttggcttttttaagcccatacatgatatatgggtttttgggcatcatcactcgatttgtttaaagacaaaaccaaaacctgatctcaaaaactctttttaatttcaggttggtcttttcgtatcttcttcttccacataatcaaaaattacaaagagagagagagagagatctttgaaagcaagaaattctaatccatggaatcatctccttcgttccttgacaatctcttcttcttcttcctcatacgtccgcttctggcgatctcattcgtcatctgcttcatcgctctttgtactttctctcctcaaacctgaagtttagatctttagggctctttgatcttaatttgcaaaatttgactttgtttttgctttggggttttgcagggtggtttctagcatggaagcttgtattaagccatgttcctctagtacaagagatctttggcttgaggaagaaaacctttataccaaaacctgatt

SEQ ID NO: 50840 - DNA, 558 bp, Arabidopsis thaliana landsberg
tacaggtagtaataagcccaataaaataagtatgagcccagtgaagcccaatgcactaagttattttcttcctctgaccagtttcatctctttgctctcgacaaagcagctgagcgacttttgcacatttctagggttccaatcaaaatctatctgcaacaaaaatggctaatcgtttcagatcagggatctccttcttcaagaccatcgccgtatcagattctgtctcctccgttagatccaagtcgcttttcccagcggtaattcgcattcttaaaaatcgaatcttttcagtccaattttttgttcggagtcgattcttacgagatcagtcgatccaatcgcctaattggattgataacagtatagaatggggattatcgtgttttctcgcttacattgctcggctttagatgttttggaagtcttttaactctatctctgttattttcctgagaatgctatcaatcaatctttaaagtttgtatatttctatcgcagttgagaacttaagcaactgcttctgctcaaacaaccgctaatgttaaggtacaccct

SEQ ID NO: 50841 - DNA, 830 bp, Arabidopsis thaliana landsberg
tattgagaaaacattaagaaacataattacaatcagtaaaactacccacgggcgatccttttttatttaaagaatatatgtttctctatttaataatttacccttcaaagcatcacaatggagagtttttcttttatttttaaccaactagagttttgtgtacaagtagttattaaagatataattcaagaactgttatgatatttgtaagaagaagagattttctattataaatacttgagtgaaagtttaggtaggttacacaatgtcaataatgtgacaaagattatttgagatgatagaacacaaaaaaatatcataccataccactatattccatttccatctagtgtttgagcagatattctgctttgtacatgtttcttgcacctacaataagattcaaaagtttaattagataccattggaactatagcgatagttgcagttttctctaaagttttcctataacatattttcggacatatggtaggagcatctggaagattatgaggatcaacaaatagcggaaaacaaattactgtatacacattgctttcaaaaaccaaacaatcttcgtcaaatgaattttgtaacttttgctgaatatgataccaagtggagtccaatgacaaacaatctccggtatgaatttagtgtcgcacgtgaagtatatataagttacaaatcatgtctttagaacaaatgatggaaagtgatatatcatatatacagtgagacacgatgcgatcaatcaaacgaccaaattaaataaaaaattagtaacattattatgactcgttgctatatttaaaaatgacaggaaaaca

SEQ ID NO: 50842 - DNA, 610 bp, Arabidopsis thaliana landsberg
tatgttcatttcataatcgtggacgggttgtttaattttttagagatgtaggaagtttagaaaactctccttcttcatctttataaaatatcaatcttaaattaatgtgacactaagattaagttttccctttcttttactttgtttgttctataaagtaattattatgagctaatttcaatttcagtttgtattttctaactgattatttgcacaataaagtgatttgttgtgtactcataagactcttcatttcctcacaatttcgtaactaatgtgatagtaattttacaaaatgcggtcacaatttttttttttttttttatcaaccgtacatttaaatcaaaagtcaagttacagtgaagcaaaccaaccatatttatacatctcattagatgataagatatacagtatctcctaagagaaaaaattcaaagccaaacacggtaagcataagcccatgatgatgacggttaatatcatgattatgatttaacaaacataaagagagtttttaaccacaataaaaaaacaatccaccaaattctttcaatatgcataaaagttctaacggccaaatggcttcatgggtcttgggcaggtactgcca

SEQ ID NO: 50843 - DNA, 964 bp, Arabidopsis thaliana landsberg
ctccatttgtatgcagcacgagtaggcctcgtcgtctgagccaacatgagcccggaccactgtaacgagcttcatcaaagcctggttcttgaacctagctgcgttggttaacagaacagagcttccttccggcacggaagtagacagtttgagagcatcattgacctatctttaccgcagtaccagtgaggacccattgtctcggtgctaaccacgagtgcgagacgttttcacgagtttcgaatatcctttgcacgatatctatcgatataacgctcgcgctacaccctagtcccgagagattgtaggatttgatgtctgctctcatcttgtatctgttgatgactcgtgaggttagggaaggagatggagcgaagagtgagacgttgacaacgagaatatcaatgtctgaaggagagattgagccttttgtcttgtggaaaagcttgtcgagagtgtcgaacatgatctcgtccatttcggagtgagcgtcaaggagagtaggagagtcttctctaccttcaagcacatttcttgggccgtacgtttcctctcctatcccggaactagccatagtacgaaggagaaacctgtactcttcaagacccaagttcttgtttcgttgaacgaccttagcacaagtctcggtgtcgagttttctctcttccatgcccttgtagcactcgtagtgaagcatgtagcagtttctctggtttcttcttttgaaaacaaacttgaagatgtagaaaacgaagagagtggagagtaggagaagagaagagagtgagaagagctccatggaagaaagaaacagagagtagagaaggaaagtgtgtgactgagaattaagtgactagaacgattaaattgagtcatgagtttcaagatttgtacggttaaatacagaaaatttaaaggcggacactgtttcaaactgtttcttttgtaaaaatgggaatttttg

SEQ ID NO: 50844 - DNA, 401 bp, Arabidopsis thaliana landsberg
tgtcttccacatagtaacttcctggtgatcatgcatgtttgcttagagaaaaaaacagacttggagagcatctgttataaccatttctgcccatataaattttgtagcggatagacaaccatatgtggagcagaaccaggtcggcaagcaacgctatgcagaagagtatgcagcctaccgtggtgcagccgctgaacagtgattactaagcaatactcaacaagttacatgttagagtgatccaaagttggctacagaacactgaaagaaagttttcgtttgctgcaaatagaatgtaggtagtgactaacaaatcatgcaaatttcatctagaaaccatggtttggtgagccccacacagatgtcgcgctctctgtgcatggctgttgcaaatgatcatc

SEQ ID NO: 50845 - DNA, 671 bp, Arabidopsis thaliana landsberg
agcacgcaaatctactggacctcttggcttgcctcgtcatcagctagccctcagacatgaaggcagtagtagtggcagcaatgacacaattggagacctggaagccaaagtggaacagcttcggtcagagctacgtcaccggaatagggcatgagcgcaggacaaccaacgtatagctgaattgtcaactgacgtcagccgcttgcaatatgagatctctgaacgggattcgccattgattgggccgtcaactcgcgttcgatcacttgggaccgtgaagcaaaagcttgagctcgtgtggcagagcttagtgcggccctcgacagcctacaagtgtattgtaatactttacatgaggaagtacatgtactgtatgctcgactgcacccggacatgccttccgacgctactgcaatgggaaccagaccatcgggaatagcaagtgaaggacctgatgtggagttggacctttttaggcccctccttccatgaaccttgctgatgaacggtctcctgcagcagggaatgaagtatcaaaggatgacgaagactagaatagtatagtttagatgttatacttatgtaaaataagtactgaagtcaagttgtatgctagagtctgtataatacattttggtaatgtatatgatggtgtatgctggcatttatat

SEQ ID NO: 50846 - DNA, 884 bp, Arabidopsis thaliana landsberg
tcacttgagttttgagtaacacgaaattgtaaagatcaatataattgtgggtgttggttttacttggaggatccacgtgctattcattgggagtttgggaccaccctctccattcctagcgtcacatttttctaagtattttaattgcatataagcaagcattgacctattatttctcttcttcgtatcctatatatacatatactttgattttctttgtaatcccataatgtgtttagtcgcgcaccctataatcataatggtgacgagaggttcgagaaaaaagtggtgaagagagtgccgacgagaatgtttttcaaagatcataactgaataactaattttatctataaaagaaaacactaatctattatgttttttcaatggttgatcaattcttttgcaaatgaaaatgttgatccaaattccatacgcaaataaatcgttagatatttttaaaatatatataaaaaaaattattagatatttatcagaaaaagacaagatttattagtgcagaacacacggtgacgttaatatgccgacgagaaaaagaacaaaaatattcgtctctaacaaaaaagtttacaagggtgagtttgtaataagagtaaatagtgatcgcatttgtataggcataactttttatataaagacctcaaagtcttaccatttgaacagaaaaaagctctccacgcctaaaaaaaagaaaaaagagacagaagaagaaaaagataaagaagaatcaaactttgtaaccctttagcagcaatggcgatggctttcaagatggtaaattcaaatttatttttctacgtttaaagattcttgatctgatctttaaacaaatagctaatgatgattcgcaggcgacgacggaaatg

SEQ ID NO: 50847 - DNA, 351 bp, Arabidopsis thaliana landsberg
catgcaacagatagaatttctaattctcgaaacagaaattggttatccttcttcttcaaaaattttaaagcggggggcatcatctcaaaaactaaaactatcttatcaccagttacgtcacaaccacacaaaaagagctagtctaattgagggaaatactaaaacttttctgctgacacaagtatatatttatgatactttttataaatagcacatatttatttatacaccatagttaccgaagaagacttgacaaaaatccaaaagaagacaagcattattaaagatattacgatataatttttaatgcaactatatactatcaaaaataataccaaaggggaagagaaa

SEQ ID NO: 50848 - DNA, 390 bp, Arabidopsis thaliana landsberg
  unsure (1)..(390): unsure at all n locations
ataaaggaaaaacaaaaaaaaaaaanaaaaaataaaaataaaaaaaaaaaaaaatttaataattaaaaaaaataaaaaaaaaaaaaaaagaaaaatagtaaaaaaaaaaaagataaaaaaaaaaatttgaaaaaatataaaaaaaataaaaaaaaataaaaaaaaataaaaaaaaaaaaaaaaaaataaaaaaaaaatataaaaaaaaaaaaaataaaaaaaattataaaataaaaaaaataaaaagaaataaataaaaaaaaataaaaaaaataaaaagaaaaaaaaaaataataaaataaataaaaaaaattaaaaaaaaaaaaaaatataaaaaaaataaaaaataaaatagtagaataaataaaataaaagaaaataaaaaataaa

SEQ ID NO: 50849 - DNA, 1087 bp, Arabidopsis thaliana landsberg
gccaaacatcgtatgatcgaggcataatgaaacccataattatgtttttaagaggtggcattatgatgatttagcttaatggttatgtgtcctcatttcaatctttgggttatacttaatttgtattattagttaatatatgtaaatatgttttccttaatggtattggatttattattaatggtatgaatatgtaaagaagtatttagtggaaaatatatttttctatatcccattcacctaaattccattaattgtcaaacatttagagctattagctatagtatttttatttgatatcaacaactctatttttatttgattactacacttttctttttaatgttaagatttataccaaatattttaaaatgattacaaaagtaaaatcttctagtaaattgaaactacgtaaataaaaatgtttattactttagttacttaaatatacaatttcccccttttttttaattattttttgctaaaccctaaaaatcttttaacggcgtttatcgttcttccactctctccgccgcgttctctgtctctcaaaccctcagggtaacgattcttcttattagaccaactgttgcttctttcgcatcgtagctctgagattgacccattgatttctcaactctttctcagtaatcagattcgattttgtttagtctcagctcagaacaatggcagctaaacctggagccgcaactccaacgtattcacctaaaatcgtcggaagaagtcggcttcctatattcaaagattccgacctcgattggtctcgtcctgatggccgtggcttccaccaatgccgacccgcatgtaaaaacacctttgattcctctaaattcttaatcgttagggttcttcattgtgaaattacggttggattcatatgactccagttatttgtgagactaaactagatttgaattttgtttcttttgtgaaaaatgcttctttcagtacttcaaactggtgctgtgagttctgcttctggttctgcttatgctgagtttgggaacactaaagttattgtttcagtgtgagtattattagattagaaacttgtatattcagggat

SEQ ID NO: 50850 - DNA, 589 bp, Arabidopsis thaliana landsberg
aaacagttagagtagcagcagaccgaagcgagtagcgcctcgcatatccgaccactttagtttttggtgtgttcggtgtgtgtttggatttgccattactcgccatggcaataattaatgcaaacaccatcacactgcgactttgtcgttgcccgatgaacaacagaaatatggtagcagaattaacaatcgaatcttgaattaggcaaagtcaatacagcaaaaaggtcttatgtaaatggggtgaaatgcagtttcgccattcgatacgcgcattaaggaagatgcgtctacccagtgcttctactgctgccgattcttttacttttgccactgctgctgttgtcttccatttcactggtaatggatgacgccagacgtcgggctaagtgcctcaagggagccacctaggtacgcacaacaaagtagcgtcagtggccgtatatgcatgcactcttatgctgctggcttaatgaatctccactcttccgatagttcatcgaatggaaggatgtttattgctgcactaggcacaagcactggagaaagttccctgtgcattgcgcatccctatcgccgagtttttggc

SEQ ID NO: 50851 - DNA, 433 bp, Arabidopsis thaliana landsberg
attcttactcgccgttgccccgccccggcgcggatttgatgcagaactcgcgcgcgcctgcagactgctctcggtctgctacctccgcggtgtgggctgcctgtgcctgtacctgcaggccgccaagcatggttggcgacgcacgcgtgcgcgtctctctctggcgccctcccagagtctcaggctcccacgcgcacggctgttgttgggcggacggaccggcgcggcaaagactcgtggacgcaccgagaaggcgagaacgtctgtcggcctgccctgggcgaggctactctagagagacgaacagcatgccacgcgtgctcgctcggcggacgcaacgccgcgcaggggagagccgaagggcggcccaaaggacggtgctaaacttaatacttcacttcaaaatctctagtacccaataggatccaaggtt

SEQ ID NO: 50852 - DNA, 1134 bp, Arabidopsis thaliana landsberg
ctcgagaagatgacccgactagtgtcgcagattctttagctttgtcgacccgataaagttaaaatagggagagtcaatagcacaatagcgataagtttcaaagcttctttcatggcggctctgagctagttagcttgtttcgatgttgttgtgaagataagtctttagggttttattatggtatcgatttcaagagatatttatacaagcatatacttaacttaatactttattgtaattgtatacaatctgctcttgagctgatacattttacatactcactaatattttattatatgatcttacgaattgactatgtgaaatcatgtgctcttctttttgactactctctcgtcgccaattattcgttcttgggcaatgagctcatgtgatacggtcacgtgacatatgaattttttctgctgatgtaaatactaaatccatatctatacctatttaccacggccggtccaattctgaaaaacaaaattgtgcttttttttaaatatttttttgttaatgtagtcctctaaagtcagttttagaatccaaagttttttttgtttgtttgtgctttggaccggaatacatacttctatacaatatatgtaatattttggtaagagagactaacatatatggtcgaagcgtttttacaaattccccaatgggtgatgggagcctgatgactctgatctacgttttgttggcctgattaatggaacaggtgaaatcgtattgtcctcgaactttcttttcaaccctttttacgttttctattataatcccgagaggaacactattcgtagagttgaaatacgaggatttgaagcatctcagcattctgtagttcatgtctttatagattatgttgagaatgtgacacctatgcttagaacttcataaagtcgagacttgcttgatctgttccttaatataaaccattacttttcatatagacatatagtgttatttaatttgccattgcaagaattggatttcaaactatattaaccatcgtaatcatcatctctcttataagaaaacaactaatgtagatttgaatcaaatcaaactatacatgggatgtttatgtcacacttctcatatacaaagatatataaccaattcaaa

SEQ ID NO: 50853 - DNA, 717 bp, Arabidopsis thaliana landsberg
ttttgagactgagagatcccacttaaaacgaaataaactatttgtttggtcattgcttgcgtaaacgaccacgggaacaattaagtatacataacataggtctagatctatgtgaaagattcccaaacttaagatctctagctagaacattcattgatcctccaatcaaaaaccaaaggaataaaaagtaatctttgtaagggcgaatgtaaaaccgaaacgtaagctagaggaattgatattaaaatggaagtaaaagcgaatattagtaaaggttttggagttaattaaataaagacaaaagatgcaaggacaacgaattatgaacatcttcgaaatacgtttttaatattgttttggcatttgatttgatttgattctccttccacattcccttgttcatatgtgtttgtgtctcacgcaagcactacataagcggtccccctaaatacgtttctagaaacgtcaacgtttattcaatcataccaaaatttacatgtgtattcatcaatcagccgaccataaactacatggtccattagttgtagaagcaacaccaatttaaactgtagtttatggtccgatgatcgaggaatatgtaagtgtatgttttaagttttggtgtgattggatatgctttattaaacattcattacctatactgcaattttctagcttttaacaccatatgtactcacagtttgaatactgtatgac

SEQ ID NO: 50854 - DNA, 515 bp, Arabidopsis thaliana landsberg
taaggataacagcagcttgcgcacgcctgtatgatcgccgtagaggttctgaaacgcgaggagtatatcacgctgtcgatattgagcgtctggagttgttagctgttgccaaaatacagctatcgatacagtagcgtgtcagctaacgccccaggtcactcaacgccccacccacaacacaacagcttcatgagtattgcagctgtaacgccacaacaaatcgtagtaaagttgcgcaaaagtagatttatactatataatagcctgcgaagactttgcgctagtctaaatctttttttgggcggcggattatacgcgttctagtggttttgggtggaactggctgtgcaactacccgggctcccacagaagctgtaccaccctcaacacgctttggacgctttgtagctatcggatgaggttgtgaagccttgcgcttgcccttttgggacaattttataagcttcttagtgttgttgatgagctccggtgttgtttcttggctagcttttcag

SEQ ID NO: 50855 - DNA, 323 bp, Arabidopsis thaliana landsberg
tttcatattagttaataatagttacaactttagttaataagtaactatccgattgaaacaaagtagatcagtaatacaactatatttaccgatttcttccggatattcgcttagggataacatttaatcgaatgttttaagtttcatgagtaccaaaacaagaaaacaaataataacaatgtgaataataatgttatcaagttttgttatatgataccaaaaatagaaaaatttggtagatgacaataataacttcattgccactctcaagttcgttcgttcgttgaatcttatctcacttctcccattatttacaactgtgg

SEQ ID NO: 50856 - DNA, 429 bp, Arabidopsis thaliana landsberg
agctaccaggagaataattaagataagaaatgaaacctagttattttaacaggcagtttcaatacatcggggggcaatgttgaacggaatttatcttaccaatgtgagggtttgcagactcgtggataacgaatgctagtgaaaaaccaacctaaaattgaaaacattgcaactgcgtgagtccttagaggcctatgcagaaatcatatatacattagttagatgaatctgaacatactatagtatctgaatactcacaccaacaaggacaccgatctctattccgaagaacaatgttatggtgctagtgatggtccaaagcgaaaaatccctcttgtccacacgccagaggaaaatagcttcgtcatagtccacctaatgataataatcgcgaaaagtatacataagaaaccagaagcagaattcatc

SEQ ID NO: 50857 - DNA, 477 bp, Arabidopsis thaliana landsberg
tatttctaacatcctattaattcgttggacaatgatcattcagctcattcattgatggttgtgcccccggccggttccatgctggaacattccagaactcccaaaagaatatcaaaatcttgttttctgattcttgttcaacaacgtttcgaccatatcgttcacgaagaagatcaacctactcattgccattgattgacaacgatgaggatgaactaatgaggagtcaatgtccccccccccgcccgtcctcctcctcctcctgtgcctacctgatgtgatgataatccagttttggtattaatgctctgaataattcgcttatcatcattactaacaatttcatgaatcctcaaattgacatttgcaaccgtatctcctgtagctgatgatcgtgatgatgataatggaggtgcacctgttacagttgatgatactggaacatgttcaagagatgatgcgattgatgcatcacct

SEQ ID NO: 50858 - DNA, 914 bp, Arabidopsis thaliana landsberg
  unsure (1)..(914): unsure at all n locations
attggttattgttgtattattgaatgaacgtcttttttcttctaagcaagttatcatttgtgaatagggagtattaaaccgtattgttattgttgtattattgaataaaagggtacaacttatatataagcatttcatattattgaatgaaagggtacaatttatatataagcatttcatattttgtccacataattggggtttagtggtggttgagaattagagaaatattgaaagaaactaaccctggttcgattaactttcaaacaaaaaaatacatgtacgagaagtttggatttgggccaaagatccaaacagtttacacggtaatcagtaacatccgatctgactactttctaacgttactcagaaagtattccaaatttgggaatgacattatagtggtcttttaggcagaagtctactagacttttctcgcttatttaataaactctagactctccatatatagtcttcactaataaaactcttgcaaatatttaaagttttggacacgaataacgaatttaatatatatattttaatcaagttcaggaacgatatatatatttataaaccctgatatattttatatatttggttctccgattgtaatcagtatgttgaaagaacacaaagttctcaattcaaatgagtcttaagtcgacaatttttttgattgaaaataattttttatataagatgtgattctttggctttgcttatactccaacgagaagtaagagcatacaaaaagtaatgatcgaaagcgaatgaaagacaaacgaagcaacacctctttactcattctttatattaatacctctcannnnnnnnnnnnnnnnnnnnntttttcttcacttgcctacagcacctgagctctcttaaaaatggaagaaacgacgacctttcat

SEQ ID NO: 50859 - DNA, 482 bp, Arabidopsis thaliana landsberg
  unsure (1)..(482): unsure at all n locations
cgcctccgcggaacantgtatctgtcgaaaccaccgtactgtagcctctcgcaggagattgtaccggagacgtcgaataaaccggaggggggacgtatgtgtgagttgatgtgtagcaaaggtctgcgtaaatacatatacgcgaatatctctgatcaagctaagttaatggaagagattccttcagctttgaaattggccaaggagccagcgaagtttgtattggattgtattggcaagttttacttacaagggcgtagagcatttactaaagagtcgcctatgagctctgcgagacaagtttcgcttcttatactggagtcttttcttctaatgcctgatcgtggtaaagggaaggtgaagattgagagttggattaaagatgaagcggagacggctgctgttgcttggaggaaaaggttgatgactgaaggaggnnnnnnnnnnnnnnnnnnaatggatgcaaggggttcgcttttact

SEQ ID NO: 50860 - DNA, 423 bp, Arabidopsis thaliana landsberg
  unsure (1)..(423): unsure at all n locations
gttggcgtcctgaatgcaatactacgttccatgagacacctttgaaggtcttcttccatatacatactactaggaatctgcgtgttcacaaaacacctgctgcatttagaagctaatggtatcgtatgaatgctggtaggtggcccttctgtattgctttctgcaaggaaggggattgtgaaaatcgtctgnnnnnnnnnnnnnnnnnnnnnnngaagtctaactacgaaacactcgactccactttcccatccaagaacaagaaatctagtatcacgagtaacagaaggtgcccaacacaaacatgagtactcgaaatcttcagtaatgttacgcaaatcaacatttgcacaacagcttccatagaggatacataggtgcatgcattgtcggtatgagagttgagaaagttgacagagacag

SEQ ID NO: 50861 - DNA, 644 bp, Arabidopsis thaliana landsberg
  unsure (1)..(644): unsure at all n locations
agctgagcctataaactctttctttgtctggttcataccctttggggcaagctcagacaaagtggaatggaataacggatgccaattctaaccaagagtgaaccatgttgttcccatctccaacatacacaaccttaagtttgttgaattggtgttagtatagataacatttttttatgaccttacatgtatgcaaaacatagaacaatgagatcataatacaagctgtgctttaaaatggacaatcttgaatgtcgagattcatgaaataatcttggttttgtttcagtttccttcaagcagtaaatgaggtagaactttttttgacgacatatgaggaggaacatagataatagcaagcagcgggtaaaatggttaactaacctttgtcccttcaacttgaccaatgtgctctatcattgtgagggcatcggccatgatttggcaaggatggttatgatcagtcagaccattgacaactggtacactcgagtagttagccaaatcaagaatgtcctgcaaatgaagtggattcaagtttgttcattcatctttctgaaattggaaagacgtgcaaacttaagcatagaanagagttgaanaacaaatatccatgccactaacatacagcacacatgagaatg

SEQ ID NO: 50862 - DNA, 1236 bp, Arabidopsis thaliana landsberg
cccgccagtttagtttcagtaaattttgacccatgaatatttgggatttatagtggtttttaagttaataaagtttggattttagattttaaattttgcataaaagacggtaaataaatagacaacaaaaataaaattgagtcatatcatattttatacgcagttgaatcgcatgtcttcgttcggagccgcactttagtaaattctctattgattcatatgttgactttacaaaaaaaaaaaaaatagaactatttcaaattttcaatattccttttttttttcaaagtttgaatattactttctaaaaagtaacaaatcttcctcaacaattttctcataaaagatacaatgatgaatgaacaatggagtggggtatacatagaacacacgaaggtacaaatccactcaatctcaaactcctataccactgcaacaacaacacacaactacagaactggtcactactgtcccttcctctcttttgtcggtaaatggagttacccgtcgtagatctgtctagttacctcgacttctccggtgatgaattaggatccgatctactcgaatcatgccgacaagtgagtcggatcctaaaagaaaccggagctctcattgttaaagatcctcgatgttgcgctcaagacaacgatcgattcattgatatgatggaaaattatttcgaaaaacctgatgatttcaaacgattgcaacaaagacctaatcttcactatcaggtttcttcaattaaccatcatcactctctcgattgtgattcaattttaatcgaatttcgtgttttgttttctcatttctggattaagccaaattagggcacaaatcttagtcttatgggaattactattgcttaatgtagttgtgttgtttgatccctttgttgattgtgaaatcagttgaatcgaatttcgtgtttgctatcgaattagttacgagaatctggattaagccaaattagggcatgattagtgaacttgtctcagtttaaagctactattgcttaatgtagttgtgttgtttaaaaattttcaatcttgtgaatgtaaacacaatatttcattgctatgtgttgattttttaacaggttggtgcgacgccggagggagttgaagtgccgaggagtttggttgatgaagagatgcaagaaaagttcaatacaatgcctaaagaatacaaaccacatattccgaaaggaccagatcataagtggagatattt

SEQ ID NO: 50863 - DNA, 738 bp, Arabidopsis thaliana landsberg
ccgctaaaccccgccgaggtgcaatccccccgtaggagaaggcgcaaagtgtacgcttactttcttattcatccagcaaaagtgttgaaggatagaacaaggaacaaggagcagattgttcaatatccctcatctttgcctcatgtacctcatcacctctccctggtggctccgggccctgtatcccgcctttacctggcggatgccgggagatgaaaaggtgatctatcttacgtttgatgacggcccgcacccacaggccacaccttttgtactggaacagctgaaaaagtttcatgcaaaagcgagtttcttttgcatcgggaagaatatagttgccgaaccggatatttaccggcaggtacttgcagaaggccattctgttggcaaccatacctaccatcactataatggatggaaaacagaagatgccgtatacatggaagatatacgaaagaccatggaactggtaccatcaaaactttttcgtccgccttacggcaggatcaaacgttcccaggcaaaacagctcctcgccccgcagttttcgctccgcaccatcatgtgggatgtgctgagcgccgatttcgacacaagcctgcaaccacaagcctgtttcaacaatgtaatcaaacacacccgcccaggctccatcgtcctgttaaacgacaacgaaaaagccttcccgcgcatgcagtatgcattgccgcgggtgctggagtattttagtaaaggggg

SEQ ID NO: 50864 - DNA, 909 bp, Arabidopsis thaliana landsberg
  unsure (1)..(909): unsure at all n locations
gcataaatatttcactcttacagtcgtcaaaagtatgaatgaactctacatatcggcccaatatgaaccaatttgtaagaccataatggaaagcccatgtttctcttgtgcttgttttagttgcagaatcattagttcacatattgaccggattatattagtttttaaaaacgcatgtatgatgtagtcactgtatcatacccaagttactgtattcattacccaagttcaaactcgataaaatgcataaactaaacatacgttctttagccttttgttttcacttcaattaactcattttgtgcgttgtatattttttttctttccaacagctacttttctcacgtctatattttttaccgtttgtgatttttgagtctcaaatatatggaattgttttttttaaatggctactttccaaagtcttatattttttaccgttgtaaatgttcagtttcagatatatatggatttctttttctaatggctacttctctaacgtctatatcttttaccgttgtaaattttaaattctgaaatatattaccgtttgtgattgagttcacttgacacaccttcgttaaaaattacacaacaaaaagcgttcacaataagcccaatgggcctaaaagaccctaacaatcgaacatacccttctgaccaacacattttcttaaggagacactgttggtccatttactcatttaagtaggattcataacacttgtcatggtcgtcatttcttgttcaaatgcctttttaagtaataacgcaatggaagcatatatatactttaaacccacaaattaataatgcatatgtatctatttttcttgcatatactaaacatgtctaagtatgatataaactctgacacnttggtggtgctgagtaatcatcatatttatg

SEQ ID NO: 50865 - DNA, 692 bp, Arabidopsis thaliana landsberg
tgataaaacaatacgaaaaatggggaaaagacacgattctaaacaactagaaataacattgtaaagagacataactgttaaaaacaatttctaactaataaatttatatatttaacgaagagtttcaatataagaaaatgcaaccatcaaaactatttattcaaattaaaataaaaatgttttacgaacgattttgaagaaaagacgaaaatagaggggaaaagacacaattttaaatgaccagatgcaactttgtaaaatacaattgtacaaaatattttttcaattatgaaaaattaaaataaaatattaatggagggttacaatgaaaagaaacaaccataatatgtatttattcagatttaaaataaataaaaatattttactatccgtaacaatgaaaagactcaaccatatgagatatttattttgattttttattatgtattaaatatttaatgaagagttacaatgaaaatatttaaccatataaaacatttgttcagacaaaaactaaaagaaaaataggttacaaaaatattacgataaaaagaggcatacaggtgaaaaagagttataatctaaggacgctactgaagataatatatcaatggttgcaacagttcgtcacataaataaatgatacaatggttcataaaaaaaaaaccaaaaattgcaatggttcgtcagaa

SEQ ID NO: 50866 - DNA, 1133 bp, Arabidopsis thaliana landsberg
acctaaaccgaggagtccaccagacatatgacttgttgtcggcaacactttggtttttagttaagattaagcccaatagcccaatataagcccattagtgtaggccctattaagtccatctacactcgaaaacttcatcatcatcttcaaggtttaagattggcttcatgaatctccaatcactgttctcagatgattgtctaatcttatctgataaaaatcatttgcttccataattgttactgaatcgtgcagaactgatcaatcacgggtcccaccacattgtttgtttcaagaagctattaacgtcggctgattccaaatggtgatgacacatttttcacgtctccgacaacttcttcttctccaacccaaattcctctcttctcaacctcgtactatccgttctcctcctccaacatttctccgatcattgatgggttcgaattgttctttctcctctacttcctcgaagcttctctttcgtcaactctttgagaacgaatcttccacctttacttatcttctcgccgacgtttctcatcctgataaacctgctttggtatgtttttgcttcctaaagattgaatttttcgacatgggttttggttttttcgtgtctggtctttgtttttcgaatcctagttctgatcttcatgatgaataataggaactggattcatttagttttgaaaagatcatcaattttggatcaagttatgttctttgttcatctgatttgttgaatttggattgttttatgtgatgtgatgagcagttgattgatccggtggacaagactgtggatagagacttgaaactgattgatgagttaggattaaagcttatctatgctatgaacactcatgttcatgctgatcatgtcactggtactggacttcttaaggtctgttttctcttgcttgatgttatttgtttatatttccatggttttggtttaaatcgaagattcagtgatctatctttgtttgctccacacagacgaagctcccgggtgtgaaatccgttatttcgaaagcaagtggttccaaagctgatttgtttcttgaacctggtgacaaagtatcttatgggtgatatatacctttggggtatgaaaacccccaattttc

SEQ ID NO: 50867 - DNA, 498 bp, Arabidopsis thaliana landsberg
  unsure (1)..(498): unsure at all n locations
ccgaattggcctggtaatcagacctgttgcttttgtagcagactggagacaataaatcacctgtttttcaggtgtacttatgcgtctttcatctggcgtttggttcagataagcacagggttgagaccacctcgggatgcaaacgatttgtttggggactgggcaagggtgctatcagtcaaatcacgtcgtttactactaactgcagcatctgcaatttgctgggctatttggttaagcaggaatgatgtgactttcaataaatcttctcctagatcttgtctgcaggtaaccttcagggcaacatattggtgtcgcttctgggcacagctacagcttaagatggaggaccaagagttaataaaatcttcatgtcgcaagatnnnnnnnnnnnnnnnnnngttttttcgcaatttcggatggggagctgcttggcgattaacgttgtagtacctttggtcttgtcataggtggtgatgggtgcagtcatgtgttttg

SEQ ID NO: 50868 - DNA, 388 bp, Arabidopsis thaliana landsberg
  unsure (1)..(388): unsure at all n locations
tcgaccatacatatctaccatacaaccgtaatgtttcaagctcggtgttatcccataatccgtttgcatcatctcaaagcaccattgaccctcgtctactaacccagaatggctacaagccgataacagagtcacaaatgtaatgtgatctggcttcactccttcatccagcatttctttgaacagcatcactgctttctcgccatgcccgtgaaacccgtgacacgctattagggtgttcatggcacagagttgactcttgggatttgataaaacaaagagagggcatctctagtcgtcacactttccatacatatcagcaaggcttgtaacaacaaaaacatccaaataaagnnnnnnnnnnnnnnnnnnnnnnnnnagtttcata

SEQ ID NO: 50869 - DNA, 823 bp, Arabidopsis thaliana landsberg
tattatttaaatttaaacttcaaagcctgagagactgctccagatttttccttcttaaatactaacaattgacaacaacaaacaaaatcatcgacaccaaacaagcttatataagtttcagatattaacctgccaaaaattccaaatggccagtgccagatgcacgatatgaaacaagatcacctaagagtcttgcaactgaacacacttcgtcttcctcaataacacccctgaagcagacaatcaaattctaagagtctgaactagtaaagttgctataaatctccagaaccaggacaaatgagtataaatgatttcagtattaaatcaggaaaacaaaacttgcatatattcacgacgtccaagacagcacaaaacttcacgaattccatggtcaaatacttcctggtagtgagctttccaggcatcatcttgggttgcatagaaagaccgccattgcaatatatctgatcccgtaaagcattgtgccagcgcaacaaagcaaacagtgatcaagaaggcaacctgaagtgtttgcttgcacccaccattgtccggagataaccctgagcaaagaaggtactaaagagactcttaagcatgaaaaaatgcatagaaacataaagatatgccatgtttaacccatacaaagatatatctcaagattataaatggccaagtctgtgactttagacatagcacatgaatgtaaaatgtgttagcttacctaaaacgcaattgcttggcaatccatcacgggaaacatatttggcgagacggaataaaaggtaagtggcaccaataaattgcaatacagtaatca

SEQ ID NO: 50870 - DNA, 1109 bp, Arabidopsis thaliana landsberg
  unsure (1)..(1109): unsure at all n locations
gagaagaaagctttggctctgaagttaacttacattgtttgacttttccattcacctccatcgcacaattgctgatcccgacgttaaaccggctccaaaaccggatgtcgctatggtatgtcctgctttaacttttccgcttctcactgcctcatcaagagccagtggaatcgaagcagcgctcgtgttaccgtaattagccaaattcgatatgactcgctctggtgggaaatgcagccttgtagccacagagtctattattctctggttcgcctgcaaatatatttcaaaaactatctgtttaaccatttttccagtataaaagtttaaaactttcgccatttcaactcgaatttcaagtccattatcaatggaaactgaataatgacaagtatactgatagacatacgaaagctctaaactttcccccatttaagcttgaattcatatctactatcgatgcaacttgaattaacgataaaattctgataagaaaaataacctggtggaggaggagccagtcgatggcagaagcaggaagaccggctttttgtaaagcagactcaatagattgaggaacacattttacagcaaagcgaaagacctcttttccattcatctgaatacaagaatatgaagattgttttggtggaaagtctccaaacactgagccattggagctcgattcaccatcattttcggattctttaacagaagcattcaaatgtctgcaaaaacagagaatcttacagtgggttcttgagggaaaagaagatggatcttaagaggccaaaaaactgaaatgtgaatctaaataccttcgaccgtccccatcgctgtgcacatcaaaactgaacaaaccatcatcttcaatatcacaagcctgcataaatgaaagaacatttctttaatggacaaagattgatcttttaagccaaggtttgatttgcaatgtggcaagcactcattttctgattatgacttcttgtgataatctactaaaggttatactctgtttaagtaattcaatgaaacttatataaanctctgtaaaatagttcaaagcttcataaggcacggtacctgaacancctcagcaccagcagcgt

SEQ ID NO: 50871 - DNA, 457 bp, Arabidopsis thaliana landsberg
cccattgtaatctttgtttgagggtttacttccatcatgtgattgtgatcggttgatggtagtaactgtttgtttgactttgtctacatctggaaacgttcttccttgttctgaatttgtcattttggtactctctttatctgctagagagaggaaattattactatttcaaaattgaagacaaaaaagtgagacaaagtgatctcacaatacaaaaaaacttataaattatacaatatacatgatgggtaaaactataaataaatataatatatgaagctttaagatattacaagggcagacctggtgctgtggtgagagctgtctccatgagtcacaaggcagtggatttcgaacagcgtctctacatttgtgggaggtagttttttaaagtatgcttgcatagactagagcgttagttgtgttgaggcacattgatgttcagatcctatatatg

SEQ ID NO: 50872 - DNA, 614 bp, Arabidopsis thaliana landsberg
  unsure (1)..(614): unsure at all n locations
ttaaagattagcnccgctctagcaggactacaaggtttttagagtgaagttaacagtttttttcctttccatatggagcaaaaggaagcttgaaaagccaaatgaattacaagtggtacataccttgttgagacagtacgggtctttgatccatttaatcccatcttcaaaaaatagtggtggagaacgacgggcttaagatgtaaagaaagatcaaacctcatgcgactgagaaatcaaagattaaatgctgagctgatccgtcatgagacaatggaggcatacatatgaagtctttatctagtatacctaggcaacaaatacgtacttgggattctttcccttaaaaccaaactgcttcatgccaatcaacttcaggtccatgagggtttaagtgatgccaattgccaagtttcaaagatagagaatttgcaggtctgtcttttctacttaactgatgaaattttatggtcttatagtcttaccctaataattaattattgttacatttggtagaagtttattcaatatataaagcagatgttacaaaaataattatgtttaataaaaaaattaaatatcctaatttccattaaaatccatctttaattttg

SEQ ID NO: 50873 - DNA, 1030 bp, Arabidopsis thaliana landsberg
gcatgtgtatactatgaagcattgcagaacagatgcttcaaatgcttggagaactgcttcttgggtcagaatcccttatccatttcaatgggggtttccaaattttcacatgagaacttctattattatgatctttgtgtctttggttgcatcagtggactcggtatgtacttgttcctctttgctattcctgtttttctcctaaaggtgtggtcttacggctaaaatgttggacttggtgcacttgtaggttggaacatatcattctgcatctatgatagtgaatgctaagcgcccgacacggggaattgtcagtagaggtattgcattagaaggcttttgcagtttattagcaggaatctggggttcgggtaccggatcaaccactttaactgaaaatattcatacgatcaacatcactaaggtggctagcagaagagctttggtgatcggagctatgttcttaatagtattgtcatttttaggtaagcatcatccaatgaatgatccaaagtgtaaaactttatcatacattttacaagaaacttctttaaatttgacaggaaaattaggtgcaattctagcttcaataccacaggctttggctgcttcagtattatgctttatatgggcactgacagtgtctctaggtctatcgaatctacggtatacgcaaacagcaagctttaggaacataaccatagttggagtctcattgtttcttggattatccatccctgcttacttccagcaataccagccgctatccagtctaatactaccgagctattatattccctttggagccgcttcaagcggaccattccaaacgggtatcgagcaagtaagccactttccttcccttgccttgattagcattttcctggacaatgatgactgactgactcttctaatgcgtactgcagcttgattttgcgatgaacgcagtgctatctttgaatatggttgtaacctttctactagctttcatactggacaacactgtacctggtagtaaggaagagagagg

SEQ ID NO: 50874 - DNA, 436 bp, Arabidopsis thaliana landsberg
  unsure (1)..(436): unsure at all n locations
ctttgccgggtcttccacgcagccagcgagaaacttctccagcatgtatgaatgaaactccaaaacttgaggtcgtttaccaaaacttaacatcaactaactaaatcatttcatatttcagtacatagacacaagaacacagaaggtatcagttttactgagaaaaaggttcaagacacctaactgggttaaggtattgctgttgtggtgtggctaatcttcttagagaagcattttaccagtcattgttttctaattccaaatattatgcagcacaaggagccacgagaggttcacatgtatgtcgatatgtttcttcacgaggtttgacaactcttctcctcgtaacctggaaattatctaaagagcatgcaataactcatatttgtttggattntctacttcgcagntagaagacgttggtaatgaagtgaac

SEQ ID NO: 50875 - DNA, 100 bp, Arabidopsis thaliana landsberg
cgagttctcccctcacgtcacctggttccatcacagtatatcttaccagcagctcactaaaaatgagaaagagattacttttacctttaaatgtctgtgt

SEQ ID NO: 50876 - DNA, 617 bp, Arabidopsis thaliana landsberg
ttttttaaacttgtcactgatgtgtttatagctagatgaatgcatctcttcgaataaggtagagttataaagattgaatactgaataaagaaaaagatgggtgagatcaaacgcaccattaaactttttatttactcaattcaacatcatagataggtctataaatcaaaacattcaaaaattcataatgagtaagaatattctagaatatggcgctgtctatatattttgaattttcctattaaagttgttttgaaaatttcaatagatatcttcttaaagtcaaattggtgttatgagatcataaatatatatgagaaagaaaaaagaaagaattaactgattctatatttagattgtatcaaataatataagttttattgttagtttggttgaacaatctcacaaaatttcttgatctcaaggattcatctttaagaaaggataactaatttcatttatcccattagtactaggctactagctaacctaaaatattctttctatgatttcgatgtacatacaggttatgttgatagaatatgtgtgacatatgtgaagtccggattttggattcttttaagcgttatgtgatttatttaagcaataaactatgg

SEQ ID NO: 50877 - DNA, 762 bp, Arabidopsis thaliana landsberg
ttttgtcttaattaaaaaaaaatcgctcaaagtctaaagttacagtcaaaaaaaaaaaagaattgtctaaagtaccaccaccaacaacaaaaagttggttttgatcctcaaaagtaattttcatcgagatcatgaattattaaaagaaaatgttatgtatcttttttcgatttagttttatatcgaattttagctttgatgaactcaaaacacatgtttgaaaatacgaaaatctcaaacgtagaatcaaatcgttttgtgatttttaaggatgatcgatcacgtacgtaatgtatgcttcattagttcatataacttatgattagtagtacgtcgttcgaatatagatcagtcattatcattagataagccatctttctacaaaaaataaagtggctatattgaaaaagtaattaaaaagacagttgaacaacattttatgcaaagtgtgttacgatccgtacaataatcaattaataaaacgctaagacttggtcttcttaaatactagtgattagaaaacgacattagtggagtggatgttgaacttgaattctcgaattcaattgagcctaaacgttgacttttgacttttccagtcattggtttccttttcgatttcctaatacctttttttgtctccccttgtctctagtctttgttgtattcataattatctcatatagtaaaaatgaatgtaacactactcgataatgcatctacttttttttttaattggatatatgtctatattagaagatg

SEQ ID NO: 50878 - DNA, 914 bp, Arabidopsis thaliana landsberg
atgtcagtatccaccaacacatatatacggcatataaaagattttaataaaaccttggaactatctatatctattcagacacacacgtctatatatatatatacactcatatactactttcactgtatcattcttgttttctctaaatttttcaaaaaacctttagaattttcatttttttacgattccgatgttaactgtttctccggctcccgtactcatcggaaacacctcaaaggatacttacatggcggcagatttcgcagattttacgacggaagacttgccggactttacgacggtcggggatttttccgatgatcttcttgatggaatcgattactacgacgatcttttcattggtttcgatggagacgatgttttgccggatttggagatagattcggagattcttggggaatattccggtagcggaagagatgaggaacaagaaatggagggtaacacttcgacggcatcggagacatcggagagagacgttggtgtgtgtaagcaagagggtggttgtggtggtgacggtggttttagggacaaaacggtgcgtcgaggcaaacgtaaagggaagaaaagtaaagattgtttatccgatgagaacgatattaagaaaaaacctaaggtgtgtttatttcccaattatccatgttagattagtttatttttttttcttctttaaaggtaaaaaatcccattaagaaatcaccaacctttttaaggatttcattaaaaaaaacataaacttctagtgtttctgaatattttttttacaaagttagtgaattagtgtatttatcatatacacaattattattaagtttgataactggagtagatctaggaccaaaaccaagttttgtgtagtaggactatacaaatttgtgtgtttatttggactt

SEQ ID NO: 50879 - DNA, 707 bp, Arabidopsis thaliana landsberg
tgctagagtttttgtacagggatgaagattaagactgatacaccaatagcgaagaaggcgatttgttttagtgatggagtttttgttgatgaatcatcctttggattgccctatttgtgaccaaggaggagagtgtgatcttcaggatcagtctatggcttttggatctgatagaggacgttttactgagatgaaaagatctgttgttgataagaatcttggtcctcttgtgaagactgttatgactcggtgtatccagtgtacaaggttactaatatagtttgcttacagtgtgatgttttagttaatgtgatagatatgctatcctgttgattaggttttgtatgtataatgtttttgtaggtgtgtacgatttgcttctgaagttgctggggttcaggatcttggtatactaggtcgtggtagtggagaagaaattggaacttatgttgaaaagcttatgaccagtgaactctctggaaatgttattgatatctgtcctgttggagccttgacttcaaagccctttgcctttaaagccagaaactgggagttgaaagcaacagaaactattgatgttagtgatgccgtggggtccaacattcgtgttgatagtagaggaccagaagtgatagagaatcattccacgccttaatgaggtatgttatgcttttgttcgacgacggtatgttttttataaataattt

SEQ ID NO: 50880 - DNA, 418 bp, Arabidopsis thaliana landsberg
  unsure (1)..(418): unsure at all n locations
aaagcgcgctcgtcgtcatgactcgaggaagaagggtgcgctgacgctttggccccacagcgcagtnccacacgagtccgcagagcatgcgagtactgttccgcccatcggacccacgcgccagtgagctagcgcgggtgaggagagtcactgacctcgtgtccccacgcgatagagagtgggcaggagaggactcgcgcgtgcaacagtagaggagttgggccgcgcgcatgaaagtcccagtgggccgaactgggtaccaacccaggtaaggttgttttctgtttttcattttatttcgtgttttattcgatttttgtttcgaattccaaatttgaattttgaaccattttaggagttcacatttgggtaaaattacaaattcagatccattatagaaatgtatattttattatat

SEQ ID NO: 50881 - DNA, 588 bp, Arabidopsis thaliana landsberg
ttatatcattttatgaatcgctttgagactagagagcttagacaatatcagaattttaccgaatcaagagccgtattgtctccagtcttgttgttttcatctattcttaactaaacacaattaaaatgacagtgaaagttttaacttctatcctatattaaacttttaaatttctatgattttgaatatgattatgaaatttaggatgtaatttcaacatctgctgtgtgtttatgaatagttttaacttcacaataaaattttgattgggaacatatttaactgtacaaaatattttaaaatctgaagcaagagtctttaaattgatttaatatctgactgctaattagatttatatttgacaccgatgaaacctactgaaaaaggtttaagatgggaaattttgtattgtgttctcttctcccctaataattaaagagatggagaaaactatgaattagtagtcgtgttttggcaatttaggatctttgaacatctgttaacaaataaactgttgatttcatttatgtggcggcagtacgcaattttcaacttataaggcaaaggaaccttcctcaaaatcttggt

SEQ ID NO: 50882 - DNA, 264 bp, Arabidopsis thaliana landsberg
gcatgatgatgatgaaaagagtatttacctgccacgctgaaagtttctacacagttccttcctcatactcgcagctaaaaccttcgaactgtgtacgtatgtgcgtatatatatatgtagttttgcttctctcgagaaaaatgaagaagcgttagattgacgaagagtgcatcaacagaacaaaaggaagtctctatgtaaatcaccatattacccttacatatcttcaaagtatttacggttattaacgcacctccaatacac

SEQ ID NO: 50883 - DNA, 1094 bp, Arabidopsis thaliana landsberg
ataaatttgataacatcttccatcatgatgtcgacaggtttctttctgtccttctgcacagaactttcagggctggtgggcatttctgacatggtcccttcgcctacagggacactgatgctagcaggtgaggcaggctgaaaactttgagtattctcctgagtaatcacaggagtttctacagtccctatattctctttccctttgggagaatcgtcatctttcttaaccaaggccaacgcggatgctaatgactccctcattttagacctcaccgactcatttacttcctccatcgctttcactgacctttgtggaggagggacatgctgcttcttgtttacaaccggctttgccggtttctggggagcggattctgtttgcgtcgctttcttgccatgcatcagagaatgtagtgtctcttgagaaagtattttagtaggaatatgcagaatcccattgcttgctggagacaactgctgtaaccatggtctaacctgcttgtttggtgcctcggatgcagaaccaccaccgagagtggtctgaggtagtgacttgtgctttcctactagctgcatggacccatttatctcggccatctccatcaaagtttgtttctttacaaaattcggattccgcagagagagagagagagagagagaaaggctcaagatgacttgaacatacaccttaacagctgcgaggtaaacaaacagaaaaagagtcaaaattacagaatcaatttctctgctcgtatcaccaaaaactaatttcgagatctcaattagacaaccgaatcagctaaatcccatgaaaattcaccaaaatcgaaagggcaatgaattcaaacacagattcaaattaacagataattgaattcacacgattgagaatatcaactagatgtatcaaaaacaaagaccagagacccaaagattcaaccctaaaagaacagatacattgacgcatctcgcggctaatcgcggacagagatacatacctgaatacaagtttgagcaaaaaaaaaaaagctccctcgtatcggccggagcttgcagatgcagagattcaggggaagacaggagaaaaggaag

SEQ ID NO: 50884 - DNA, 1204 bp, Arabidopsis thaliana landsberg
  unsure (1)..(1204): unsure at all n locations
aatgaccaaagttgaatgaaatccaactattgactaagctaacgaaattctggttttcttgaaaacataccataacaaaaatcccctcgcggcgagtgggaacttcttctagcttactcaatgtttcatctcctttagtaactttaccaaacacagcatactgttgaatacctccaatcttattactactagtcatcttaagataaagccaatagtctgcgctgaattagcaatctgacctggcgatcaagatgaggagcattgccaagaagcatcgaaaatgaagattgtgcactgtttggatcgtcatatctaccgaacaaaaacaaaatcacggaaagacgaaacatcaccatgcaattacctttaccaaaatgatatgaacacaacaaaaagcaacagtcacgagctacacgaggacattcacagaacacatataaacaatccaagctacacaagatcaaaagataccataccttcccatggaaagagtacctctgacatgcttaacatcactgaactctcccacaattttcttctcagcttctttcctttgctcctcattcattggagctgatcgtncactcgccacatccgcaacttgagcaacaaaacctttatcaacctgcaaaatgactcacacttagccccttcttccaaaaaaaaaacaggccagagatgcaaaacttttatcaaagcttgagcctttaagccatataccctgaagaaatgattagtgttgtatcctcctaaacgaacaagcttgaagatgtgatccactgtcttgggtgccacagtgggatagaacccaaattcgatatctccataactagtctgcacaaccattatcatccattccgaataccattaacacatttcaagttcctggaacatgaatttgggtagaaagttaaagaaaactaaaatcgattttgcccaaattcaagttgagagtttgatccgattatacactgtaaagtttcttttaacacaatcaaatcaaataacggcatgaactatgactagggttaaacttagcagagaagaggagacgagaaatgaacctggaagacgacacgagccgagccaagttctggttcatgaggcagagctttagcaatggagacaaaggctaaacaagccaaacccaggatcaagtttctcgtgattcccatttgcgnttagaaagtggcgccgatctaat

SEQ ID NO: 50885 - DNA, 569 bp, Arabidopsis thaliana landsberg
attactacgtaaaagacaacttgtgcttatacactaaatatgagcttctagagaagtaggcctcctttctgagtgatgttgtatgtttgctgtgtagcggaggatgagtttgacatcgattgtggcggtggagtctccttcatcgagcaacgctccctctagaaaaaccattgatcttggccatggaagcgacctcatttacattcagaggtttcttccatttcaacaatcttggactttcttcgattatctcgacaagcatattccttggaccaggcctactattcgtgtctttggtcgatcttgcctccaggttttcccacttcctctttctctgtcatttgtttttgtatacatatgatccattgaagctttattgtgtctcctcgtgggttacattgagtattgtgcaatgtgaggaacaaagattgccagggccatttccatgcttggattcaacttgtatctcagaaatctaagtcacaatcatgtgaagtcctgtataacttgtgtttgtggccttctaatacatatgcatttgccacctgtagctgagagatcttgttatg

SEQ ID NO: 50886 - DNA, 426 bp, Arabidopsis thaliana landsberg
cgataacaaggaaacaacaactgaaatgttcttttctaaagtctcaaattaagatgttatccaaatacatttgagaactaattacaaaatgatataacattaataaacaacaaacaaaataaagccgaaaaccaaaataaaaacaagaaaataacgaaaacaataaaaaaaactgcagagaaaaaagccaaaagaatagctcttaaattctctcattatcatctctttacaaattcttccttttttttgttactcttaacgcttttttcttcatcgtccgattgtaccgtcactaagatcgagccgccacgtcatttatccacaacaccttaaaaatctctaaaatattcacaaaatcagatcgagtcgccacgtcatcaaagactcgatccaagtcgactcaaccgagtgagttctctctactga

SEQ ID NO: 50887 - DNA, 1128 bp, Arabidopsis thaliana landsberg
  unsure (1)..(1128): unsure at all n locations
acgagcaggttggagtccgagaccgagccgcttcagtctctatgaccttacaaacttgaaatttttggaagtgtgtcttctgctttgtgtatgtatcaatcaaatattatatcaaacattgtcttgtgtattataaagattagtgccttttgtggaatttgtatctttttatttcgtgaaaagaaatttctcaaacttcttaaatataccattttcacatttgcttaaatataccattttcattttttcactattgataataataacatgttatttatcataaaaaataaaaaaatcacgacacgtgaatgatgtactgtaactatcaaagatttgacgtaccacatactttctgtatgtttttgatcgaatcaaaaataattatttttgtccttttttgttttattgttattttataatgtaatacttttactaaaataatttttttaaaaaactaaatttctggtctatataattttggccaaatatgtacatatttaaaatccagagtcaaccatttaacaaacacttggaaatttaatttattattatgccctgtntagtagaaaatccattaaaaattacagaaatggtctgcgtgtcgcattgaaccaatcatatctcgacatctgtaaatacagttggagaagattttttcttcttctgctggccaaaaaaaaacattgcattaaaaagggttcaaagaaaaattctcaaattctctaacaaagagctctgagatttttggaaatctgaatcgttgttcgaggtatgaacttttggatcactctccttgaatctgctctttgattcgatttcgtacttgaatttcgcaattttggagttttctctcgcttcgttatactgatcgtttagggcttgaaattgaaggtttaatgttaccatttccggcaatgaacttgaagaagtctcgatcggaaaactcatcagttgcttcatctggaagtaagattgaggagcagactgagaaatcagctgaaccaacaaccattaaggtaaacctcactaaacctaaacccggtttcaattttgctttgtggtctctctttaccacacagatcttatcattgaattctatctcttaattagggttttagttgagaatct

SEQ ID NO: 50888 - DNA, 859 bp, Arabidopsis thaliana landsberg
aatacgatataaatacttgtaattgatcgatatttactgtattaggaaaagcaatgaattatgaattatgaattgtgcgatgatcatccaagcaaagcaccgccagggacgtgtaataaggtagacggtgctaggaggtgccgaacgagttgttacaacgaaggttatggtggagcaaattgtaatttgaagggaaaagttaaagtttgtgaatgcactatacttagagtttgtctaccccaccacaagaggccaccgcatgtaccgaagccaccaaagtgaccacataaataagttttatttaatttatttaccatgttttaatttatattttaaataatacaagtacaacaaccttggtgttggaaattgtttttgacaatacaaatttcgactattgttatggtagattttttggtgaagcctttcattggaatgatcgggtttcgacaacaatggcatagtctttacttctagagtcagaaaagatagaacggctcaaaacaattatcttttttcacattgtgttcatcagaaataaaagagcatctacgttaataaacttcacagctccgtcgttttgtctccactgaagctcctcttcccacctgcaaatacaacaaggccaaacaagtaaaccacaccattccacaaacataaaccatactctactatcaaaccaaacagtttataccaaaccataaccactcttagttcaaccaaaccgaataaccttaatgcctttaaatgggaatcttaagtccaaatccatttttcattcattaaaacaaagaagtaaaagagcataccaatgttatagctcaacgaccagggttgagattaaagagcataattgtcc

SEQ ID NO: 50889 - DNA, 720 bp, Arabidopsis thaliana landsberg
acatggcaatttggtggttctttcacacataattagaacttgtaatataaaagcagttggttgtaatacgagccagcgcttaagggttttggtgggaggatctagtggttaattaataaaatccctttgatattccctaagcacataatcctaatctgcccaccactactacgaaactctatttacgatgaatggcctcactagaaagtactaaaatcaaatcatgatatattgctcataagtacatacgagtagattaaaatatttcaattatctacatttttgagtctatcagacagacaatatatgaagagttctatgatgattttagcaatctttcaacttttacgatttgatattgtttggtaggattcgatcttaaaaatattgaaatggatgctgtatggatctttaatccatgttcaattattaaaactcatatccataatatcccacttatccgttttgtgtataatcaatgtaagaagctaaacacttttgttgtttggtcagaacataaaaattggaacaaagtatcaatggccagaaagtgttcgtttagcaagagaaccaccgactacattctctaaacgtgaaatatataaagccaaccgagaaagaaatgaaatagaagatcgttgggcaattcatcagatgggtagtaggagatggatgagagacgagttgtcgaagccgcataaacttgttcaacggagttac

SEQ ID NO: 50890 - DNA, 462 bp, Arabidopsis thaliana landsberg
  unsure (1)..(462): unsure at all n locations
tnnngtatcatgtatggtacctggaagtctctgacaggtactgctctgtggttacaacactgccctccggtaccgttttttccagcttgtttccattggcatcatacaggtattggatcgtgcctttgttgcctgattgtccccgcaccgtaatttgtgacggaagattcagatggttataggatatcccatcacttccgctgtagtcgactatatccttattcagatctcgcagcaggttgccattggtatcgtaagtgtaatcctcggctgcattggtttttgtaccgcccagtgcagttatatatacctgtgagctcctgaaatctcccaaagttgtctgcgcatcattctgtccatcaatcacattcagcaactaacctattagtgataaagataataaatagataatctattttgccagtttttcaatgttgtttattactcatcagtagcataatt

SEQ ID NO: 50891 - DNA, 780 bp, Arabidopsis thaliana landsberg
gctatttattatttttccaaatgatcctattttattaatgatttaaaaaaaaatagaaatagaggattaatttgtgtcttattcaattatcacattttataacttaaattaaaaaaaaaatatatatattttcaatctaaaaaaaatcattttgcgcttatgtggtaagtccacaattattctcatttttttttctctttttaattctacaatccttttggccaaatacatttaattacaaatcttctaattttcataaaattaattgccaaacacacataaaagtttttttaatatttaatgttaccaaatttcgatattttgaattttattaatgcgatagctggtagacaacacctactgtttaatttaattaactaatctacgtttgaatccaaacaactttatatagcattgatgagaaattgagaattcattttaattggcggtatatttagtcaatttaacgttgcctaatttctttacaattacaactaaaagttcaaaaaaataattaagaacctaactctaattctctatcctccaacaaaaacacgtaaatatcataattaactcaagttagtataaatatgtgaccggatccgaataattggatccaccggatcggagggaaaaaaaacaaacccgtgacgccattaacgaaggtcgagcttgcttgacaccacacaatgcattctcctcgtaagctatttcacgcgcggtcatcactcgccacgcgccgatcaacggctcttgtcgtattaactttcctagctattg

SEQ ID NO: 50892 - DNA, 643 bp, Arabidopsis thaliana landsberg
agttattttacacaaatccgaatagccgcgcatccagctaaatagctagttttaaaccacccctcaaaaaaaaaaagaatttatatgtggatatatatatatatagttctactattaattgttagttttccatctttattatttctattattttcgcttattatagtgaagaaattgtttgcatcaatcaaagcgagcatttaattataacgtaagctcttcaacattcaactactcaaccatgagtaacatttacaagttaggcatacatctgaatatagttagtagttagggacaagttattaatgattcgtactgcgctaaatttttgaacatacaattttgttggtgcaattgtagtaacaaaatactgattttaataacacttggattcatgttttacttattccaaacatttgtctatatttatgtgtgcaattttttttaatttttttatagatgttaaacatgtgtgcaaattaattaatttatgttcagttttttgtttgttcgatcaaaattagtgtcacattcggcaaacgctaacacggagcacataacaattttacaaaatcatagccaaaaaatgtccaaactctatagaaataaagcaaatgtggtttctatccatttgtctatgctc

SEQ ID NO: 50893 - DNA, 628 bp, Arabidopsis thaliana landsberg
  unsure (1)..(628): unsure at all n locations
aaatcacaaaacactatacacgacttaaatggtaacaaaaaatcaggttgacatgcattttattcaaaagtttcttgttaccaataaaatttgttattttagaagcttgacatgcatactttatgcttatgaatatattacacatgcacgtattataccatgaccatacacatatgtataagatatatgtgtatgttcattttcatctctacagtaattgtagtcaatgatttgagaaactcggttttcgaatccctttttttttactgttttttttttttattgtgtaattttttgtaagagaaaaataaattaactgacacaaccataaatacaacattcaatgactgaccaataacatgctacggatacaaactatgagtaaatagcaaacaccacgtatgcatgtacaaaataagtagatagattaaatttgtatatatcactcaacaaatagtacacattagagaatttaatagtcattatcaatcaatcctatacaaatataaatatcagctttagcgccaactaaatcatatgagtttcatcatcatttttttttatcatcgacccacgttgactacttgactatnacagtataaaaatattgtttcacaccaaaaaaact

SEQ ID NO: 50894 - DNA, 978 bp, Arabidopsis thaliana landsberg
tagaacctaggatgagacacgttttgttgttccgcaaggaaaaaaaaaaccatcttagtgtgggttttccatttattccatgattaattatttgcttagtgaagaaggttttttaaaaaaatattcattatgagaaaaatggacttcagtaaaatgtttttcatgcgtaataattggttcatgaaggtatacatcttagaacactcaattgctttcgagtaaatgtgtttatacttttgtttaaacgatgtctctagcaaaacaagggtaacctgttgaaatttatacataagccaaaacaaggttctagagtagacaatgaacagccttcaatggtgagtagatgtaaaacttgtcaactttcatccctaatatatactctgaattaaatgccacacacgatacaatgtattaatcactctaatttcttataaattagtagatggtttataatccttccaaaactaaaattttgtcttttcctttttgaataaatacggtgattagcacgagacattagtttaatcgttgtgttattcgttgtcgcatttatacacatagcacattgcccaagccgctgacagccgccactaaaatgtttacgtttctactcgattaattttcttaacattttttaaaatattaagttttcattgattttagcatctcaagaagtgtgacaagacgaggactgataacagccgtaaatatttaacaatcggagagtgattgactggttggagaaacgcagcttatattggtccttgtgatggtgacaggtcttaaactctatcaatgcctaacacacacaaaacaagatactccattttgaactatttttcatccaatttgtttgtgtctagtttagtttaaactttaaactaattactggctaatgcaacatcgtttcagctaactagaagttacaaaaaaaaattcaaactaaagttttacttacatgttgaagaaaagaaagaa

SEQ ID NO: 50895 - DNA, 777 bp, Arabidopsis thaliana landsberg
tattatctaaaataaaaagtaacatgtctatattattagattgcttttgtatagaaacaaaaccagttgcttgctctggtagaatccggtgcgaatcacttttagaagtactcttcttcctctctttattttaacttctttataagtaagagtgatgcattctttaaaattctaaattctgaaaatatccattggaaaaagattagtttttagatctcatctatgtttatatatactagaaacttttatacaatagtgttcaatatggataataagaattcatcagaaaaagaggataaatattaagaagaagggtagaacgtcactgttcaatatagtatatttctctcactgattattttattagttcttatacaataatgcaagtaaatttatgaaaaaagaaaatatacaactcaatgacatatatttaaccaaattaaattgcttagaattcatcacattgacatagccaaactatttaaaatatcgaacattacaccttcgaataactcagaatacgtatcattggttgatggtttggcatctattataataactttctttattaacttttacctaaattcttgtttttttatcggttctgcgactcatgtctcgatcgatcaacaaccactcaaaaatatacttttacgtacgttttgatcttaagaagattacaatcactttaatccgaatatatgtatgtgttatgtgtgtgcaacgagtgagcattgagtcaatttatgtaattttggtggacatagagaaaagacg

SEQ ID NO: 50896 - DNA, 570 bp, Arabidopsis thaliana landsberg
tgggaatggagagtctacggatatttagaaccatcaatggctctcatgttatcttacaaaaagtgttcaaaagattaagagattgagccctcaagatctccatattatctcgcacttatgatatgtaaaagatctcttggttgataatggaagagattggaatatggctaaactccaagcgtgttttcctgaggatgtgatccatcaaattgttcaaattagaccaagggaacagtccacgaaggatagttttgcctgggacttttcgaaagatggcaaatattcggtgaagtcgggttattgggttctcgtggaagtcttacggagacagcatgtccctcaagagatactgcaacccagcttaaatcccttattccagcagatctggaaagcagactctcctccaaagattcagcattttctctggaggtgtataagtaattgtatctcagtggcaggaaacctgttctatagacatttggcaagagaaggatcttgtattcgctgcccagcacatgttaaaacagtcaatcatctgctgtttaagtgtaccttttgctcggcttgtct

SEQ ID NO: 50897 - DNA, 743 bp, Arabidopsis thaliana landsberg
catgaaatatataaagacgcatgcatggtttataataaaatgcagttaataaatgattgacctatttttttatcacgtgataaggatgaagtgctaagagttgacgtctgttcaaatgcaaaggtggtgaataaatactcttattatttcttgagtagtgattacttatgtaatcaatttccacatcattcacaactgcgaatttcacatagcggttgcattcagtttgaaatttcgacatgcatgtatataatctaaagaggttgatgataaccatgtaaagcaggttatgaagcatcttgatggtgatgatgcaatgaagaaggcgcacgtacgaggaagaagtggacaagagtttagcaaggaaacgacaaagatgatgatgaagaagacaacaaagaaagagacaaatgttgaggaagaggatgatctcgttgcctacactgctgattactggaaaccaaggcaccatcctcccaaaaacaactgatcacatctatcatatttatatagagactcaacaaaatgctcctcattattatcatatcaatataagatatatatcaaaatacatatagtatatggagtattgggagctttgtgtttgtaaaatcgatcgttcaaattatatatatgaaaaagtggtatgtataaccaaattgtgttgtctcagttataaaaagtggtatgtataattaccaagctgtgctgtctcaatgttatccttctcttaagttaattat

SEQ ID NO: 50898 - DNA, 1198 bp, Arabidopsis thaliana landsberg
aggaaattggcggcggaagcatcagcagcaatggtgtggttatgattatggaaggattacgcgtctttctaagggggggggtaaaatagagaatccttttgcttttaaggctcttcaagtcttcactggatttggcgttggttgtggagttggtattggtagtggtgcacctttgaatctcggtatatactctctttttccttttgctccgtttttgaggtgtgaaggagtgtgtaattaataaatctggtgagattgattgtaatcaatcagctcaaattaacctgattttgaaagtttgatttttgattctcagtgtattgctgccactgatgattttatggtctgttcaaattaagaagttttattgtttgttgaagactatgtttcaatcagagttcttggaaatgaaactagtgttaagctatcactcatagttgaaaatcgtgtgtcatttactttgctaattggtttgctttcacagcatcatgattgtgagatcactaatctggtattgatgttgttgttattgacatatcaggtagtattccaatggtgggggaaattatgaattcagctagaggagcaaccaatgtattttcgggtgccacacaccacgtgaatggcgctgtacagtatagacaaacttgttcctgctcttttttagatcttcctgcattatgttattctgaatctggttgtgtacttgcgccatctatagttagaaaagcttggagcgaggaacattcaagcaggtgttggctgtggagttggctttggtcatggtttcggagttggtatgcttccgttctaagtaaaacttcttgtttcgattttgttctaaacgctcttcaattttgatacatggcttgtttctgaacagttgagttacttggatttgttggttgtataagcatcccttgagttacttatttgaactatcgctctcttattgtcattaactcatatccatcattgacaggcattgcagtgaaaccaagtgccatacacaaacttcaagcttttattatggtaagcaccagtctttcaaagagtgtccttattaatttcattcacataaaaccatgagtatgaatcttttctagggaactgcatccaacttgatgactaaacttggaagaacgagtgagaccacctcaagtcaaactgagactgaagaccaggtgtctcaatctgt

SEQ ID NO: 50899 - DNA, 729 bp, Arabidopsis thaliana landsberg
tgtgcttttctaaaaacagagtattttctaggttttatgttaataaatatgacaaagcttcaaaaatattttattaaataaatcatttcagatgtaaattaaattttaaaatacttaatattttattttgaatatttcgtaaaacccataaaatattgaaccattgacacataattacccacacatgatacctttccaattcttggtcggacagtgttagttaagattactttttctatatatatatattttttccagcagtataagattaagcataactgcataagttaagactaagttattaacgttcttttgtacgttaaacattacctgtacgtaacttataactcgtaattataataatatatggactatatatggtacatgtgaaataataaatgtaaggtaaagatgaaagaaagaaatttgattgggacattgaagatacggagtcaaagggatttgattcgagatcttcactatgtctgcctaaaaatggttaccgtgtgcagccacaactttcactatactctccacaaatttggcattatatttttgaccctttgaaataatagaagagacgagacttaccattttacatacatgatttaccctatacacattaaccccatatagtctcattgattaagctttgaatggaagtaactctttacatttttctagatatcttagcgaatccagttggactaaaacgaggagtatatattg

SEQ ID NO: 50900 - DNA, 824 bp, Arabidopsis thaliana landsberg
tcctgttatattcaaccgaccaattaccaaatcaaccaacagtaaaccacagaaacaaggtgtaaaagcaaaattaattaattaggtcaccggtccaaccgttttttgaaccggttggtcacattcgaagcactaatgagtaaatgactaaactagtgaatatagtagtaccatccttggaacaaaactagtgacatcaacaaataattaaaatattaagaaccaatggatgagaagcttgtcggtcgcgcatagcacaaacatatttatgataaaacttttatctttaatgtaaagagagatttattgggggatattcggacaagtaagatagaaaaagaagatgaaagttgttggcaaacaaacaaaacaaaacaaaagaagaagatgaggtttggtaaaagtgtgattatgcatgcagttcaggagacaaattagtcaaatctctgagactgtaactccttacattttacaatttccttattaaaataaaactctaaaactgaggtgatgatgttgtctattttcgaaaatgactactttgacttttacggtaattttagtaccttttacacttttcagttttcacctttcaaaaagctcacacccacttaataatatgcttaatcttagattataaactcatcgaatagacaaatagaatgaaagcttacgttttctaattcattatttgttgacggaaaacaaaaactttgaaaccagtttagtatatgatatacataatttgaaatagtgaatagcagtactagatcgtctttacccgctaatgtcgcgtatttaaattttcttgatacctaaccatt

SEQ ID NO: 50901 - DNA, 486 bp, Arabidopsis thaliana landsberg
caaaccgcgagggggccccagacatgcagactgcccaaccaggtcggcctacaacagttcaaattgacgcgccaggctcaaggctgacgcgagcgaatccgggttgtggatgcgcacggcaagactgagtggtggcagcaagccgccggtgaagagacagaagcgctcgatgtcgtcgagacgaccaacgcgcgggagaagggcctggaatcgatttgcaaactcaaccacggaccctgtacgcctgaaatcagcgagctcgaacaccagcagcgatcggaggggaggcccaaaccagcaacttgaggaggtcccatgcaacggccccagattagagtgcctcgtcctccagcagatggatgtaccacagctgcacgacgtcatagaagttgtatgaagccatccaaacgcagctctcaaccgatggtgcgctgcaggcggaaatacagactcacacttgttgaggaagcacataggatcagactt

SEQ ID NO: 50902 - DNA, 800 bp, Arabidopsis thaliana landsberg
aaaaggcctatcgatatctcaatgttacacgaataaggcacttattacttttacttattatatctgaatgccttttaattgggtaatatgaataaatactgacgagtttttaattaattaaaacatttaggagatgcatgtgttatatagattcacgtgatggtgatgcacatgtatcgtccttcgagattgagagcgcctggctacatccaatattgaatcccttcgtctttgaagtttgaatggtgaaaacaataacatattaacattcctcgcttcgggaactaaaaccatgactttatagcgtacgatgcagtaagtaccatttacgtgtctttttctgcttattgttatatggagagttattttcgcattgttaaatatagacgtataattagttattcgttaggtactggaatatgatatgattgattaatttttcttttttgtggtataaaatgtaaagacgaatgataaaattgtaatgactaaaaaaggaattgaaaaggagatgaattatcatgtatgggccatttataaaagtaaaaaaaaaaaaaaaacttagaaaaatgcgggttgtttgaaaatgacagaatagacgactctcgttgcattgaatttgagtgaaccccacactctctttcaagtctcaacggccatctccattctcttctatctcttcttcacaaaactctttcacccatttttcctccattaaacaacaaacgacctcgtaaggaaaatgtcaaacatttcccgaatcttctccatctccaactctcaacatttcagcgactatg

SEQ ID NO: 50903 - DNA, 451 bp, Arabidopsis thaliana landsberg
aaaacgcacggaaaattgcaatgtacttgtcttctcatccaagagttttgaaagtgtactatgctggtctaccagatggtcctggtgaccatctccacttctctcaggtactaaaaagcataaactgatctacgaaaaaaaagaagaaaatagattaagttctctatctaagatataactgttttcatatatgcaggcgaagggtgcaggatcagtttttagctttataactggatcagttgcgctttcaaagcatctcgtagaaaccaccaaatacttcagcatagctgtcagttttggtgaggctcaaagagtacttatattctgtttcttctggagaagctttaataagctttgggattattttggattttgatctcttccactttttctctttgacaacagggagtgttaagtcactgataagcatgccatgcttcatgtcacatgc

SEQ ID NO: 50904 - DNA, 411 bp, Arabidopsis thaliana landsberg
  unsure (1)..(411): unsure at all n locations
nnnnnnnnnnnnnnnnnnnnnnnnnnnnnnnnnnnnnnnnnnnnnnnnnnnnnnnnnnnnnnnnnnnnnnnnnnnnnnnnnnnnnnnnnnnnnnnnnnnnnnnnnnnnnnnnnnnnnnnnnnnnnnnnnnnnnnnnnnnnnnnnnnnnnnnnnnnnnnnnnnnnnnnnnnnnnnnnnnnnnnnnnnnnnnnnnnnnnnnnnnnnnnnnnnnnnctgcttcaggtactctttttttgatgtttattctattatttttttgtgtatatatttagctctattttttttccatttttctatttattttattttttctacttttgggtgggggtggtgttctttattatctatatttactcttttttattttttctcatatcttttgtctttttctgtctttctttatttactttt

SEQ ID NO: 50905 - DNA, 588 bp, Arabidopsis thaliana landsberg
gcacgtcttcgcgtggcggtccgcgctggcggagatcggcgtcgacctgtcggtgtggcggattcattgccggatcggcatgagcggcgggctgttcgtgcacgcgctgctccgcgagaccggccgttccctgtcgcccgaggacatcaccgaactgcagcgggcccacgcgaacgagtaccgcaagctgacgggccaggtgacggccttgccaggcgcgcgggaactgctcggcgcgctcaccgcgaacgacgtcaagtgggcgatcgcgaccagcggttacgcggagaccgcgcgccccgccctggaactcctcggtctgcccgaggacacgcccatggtgacgcgggacctcgtccagcacgcgaaaccggacccggacctgttcctggcggcggcccggctcctggacgtcgacccgcggcacgcgatggtcgtcggcgacagcgtgtgggacctgctggcggcccggcgcgcgggcgcgctcggcatcgggctccagtccggcgggtacggccgtgaggagcttggacgtgccggcgcctaccgcgtctacgccgattccgctgacatgctggcgcgggtcta

SEQ ID NO: 50906 - DNA, 732 bp, Arabidopsis thaliana landsberg
acaatactggccttaaaaaactctgtctctacactaaaattgtaaacaatttacgattaatgtaaaccataatctaagagggagagagactgaaacaacagtgaggtagttaaatacttaaattgtacacatgctcagaaatactgaacagaaaaattgataagattaaatgaagtataactcaaatcaatgatgcagcatcggacaaagcacagtgtaccaaaccataaggccataaccacaatttcattcacttttaaaccgatatgaaatcaaacagcgtcatccaagcatataagctatagaagctaagaaactaaatgatgtcacccctaaaaatggtggtataacgttagaagcctcaccatccgtaatcaaaagtcttaattaaagatgagacacaaacctagtaagtaatctaatcttaacacagcttttataataaacgattcgttccctcactccttacgaatacttccattaaattcatacttaattacattcctctactgcaaactacattcctctacttcaaaatcaggtgttctctaaggcaataatacactagttctaaaacatagatcaatgatcctatataactgaaataatcaacgacagatggtagaattcatgaatcactgagattcaagtaaagacagccattggtaatgaaactcaaacaaacataatttcaaacaaaaatcaatagagaaaagagctaaacaacacaca

SEQ ID NO: 50907 - DNA, 637 bp, Arabidopsis thaliana landsberg
attatgtaccattaaatttgtataagatcctcaccactccaattataaacaaatttaaagcaattttgaaagcttagttgacaaaaaaaaaaatatatatattcaaaagcttaagcctgttaagggtcagatttttaacattctggatcatgatttaagtaaagcccgagcccgtttcaatcattcttattttcgactgacttttatatataacatgaattgcgctcttaaacggtctggttcaatccacaaacaaaccatactaaaccgaagttctatatatagtggatttcgttattattatgtttgaagctaagcaattggtatggttacgattggtatttctactatcattgatttatttagttgaacacatatcaactagattgtatttccatgcacttaacctacatagacacagataacacttattacttgttatatgcttaggaatagtttactagtttatgttcccgcaagtccgcaactcgtaaaagtcggacccatgaagtcttacaaaatccaactttgaagtcagcttatgggcctacgagcggcggcgtgattggctaatacacgtggtgggccagataaaattctctcttgacaattttcctacgagggaggcttattgatt

SEQ ID NO: 50908 - DNA, 649 bp, Arabidopsis thaliana landsberg
taattgaactaaacacatgcattatcatttatgtaatatccctatatgcacacatagcaaattctgtttgtagtaacttcctttcctaaaccaatacggcaataccgcttattagttttgcctttacccaaacatatgaatgttttctttacctcaatcaaatttcacctaaatctctatatagaatgttgtactaggtttttagtttataaataataggcattttgatgatcttacatttctgataaataattacactggcctctctcttttggttttgaagtaaaaaatattttggaaaattaccatttgatcttcaaattagtaattagcgaacgcattttcgccaaataactatacactattttataaaatcatacaatttaacgtttgtcatcaaagttatttacttaaatatgaccaaaattttgttatctaactaactacatcttataaataatggaaatttctgctaaaccgaattaaaaataatctaaatttcggtttagtttttcattttctggttaggcaactattttcgtaacatttcttaaaagtacccattataaaactttaatccaaattgatactctgctatccgaacgtaatgccttggttggccgaaattcaccgatcaaactaaacttta

SEQ ID NO: 50909 - DNA, 652 bp, Arabidopsis thaliana landsberg
gagctcttactaagtaagtccccatgcttttgtctttacatcccacgtgtgatagctgggacctctccaaggatatgaagtttttcatgtgttgaaatgtattgaatttttttattttctggttaaaaaaatgtattgaattttttatttgcaagtttgatcaaatttatattaaacctctcatacttttaataggcattccggagattactttcggtaattaaacaagccatatgtaggattttatcaatgttagacaatcagtttgctaatttgacatatgtagacaatcagttcacaggtcaattagataacgccatatatgagtcttttcccactccaaaatctcttaacaatattagcatttttagtttattatggatcttttcacaaggacgtcacacatatggagctctttaaaaatcaccgttggaagtggtcttatctaaggataaagattccaaaaagatgtctagtacactgagaaaggagaaagaaaatatacatatcataacatggctctatagaagtatagctacatgtgtctatctgtcatctatatttgcttttctatttgaattattgtgtagcgaaataactatggctttgctaattgtggccgacgttgtatttgtgcatgctaagaccaaaa

SEQ ID NO: 50910 - DNA, 546 bp, Arabidopsis thaliana landsberg
cattggacctcttgagggagggtctgataaacatcagggcgatgaggtttccaaccgatcttcctagagcggttcgaaacagcacgactgtctccattccagcttctacgaccagaatcaccatacaggaattgatcaacgatgtccttttcgaactcagagatatcagtggactcaacgagcccgatctttttcagttcggaagcgatgagttcagcggcgtggtaccatgtgtgttcatgaacagcgccgaaataccaaccgccttgcttaccgtgctctatggtgccggagagaaggccattgaggagcaacaaatacaggtcagcgaggtcgtggatgttgacgttggcccagatcgtgtccttgcgcgggccgacgtagcctgccttctttcgggctgcacttgctcttgccaggttgatcacttgctgcgatgtccttttgaagggttcactaccaattccattgatggtcgatggtgcaatgatcgccgtagtcaaatcttcaggtgttttcgacaatccagctatcgactggcttatg

SEQ ID NO: 50911 - DNA, 543 bp, Arabidopsis thaliana landsberg
aggtgcaaaatgcagttgcctttttgaaagaatgttttttaaaaattgctttgatgcatcaccctttagagtttattaaaccttttgatcgagagattataaagccggaaatcttccgtgagtttaatatactttgcacaggccatgtacatgaaatggcttcgtcctatacctacgacctacttgggaatatatttatttctatttccaattctactattgcagaaatacctgaattgcgcaaatatgtaaatggttttacagtaatcgaatttgaaccgacaaactacattaacgctagatatagaaaatacattgaaacatccaagagatttgttgccaatactgatataggaacagaagacggtaccaaaatgttcccgctgttaaaaaattctcatttagcctcctttgaaaaggattttacagttattcaatcagtgcttaatgtatacacagaggagctaaatgacatataataatgtccaacatgctactcgcgttaattgttctatagacgacatttttgacatcccacgatac

SEQ ID NO: 50912 - DNA, 584 bp, Arabidopsis thaliana landsberg
gacgccactcgcccgatcccgccctgcgcctcggcggaccgctgggccacctgggcgcgctgatcgccggctatgcttccgcgtttatgtggtggttctgcctggggagtttcgacgaggccttcacgccgcgcggcggggtgctggcggcgggcctcgcctggatcgtcatcgccagcgccgatcgcggcctgtttggtccggcggtcgcgggcaagggcctgtcgtggctgctgatcgcgctgggcctggccatgatcggttacctggcctggcgactggtccgcgaccgcgcgggcgatctgatcgaggccagccggcgggatcgggtgctggtcgtggcgctgctggccgggcaattgctggccgacttcctggtcgacctggtcatgggcctggactgggggccggcggccttcaccatcgcccagaacgccgccctgctggccttcgccgtctggctggccttgcgtatgctgcctgtctctccgacacgcgccgcgccggcggccatcaccctgcccgcccataccgacgaagcctcgctggccgagcggctgcgggtgctggtcgaggtcgagcgc

SEQ ID NO: 50913 - DNA, 511 bp, Arabidopsis thaliana landsberg
aagacctcgtttctgaagaaaactgtgaagagatctcttttagaggctttttgataatgaaatcgagtcgggttgtttgggattgttggaggatccgaaccgtctgaacttctcaaggataaagatttctcttccacatctctactcgctagcgatagtatagcgttagcctcaagatgggtaagatctgaagaaacacacatgtgcccgttgtagaaaatggttaatatctgagattcttgctttggttgtgaaatttcagagctgcttgattcgtccaaccttcaaaaaccattgataaaagtatatcagtatcgtttgactctaattcatatttataaatttactaaaaaaataacgttgaaagagaaagaaggcttacgagctatggaaatcagaatcataagaagaagtaagaaggcgaagttccaagtcgcattttgtttgcatctccatctctttgaaattgagtaaaggctttgtcgcagttttgatgatgatgatcatgatt

SEQ ID NO: 50914 - DNA, 744 bp, Arabidopsis thaliana landsberg
  unsure (1)..(744): unsure at all n locations
ataagttctcatgatctcccagaaggtgttcaacatatgcctctgcatattatattgacacaggtacaagtgtatgcataccttctcgacacaaagccctgagatacaaagagagaggatcctcaaaattccctgcattgtgtaaaattactgttcctccttcaaagtttttaagagcacgaaaatgtctaatcgcttccttcacgacacaatatttggtgaagcactcaactaagagcctgaaatggatcatcatacagatcatattaggatttttacaatagaacaggtagaaatgcaaagttggtagaaatgagtacaatacagaaataatgattctcttacgcataagtcttcacatttggctgcacacgtttgtggtcctcaaccatcattccaagtaattcagcaacatcctgaaccctgtgattcatgcaacaggctacctgaaaatttgtccacttctaagagaaatgtgtgcaatcaaaaactcataagaattacctatcatatgactcggctctagtgtaggcttgaatcacccagttatatgtctcagtgtcaggcttcataaatactaccaaatcaagattacatcaagccatgtcaaaagccatcaggcaacaactaaaccaaacaattgaagcggaaattagctaagaaaaacatacaaccttcaccgtactccatattttcgaatgtagcataagctnacctcggaatcccacatgtagcctacacaac

SEQ ID NO: 50915 - DNA, 475 bp, Arabidopsis thaliana landsberg
ggggtgggcagccgcgactgctccgacctctcgctcggcgtcccggcgcccgcggccggcggctacaacttctgcgacctggccggcgcggtgctgaccaaggcgaagctgtccggggcgatccgcgaggccgacctctccggcgcggacctctcgggcgccgaactgaagggtgcgatcttcgacgcgggcgcgctgggcggggtcgacctgaccggcgccgagctggaatcggtctcgctgatcggcgcgaacgcgccccgggtgacgctgccgaagacctcgctgcgcgagtcccagtggcgggcggcgaacctcgacgaagcgaacttctccggcgacacgatcgccgacagcaccttcgccacctcctcgctgacccgcgccaggttcaccgacgcgaccctcggcaaggtcgacctcggcttcgcgggcctggcgggagcgcgcctcgacggggtcgaagcggccggct

SEQ ID NO: 50916 - DNA, 997 bp, Arabidopsis thaliana landsberg
tgtgttttatgcataggtgtatggaccggcggctgagccagagagcaagctaggttcttcccgggaatagcagatgccattgcgatgaacgcatcagagggaataattgagcacgagatatggagagtcgcaagagcgattcagagagcaagcaaagctcttaaaggaggtttcacatgagaaaatctgaaagagttctcttttgtgtatatattgtgactatagattgtagaagaataacgtcttatgaactaattttcagaaccatttatgaactaaacactataatctaatcatattcaagactaacatttttttttaattctttttttgggttaataaaactaatttatactgtaaccttgggtatgatatcaacatcttaaacatcattgcaaaggacaaatactttcttcgagtaatatagaaagaaagaacaatcactatctttatttttagagtatgcttttcggcttcaaatgtttaatccttttaacaatctaattattttaagatgagctagaatcttttctttcaaaagtgtatggttcatttacctttacattcaaacacttctcaatctatcttctaagatgtcatatgattggagagtgatgactgtgtttccctttggttttgctcttttgctttagtactactcttttcaaaatttgtcgattccacgaagacctagcgaatcttgttcctttgccaaaccttattctcaatctgagtcttacagattcttctctgtagcaagagcttcttaaattggtatccacagaccacagttaacaaccaatacagttcttctgcatgtagtagaattaataatcatcaaatggtgttttgtctcctgattattctcgaaatatgtaaaaagaatgttacaagtttatacgggggaccagcttataaagaagatattggtgaacaataatgataattgaattggtgaagaggatgaaaacacccaaaaaagagtttcaggtttatg

SEQ ID NO: 50917 - DNA, 617 bp, Arabidopsis thaliana landsberg
cgatatgctgcaaaatcaggacatacaaatgcatgggaaattgcaggtaaactttggtccagtcgaaccgaaaacgaaatcacccctttgtgatggaaaccttggatcatttgtttgtttcatgtgtgttcacacaggaattctggttcttttgggcgttttggtctacaaatttttgcgccacaacctggaataatttcctttataatttggtggaaagttatcaatgaggctgcacctggtccttttaaaaaaaaggatcgattcccttattgctttggtgcttagatgacctagaatcaccggaacaaatacgtttttttgatggtttaagcccaacatggctctagtttcaaggcaggcgggagtgtaggatgtgggagatagtcagatagctcgagccaaaggccttgccttgcagccatctctcaagtgcttaatgcagctagccaggtagctgctgtagattcctaatcagattatggatcgttttttgtttatttgttttcggccaccttatggaggccttgtacatgtcatgtattggtctatgttggatatatatatattcttgtaatataacgatgtaaagctcttctatacgtcgagagaaaaaa

SEQ ID NO: 50918 - DNA, 756 bp, Arabidopsis thaliana landsberg
ggtccatatattcttcgggagagatcttcaatagtgttccttttgtctacactttgttgtcgctttactcctttaaattatcattccaactaactttttcttggtaaaaaagtttcaccattatatatgtacatcaactttcactgtcgtcggtcgaaaacaaatcatggtctaacaatatattcctaattatctatcatcgtacactacacactaattaggtacaatacttctttattagtttaatctttcaccgaatatcagaagaaatcccaactaatatgcgtgtggatcttgtaaacaatgaaaagaatgttcccaccaaaaaaacaatgaaaagaatgtgaacagaactaaatgttgaaacttctacttcaaaattgaaataaaatctaaaataaaatatataatgaacatcaatcattgtataaaagcgattaaaagtttcatgatttgggataaaaaaaagttagagatagataactatcccttttttagtgaacaagtataaagtttttactgaaaagtttttcagtgtccggtattaatttcatattagtcatattatttacatgcaatatgaaatgagatgtcaaaaaagtttagacaaaggaaaagagcagaacattaattacagcagcgtagggtcacatgcgtaagtcacgtgactctgtttttcgttggggaacatagaatcataaatgattttttcgatggttcacgacactattcttagaccaataagggcaataagag

SEQ ID NO: 50919 - DNA, 1065 bp, Arabidopsis thaliana landsberg
  unsure (1)..(1065): unsure at all n locations
acaaagtttaaaccttatagctttgattgtctatgttttaatattatattagaaacattttttgtattacaaattgttaatgattatagatacagtatgggcgtgacaaccacattatgtttacaaaatagcaaattgtaaataagtttaatatttactccatatttttagttacttggatttcaagtattttttcctacgaatattttgtttatgtgctagcaagtatgttttatgatttgtatcacattattttcaaaaaacatttatttgaaaaaggcacacaatggcatcttattttgacaattttttaaaacactattgttatctactctctccgtatttttatgattgatttttaagattcttaaatattgattaaaaattatttaattattttctaaactaatatatcatttacaatctatttaaacacaattcacccaatagtaaataccgctataacagtcactgatatctacaattgaccaaaatacagctttggagaaaacaattctgcaacttttgtgatttcattttaacagataagtttaaggagctttttattatctcaacatcacaactgccaaaaaaataatcataaatatgaatttgcttacacgtaaacggctaaacgctaaaattttgaggaattgcttatggacaaccataaaagcaaccaanaaccaagaaaaagaaaaaagagcttttgtatttgtcagcaaaacaaagatagtgttccaattttgaaacagccaggcaaataatggtaatattcggccataacttatcacaaaaagtggcagcaaacacgtatagtggattctgcgaatttgttccacaagtttgtggacaattttttgtatgctttttctctttgtttttcgtccttttcataacccttgtcttaccacattcacatttttacacactactattgtatataatattcaaccttctgataagtatagaactttgcacttttgaataatttcctttttttaaatttgattgtggatgttttgtaagccgacagtatcactccgcttgatctccactatcaga

SEQ ID NO: 50920 - DNA, 582 bp, Arabidopsis thaliana landsberg
  unsure (1)..(582): unsure at all n locations
aggaggagaaaagccacatagccaaccctggccaaccccagtccagccctagtcggccatggcatccccagctaggcctagccaagccacaccctacaccaccctgccttagccccaccggccaggcccccctccacaaaccacctccgtgctcacgctgctagtaagacgtgcctagcaccttctcgtgtccttgagcttttcaaacctcctccccacaccctctcgctctccaacaactaccgcatgctctcgccgctgcctatagcctcgccgctccccagccacctttgactgcggcggcctcgccaaccacgctacgtcgatgcccagctagtcgattgccgccccaaggaaagccatggtcgtctacccccttctcttccaataccctcgtgcgagacgcctaggctgagcactgtagcgcgaccagcgancccgattcgtcccagccccagcctcacgcgagaccccagccagccatcgcgcaatgcctagccaaccgccccaccgaccgtganccttcctggctaggctatagcaagtccttagccggtcgttgcncttttgactagggctgtg

SEQ ID NO: 50921 - DNA, 1306 bp, Arabidopsis thaliana landsberg
aattagactgaacatcaatatttaagcaaaaacatattgcacagcaatacgtatggtaaaagatcttgattaaaaaatatcccaaagatattcttgagacagttcgattttatttttttattttgtttctatgcatcaacaaatcatagagagaaaactttgtcgttacatctacaatatctaattttgtctatatcaaaattagtacgtacgtgtgtagtaatacagaccattcagtcaatttggaccaaagacaaccgttgatacatctgtgtctttttttcttaaaactttttctcaacaaattgaaaccgtgttttttatttttgtcgccttgcatcaaactctatatatacagaccaagaattcaccattgaaactcattacaatctgaatactttcacagctttctcttaaaacattttcaagaacgagaaaaaataaataaactaaaaaagattgaggtcatggttagatcagaattaggaagaataagattcttattaggagctgaaatggcgccggcgccggtgatttctcgccggagttgttcaatgtctccgacacttgagaccatttttgaagaaagatccgatgatttttgtcatcaagatcgttatcacactgtcgtcgtgggacaaagaaaccgtttgtttcttcttgttccggcgatcatatcagccgtatcttgtgttttgttgtatagacaggatcgtgttgttcgattttcttgaacatatatacaaatatgcataagtatttcaaatgtaactatgagttttctataagcttatgttattcatagtgtatttctataacatgtgttttatgctcataagtatctataagcttattcatagtgtatttctataagcttctccataagtatttcaaatatggagaagagttttctataagcttatgttattcatagtgttaatttgattcacaaatatctataacatgtgttttatgctcatagttctggcttttaccaataagaacttttgacaaatgaattcatatgcaaaaacaccccttattaattcaacaaaaaataggtacttgctatcaaattttgagaacaaactatatatgacgattaattctagatctttggcccatataactcttctgaacatggttagaacgggttgttacatatgcaaacacacattttctagtagaaataagctcggctctttcaaatcctagctctttatatttaccctaaatcatggatagaatttgttattaacaagacatccatattacaaattgaagaagcaatcaatggtatttgata

SEQ ID NO: 50922 - DNA, 164 bp, Arabidopsis thaliana landsberg
ttggcccaacaatcaattttttgaaatattaaattaagcttacaaatttgcaagagtgatgattgctatattgcataagaggtatttaacttggaatttttttttaaaaaaaacaaattgggacgaaaatgtagtctttctttttttgtgtgcatgggtaaggt

SEQ ID NO: 50923 - DNA, 625 bp, Arabidopsis thaliana landsberg
ggaagaaaagttctcgcaacctgatttggagtttatggtgtccattgaaccggatcatctgaattatcaaaaataataataagttcataagttggtaggctattaacagtacattagaacacacctagttaaatattctttaacattcttgtagattgaacgtgctagaaacgatccacacatgacacatctacatgagtatgtatgtattataaatgccaataattatgaactcgacatgcatttaaaaatacggaaaatatatatatggtctaattgtttacttgccgaatacatatattcggtatctataatcaattgctttgaattcttgagatgaaaagataatttaagagacccacacgtaatgaagcagcactgcagcagtaatgttacatccatttcccatgtacacaaacaaaccttctcttcactaacatttaatgtgtcaatagggacacacgtctttttctctttcgttttacacacacaagtcagaaaacctcttcttcctttcttctttcttcctcatttttttccacacacacacattgactatcagttgatcttcctcaagtccttttgtatttcgttttatttagagtttaaaaccaaaatgggaaag

SEQ ID NO: 50924 - DNA, 449 bp, Arabidopsis thaliana landsberg
cagctgcacagttgtcataccagtatataaggtggctgatctctcagattacttgttaatagtttaagtaagggtgtcataaatgttacttacacctgattgtcctttgattccagtgatcgtttccttcctgacaaggcaattgacttgattgatgaagctggttctcgggttcgacttcgtcatgcacaggtgtggtggagtcatataccaggtttatgtcagttaccattttcattttttgatcattgttgaacttgctcgtttatgcaggtccctgaggaagctagggagcttgagaaggagcttaggcagataacaaaggagaagaatgaagctgtccgtggccaggactttgagaaggtacatacggattgtatatattcctttcatgtttttttgtcaatttgggggacaataagatgtcttatgagacgtaactttcattt

SEQ ID NO: 50925 - DNA, 1101 bp, Arabidopsis thaliana landsberg
ctatattcttaagactacgatatttgccactggttccgtattattggacggtacaactatagatatattatctcttcttttttactagcaatgtgtaaaaccaataatatatctaattcaaaaaagcaaaggaaaaggaaccctatgtataccaagagggagctaattatattgaaaatgttgaaaatagtatacaaacttaatttttatcataaattcgaattatttggatcgaaattgatcttgtcccgtgacactattttcaaggtaattaatttcaacaagtataatagactaataagatcagatttttttgttgttgttaccaaataaaatatagagtaaaatgaaaaagatttgaaatgtgtatagttgtattaaaaaaaaaaaatcaagttccacaaaaaagataaaattgaagaaaatggagtcgtagtgctttaagaaaagtaattaagatactaagtgtatgattgttttcctctttcgtcaatattatgcttaattttaaaagagaaaaatgcaggttgacagtgtattaagctattttcttgttggtcttaatttacttatttatgtgcgtgaccttattttatttcttgttggtttaagctattttctttctcttttacagttttacctcaaaaacaaaaacaaaaaccactgtataatatatatagataatgtgtcaaaatgttcgtaaatataacaacgaaaaaataggaacaaggaaaacttattactaaatattttgctaacgattcttatgtatagttgcattgttaaataataatatagtcatgaatttccttactataagaaacgtatttaatttcttactattataatttataatgaatggtcttgtttgtaacacaaacaacatatttctaccacaatctgcacttttgatattttaatcaaattagtgatatacagacgtatatgtatatagatcccgagagatagaagcaggatggagctaaaacatgtgatctttatctttgggaataaagtggccaggaaaagaaaaagcaagcaattagaaagaccaaactcaaagcagttgccgaagagattacaattcgaagaggaaatatt

SEQ ID NO: 50926 - DNA, 549 bp, Arabidopsis thaliana landsberg
caggcagtgatgtatatatccaccaattatataatttaggatgttccatagaatcttactgcgacattagaactaagccatatgtatataaataatcaactttctttttattaacctttgaatagaagggatcaatgatgattaattaagatgctttaccttaagtgccaaagattagccaatcttcaataacgtcaaaaagaaaaaagcagagtataagtacacccaaagaaaatatttcttacgtaattttcttaataagaaaaaaaaaaaaagtatttctcttacgatcataccaattattaatttcaaatatgtcttaatcactatggtttcacttgctcgaggtgaaaccatctctttttattaacaatgtaatcagattaattagttctaattaagcatttaacaacaacaacaacaacaaaatagttctaaactaacaatggtaaacttatccgatttaggaggaaaaaacctcgaaatttaaaaatggtaaactttagaaaagcgtatgtgcatatgagagagttttcttaatttcaagaa

SEQ ID NO: 50927 - DNA, 359 bp, Arabidopsis thaliana landsberg
taacttcttattagacaagtggtctactctatttttttttgttttcttgttcgtagtcgtaggatactaatctgctttatattttcttcgaacgtttcttttgatataattttaaaatgttttatttaatttgcttataactttatatagtttattacactaatcttcataataaaagtttagtttttatatgatgagaacacaaatggaaaagagaagagactaaagtttccgtccaaaatctaaatcataaaattatgatatatttcacttcaaactctatttaactgtaactgaattatactaccgattatacaatatgtagaaatttgcatagagtataattcctcatatggata

SEQ ID NO: 50928 - DNA, 670 bp, Arabidopsis thaliana landsberg
gcttattttaggggtttcaccttcattcgactgtataatcttccttgtttttgatactctattattgttcattatggatcgactttgttttctaccgtatcgaatgagagatgagtaaaaccaagacaaattgctaccaaagcttcttttgtgtaaacatttttgtcacgtggttatcgtattagggactagtatagattcttcgatatggattggcttgatgatataattgtcaaaaaaaaaaaacatttgtgaaagaaagtgatattaatcgaatgtattaatcctcttgatggaatacattaattgtattgaatacatcaggaaatgaaaaggttttgaaggaacatatgactccttctcacttttttttgttttgaccatacatatttatgtttatttgttgtttcaagtttttatactgcttgattagagttggatttagtagctaacactgcttgcctagcttttataggacatactgttttagcaacgttgatgtaatcaggcgtgttttttttttccgatgatgattattatagtggaatactaatggtatattaaaaaaaaaatactcatcaattgttttctttattaaagtttgaaaaaaatctcaaatattacaaaatgataattttgttaaaagggtattaattaccaaataattgaa

SEQ ID NO: 50929 - DNA, 669 bp, Arabidopsis thaliana landsberg
acaaaaatagcataaggcaatttttttttttttgttgactagaattatatgctgtgacaaaaaaaaagacaattaatatcatagattttgactagatttctgtccaaaaaaaaaaaaaaagattttgactagataatttcatatagaaataaagttatatgtaactgaataaatgtggtgatttgactaatttcattggcaagatttaatttctaatatgaaataaatcattaggattgatatgtagttatgtaccaatacaatttaaccatacatgtgatgcaagtaaaaggataaacaaactgtaccgtgtaaatgcttcatataacaaccttcatgcttcatgcttcatatgatattgatttttggtttcaaaccactcgactttttacattcgtcttaaccatagccaataaggaggatcattgacgttgttaaaaagcctttgctaatgatatcgcacaaaaacgactgcttgtatcacataagaggcaatctttattctccagtgtcatcttagaagaactattattaagcaaagaaatcacataacgaaaccatgtactggaaactgtcatacaagccttaccccattcaacatagagatcagagtaaatgtaaatcattcacagcttattgagacaatccaagaaacaaaaaaaacggcat

SEQ ID NO: 50930 - DNA, 1020 bp, Arabidopsis thaliana landsberg
ctttgtgagtttttctaaccaccttatcagaagcatatgtaagtttaaaacccctgattttgatttgcatgatgcagcatgtgccgaaaatcaatggggaattaccgtcagaggatgagcagatttctgatcatgaacggctatttcagaggtatgttttagatgtggtatccaatacaagctagagaacagtttcttgtcaccatttccgtgatttggttggtttgatttaacttgctcgaaatagaaatgcaatcatatctctagtcttaatattgccttcatcaattttgatagctgagattggtttcatacttcttctctggcttttgctaagagtccagacagattattttaacttggtaactaatcttagctttatacatttatatgaatgaatatttagaaatctcttcttttgtatggttattataaactacagattacagctttatggcttggtggagaacaagattgaaggagatggaaactgccaggttttttttttcttcttttccttttctcacttctaaattctaattaaagctttgcagataaatctctagcagtgtctcactggtttacattttttctcagtttcggtcactatcagaccagctttaccgctctccagaacatcataattttgtcagagaacaagttgttaatcaggttgagatatattaccaagaaaataatctatttccctccatttcagttctatattcttatcactttgatgatttaacactcttacatatatattccagcttgcatataatcgagagatatatgaaggttatgttccaatggcgtacaatgactatcttaaagcaatgaaacggttcgaaacttaattctctcaattcttaccattgcagtttactgttttagcttcatcactaatggtgagactttcgtaatattttgggaagacaggaatggagaatgcggtgatcacgttactcttcaggctgctgcggatttggtacttacacaacttaagctctgccttttctg

SEQ ID NO: 50931 - DNA, 505 bp, Arabidopsis thaliana landsberg
aatgatggtatcgtattcccagtttttaaggaattctgcaaggtaaagattaagctttatgatcatgactgtaatttcaatcttgattctttgttgctgaagaaacaataacttacttcttgatttctctttcgatttgcagagatgtccacctttaggtaccaatgaggcatggttgtttcttgtaagtgctatttcaaagttggtatttttcatttaataccagcctgaatgtttatgttgattctttgtgttggtttcaaaacaatctcaacagtgtcttttctgtagtctatgaatacttctctccattgattaacctctttctttattaaacaaatggggaaacttttattacgtttgatgtgaactcagaaacagaagcgacgcaagtgcatccccgatgaacactatgtgaaaacatccctcaccgtgaccatcctatctgatacaaaaataataaaaatttttgtttccatctaaaaagttccatattgttaatgta

SEQ ID NO: 50932 - DNA, 906 bp, Arabidopsis thaliana landsberg
  unsure (1)..(906): unsure at all n locations
tgatgatattaaaatgagcgatatataaattatagatgtttagtataaagagcatgaataattatgatgaacgatatattgataattggcggctacaaatgaacgtgcatgaatgatcccaaaccaaaggaatgaaaaaaatgctcacttcttttttgcccaaaaaaaaaaaaaaaccaaaatgttattgcaatactgaggaagatgtgcgcatgagtgatttgatcagtcccgcgtgttggtaattgatgtgctcgaattcgacttttatctctgtaaaattggagaaaaagaccagtaaactttattgacaaaattaatataaatgttaaactatgatatcataatatatccctttctcctatcgccaatcacaattcagttttccccaatttaaataatattattctagtaaatcaactcttatcattaagtaacacttcaggaaatacgcctttaacataattggtaatttgactgaataaaaccctctaatcggaaaagagaaataaaacagaagaagaaacggagaagctcacatgtgtttttcttgtatttaaaattgtttcttttccattgtggagcaaaaaattcaaaaggactgaaaaatagcacttccaaggagcataaataatctaattttggtaatatgaaaggtgatgtcaaatccaacggacattagtaaaccatgataataaattagaaaacaacaacaataatacaaataaattatagtattactaatcacctagcacacaaagcaacttcaagtttcaaaaagattcaagtattgggcagcatgttccccctatatatatatatgtcaatagcttaataatcatcaatttaatatattatgccctcctctnttatatattaagtatttgagttaaaataattcaagtt

SEQ ID NO: 50933 - DNA, 677 bp, Arabidopsis thaliana landsberg
ggataaaaccgtgaaagtcatcaagtaaaaaaaaaagagtttgctaacaaacctgcaagtgaatttgtgagtcgtgattgctggtttcatgatcttttgtgtacttgcggtagcgttcgatcgtcttctgcatactgatgatcaaaaatagacatatattttcagaaatatgaactaacgtacttatcttcgtatttgttttatctgtagctctactatatttgaaataacatcttatcgcaacgagatatgaaaattttgtttgactgtagtatgattcttagattgtactacaatatcttctttgctgttggttaatatctctatagctaggtaactattcaaatccatgccctatgattcaccgggcccttttttgtccatttattgaactctttttttttctcacatcaaataattgaatctagatccattaacccattaggaaacctctaatcaacaatatatattactatagagaaaaacaaatcacaactttagctacttggttctaacattgattatagcaaaaacttaaggatgtgaatgtgttaaacatatatatatagggaactatgtttgcactggacaccttgattaaaccaggaagagcacgctttattactacatggctacaagagttgagcccaaataaagacataacgaaaaccaaaaac

SEQ ID NO: 50934 - DNA, 574 bp, Arabidopsis thaliana landsberg
aggaatttttcattttgaactgagaagaagttgtttgtgctttctgctacctctgcttgagattggtgtcttactttaaagttgattcagtttctggggatctgtactgtgttttgctctgaagttgaggttgattgactatttactacacaaagcagggtcacagtgttatgcagtgaaccttaaaacggttgggtgtttcttgatgtcacatgggcttgatatgatctttcagattttgcaatcgtttcattttactactgcccttctgctcacttttagctacacgtatgcatatatctttgggaaatcagcttttatggtgtattgtgtatagatcatgctggaaagagatactggtcgttcacgtggattcgggtttatcactttttctgatcgccgcgctatggatgagtccatcagagagatgcatggaagggactttggtgatcgggtcatctcagtgaacagagctgaaccaaaactggggcgagatgatggagaaagtcatggctctagaggtggcagagacagtggctactcgattgctggaaaaggaagctttggtggaggt

SEQ ID NO: 50935 - DNA, 546 bp, Arabidopsis thaliana landsberg
ggcgccttctggagtgccaaaagaggagcaaatcaacatgattaaagacctggagagaaaagagacagagtttatgaggcttaaaaggaacaagattagtgtcgatgactttgagcttttgactatcattggaagaggtgcttttggtgaggtttgtacaacagattactacctctcccttttattctcacttattcttgcagctcgagcatttacaactttaccgagattggtttctgggtcctttcttaatgagtatggtacttttaatcttagaaataacttaatcttatttacaggttcgcttatgtcgggagagaaagtctggaaatatttatgccatgaagaagttaaagaaatctgaaatgtcatgagaggacaggtaaaattcgtaaacaattggaatgatgtgccacagctaaaactgattatatttatgcttgtctctgagtttcctacatgtctgtttcttctagtataatatgactaaaatgagtgtacattttgcaggttgagcatgtcagagcagagaggaacctgctggct

SEQ ID NO: 50936 - DNA, 549 bp, Arabidopsis thaliana landsberg
aaaaactctttttaactctacctggttcttgatcatggaattggtgttaatgcaggattcatggaagacaaccatgttgttgagggtgaaggagaagctcaaggccaaggagctagaggaggatgaccttacatagacatatttatccagagcgttgctttttattcattcccgggttgtattgtcactatgtccgttacttcatgtccgactcttctttgattttattgtgtctggttttgagttttaaagtttcttaagaggtttggtcaaattgggtttgtttggtatcgacgtctacaattgttctctgtgtctcgccacttcatttatgggaactactcaagtctggagttttttttatattggcaaacatctgtggagagtcttcttcgttcagcgattatttgatgcatcgagaggatcatgtctcgattatttgtttgcttttacgtctacatctaataaacgtgtgctttttcttcctgttaacgacaatttgtagtgttttgattcatgttttcttgctctatatatctttgattgcac

SEQ ID NO: 50937 - DNA, 544 bp, Arabidopsis thaliana landsberg
tctaaggggtgaatcctccgaagctgaggaactcgtgaaagaaaaggcgtccaaaaagctcacaaacccactagaaatcctctggaagtcattcagcctcgtgttctttgcggtaagaaagaagaacccctttgcgtttgtcaagaacttaaattaaaccatccacattttgataattgagggttctttgtctaatcaggaatggggagatcgatcaatgcttgctactgttgcgcttggtgctgcacaggtatgattcacaccatcccacaacaccacaagctttagctcactacaccctaaacatttctctgtttcaaatctgtgttatagtctccattgggagttgcgagcggagctattgctggacattagtagcaacagtgcttgcaatcatgggcggcgcgttccttgccaactatatctctgaaaactggtatgagttaatgcttacacaagtccattcacagcaaccgaatagcgcacaagctaatgaaaattggttggtcttttgatgcaggtgggctatgttgggggagctctc

SEQ ID NO: 50938 - DNA, 724 bp, Arabidopsis thaliana landsberg
acctgcctggtttctgaggctctcgatccaaagtttttggttcttctgatgcaaatgataagaaccttattccttttggaggccccagagggagaaagcttccctgttgtgactgcttcaatgtctgactatcagagttgtctgtgtttggcttggacgcagaagacgctttcaccgtatcctcttgtgaggttttgtctaaagagagaaaactcataccctttggagcaacggatggttttctcaaaggaggaacctgtggaggcgttacatgttcattgatctttgaagatgatgcatcagatgagtttcgttggttagaatgacttgagggcttcaaaaacgcaacagagcttgaaactcttgcttggatcgccggtaatttggctatggcatctctcacggattgtttttttgttttctgaggcgagaaagacgctgcagtgatcttagtagacgagactgttacatttgcactcggcgtgtctgaagcagattgtggagtaccctgttaagtgaagattagtatattaggatcaaaagatcaataagttattagactgtggaagaagaatcattgagaagatcgagagattggtttttaccttatgcgaaaacaaacaactatgacccctgtagcagaaacctttagtaatgaaattattgcaaggggatttggagagatcatggtcgaaaggacaatcatctcctttcatacatgact

SEQ ID NO: 50939 - DNA, 549 bp, Arabidopsis thaliana landsberg
ggacttcccatcaaccaggacttcacccatgttggactgcatcaacaaaaaaaatagtagttgcactcacagtccatgtttacgcataatgtgtctgttacgtaccaaagaatggcaggagaaagacaaccagagttgatgcaacaatggaagtacacagcataaaaacgaagacactatccatcacaaaccatgttgaacacaactcttctatacttcgagctcatgggtttatcaccaaagatattacttgaagatctcgcaaccacacgttgggcaagacaacaagagcaaatagaactccaaagaaatgcctcccattggcatgaaacccattccaatcgaaagtcatgctcatgaaaattgatgtcaggttatcaccttctagaataacgaactccacataaaagaactgcagtaaaaaaaataactcaaatgtgaaaagaatggaatactgtggttatcacaaatactacaataaacacaaaattatgcacaatataagatagggaaaatgggtttcttgcatagaagttggtgtatagacta

SEQ ID NO: 50940 - DNA, 1204 bp, Arabidopsis thaliana landsberg
ttcccttttttaccaataatctcttctagattgttaggttaagaacaaaaaagtcaaacgaaagcgtgctatcttttcctccgtttgcgtttttagctaggttcaacattaaaatatcaatttacttaagaaaatttgtagagatgtgtttattgaatcgtaaatttcaactaaaaattaaattatattaaatataaatatgcaaacacaatcagaaaaatcaaccgataaattgttgaattaaaataatcaaaccctttactttttcatctccatatgaattaacaaaaaaaatgtaccaagctactttcaagcgatatctccatgaaggaacaaaaaagtcgaagccgattcatttcttccgagaaacagagattcaatgttagcaaaatatatttttgtggagttaatctccgatattgtttccactcctttttagtctctttgatattattgtatagtatcactgtatgagacagtgactttatattcggaagataagctataaatgaattatgttaattgtaaacaacgttagctataataatattttcacatcgacatcgtctgagagtgcctcggtcatccggctgcttgtgcgaggaggctgcgcactatactacgttgactactgtaatattaaagtttaaacacatttgtaaattgtgattgaattaatataagagaatatatgccaaggtttttaatccgttacgttagctgaatttttgaaaatgattttacaccaaccatagttttggtttggatactttggctagatgaatagccaacgaagtgaacttaaaattttctcgtgtatatggtatatatattctcctcttttctgtatgtttttaatatatatctatcatgaattttttttcctcaccatgaatgagtatttgctttatttatatggacctagctagggttgattaggtccgcgcgctaccatctaaatagtccagagaaacgattgaacaaaaaatattattcatagctatctgagacttaagcgatgaatggttaactttattacgttctttattgatcggttgaacgaaaaaaaatacaagtcccattttataaaataatatctaccaatccatagccgaaaccaataattgtaaagatattattccaccacccttagccgaccgagatactcatcactatcaactctacaatcatgccaccttttttt

SEQ ID NO: 50941 - DNA, 624 bp, Arabidopsis thaliana landsberg
taatctttttacaaaacagctttttgaattacattttcgtatgaaaccgtctacaaaaacgattgactcaaacacttaccatctagacggctttacagactatttctaaagacaatgattattaattcgtacatctatgaatgacgtccaatggttgaggctctgagtgctttgttactcgtacgaatatactgcttttactaattccatataaaaatctaattttaaataggttttttgttgttaaagtctaatcttaatatatagttagtggtggcataattgactcctcttgtgttgagcgtacagtgccaagaagagtactgtgtgtggacaattccacgtcagcgaaattagtggagcccaccgtaagatcacgaggattcagagaggtacgcgtgttcaccacagacaagctttggaacagcgcgttgctcccaccctcaagcacgtggggtctagaccgtgacacttggtccattatctctcgttcagccatcactgtacatgtgacatcatatgcgtcaatttactaggaatccaattttattgggcctttttatgggtccgaaaccactcgaattttgggtttgcattaataattaagggtccgaaaactatgga

SEQ ID NO: 50942 - DNA, 558 bp, Arabidopsis thaliana landsberg
aggcgccggccataagcttgatcatggtcgaaaatttcatgtctgtctcctcttacggtcttgttggtgtttgggggagcatgtgggaacaatcgggttcagacgcggtgcccggccgctatgatcttgcgcagggagggtttgcgtgcgttcctgcttgggattacggaaaatctcgtccggcttgccctcctcgacgatcttgccgcggtcgaagaacaggatccggtcggcgaaatcgtgggcgaaacccatttcgtgggtgacgagaagcatggtcatgtcggtctcggccgcgagcttcttcatgacattgagaacttcctcgaccagctcagggtcgagcgccgaggtgacctcgtcgaacagcatgatgcggggcgacagcgccagcgcgcgggcgatcgccgcgcgctgcttctggccaccggagagctgcgccggcacgtgcctggccttgtcggccatgccgaccatgtcgagcagttccatcgcccgcttttcgggcgccggccgcgccacgcccttggtcaggatcggcgcgagcgtgacattgtc

SEQ ID NO: 50943 - DNA, 1133 bp, Arabidopsis thaliana landsberg
  unsure (1)..(1133): unsure at all n locations
tgtcttaatacaaaaatgactgagatatttctgtcatggttttatttttattagtcaaaaccactttcattataggaatggtgcatcagcccacataatcattaaaaaaaaaaaaaccaatggttcaaattaattgctaaattaagcagatgaaataaattaaatctggatatttttatgtattgtgcaacatatatagtgacacccaactggctcatcttgaagaaaaccaaacatatggtgagtgacgtgagtcatgagatgaaaaccaaacagttacattttttcataaacgattcagaaaatcctcatgtatattgcgatttatagtaaatatatatatatatatatatctgngtgtcgacgttttattatattttagtatctttatttacgtttggcattttggggtgtataaacttataaggctttcaagatgaatatataacatatcgatttgcatattattgatggattgatgatgattatgacaattaaaaatgttagactaatctgcatccgattaataaatatttgagacacgtggattatgtaactcattactatatctagatcgatacaagacctttattagagaccatataaattttattttactccttcgaaaatgacattctataaatttcatatatttgaaactaaaaaaattgaaaatgttttaataatcaagtataactgtgtaattgagcaactcgaacttttatcattttccttatttttgttacatttttaaatatttagcaaatgtttaagtaaggcagtagtgataactagagacagcttgtcaaagacatgtacatacacggccttggcctaatggaccaaaaccatatacacttctcttgaaggctcccaaccgagtgtacatcagtacagtttatggtttcttttgactttgaatcattgaacttacgcctatggatccagttaaatttggttggcccattatatgcctaaatttaggctttcacgtgttgaatggaaactgaagtggcagttacgtttttgtggttttgaaacgacgtgaatgtcgaaatgaaaacgttaaaatggcatactgttaattaagacgaanaaaatcaacgctcatgtcgctttaatttggacactga

SEQ ID NO: 50944 - DNA, 504 bp, Arabidopsis thaliana landsberg
acgtcagattattttaataattgtgcctaaaatttacaagtttcttaatacttatcaaattgaaaaatgatcagtatgtgttgtttagttttatgtggacaaatttatatatctgtaaacaaaatgaataatgaacaaaataagcttgcgacaagaaaaaagctaaaacacatgagatagatgttaggaacttagaagatgacccacctctcatatcatacatttagttaatgaaacatgcccagcctgttttgtacaataagctaagatatgttacatcaaagataccaatcaagttctctgtattaaagtgaattgtttcacgaaattgaaacatatttatttcaaatgcaaatcctccatttgtatttttttatgtatatcgttcctacttgtctatccaattaaaagaaacacgtaactatactttgattgaaaactaatttaaatatatttagttaaaacatatcttatatataatatctatgttttcaattgatctat

SEQ ID NO: 50945 - DNA, 402 bp, Arabidopsis thaliana landsberg
atttgaaaggatgctaccttctatgatttcccttgcaagcatctgaaagattaagccataaacatatttggttattgttatgcaggaactcaatgtgcagatcacaaaaacagaaaaaaaatacacagctagatgctctcagaagtagagttatacatcaaggagacaatcaactgcaagtcagacaaacatctggtaaaggatgaaaacgtttgccaatataccttcggatttcctcccagaataatgtcagtacccctaccagccatatttgtggaaatggtgatggcatattttcttcctgcttgggctataaaatcagcttccctggcagcatactgaatgaaggaaaacacataatattagaactagctgaaaataatgctatgtttcttttactat

SEQ ID NO: 50946 - DNA, 1300 bp, Arabidopsis thaliana landsberg
cattttacgtcatgacgtgagcataacgaaccctataaattatgatctctcccaactctgctttaatttccactttgggcagaactcagaagcatacgtgtgaaagaaacaatacacaactagtcagttgggaaaatcataaccctttgtttctctcagaaaccactttgatatttacgagtgatgattgttatgtaacgtctacgacacctacacatatgctagcaatcatgtgttgaaacacgatataaaacattctcctaagttcacgatataactgttttgatttctttcgacgcaatcatgtcaattaatttacacaaactactaatttaaaggaaattttaattgctttaggttttactacttaaagtagtttcatcaatatttttttggttagaggtcatgttgatagatgtcgtataggaaattcactctacaaatgcttactataagtttaggttttaactcaaaatgtttcaacaaaataaaatcatatattttttactatcctattaaaaaagagagagggtctgcctaattagagaaatgcaacaaacataagaaaagaccaagtgtgcgttgaagaacgagaaaaaatggtcttggtctcatgcacatcaccacatgttgatcttacgccgtggtcgtccacttgcctcttgtttctgaatttttgtttaggtgtccctgctttttcctattttttcctgtaagaaccctaatgtttccatatgtctcatttcttgttttgcataatttaatgggctcaatgaagttaatgggcctaagagtgctacgacccaatagcacttgaagatatgtccttcaaggacttcctaagctctgttcaggtcaacatgactaactttctgcttcacaggtttatggaaattaatcaaacatttggtgttttaatttgaacttttattttctttagcatgaactcatgagacttcttgtgtcaaagaagcgactaattataaacaggggagggacaaacaacagagattcatatttgagaaaaagaaataaacaaaaaagcatgagaacatgatgaattagtattggctaaatacaggacttaacatgaaggctatggtacgcgatatatgactcaaagaatggtgcagccgcttccactttcataggtagtaacagacacaacatcacaactgttgcagtaaggtggcttgcatacatgctttggtggttcaggtgctggtggagtctttggtttttcaggctctggaggctttggtggctcaggaggttttggtggtggtccaaccctaatgat

SEQ ID NO: 50947 - DNA, 841 bp, Arabidopsis thaliana landsberg
ataatgagtcatgactcatattaatcgcggtttttgtaatatcataaagctttctactttaggcttgacagtgatttaaatacagtaacatatcacataaatatgagaaatggaggctctttaattaggcctttacaatatacatatatattagaaatagaaagaaaagaaaaaaatcgaccgacaacaagattggtgaagaaacgcaataattgaaccattaagtacagtctaatacccgcagaaaatattacaccacctactcttagtggcaatgctgtactttaacatattgtcgagacaaggagaccaggttacgtgaaatcatgtagatgatgatgcataaacaatcaccaaagttcaccctatgaatccaagcccttctagcttagtggctatgatcatagccgacatctcatacagtcacattccatttcggagtaaatcatgcgatgaacaaaatttagcttgttctcattacaagataacaaattggatactatatatcaaaaaattgtgagtgttaggatttggatcaaatctaactattagagaacgataatataaaaaacatacatgatttgaagtagtttactataattttgatagatttagaatttggaaatagagaacgattatagattttgatagtagaatttggaaaaagaaatgctattaaaaaaacaaaatatattctttttatttaatattttattaatttaacaaaccaaaatatagttttcgatattgcccacgggctacaaaaccggaaatagacattacagatacagcttaatccgtattttcatttatttcgcgtttatactttgttgtttactat

SEQ ID NO: 50948 - DNA, 585 bp, Arabidopsis thaliana landsberg
tggaagtcgcgttctcaactgagattatggcaatgattgtcattcagtctcttgaaacaccttttcccatattagttcctttctctgcacctgcacccccgcctacaagctctcttaagttagccattttgttttctcgaccagagccgctcattttctgatctgcttccttgagcatctgcttaaaccgctgcttgcggctcgatgtgttactaccaccatcttgtagctgcgaaggaggagctccatgtggtcctaagtagatgttttcttcagctttactctacaaaatcatacaatgagagataaagagttaacaacatttttttgaaacttgtcttgtacgtaagaaatcaatcactaaccttaggagaagaaggttttgatgtttcaacttctgaatcattattattattaaccttgtcttcttcaatctccaagctcggaatcacaaacccatcagtgtctgccaccaatcaaatgatcgactcaagatttgtaattacacaagaagatacagaaatttgaatgattgaatccgatcacataaacacgaaagaaccctaatttcaataaagaaatgca

SEQ ID NO: 50949 - DNA, 1069 bp, Arabidopsis thaliana landsberg
attctcggctgtggtagagtgtacgggctactttgtttgggtagggaccaggtgttgctgctgggatttgcgtctctctctgtatctgtgaggcagcctcagtgtctacgtttgtccgaggctgggctgcgacagccagaggggattctaatgatcaggtgagcactcctcaatatgcagaggtggccatccatcctgcagctgatatctctattcatggctcaccgttcaatgccttgtccgaggttagagaaaaatgtgtcacaaatcggtttgtgtttgaatcagataagatcacaaagctcaaaatcgtggccgccagcaagagtgtgccgtcccctacacgtgtggaagccgtcatgtcacttatatggcgatgtgccagaaatgcctcacacgctaacttgatcgtcccaagggccacaatgatgactcaatccatggacttgcggcttagaattcctactaatgttttgtcacctgacgcgattggaaacttacaaggggtattctttctcaaaagaggcccagggagcgagatagaaatcagtgaagtcgtggctgagtttaggaaggagaaagaagagttcaatgagatgataaaagaaaatgttaatggcggccatactaacactacacttggtcagaaaatcatgagtggtattgcaaattacatgtcggagttgaagcccaacatagatacgtacaccatgtctagttggtgcagaaaggctttttatgaggtcgatttcggatggggtcgtccagcttgggttggactcggccatcaagatatccaggatggtgtgatgtatgtcctgttggtggatgctaaggatggtgaaggtgttgaagcatgggtaggcatacctgaacaagacatggcagcttttgtctgtgaccaagaattgctttcttatgcatctttaaatcccccagtcctgatctaggcacgtaccatgatatacatcaagattgttcaaactttgtcatgcatgaattgattggtatcgcacattgctgctctatgtttctttgaatatttacttttgcatttcgtatgtttgct

SEQ ID NO: 50950 - DNA, 606 bp, Arabidopsis thaliana landsberg
  unsure (1)..(606): unsure at all n locations
attcaatcattaaattttttaattttaattggtatatgattcatttcatataatagtttatttggctcgttactaattgtgtctagtttctgtggaagttaaaagaaaatcttcagttagtgttgccacaaacgaggaagtaaggaatatttgagttttcagaaaaaatgacaagatgattaattagatgagtgcatgtcgtctgtattattgtaattaaatctaaaccttgcaaataaatttacccacatctctatgaatcgatattcttatatgatttaatggttgtaactatgtcaactaaccatttctttttagcatctctatgaaggcaaaaaaggcatatggtcttaacgataaacataatgtgggtacaagtcaacttttattttcacaataaaatatgtattttttataaatgaataaaaaaagaagttaaattgttgatatagaaaaaacaacaattttggaaaacataggagggatggatgttatgattgtctgtcagagcagcaaatcatcgaacatcatttcatctattactntactagtaatatataaatggaccacgcattaatattacatgtaataaacatgttacctaac

SEQ ID NO: 50951 - DNA, 153 bp, Arabidopsis thaliana landsberg
tgctaagaggatcaaagagtgcgagaaattgtagggaaggactctgattagagtcgtctatgcgacctcgtcgaaggctcaacggagcgatcgagtccagagatcgattctcagcatggtagaatcctaagtacggtagactttgaaactctg

SEQ ID NO: 50952 - DNA, 878 bp, Arabidopsis thaliana landsberg
  unsure (1)..(878): unsure at all n locations
cttaaaatgacaatagttagttttctaactttctgaaaccagtctctttgttggatgcttgcatggtctgtggagtttgcattaccgataaagtgtatcaacatgaatctggctattactgtttattctctttgatcggacacaaaatgtcatggtgctagaaaatttaatggatacatcattgtctattttgtagagcccttaacaacccatgatttgcagtgtcaaagggtataaagcaacatgaaaagcaaaatcttgaaaagatactacttggctctcggtgtcacaaaggacggctgctttattatttccctgcacaagagaggtaaaattagatgccggcccttcacaagctcttactctgcttttttactttgcagttcagtccctagcggctaatacttgttgaacacatgttagatatgcttctttaatagtagnnnnnnnnnnnnnnnnnnnnnnnnnnnnnnacatattgtcttccatcagctctacgcatgacaacgattccatctcatcttggtgtggatggcatacagaccatggttcactcacaggtgtccagttttcttctctcttgctttcctgagttgttgttgttcacttaaagtttagttggctccttttgttttgatggtatgcaaatacatttagcgtctgtgatatgctgattaagtttatctttgtatgtatatccacaggtcttactcgagcatattttctagagattcagttgaagtaccttgcccagatcctgcttctggcttatacatacaaacacgatcaggtcagatcgttaaggtactgcactgatccttcctgatgactgggcatagtatgtataaacggatcctatttgatatctaacagtgaaa

SEQ ID NO: 50953 - DNA, 619 bp, Arabidopsis thaliana landsberg
taacaggagccaccatacatagggaccttctgactactagagggtcaggtcgccgccataaacatgggtcatctcaccgaacccccgccacacctcaaccacaccagtaggtgcatcgcaatgtcaaacccggccagaatagtactctggctttgcagtcaaaacgagttatccagctagctaagtgattaggcatgtgttcaacatgactcgagggaccacaacggtacggtccttaaccgacacagacgggatcactatggcctactatgcccatgatactccacccggtcaccattttaacactcacattagcattgatatttcccgatgacaatacccaatcaagcataatgtatccacctatatctcgcaggtgacaggaaatcacctaacttctactgatctaagcaagtctaagcatttaagcatacttaacttaaccatgtaacaaggataagataacaaaggtaatcaaggataaatgtagcaatagttttcaaacaactcctacaacctaatgcaacaaacatagtaggtagtagataaatcaattattgcaaacgataggaattagatcctgggtcttgcctttctcgaaggacatagggcgatggtt

SEQ ID NO: 50954 - DNA, 593 bp, Arabidopsis thaliana landsberg
acatatttgggcctatgccgattaacattaaaaaaaatataaaaatcctaagacgcacgtggtgagaaattagtcgtcttcttcgtttggatcgcgtcaccggagctacaccggcgcttcagtgcttgcttctatcgtcgactaacagaaccagaatccgataaaaaaaaaaaaaaagtgttgactcaatcaaagagaagtcatgaacactcacaataatcgatacgcaaaatggaaacagagagagcttgttcttatactcttatacgccatcgctttctatgcttatgtcgtatggagatcgcttcgtctctcccacggtatctccagcttttgcacaaatcaatcaattcttaagtcatgtgattgtgatttggtttgattgaaaattttgacttttagatcattacttcaagctccatggtttagcttctggctggctcattcctaatcgacgtaatgtaatggtgtgattccttaaagttccattttttctacgtattctaattgctttgaagctcattatctcgtgttgggttgaggatgtttctgatgctcaatggaagaaacttcgtggaaattgccaattctta

SEQ ID NO: 50955 - DNA, 602 bp, Arabidopsis thaliana landsberg
tatttgggttattatttgaatttgggattgagagatggggggttattctccttttcttttctctttttgggactggattatctgaagggcaatgatgggaggctggggggtttcggatgggtacgagggatcaaagaggacacgaatgatgatggaatcgaatccctacttcgcagtgaacgcagggagtccattggatgtctcaaagaggtctaggattgttgaaccaggcccgccctattttggggccatgggcagcaacactggtggtgccagtggtggcttctaccagcccttcaacagcagcaacttagctggtgcaggggctagcactggcatccaaaactttccaggtgtacggctgcgaggtctcccttttgattgcaatgacattgatatctgcaagttctttgtgggactggacatagtggactgcctcctggttaacaagaatggccgcttcactggtgaggcttttgtggtcttccaacagctatgcaacagaatttgctctgcatcgtaacaggcgagacatgggcctggagtatgttgaggtgttcagatgtaaaagcaggagtactcagtgcaatagctacgaggtg

SEQ ID NO: 50956 - DNA, 492 bp, Arabidopsis thaliana landsberg
tattgcaatatgtagaatttaactgtatgggtatttaataataacaatattcatatcaatacaaaagaacacatttgagaattaaagaacaccttgaatgggaaagaaagaataataaaagaataggaaaactctatatacaatatgaagaaaatatgttaattaaagtggcttttcataatggaatccttgggttgaatacttaatctaaagtacaaattcacaacaaagatttggattcaaatttgggattttaaaataaaaaggaaagggaaacaggtaggaaaggccaaggaaagggggaagaacctaaattgggcttggttcctgaattaagcccactaacggtttgaaaaggccaaaaccctagcggcttgacttcttctcacggccatgctggcccacttcgctagcttcattcccacaaaaggcaggcactattgcatgggtccacgccagcagtaagcttcttcatcctcgtaactgaaggcc

SEQ ID NO: 50957 - DNA, 1049 bp, Arabidopsis thaliana landsberg
  unsure (1)..(1049): unsure at all n locations
ataggtatagggcttacgggattggtgaggaaggagtctagagaccaaggaagtgtccaagcttcttctaatggagaagatgagctcaggtgggacaggaacaccagagaccatgtacttgtagattagggcttgatgttccagttcttcccattgtgttggtgtaaatggaggccttcctattgttctcccgctacttccacttagactcatcatcttattctctagctttcttcagatagtttatatatgtagcaaattcagaagcataaaagaaggaagagaaagagctttcttgatggattcagagattagggctcctgagtttcggacagagacagacaaagatgaccactttctctgtcactcttttcctctggtttgatatctctctctctctctctctctctctttctaagcatatattcctcagatgcaaattgcatgaacactagctaggttctttctctacacgaggccactccctcttttatatatataccctacttttttgtattgaggaaagataaaagattattacacaatagagattactatacaattagtcacactctagtagggtttattttggggggaatggtaatcagaaagttaataaatcaaagagtgatcacaaagaagagagagatatttagacagtgttgaaaagaaaaaagaatcacatcaggacaagagcttttaaggagttttgccatgtagtgtaaaatcaaaacaacattaaaatatccaatattgtaaaatgtaaaaatagataaaatgtatgtaaggggatgaagaagaagagtgtggtcctataaagactggcaaatctgaagagactcaagcccagtgttcctgttgcttcttctgcagcacttgatgctcctgtctctctgactactctttcctctcttctcaatcctttcttcatcttattnttcaaaatttaagtattttttgaaattatgtgtatttttttctataaaagagcattgatttttggggatcttttttatttatttttcctttgagctgacgcctttttaatt

SEQ ID NO: 50958 - DNA, 1279 bp, Arabidopsis thaliana landsberg
taaaaacaaaacttagaaaatcattcttcgactccatatttgtttttcttggtcgaaatatcattactcaaaagaaaccaataatatacaaaattttgacaatagaaacatatgaaattgggaccctaaaattcagtttcagaagtggggagttttcaaatactataaccacatttatcaacaaaccttgtagcctttgatcgcttagcagggaccttagcttctgttgtcagcttaatcggatccattataacaaaaaggacgttgaatctacaagataaattataataattattgtatcttcgattgagagatgtaagaggaaaacttaaaaaatggatatataatcaaatgtaaaaagagaacgaaaaaatgaaaggaactcgtgctacggtaatgtggaagctatagtcgctaacatggaattttggatagctgtggaagttaagttgagacctggtcggagagagtagattcaccggagaagagagataatcaccggaaaacgaggaggaggaggaggaggtgttgaaactcttgtttttttttttttttgttactcaccaacttttgttatctacatcaaaacatatctcaccttatatatacaaatgatttgaagtctgtgagggaatataaaatacataaaaataagttatataaggtagggaattttttaaaagttaaaaataatcctatataagtaaatattttttaatttatattgactaacacttatttgttggtaaagaataaagataaggtagattcgtcgaacgatgagtagtatgtgttggatatgaatggactttatgtttatattgactaatatttattttttggcaatgataaaattagattcgtcgaacggctgagtcgtatgtgttggatctgaattgatcatgttcttagaaagaaaaaaacatacggaaagcactcacttgatccttattgatggggaggcaaagtgaggtcctaaaaaacaaaatcatgaaagtttttagaaagacaaatgagagtttttttttttttgaagattcttatggtttgagtaaaattaaaatgaatgtaagatgttaggagattgaatatttttgaaaagcacatatgaacatgagtcatgccacaaattatggacatggatgaacgaaacaaggagagtgaatctcaaatgtaaggtttgaatctagtttgacatcgtaggtgcatgtgtgtgggaactagacacaaatgtatgaagtataaatacttggatcgaattgcacgttggatagtcgga

SEQ ID NO: 50959 - DNA, 673 bp, Arabidopsis thaliana landsberg
ctgttgcacgagtgttgaaagtagagagacttagtaaattcagtgtatacaagaagatatatcgatcctccctaatcatgatcgcctaaaatcaaacaccatcactcagaacagatacacaattacaacacaacacaacataacacaacaacataagacaaggggattttctcaaaaaaggtaatttcaaatatagattcgaatcaaaattcccgatctaaaaagctagaatcggagatgttacctcaagaggaagagacataaaatcatcagacggattagcttgcatctccttaacctcctgcaaaatcctcttcaccgccggattcttccgattatacctctcatccgccatcttatttatccccacgagatcttgccggaaatgcaatccgccgccggagttctctctgtccgattcgtcttaacagaaaataataaatacacaaaattagaattaccacatggcttcgggagatgagctaattagtacggtgatataatacaaacacacaaaattaattccaaaacattttccacgtcacactctttaacgacggatacgtgacgtgagagagcttctgagtaagtgccacgtaattaataaactttagtcatccaaacatctcaacggttcagaaactgtaaagtaatctgagaaatttaagcgcct

SEQ ID NO: 50960 - DNA, 376 bp, Arabidopsis thaliana landsberg
taaaggctttaacaaaagatccgctgtagcacaaagactaaattcatctttgttgatgatctttccgggtttaaagttcggcagcggaaaacctttctttttggtattatatattgtattactaaatatttatattttaacaaaaaatttgatatagcacactagtttgatttgtcgtgattgccgaacttgcaagttaataatccccacacatttgctctttgtgtgtttgtctattgctagctgaagcgcttcaacatacttcttgtgaagaaaagaacttcaagaacattttatgtaatcttatagagaagtttttgtcaagattggaccttttaatcaccgaaaattagctgggaacaacttttttcaatgt

SEQ ID NO: 50961 - DNA, 334 bp, Arabidopsis thaliana landsberg
aggttgaggcaaaatatatgcagacgtgtataatttgatacgggcgcgttctgccgtatcggttaaccaggcgcatgcgcaggttgccaatacaaaggccgcactggccggatacaaagcgactctggtgcatcaaacggcatattttgagcgctgccagaaattattcaacctacagtcatcttccgccaggaattctaacaggcgcggagcgactatcaacaggcgctcgaaattataagcggcataacagcagataacggcgggaaattcgagctggtagctttccaggctgatcttcagcaagcggtagacaacctgcatcggaccacga

SEQ ID NO: 50962 - DNA, 553 bp, Arabidopsis thaliana landsberg
tttcagtgtctttggtctcgtgtttgtgtagagatggagaacaagaccgataatggaaacgaggatggtccaataatacatagccaagttgagaagataaagaaagagtttgagaagataagacaaccgtcgctgcagcaaccggagatgaggagggttcttagcgagatcaaaaggcgtcaacgttcacgttctcctcttggtttaggggagagatctatttccgttgggaattgatccatgtttgactttatagtcgagagagatagataaaaaaaaagaggtagaggtggttatgtggttcctaatagttaacaggttttgttgtatatattatgctatataaatactctttcgtttgaaaatgaatacgtctcctctctttgcatagtatgatgatgtatgaatctcgatttacatgatatgtatgtgagagatatagtaactacaactgaatgaaaaatccatgagacaaaaaagttcgcaatagaagaatattgattcggtaacaaagcacagcttataagttttcttgggttcaagatgaaccaat

SEQ ID NO: 50963 - DNA, 913 bp, Arabidopsis thaliana landsberg
agccactctctaaatgtgtatatctattttttttttttttttgttatgatggatgaattgagcataaaatgttaactaattaattaaatttttaaaaactaaataatttcccaatattcgtttggaatatatattttccatttagaaaataaaagaaaaaggagggcagaaggtgtcatgacatgagattcaagcggctctgtccagagagatgagacaaggggcttttcattcggattctatgtgacgccatcacacacacccctacaagttattattatatagtattagtcaaaaaactattcattttcgtttgaaaaactaaactacgagttctctgctcttttatttgacttctatttttcctacaactactttctaaacatcaagtcatttcacattttttttttctttttttttttcaattcttcacattttcaataaaaacttgaatattttcaaattggatttaaaataatttgtttcctaaacattttataatgacaaatcaaattcttcatatgaggtcgataaacaaaaccttattaaattaaggatataccaatattggagcactatactttaatgtgtcctttaattttgttatacatcaatgtgtcctttagtttatttcgtggaaatatgggaaaacaaatataagtgaataataaaaattatatttttagcaaaaaaaaccccgtaaaatagatatttataataatacaaataaagtaaggagtatatagacatacaaatgtttagctaggtttatttgtcagcatttttttttaattgcttgtataagcttttcttgtcaactatgtgtaactatatcctgacataaaaatactagtttaatagaatttactttaacttgaaaaattcccacaagtaatgagtaaatagacaaaaa

SEQ ID NO: 50964 - DNA, 786 bp, Arabidopsis thaliana landsberg
gaaaaatcaaacaaccggaaaaggctcatgaactcttcagaaaatgattaatgaaggttgtgtggtgaatcataaagtgtatactgcacttgtatctgcttatagtaggagtggacgctttgatgctgcgtttactcttctggaacgtatgaaaagtagtcataactgtcagccggatgtgcacacttattccatccttattaagtcgtttcttcaggtttttgcgtttgataaagttcaggatctgctttctgatatgagaagacagggtattaggcctaatacaatcacgtataataccctcatcgatgcatatgggaaagcaaaaatgtacttagcaacctgtctttttgaattcttatgatgttgtagcaatttgcactcactccatcccgtgtgatgttaaccgagaactttacacatgcattttgacgccttttatctttcattccattttaaccgagaactttacacttgctaggatggagtaaatacctgaatttgacatttttagttgttatgctttacttcaaagcatccatgaactgagatatttcttttgtttttgaaggttcgtggagatggaatcaacacttatccaaatgcttggagaggatgattgcaagcctgattcgtggaccatgaactcaactcttagagcctttgggggaaatggacaaatagaaatgatggagaattgttatgagaagtttcagagctctgggattgaaccccaacatcagaaccttcatatcctccttgattcctatgggaaatcaggaaact

SEQ ID NO: 50965 - DNA, 449 bp, Arabidopsis thaliana landsberg
  unsure (1)..(449): unsure at all n locations
tgnnnnnnnnnnnnnnnnnnnnnnnnnnnnnnnnnnnnnnnnnnnnnnnnnnnnnnnnnnnnnnnnnnnnnnnnnnnnnnnnnnnnnnnnnnnnnnnnnnnnnnnnnnnnnnnnnnnnnnnnnnnnnnnnnnnnnnnnnnnnnnnnnnnnnnnnnnnnnnnnnnnnnnnnnnnnnnnnnnnnnnnnnnnnnnnnnnnnnnnnnnnnnnnnnnnnnnnnnnnnnnnnnnnnnnnnnnnnnnnnnnnnnnnnnnnnnnnnnnnnnnnnnnnnnnnnnnnnnnnnnnnnnnnnnnnnnnnnnnnnnnnnnnnnnnnnnnnnnnnnnnnnnnnnnnnnnnnnnnnnnnncccgggggcacttccaccccccttttggggggttttaaaactctcggaaccccaacggggggggggggaaaaaaaattttttttgggggggtctcttttttttt

SEQ ID NO: 50966 - DNA, 601 bp, Arabidopsis thaliana landsberg
tttaagtaaattgtatgcatagcttatcaatgattccaaaaaccgatatttaagtaaattctatttgttttcaacttttcatcaagaaatggtgttcctcaaagccccggtgcttgcgacaacaacgaaggtggtgatgatggagaaggcgacggtggtatatctcttttcctagctctttggcttgttgatgatcgcaccgtgatcatcattcttctccattctgatttttaaatcataattaaataagttaagaatcatgtattaattgaaattagcttgacaacctaaaacttattatatctagtcaataaaagggtgtctaatctggtttaactaaaccaaaccaaattctaaagactaaacagagaggaaaaaagaatcaaattggatttattttcttttatatatatatatatatatatatatccaaaaaaaacaagaatcaaaccaaaactgagccaaaaattatattcagcaccctgggttttcatttttaacattttttctggtattttatgttttggattttttcatgctttatattcaaactatttttaattaaataacatatgtttaaattattgaaaaatgcgaatga

SEQ ID NO: 50967 - DNA, 2970 bp, Arabidopsis thaliana landsberg
taacgacaggagaagaacattgatcaatttcaatggaatatctttattatttcaaaacctgaaatgggaataagcgggatgggaaaaaagacagatccatcaagactacaaaactcaaaacgagattcttagtggttcatatccgtaagtgtaagccatgtttcgtaggttttaaatagtgcattcaaatatggtaaattgatatttttgatatatattactattttgtaaatatttaattactaatattttgttatatgttagtaacaagatgtttgttggaaacattatttgattatatcgaagttaaaaatagtaaaaaaaaatttatcaagtattacgctagtttgaatatgtataatgatagaacgacgacaatagcacaaactactatgttacatgttttgctctctatttttcttaagatatgataactatattgactaaaacatgaacaagattggtataaaaactactttgatcactatgactctttctgattatcaagacaaagaaatatacggttactgtttgtaaaatcaaattaaatgatatgaccctcttatgaacagagtaagtttgaatctttgtttgtttaactaggaatatataggattttgcattggctatgaaaagagcttttaattacctagaggctagagagataactcacatgaattttgcggtttgatttcaaattgatcacctagtgaagttaaaacattgtgacttcatcaaaagaagtcatgggaagtaatgctggatttatgttggatcgacaattgattttttttaatagatggtgactagtgttgaaaaatctatatttgagtaggatactttaatttgtatgaacaattaaaagacattaaaaaatcaattctttaagatatgattaatatcatatactattacaatgctcatcaaccagaccaaatataactcaaagtattgggcgtgatgcttcatagaaagcttacaaacgagttctaagactcagttatcctttggtcaatttttgcaagaacctctagaaaccaaattattcagtataagttggataaaaatatattaataaaatctacttactaatacctactaatttcgactatatatgtagatcttaaaccacttttgatagttcagtgtggtttatcctatatgattattcttctttttcacaagcgacttcctccaacttctcagaactcttaaatcttgatctttcccattgccacaaaagatttcattgcaatgatccattagactaagacatgtttatctggtataaccattgaactcttagatgttgatgcggctttagacacttgttattcaattgatttcacataatcgttttaaacttcatacactttgttaatgtccaaattgctcttggtttatccttctagcacttgttgaagcataaattttaacatgttttccttgagagattgagtagatgagctcctttggccttgaaatttgagtccccttgagtttgatcaaaataatgatattttgggactgaatggatgtatttggccaaagatttcgtgttagttcctcacatttagtatcctaagttgatgtagaagattttaactatgtttctctagtaagaaatggtaggtgttcgttgaattctcttgtttttcctcaaatgctcatccttgatatcttttgtaccattttgtatccttctaaaccaagaattggtatttgactcaatttcaagaacttgtcaagtttagcattcaactcctcaaaccttgtaaacttttgaatagtgtctctttaagtcatagcacaaccttccccgtggttcccatcgctataatttgagctaaattatcccctagtaactattttcaacttaaatttccatttaacttaccattgttagtagtttgctccttaaatttccatttaactttgtttgtattgctcccttacactcaattcttatgtgtgaattgaagcttgggagcaaactttttaccataatcccattgatgatatttgtcgtttgaggagaaagaaaacaatctcaacttaaaagtgtcttttgcaatcttattgatgtacacataaacgattaaattggtccaaaacttaaaagtgtaacaacattagtgtcattgaagagttgtattttatatgaacaaaacaccactttaaaaaagtttattttccattagacacaaaatttatgactgacttgtgagattcagactaggtttgttttttctccaagttgagagactaggttagagctaattctaattttaggctgatacagatcaaatttaagtttgcattaaatatacccctctctctctcgtggcatgaaattttaattttctgtttaccgtaaagagactacaaaactttgaaatatgtaaccaatatttttttttccttggggagacaaaacggtgtctcgaaccgtaaagcaaaaacgaaggaaaaaaaaaaaaaactgaaccaacaccaaaagtttgcaactttgaaaatgccttctcatcttccaatgatctctctctcttcttatctttagccgttgcttttatatcaaatccgttcttctctttccatctcaacacccatttgaacagagaacctgagaagcaaccgcgattcgccgccgccgccgccgtaatccatcatcggcggcggcgagcggaacaaagtaccggactgtcagtgcttgattaagacaacattctctgtactctcgacattgatgatgtacgcgacagtgactgaaaaaagagatttgggtcggtcctatgtgaaaaaggcagacaggttggagcccggcataaccgatttctatatttttaatttcgactaaagaaaatttaaaaaaaaaatcttactttttctggtccttgggagtggaccctttctgcccaaattgggggcaaataaaggggccatgcaccgcattctcaccttttctttttt

SEQ ID NO: 50968 - DNA, 498 bp, Arabidopsis thaliana landsberg
tcccctttaatttattaaaaatgatttttaaaaacaaaaagtatccaaaatgcttagtattttttagcctatttatctatgtcgatgttgctatcaatttcgtcaacatgttattatccgaatgtgtatctatattttaggaaataaagataaagataaaatgaaatgatcggataatgtctttggattatgatgtcaggctatgattatttacatatacattcatgcactttatgatttatccaaacaaaaagcaaagcaaaaaacaaatttattaggtctttgtgacaaagaaataggtgttgggatgtgaatggactcttgacccacaagccacaacaattttatgacaccacatgtgatgtctggatgagaccacaaggagataaggttttttgtttctgtgttgttttggttttggccattttcatcaccaaatgtcaaatccttttgcaatttacgatttccattttttggagtcattcattactcttaagc

SEQ ID NO: 50969 - DNA, 593 bp, Arabidopsis thaliana landsberg
tagcaatagctgcttgtgcatcagcttgtcgttttaattcagcagcagcatcagctttagctttggcagcttcttcagcaatagccgctttggcatcagctttctctttctttcgtcgttctttctcttcctcggcttgtttcttggctaataataatcgtggatcttttctcatcgctgcttcaacaaaacttcgaactcgacgtaattccaatgcacgcttcttctcacgtgctttggcggcttcacgttctaattctcgttttcgatgacgatcatcagtctcttcaggtgcttcatcatcttcattgggtaattcacgccaggtcttgaaattgcaccagaaatcatagaatcgatccacggtgtcaatattggtcgacatatcacctaattgagggacaggttgaatggttgagaatcgttcatttcgtttgaatacaggttcataaactttaaagaatgtttcctctgttgctccttcatgtgattcaggaaccgagtcatcaaattccaatgttgaatcatatgctcgtcgtcgactgttatcaattaagggttcgtaacctttttgcattgcctgaaccgagctt

SEQ ID NO: 50970 - DNA, 486 bp, Arabidopsis thaliana landsberg
  unsure (1)..(486): unsure at all n locations
catcagctccaccgtcgacattttttcctgaacatatcttgcatgtgcctcgtctgccatatagtttacgccatatccaatctctgcaaatataatgagaaaaataaggtagcaaagtcaggataaataaattgtactaacaaaattatagtatcatttttctcactcacttcccttgagacgatcagcaagattatccaacatctgtttctcggctctagccgcctcccattcccttgcatcctgtgctctcttctcnnnnnnnnnnnnnnnnnnnnnnnnnnnnnnnnnnnnnnnnnnnnnnnnnnnnnnngatttcgcgtacctactcatgtcacgtatgtgatcgttaatgtacgaatcgacgagctgagatccacaacacatcttctgtcccattagtcttttggactttattgtgcgcatcacctctcctttgtcgtcgtaactctcccaactgcatttcctcgtctcctaataaaaaat

SEQ ID NO: 50971 - DNA, 572 bp, Arabidopsis thaliana landsberg
  unsure (1)..(572): unsure at all n locations
gagacggctatcggagggctccggatcataatagccggagatttctgcgattatgcccgcgatggcgagaaccagcaccagcgccccatgaacgccgaacggatcgccatggccgccgatggccatcgccaatcctgtgactgcaagcgccagcagaatgacgagggcgccctggcgttcgtttgtcgtgagttcggcgatcatcgaagcagtcccctgtctcatcgcgcagtcggcgcggtcagcgccgtgaagggatcgtttggccgctcgatgtgccgccctcgatccctttccgccgcgggttcagcgatcccgttcagacattattttgtccggggattgcgtctttgtgcaaacgcaaaatgtgcgtttccaacgccggataacgccgggtcagcgggcggcggcgccggctccggtctgtgcggtggcatttttggccgcctgatccagcaaggccgtcatccgtttggtggcgagcggcggcatcttggcctgcttggcggcgtcgaggttggccgtactgtncgccacttcgatcaggccgaccattcccatgccgaaatgcg

SEQ ID NO: 50972 - DNA, 700 bp, Arabidopsis thaliana landsberg
gcagactcaacacacctattcgatgagatatgtttagtgaatgcacttgttaaatataataggtttaccagttttttacttctttgattttaaagattcatggtgaaaagaaaaatgtgttagagagttgactttgggtagaggatcctaaaatgtgtaaattcctcactctagaaatctcaactctgcagcaattatctctcaagcaccctactgtaggagcaaaacttggtttactgagtcagggggccactccaggcatgggacattccatggagatcagcgaatctgtgatcaagtatgtggactctgactcaaaagaacagaccctttctctacagactctaacaccagaagaacttctttctgtaagtagtggaaaatgaataactcttttatcatgtctacttgtatgtttcatttcttcttaaatggatttggtgtcagctttcagttcaggtcttgtccaaaggtgataaagaaacatccattcagttgcttcggtgcgtatattccgaagagtttcctcctggtcccttctattctttaattacatgtactagccatgttcactgcatgtgtaattattctttgcagattagctcttgaaaaggatcctggatatgtaagaggtttggttctcatggggcaggcgttgttacagaagacgcagttgtcagaagctactgaatatttagag

SEQ ID NO: 50973 - DNA, 512 bp, Arabidopsis thaliana landsberg
cgggatgatcctgtgacggatgtcatagacaaggatcacgatgaagaatgcgattagaacgtttgagaatacgagcataaggggatcatgcgagaatgtgcgccacccgagcacaaagaggagggccgtgaggatctccacgatgagataccgtgatgggatataggacgcgcagcctcggcatctgcctcgtaatgcaagatatgagacgaccggcaggagttcataccaggaaagcgtcttcccacagctcatgcagtgcgaccgtccgcccagcgatcgcccggtatgaaggcggtagatgacgacgttgagaaagctccccatgatcaccccaagtacgataaagaagacatatggcactatattcatatgactattctaaaccattcagttggaaatcccgagctccatacaaaaaacgcccgtgagggcgttttttgtattcctaggtgcgtttatccgcacactgggtctgaaccgtccgtgataccatcgcttgcagtcgttgt

SEQ ID NO: 50974 - DNA, 576 bp, Arabidopsis thaliana landsberg
acaatcaatataacgcctaggatggactattatctagttattagtaaattgctaatttttgctcctaataatgatagcaattcagaaagtgcgggacaggcagattaaatagtacagtgcagtttaaatttagtttgttcgagggaaacgtactatacggaataaagctttaaaaaaatggatcatcagtcgggccaatgactaaaattccatatggaatataaagttttaaactcgtgtctcataatgtggagcgtgtttcttgtacgagaaagtgtgttttgcatttttgtctccattcaatgctacgtatattaatagttaatacgtaagatgtggttcattgatgattaaaatataaataaatttatactggaaacgtcaaacgtccatgtgtaaaggtgagaaaccactccaagttatggttacgtcttatgattggtggttacgtcatgtctttggtgtgtttgagtggggttcattttatttagtatattttaaaatctaaaacaaattgtaaaaaattctcgcagattaattatatcaagtcatataattttattcaaaaaacatttt

SEQ ID NO: 50975 - DNA, 665 bp, Arabidopsis thaliana landsberg
tatgctgcctctgtttcctcatcgtaaggaaataacaacattaccctttagaagttatagtattggccagaatacaggtacgtgaaacaggtcgaagaacgtcatcataaaaccaatgatgaaagcccttatgatcgataaccttcatggcaaaaaacacacacacaacattccacatcaaaaaatccaaatgacatcaaatcgatacttcatcacattctagattgataaacctaaaaaacattcgtacaaaggcttcacagagtgaatcttgtcgatctcttcaaaatttggttctaaatcttgctgaaaatgtagtttctctgcataaatgaatcaatctagctacatcaaagtccacaacaattgaattcctcaacaagcaagtcatcaaacatcatcatcaatcatctgatcttacgattcagtcattatttcatctgtaatcaaaccaataacgctactaaaaccctagatcagatctacataatctaactatatcaaagtctacaatagttgaattccttagcaagtaagtcatcaagcttcatcatcctctcaagttgcaatcaataaagggaatcaaaccaataccgctatgcgaaatttactactaaaaccctatttgagagctaacactcccaacttgcaaagtcaaagagacg

SEQ ID NO: 50976 - DNA, 575 bp, Arabidopsis thaliana landsberg
cgacatacctcctttgaagtacaaccggacaaacagaggatcgcagatagcttgctttcttatttatccacaatttgcggaacagatgaatgtttgtataaatatgtactttatttgcattcaataatccgatcggtcaataaacattttttatggctgaattcaactcgtaattcttctaatacaggtgttatgcacatcaattcacaccggcattcttccattggctccaaaatgccccgagacctgcaactgacatgcatttccctttgtggataaaagaaaccaaaaaattttgggcggaaagtgggaaaaagtgttattttgtggtaaatttttaataccaggttgaaaatcagcgcatgtcaggttttttaggagaatatgagtccacgttagatgccaaagggcggtttttgttcccggccggcttccgcaagcagatgccggagacggaaacgccgcaatacgtcatcaacaggggctttgagaaatgcctgacactttacccgatatcttcctggcaacctattttcgataaaataagccagctgaatgatttcgatcctaaagtg

SEQ ID NO: 50977 - DNA, 558 bp, Arabidopsis thaliana landsberg
cgcactgatgatagcgcagcactacacaacacaacaaacgcgctcctcagtgtcacagaccacactaaaacaacttcagaggtagtttttatcatttagaaacatataacctaaaaaaaaggcaaaactaaaaaaaaaaccagagcaatagaaaacagaaacataacctacataaacataatccagcaacggtagtcggatggttattggtacttgggacttgggtgtacaaactacaacgtaaacttgttttcctccagattcgattccaattattggttcgaaaaatataatagtacaattaaactttaaagcccactaagacccaagtaaatagactatcacggctaaactcaacacactgattttgtttttgggcccaaaagcccattatgttttggatattcggatgggctatattataaaggattcagtccaatgtttgaaattagttgatttggtctatgactatcaaacaaagattacaaattgtaattgtcattactcattagttttggtttagtacagcctcgataatttattcagatttggcacgcc

SEQ ID NO: 50978 - DNA, 816 bp, Arabidopsis thaliana landsberg
acatactccgcagaattatgttatgtgtaataacatttttttgacattcagaagacggcatgtcattcaggaacttaggggcctcatccaatctcccctctttacaaataccattcacaagaacgttgtaagtcacaacatcaggagtacatcctctatccctcatttcatcgagaagcttcatcgcatatcccacaccactatctctgcaagtagcttcaatcaatatagtgtaagtaatcacatctggataacagtctctctgaagcatcctatcaagaacctccatggcttgcttaagtttcccactatcacaaagagaacgcaagatggtattataagtaacaacatccggcgaaacactcatcctatcaagaacagataaagcgttattgatctccccagctttgcaatacccactaatcataacgttgtaagttataacatcaggaacagcaccagaaccttcaagaatctccaaaatcttagcagctttcctcgtcttactcatcctacagaatccacggatcaatgtcgtgcagggaatgatatcaggaacattaccgtgataaaccatgttctctagaaacttaaacccttcctccaattctccggttctaaccagctgacgcaaatggttattactctcgacatcttccaacgcaaaagacgaattcacagagctataatgaccatttccgttactattgctatacccagaagctaaagtttcgaacttttgagctctaccattaagacctgaactctcaaccttagaagccgcagaaaccagaacaagtcgattcctttttcgtg

SEQ ID NO: 50979 - DNA, 766 bp, Arabidopsis thaliana landsberg
cgagtgctgcatgttcggttcccagattgagcgatataaagatttcatctactgttgcagattccacagccaacatcttgtacagttcatcaccgaggctgttctttccagactgttacaaaacaagattttagaggtagttgtataattatgactatcacaagggataataaagagtgcaagcttactttaggtattgcttccttgataacaatgggaactggcatttcaagaagaatgttttcgtttatggcttttgtagctttgaagacttgataaacaacttttcctttgtcaagcaatttcttccttcctgagttagagagtccaggtttaggcacttgtggcgatggaagccaccatcgtttgctctcacttgtactcttgttcttcccttcagctctactaccaatctcagaataccaaaactctgtgttcaccatagaatccagtgtctcctgtggagttgtaatgcaactttaatcagatcaggaaatataagaataagaaaagacaagattaacaaaagagataatccgctcacaattagcattgagtccaacttctgaagagctgggagattcatatgaatgtctgcgcgggctttcggagtcattatctgttaaaacaaggattcagctcagtttcttgctctggagtatatctatttattttaacaccttagctacgtacctcaagtgatcttgcattggcatcattttgcttataagggactaactcaatcatgtagttagttggagaaaag

SEQ ID NO: 50980 - DNA, 522 bp, Arabidopsis thaliana landsberg
ccactacgcttctaaccgcaacgaacaatccaaagagccaaaaaagactacgaggcttgcctctagaatagcgacccgtcagatccaaatacgcaaccatcggagcgggagaaaattaaggaaagagggacccgagaagagaagaatcgccttaccgaagctcaccaacttgccagaaagggactgtggtacctgaaaaaacggcgatgcacccgattccgcaagtctagaggatggtcccgccgataggagccgcacttgctacaaactccggatatgggcacttgctctcaagaatcaatacaaagtattgtatggagaattcatgtcaagttttttcacattgcgatcccacgacgaagcagtggaggaatatcctaggtgttggacctcaccttccattgaaaggtgcggtttacatccacagggctatctattaccaagtagagactatatatgacactacttctcgaataaactgataagtttgatgtagatctgataaaacactgatggacactg

SEQ ID NO: 50981 - DNA, 1155 bp, Arabidopsis thaliana landsberg
aagttgaatggttcttttatgtaaaacatttataagatcgacttatgagaaaatgcacatgggggggtggtatctgggaatgaattttgaccagcaataaaccaatccctacttggacggaagattctctatgcatcatccggtggcataatttaaactatcgaccattatatttccaccctatttgtatttttaatttcaattaaacagtctacaactaaagtttttatatcattgcaacttgtattcctgattccaaacaattgtttacggccatcttaattatcccctgttttttaatacatcaaccgactattttcgatatagctcaaatcatgtttaaaatatgagttttcttcaccaactaaagattagtactcatattttatcacagttagcatcataaaacatataaaaaacaataactaaatataatgtgtcaaaaaaattcgaactcaagttgctctagtctagttcatcgataagttagtaggttgactgtttttttaaaaatgttgataatacgaagtaacatgaacaataataaataagcgaaaactataatattgatgactaaaaaaattcctttaaggagtagtactagttggtttatataacagtgggactactaaactttcttcggtagttttaaaatttagtaacatgtaatgccaacacaaatctgaacgttgtactatactagataatatataacaaaaggtttgtattttttaataaaaagaagttaaattataaattaaacaagctgcaatttttctattacgattcgtttggtacaatctgattcatccaaatggagattctgtttatgatcacctttttccaacttctaaaccttttctaacttaaacgaatgaaactactgattaaacgaaaatcataacacaatatgatatatatatttcttttttgccaactatatttgactaataaaccactttttgatcactcattagtcattaatcacttatttaagtagcttctatgaataataattcagcttccactcacccatttcaagccaacaactcaaataacaccaatttgagtgttagattccatagttttaatgtgaatttcagtttattagtatgtgaacatggctaaaggtgggtaagccgattagccttgggc

SEQ ID NO: 50982 - DNA, 359 bp, Arabidopsis thaliana landsberg
cggtgaaaatgcccagcccttgctacaatagacgatatgtaatatatgccagaaacaatggcatgaaggaaacacactttgtctccaatagagaacacatggttgtttgtgaatctacatcttattcttgactctgtgttcgaccatatcccattcgcaaggatcaatgctccaaagattcctaccaccctgcatcaattaaccatcatcgtgtcaaactttaaaccataatccaatcaagagctcttacaaatgtttttcttaaaaaatagaataaatcactaacacatgttattggtttgaatacgtgatacaaccttaatcttaaaacaccatggtcggtatgttttactactggt

SEQ ID NO: 50983 - DNA, 1405 bp, Arabidopsis thaliana landsberg
gttttttctccatttcgttacgcacaagagatgtttaaaattaaaccctccgaagtttgtttctcacttagagatcttactaagttgcatggttttattgttattatatccgatctagaagctatgagagaaatagtcatgacccgccgtaggaaggcaaaattttgtttgtttgttgcaaatctgggtgggtttgatgttggaaaacaattttaaaaaattagaaatctcaaattctcggctttggctgatgcatcaccatggtggtaagcaatgtttaagaacgaaagataaacaaacccagccctcgaaaaaaagttcttgaatgcgctatacagttgtcgaaagcatcacactatcaaggaacattcaaactgttttacttctcattgtaacgcgacttttaaaagtatattgtagatgtcaactatatagatagatatgaagtcatgattcatgaacaaatcataagagataaaaaaaagaggcaagattccacgacattctctattcttttccctccatttctttaagcataatatatcttcttcttttttaattactaacaaactgcgacaagtgtttctgttaatcatccttacataacatacgccaattaatcaaagctaacacaatgattggtttaatattgtagcaccaattattcgtttcacatgcactctcgccttccactaaactttgttataacgcaaatgcatatttatgatacctttcaaatcctcaaaccgattaatcttttggtcggtaaataatctctacccttagcctagataatttttaatttgagcagattgattctcttttttattattagttatgccaaaaatttctacatatttctccattacattaaactagtttttgctatcgactttgaatttaaagtcaaacaacactctttaacttaccggtcgagttattgcgttaggttatttctaaaaagtaaaaagtgtttagttttggattggaatatattctttttaatagtgttataaagtaacttaaggataagaaaattgaaaaccatcccatcacttccgtcgatgtttattatggtcaaatcctcaagctattgggaattttctactgcaaaagaatattccgacgccggccaaaaaaacataagtttctggtcaatggggacaattccaattctctgataagactcttattaaaaatgcacagacagacaagaaagactaaacatatgacacagtttgtatatataaaaaattatcataaccagaaatttagggtattcaatagccaaaaaaaaacttgatgatttcagaatacgtaaatcattttcttaaataatgaaatttaaatctggctctgtttgaaaaacaaagtgtcccttctaattagttgagctaatccccac

SEQ ID NO: 50984 - DNA, 513 bp, Arabidopsis thaliana landsberg
tgaggccaaacgatacaacagtgtttttcacacaacatattgaaacgttaaacgaagaagggcaagcaattggagaaacatacatgaggaggaattaactttcccgggttcatgatatcgtttgggtccaacgttttcttgattctcttcatagtttgcagtgcttctattcccagttccttctccagatacttccataacataaccaaaaaacccgttcaaatcacaaatggacattcatatcaattgaacagaagacatgatatgaataggagaagctataccttcatttttcctgttccaacaccgtgttctccagtacatgttcctgacgacaaagttcagaaccaagtggcatcattacaatcatgttttctaaatccgggaacaagcatatacacgttctaattaatagccagaggtatacacttgtggaagagaggagagtaaggaagttgcaatataatggcaacttaaatttacacgcccttctctgttaaaggtagtaaacca

SEQ ID NO: 50985 - DNA, 1263 bp, Arabidopsis thaliana landsberg
ggagaaaacatgacatcacattccatatattgaattttggatccataattgaaaaaaaaagttgtaaaaaatgaacactaaattgaattccatgtgtattatagtgtaatacattcaaatcaaggaatctgaaataaattattgatattgtatggaccaaccactagagaatctgacatgtgtccaccgttccaaattaagtttgcgaattggttatatgtattttgtgtgagatgaagtgaatcccaaaaaatataatctttaggattctcacacaattgatattctttcacaattctcttccctccacagctgaatactcctctccacttcccagttccacaacaagcttcttccccttctttaaacccttttatttatcacaaaaatggtattgggttatgaacatatactttaatggccccttaaatgaatatcataagtggaatagcccaacaaaattcacaaagagctcacttaccaaatttagaaggatgttgcattctgagtctaaggcttttgttcatgtcaaatagggagaatttgaagcccttgacttgtctttgcatttgaaacaagagatttgtcagagctctgttatgcatgcttgctaatcttgaagcatctcttaagcaagaatcatcattcttcggttgtagaattcgtaaagccggaaaacaacccaagtcaggcacattcaagaacccgaatttacgtcctccaatcttgtatatttcctgttacaaaatattataatggataaatgaatgtaacaaaaataaggtttatattatgatgatgatgaacttacatgaatgaatgtagtcagattaccaatgacaatgtcaacatgttgagacattgaaatgggaagagattgattggtcaagaaaatgcttgagtagtcattgctcccaatgcttatcaaatagacagctcttgagattctcttcttgctttcttctttaccaaagtttgtcctccataatctctccactttcttgtagtgatccaattgtgttctcaaatttataaccttacaattattaggaattggttaccacgttgaacaacatagaataatacatctgacctaaccttaaatataaaaatctaattgtcctaaataagtaagtgggtactacatattttgcaatttaattattaaaaaggaattctactatctttatatataactaaataaagcatgtaaaaggatacaaaacacatcgtaggtgggacccaaaaactacattttaaaga

SEQ ID NO: 50986 - DNA, 938 bp, Arabidopsis thaliana landsberg
  unsure (1)..(938): unsure at all n locations
gaaaacctagatcaccaggtggtgtgccgcagcaatcaccgagtagtcaatgttaaagtatactcaaattcttggattctctcatgtctcgcctacgcgaaaatcatgtatgcacatccatactttcaattatactgttcgtttctaccagctctgcttcatatgacttgtttttttccacagaaactttcactctactgagtttatgtagattatattgctctaaattattgtcttagatatagtacttactttgttattttcctgttgctccacatatgaggataaggaatttgactgctcatgtaccatgtctatttttattttttataaccagactattgtattgataggtaccctcgttcttcattcgcaaacttgtgactcaggttttctcattcatcaacctatcacttttcaacaggtaaatgtgatccaaaattcagttctttttgtatcacttaccgcatattacttttgttttctgtatatataatctgaattcttcttcagtcttcttcttcgtcgtgaatgttgcacattttcaaatggggaatatgtgaaatctgggatttcagaattggagaagtggatagctaatgcgaaggaggaggtacaccatgttatatacccgttggttgcatcttatatagatgctatcaatgatctaaaattttgtgaatgcagtttgcaggaacattttggcacgagttaaattaccttagaacagccggtggattcttgggtaaacctcatcttcttctctgataaaaaaagtttgctttcttttttttcagttcagcttgcattaactgctttgtattttatgcaatttaaaatttcatcttaggttatacaccagaaaaaaaagacatcattggatgaaatcaggcaggatctatgcccagnacgttaatatattggtttgaattccgatt

SEQ ID NO: 50987 - DNA, 619 bp, Arabidopsis thaliana landsberg
ctgacatatgcaaagcatgaactctatattttatattttagtaacgtagttttattatttattgaaaattcatgcatttttattgaatattagaaacgaaagggtcaagtgcagcatgttttgtctccttccattttctctgcgagacctcatcatcattgtgagaaaacagaaggaagaaaaatcttcagagctcctttattgcaaggtatgtcatatgtgcaattttttgtacatgatttttatctatgatgatagatgttgaaaaattctatttgttttgttcacgttttgaaaatttctgtaatatatgaacgatcataacgcataagatgaaaattagaacaagatataatgaacgattcctgcttaattcatagacaattatacaaatagcgtgtaatgttcatcaaaagagaactaaattttaaccaaaaaaaagtgtgtgacatcttttacttttgtaattattttctttaatcacgagtgaaaatttctgtagtaatagtaattggcacaatattaatttgtatggtgaaatttaatttgtatgctagctattctttcatcatgacaatgtttgtagtataggatcatattctatattttctctttttgt

SEQ ID NO: 50988 - DNA, 805 bp, Arabidopsis thaliana landsberg
  unsure (1)..(805): unsure at all n locations
aaaatgaacgaaagatgagaagagacatgaatcaaacctttatttttatttagatgattagatgagatatatacattaggaattttgattcgttcagttaattttgttcagtttcataaaatttaaatttgatttaaggttcagttccaataattctatttataagattttaaactattagtattattcgaatttggataagttcggttagattcattcatgttttcaccactcatttcctaagaaaacctttttaaaaacaaggtcattttaagaaacacataattttacacgaagtcgttttaaatgaggtagtttaaacgaggtcgttttatcttagtaaaacaaacaaactcctatgcttttctctatataatgcagtgtacgagtcttaatttttcgttatactacgtattcccaagaagatcatcaccagaaatctctttcatcggtaagtgtttctcgcaatctaatcttatattttgtttttatggctcgatgattattaagcttaaaagtctttactatgccttcaactcatctttttaaaatgatttagataagataaagataaaaaaacatcgttttataaactaaatatacttagaagcagaattgagttgtttatccgagatgtatgaattttatatttagattgtattcaagaagtgatatatttcatatttgattcgtttagttaatctgttgtcgatctactactatcacagaacgtgtgatcccaaacggatactcatagcagatctaatgaatttctntagcttttgaatgtttcttatttttcaat

SEQ ID NO: 50989 - DNA, 378 bp, Arabidopsis thaliana landsberg
aatctcatctctctcgtctcccctcggcgataaggaaatatctaaccagaccggcccaaggagcgggcaaaatcagaaagcatttgatcttcaaactcttgggttcttctctgattgaaaatgagcttatcatcgccaaccaggtccgataaagttccaatttttgttctttcgattactgttatgccaattttagtactttgcttttgctcattctgttgtagacagtgcttgtagctcgtccagatgttactcctcgggattatcgtttccgattggatttggatcgaatcccatcaatgtgggattggtttgttacccaaaaagacacagtattgctgctcggaagttcgtagtggcttgctcctcctcctcttc

SEQ ID NO: 50990 - DNA, 531 bp, Arabidopsis thaliana landsberg
  unsure (1)..(531): unsure at all n locations
ggcttgccggcgccggattcgctgacgtatttgagctggtatttgccgaactccaccagatcaccatgctgcaggacatgcttcttgnnnnnnnnnnnnnnnnnnnnnnnnnnnnnnnnnnnnnnnnnnnnnnnnnnnaaagagtcgttaccgatggtgacgatcatggcgtgttcgccgctgaccgcaagattatcgatatggatatcgttgccagggcgccggccgatcgtcatacgatccttatccagcgcatattcgccgaggaacgcaccatccagggaaaaaatcagcttcgccatgttttaccttgctatcttaaccagttaagaaaacgctcataccaggcacgctcgaccgaatatggtttcagcacgcgcaccaggatgaccgatatattatccttaccgccattgtcattggccatttgcaccagctgattcgccgccagttcaagattagcacttaatgaagtcagcgttaatgctatctcttcatcctccaccaggtcgctcaggccatccgaacaca

SEQ ID NO: 50991 - DNA, 572 bp, Arabidopsis thaliana landsberg
  unsure (1)..(572): unsure at all n locations
cgcagcatcataagcgccaatttttgttcctggtcttgcgcctgttttcatagaaaactctggatcaatccctaggtgaacgttaggcaattttaaatacttttctaatcttggcaactcgtctttcagcttgcttaaagccacctgcacatctaaaaacacgatagcatcgtggttatacatttttgcgatttttaacaccgaatcaatctggctatctggcattctgttaatgtacattccatcttttcccggagtaccactggctacagtagcaatataatgtaatgctggaatagatttaacaaccgtatcggctctgttccatttggcaacctcctcgtccaattttctccacatttctttaggttcgtaccgacctaaaggacccattttcttcacatataaattcccataataagctataatcctgttaaaaggtaaaattgcgccgttaataggtaaaggatcgttttttaccggccatttgcctgtggtatcgccatttgccaaatatttctgcaactggtaatatnttgcagaatctaccggtttgtaaggaatttcttttg

SEQ ID NO: 50992 - DNA, 725 bp, Arabidopsis thaliana landsberg
caatttaattgtcactttaatacatatcctttttgtctatttattaactatctatttcatcatctatatggggaggaaataaatatcttgtagggagttggagtattactcaatggcatgcttggaggcatcacagggatcacaacatcaacgtaaatgaaactcatctctaaattacacgtttattttattttccgagcatttatctttagcttctaatatataaattctagtaattaaaggctaatgatatagttttgatatgggtgtaactgtatattcagagaaaatgttggacttttggccatgactaaggttgggagtcgaagggtgatacaaatatcagcagcattcatgctttttttctccatttttggtatttttttttgtttaacctatatcttcctatttgtattgtataaatgatgttatgaatatcttttactggtttagcaacttctttattttgatcaaaatgcaggaaaatttggagccttttttgcgtccataccattaccaataatggcatctctttattgcatcgtcttgtgttttgtgtgtaagtcgcttcatcacatcacatttgtaatttctataagtgttaagattacatttcctataaatatatgttatatactttttactaaaactaaaatcaaattcaatatattgcagcttctgcgggacttagctttctacaattttgcaacctcaatagcttcaac

SEQ ID NO: 50993 - DNA, 587 bp, Arabidopsis thaliana landsberg
caacaaggccatggtggcagtcgttttcaactgctacaggttcttcggagattgctgaaccaacaaatctgcgaacttttgtatcttctctaaatctagcccgaggaggagagtttctgtctgcttcttcatagctttcaggtgaatggtctcttggcaggagaaagacaaaagcttttccagcctcatcattttcatccgcagtttcatcagtgttttcatcatcaatgaatatctcaaaggactcttgattaggctgggatccacactgagtagtactagtctttgcttttccacttgtccctgtttcacattcgagattctcgtccagaaaaacctcaaagctattgttgcatccttgattttctttgttctgacttctctgtcgtgatcttctctgaagtggagcagtttctataggctctttgaacatgttgttgattgtattcatggcttccttcatgtttattgtgggatccaccaaaccgtgatggcaagcattttctgcttcaggcttccctacaatggctttatcaacaaaattcaacacaggctcatgttgttgcctctcatcaaccttgtggtgc

SEQ ID NO: 50994 - DNA, 684 bp, Arabidopsis thaliana landsberg
gcactaccattgaaaaatttatagtcacccaatttgtaatttaaaatatatccaaattttgtagaccattgttaaatttttgtttaactgttaagtagctaaccgattcgagaaatttatagttaccacccaacaataacacatcatatatttttactaaaaccactttccaaatgatataagcgattttatcccagagagaccattgtaatattttatagttataagaaagaaattgaaaacaaaattatataatttgttttcttgtgtaaaaaaactaaaaaaagcttcgagagactcctttgctcacaacatcaattacattgtctaactaaattagtgcctgatttcggtcatgagctagatattcataagggaattttaaatggaaaaaatctctttaaaatgattaaattaattggaactttgttttctacctatcgacatcctttacttaatttatattataacgaaagataataaataatttagaccctacacattggcatcacgtattacacgcgtttagggtatatttggtatgactacttttaccatttttattggtctctataaaaaaatgaaaaggacaattacattttcattttcttaaggagaccggcaaaatttcataacaagtggcaaatggtataatcttcataacctatacttataaatcgaata

SEQ ID NO: 50995 - DNA, 570 bp, Arabidopsis thaliana landsberg
gattaatgctctcttacgtaatctttcttcttcttttttattaattttctatactaattattaataattttgtattagttgtttaattggaagacaagagagtggtgttgaactttttcaattcacttgttgacttctttaactaatactatcatagagttgttttgtttgatgtcatttttgtcggaacgagtattattatataaagagatttcgaaacggaagttatttttacttttatatgtctaatgagaagaattgtggagtaaacaagatcgattagcttttacaaatctagaaaaatcgaagttgtaagcattacatgaatggttaaaaagtttgaataaatcgagagtgataactttttccaacatatttggatacgcctgtctttgtgccaagatggtttgtttggcttcacaaatatcgattctacgtatctttttgttttctacttatttgtactttactgtaccccggaaacaaacacaattacctttttcttttcaagagcaaaagtctcctctagctaattgtttttttttaggtttttgtggtcttaatctgcag

SEQ ID NO: 50996 - DNA, 592 bp, Arabidopsis thaliana landsberg
  unsure (1)..(592): unsure at all n locations
aattcctatgacatatagatatttttctcgactatgaccgagtttatcttttgagtcactacaaactttacatacccgttatatattctaaactttagtttgagttttaatctaaaatttatcttcatatgatatatatttaaaaatagaacttttcacaaactaaaataaatttataactataatatcaaacatgtgagtaaaaaataaagaaaaactagaaaatcaccccgtgataaataaaataaaaaggatcagataaaagaagaaaaatatgtatgtggtaaatgaacaaatgataatgatgggaatgggaccaaagttgaacatgaatgtcgtgaagaccagagagtgggtgtgaattgtgaaatgtggtgctgattagttgagccgaataagcaaaaaggaaatggggacacgtgagttgttgggtctctcttcttgtctctatttttagtgagcccctctcttttcttctaatgagcccctntaatttcttatcataactatccacgtggcgtctcccctgccttntgtcttcttctctttgttcacatgtgattcgcttctgtttccacaacatttataatcc

SEQ ID NO: 50997 - DNA, 527 bp, Arabidopsis thaliana landsberg
aacccgaggaaacattgggatacgaacctacataacattttatgtttattcgatgagaagtttaatattgggggcgggttgtaatgagtcatatgattccaacgttaccacattaacttgtcctctgagattactcaatcgagtcttactatcaatagtgaagatctggagacctgtatccataagatcaacaccaggagacgggccctggacatgaagcataacttctttcgctttcttctcaattctaaatgaacccacaacttcatgccagtcaccatcatcaacctcaacttttcctccattaacccaattaccatcaacactgagtgctatatttacgtactgtggactggtacgtccttctgagccaattttaacccaagcggagactctgtatgttacaaacagcttcactttatcagatattgtttgagccggacccatccatgttccacttcgactttgtcgaatgcacatatcttccagatagatatccttgggttatctaagtgagtcactccccg

SEQ ID NO: 50998 - DNA, 658 bp, Arabidopsis thaliana landsberg
  unsure (1)..(658): unsure at all n locations
taacatcttcaaacactaaaaaattatgacatcatctctacatttaaaagcaatggctgaattcaaaaggcaggaactgccatactcatacctaagaacattttgtactggttttgatgtatcggaggatggtaccgcatcctgattgttgaggttcttcgtcctgggattcaccatcacggagcttcctgaatgatggtcctttcgtcgacccttccctttcttcccatcatctttcctctgcttcatatccttcacatgccgaggtttccctacagaaggtcctttacttgagctgtgacccctttcccgtgtttctcgctcgtatccttccttgtcctcttcttgtgtgagctatcgtctaaagctccatctcccaagccatttattgtgctccccttgggtctaattgccttggacccaacacaaaccattgctcatgtacacttcgacagcagctgcttactctgaaacgagacagagaggaagcagaatcagcattctgaaagaaacaagaatcccagagaacggcaaccaggggcggaccagtacgtgggtgtcacatgtgcaccaatanatcatgcaaacaagtagtagggcatcaatagcaaatactttgagtagggttgggtctcggtgcgtcacatggaaggaaaga

SEQ ID NO: 50999 - DNA, 623 bp, Arabidopsis thaliana landsberg
tcgtatccatacaaagattgttaggattaatgttttttttttttgtcgattgacattgttttgattaattacgggaacgcgtgactgacaagttataatagtctttttaaatggtcacccaaaactaaataaagaatagtgtttgactcaacccattttctggagtagaatttcaaagccagtataataaagtgacgtatttgcagacgtggaatttaattaggtgaatactactatcgttgaaagttttgcattttatccgtatctgtgaagaacaaaaaaaatcaatattaatttctcaatcatactatatactaagatttaatgaaagttccttcttcctttcgtggcgaccaacagattactagtctattcaatcaaaagtgttttggtgggttaataagaacaagaattatggaattaaactagcataaaatagggtgttttgatttacatttttttaatcatggcgacgctttatttgcataatttataattcattatgtctttttaaatattttattttggattttttcatcatcgacatatatacgttaatatttattgtaacaagatcgacacactaacgtgaaatatttgttaatgtttttagtaaaaacata

SEQ ID NO: 51000 - DNA, 914 bp, Arabidopsis thaliana landsberg
tctcataaacttaaagtcgtcttctcttctctcgtttttttttgttgcttttctcggtaataacggtattttggatgtgttttggtgatgtaattctgtgtgtctctttataaaagagacaggttcaagactgtctttgaattggttgtgggccatgatgggcttcaaaaagcttacacccccgcattgtttgcaatcaacacggaatgcattgtgtcatgctcacgtcactctgatctaacatttgttctatatgtttatgatatgtcttgcaactaatttaatcagtcaaatgacagaaaaccgagaataattttataacccaactatattgatactgaaactatggtttatgttttggtttaagaaggtttaaatatggtttcacgtaaaaacttgtagttgttatgatttttgtatgacaagcaaaatgctaaaccaagattatataagtttattttcagttcagttttcattgttgttgattcggttatagactagactgaataactcggttactttctttgattgatcaatatgcaaatttggattcaatagttcacgataaagtgaaaagtttctgagctataagagagtgaaaagtaaactagactttaagctaataaataagacaatgtcgtaacttttaaaataaattaatttattggccaatatgaattgaatcttctgatcatccccaagtttaaaagttttaaaatatggattaacatcgaagaccagttcaaaagtgaacgaataagagagattatctctagacactttctactagccaacgtgtgacatagggatctgacacgtgtcacttttgcatacatagacacatatgtaaccttgacgtcatgaagattgggttacagaaacatatctgtatctccgatgaattaaaattggaa

SEQ ID NO: 51001 - DNA, 783 bp, Arabidopsis thaliana landsberg
aaacctcagccatcacagaggcttttggggaatttaggtgagaaacagctgagccaagctctataagtttcctgttaatagcttggattcttatagagtttaatttcacttcaggtctgggaaaacccaattagcacataccctttgtgtcactacgcaggttggtttctttcctacagtctcaatatgaaatatatgttgtcttgtttacatttcagaggcatgagatgagattttactttctttcagcatataaaccattgaggtactctgtctctcaatgtcattggtattcattttctgtattgatgtattacagctacctacaaacatgaaaggagggaatggaaaagtggcatacattgacacagagggaaccttgtatccttaatatcttataacaaatcttctgaccagatcttgtgtcttcattagattgtttctatattccatgatttttccttaacccctaaattttgtagccgtcctgataggattgtcccaattgctgaaagatttggaatggatccaggagctgtgcttgacaatgtaagcattattaacctcacatctttacttactctcaggactgtgactgacattcaaaaatcttattcatcttgatataacagatcatttatgctcgtgcttatacctatgagcatcagtacaacttgcttcttggccttgctgcaaaaatgtctgaggaaccatttaggattctggtaagtaaaacatgtctgaaattttagtttagttatccattcaaatatgagttaaatt

SEQ ID NO: 51002 - DNA, 798 bp, Arabidopsis thaliana landsberg
cttgcttagaggttagttttatgcgggttttttatgtctgttgaactctcatgtcctctgaactacgtttaactcggtttttccaaaatatacaggagatacggggcttgtttcctcccgaacacaacccattctatgctggttttggaaacagagacacagacgagataagctaccttaaagtcggaatcccccgaggaaagatcttcattattaacccaaaggtacacattcttaaaattggaaatccattagcataaaaagagaggaattagcaacattttgtggaacaaactatgcactcaggcttaaaggactcaactgtttgtttgcatttgcatctgtgtttgtttgtgaaaggagactatgagttatatagtaagtttgcatttcgtatttgacattcggtcttccaaaatgcaaaaggaaaaatctcatgtgtttgcaaacgcaattattggcattagaagcaactgaaacattgcttgtgagaattgcagggagaagtagctgtgaatcgtagaattgatacaagatcatacacaaatcttcatactcttgttaacagaatgttcccagctacatcctcttcagaaccggtatatatatcatacactttactttgtccatttcattgaaagaagttgcggattctgatgaagttttataaacaggaggactttaacacatggaatttctggaaactgcctcctccatcgcttatgtgatactgatgatgatgatgataaagatgatgatttgtcttcaagaaaatgcagattagttgatagagataac

SEQ ID NO: 51003 - DNA, 855 bp, Arabidopsis thaliana landsberg
tattgattgaatacatgacgatatgtttaaacggagttttctcgttaaataatcttatatataaacgggggtgtctgattattactcatgaacgatatacagtagatcatttttcgttaacataaaattttatgtatttgaaaactctcatttagtttagcatcgaaatactttcagttttctgcgaacatatatatatattcggatctagtggattctgattccagatattaattttagtgtttcatttttgtaatcaattaatagataatacatcttcgcaatatccatagtaaaaaattcatcccacctctatggatcggtcaacttgcttacaagtacaagatgtgtaagtaaaataaaatataaaatgatcatcacttaccaatagaatttcatgttaccgaatgaagtgacatcattggatagcaaacattttcttggtctccatgaaactttgtcatttactccaacttgctctcccaccttctcctctttttttttttctgatcactatcttaaaccatttgataattacttacaagtatctttaacaagatcgagactaactaaatgtaaagttacacataaatccgaatgtttctagcgacaaaacactgacacgcacacagaattgattaaaagtgtagttaattaagaataagtggggacattgggacaagaattaagattagggaccactttaaacagtgattaatatgtggttcatagacttaagacgttgcctaaactcttgtgaattgtcatttaacacaaaatctagggagttcttaagttgtctttgtgattttcaaacagtacacgtgttaagcatctaaattctttaaatttact

SEQ ID NO: 51004 - DNA, 523 bp, Arabidopsis thaliana landsberg
aacgccttgaagctccagttcatcaacttcaaacactggcaataattccactgcatttatacccagatcttgaaggtgtgggatctttagaaaaaaaaaaagagagtgagctataaaagaagctttgtacatatacaggcagatgtatcctcaatatctatcataataagctttttcacacttttaacgtttttggtaaatgactcctgctaacaacccttgtgcagtaagcatgaatgtgcagtaatttcagcatctcaacacatatgttttaagtagaatacaatcaccttctcaatgaaaccgaggtaactgcctcctatagctgggtccatcccactggattcatcagcagtaaaagcacgaacattcatttcataaataacaagatccttctgcaaaacagtagcagctgattacaaaactgaaacaaaataagggagaaaccataaatgctgcaggaatacaaattccatattcaaagtcggaatcgtgcaacaactagctgaaggaaacaaatgca

SEQ ID NO: 51005 - DNA, 870 bp, Arabidopsis thaliana landsberg
attctaaaatattataaagagtttatcaacgttagtcatttttttttggtagttggaggttacttacgcattccaattttcaataagttggatttaaaaatacactttatgtctttgtctaagaaaaaaaatacaccttattcctagtttctgtcaaagttttacaaatttaactaaacttcattagtgtagtattcgagtcaaataaatttatatttttggttgaaaaaaataaattatattttaaaaattaaaaaacaaaaaagtgaatgaaacattgaaaactatgttgagtcgaatgaatcttacagaataaaaaaaatgtttagtcgtatgaaacgacatcgtaaagctcctgcgacataactcgacgacacttcccggtgtttgaatcagcgaatataagactgcgatgctgggctggagtcttccgacgattgcttcattcaggtccgttaattcgaacgtgaaagtatcttcgtatttattctagtctttaatagatcttgattaaaacgaagaaagagttctgattagaacaaaagaccaattttgattaccgaatcttttgtgtgtttggtatgattgtttgtgcctgagtgtgttgtaacatatataagcttggttttgagcttgaagttagtgtaaggctcggtgtgaacgatttgttatcctttgaacttatggatcctctttcccctgggactcttattcaggccttgacggattttttcatcttggagcggtggatgatgaaggtaacttgactgagataggccagatgatgaatctcgaggtctaaacctaattaatccatatatataaatatgaagtttctttgaatttctttgcataaaatttcattagata

SEQ ID NO: 51006 - DNA, 1153 bp, Arabidopsis thaliana landsberg
  unsure (1)..(1153): unsure at all n locations
gacccataaaagagtccaaatcacccacttacataacaactttctttatagactgaaatcatctaatccaattagccgaaatttgtacggatattggcgtcttgcctcaaatcttttaccacaactcaatctttacaaaaaaaaaagaaaattggtgtaatgtttacgaatttctaataataatattgttcttgcacatattgatatgtggaattttgattgtcaaagatgttatctataaaaatttacttaaagctcttcagtcacctttatctcatcataaaatataatgaaaatgtatatgttattttgatattatttcttgttctatttgtacattaaagggacattaacacattataccactataataattgtttaagaaaattcaatatgcaatataaagcttttctaaagaaaagacatcctcatatgggctttaatgggggcatgtgcatgtgggttgtgctggtaaattgggtcaccagactctcaccacttgcaattgcattttatttttttttggttttataaaacagccattatttccttgagctaaaaaaacaaggaaaagttaatatattagctttaaattcagagagttttctgttccttatttcccccaacaagttacatttgatattttccttttgccaaaaacaaaaacagcaataaaagaaaggggaaaaaaagaaaaaagacagagatgatcattaagcacattcaaacaaaatctccaaaaaaaagttacgagtcagttatatcatcattcatcaatgcatcatcattcatcaccaacatatatatgcttggccatatcaagaaacaacagcttttgtatccgtgattgtcaaatcttacaaatataataatttcccataaaaagacaaatattttgctatcaattcaaaaccaacttgcatacacacaaagacaaacacttcacatggttcttgtcaatttctttacccacaaatagataaaattcaccatcagaatttcccgctattaaaatgttcaagaatcaacaaaacaagaacattcttctcttcttattcttacccattttagcaacataaaaaacanaccaaaaacagaaataaaaccaattatcagagataacaaaagtggattttcaagaagaagaaaggac

SEQ ID NO: 51007 - DNA, 344 bp, Arabidopsis thaliana landsberg
tgagggcaggtcgacaggatcccctaaaccaatcgagcaaatgcagaagttaccgattgctgtcaggacttggtggaagtgtccaaaagcttcggagccttgaggaggttgcctagctgaccgtctttcctggcacccatggacgcaacaggggtggcaccgtcgctggtggcgatgggggagcacagatcaaatgattgattccgcataatcttgggaggtttctatatacatagaaaaatcggatttaacctcagacaaaacatagaatttaatgcaactctagtttttgttaaatgacaaatgtactcacatgtacttaagtttaggcatagtgggaacag

SEQ ID NO: 51008 - DNA, 272 bp, Arabidopsis thaliana landsberg
gaaaaaaaaagaaaaaaaaaaaaaaaaaaaatttaattttaaaaaaaacaaaaaaaaaaactaagacaagttaaattaaaaacaggaaggcccaaccataaaaaataataataaaaatttaaaaaaaaaaaaaaataaagaaatcaaaaaataaataaaaaataaaaatcactaaaaataaaataataaaaattaaaattaaaataaacaaaaatatacaaaataaaaaatacatgatacaaataaaaaaaaaaacaaaatataaaaaaaaa

SEQ ID NO: 51009 - DNA, 389 bp, Arabidopsis thaliana landsberg
aaagaccggtactcaaacacttctcgtctctaggctagagagtgaccgagactcgggcactctcaatctctttaacttttttcatcaaggtcctacataccccaaccaagtctcgctactttgctgcaaagcccagcacaacccaccatcattggtaccactgcacgcttgacgcttcatagcctgactccacatataccgcatctatggtcacaggatcataatatgcttgccagactctttgcgatagacttcctcactgttgctgcgagagctgaaatatgccacctctcaacaatgactgaacacttatccaatatcgaaaggtcgcgaacagctgggcttagacattaaggtaggcgtttagagcatctgctctcaaagtactc

SEQ ID NO: 51010 - DNA, 537 bp, Arabidopsis thaliana landsberg
cttgtacattaataagctcttcgtactatagatatatttttttttataacaagtaatatgtgagacgaatggaaagggttgatacaaataccatgatgacactagctaatgtaaaccactaaactatagtggctttggtcatatggatgagggggttctcattaaaaaattaagggtccttaagttttgattctacagaaagaaactttaggtctaaatttgatattgaaagttgaaacagggtgtttagatttcatagagttacaagacttttacaaggatagaaatagttatggtaactaaactaacacattcgtcttctttccacttcacgaccacttcgttcatcaaaattaagcttacgctaaatatttaaatatcattagaaatgaaagttaaggcattgcatgaaataattacctataagagagttatttggcaacagaaaaatataagtctacaataaagctacacaaaatttggtgtttaactatcggattcaaaggagcataagcttccgcccataatttttaatct

SEQ ID NO: 51011 - DNA, 832 bp, Arabidopsis thaliana landsberg
aagacctgatccaaactttgtaatgctgacaccgaacaaagaacatttagctgaatgtattgtttggaaaaaggggaagagaccaatgtatgaagccgatgtggacgcagagaattttagtgagctgccaaaagaacttagaccgtcccagaagattctctaaactacaccattaatctttttgcacttttatctagtagatttagatatcaaccaagtcaagtttttaataagctcgacgaaagaagaattacttagaaataaccatttttactcttatggagtacaagtgtttagtgttcaaaattaggagtggattatctggtttaaactcttaagtttggtctttttgggcttttgatttttcgaagttcttaaatgaagcgaaatcctgatttgtttttggacttttcgttcggtttggaacgatatttatatgggatgatatattacgggtgaacaatatcaaacaaaaacaaaacaaataatataaagaaatacaacttaaatttaaaaaatttaaaaaatcgattattggtgtaccacgggttatggatataagtaacaacattctttataatatttaccataataaaggttactgtttaaatttattttcaaagtacaaaaagttttcgattcaatttgattcggtaacaaaaaaaagacccggttttgtttattccagattcataagatcataaaatagtggtttactaaacaaatttcaattcaatttctgttcgattcggttacgtatacaaaaccatagctttgatagaaaaccattatttcaaaattaatatttttattacaaaaaaaatgaaataaa

SEQ ID NO: 51012 - DNA, 536 bp, Arabidopsis thaliana landsberg
  unsure (1)..(536): unsure at all n locations
tggttatatgattttgagcgaattatgacctacataaaaatgcaagagagtgaacttttgattaaatcaagaaatttataataaatctttgtcaaagaaagaaaaaaaaaaacacaacaaaaaagagttataaaactacacaccaaaacaaaagaagaagttataaaagtgtggtcccgttatttatttccttctctggtctcatttataattttgcctgtttggggaagagacccagagagagcagagtcgcttcttctccggagaaacaggttagaatcgcttcttctctgtagaaatgttactttgaatctctatagaacagatcgaaactttcttatagattatctttaggttgattactgattttggttgtggagtctcttcgataaactttgatctttagaatttcgtaggaaaaaagaagaagtaagtcactgtttgacctagctcttcggatatatttgaggtgtntctttgcttgattttgctttcatcgtttgactttttggctcttagagagagagagagaaaga

SEQ ID NO: 51013 - DNA, 649 bp, Arabidopsis thaliana landsberg
gatcaacacttgtagtttcaataaaccagatcagattcgcaattgcatgttggttaacaaacataaaaataaaagatataaacattttaatatttaaaataaagttactatctggtttttagaaataaagtacattattttacttaatttgctattgttctaaaaccaaaaaccaaaaacaaaaatcatgatgatcaaggaaccacttgcatattgatttatcccctccgattattgttaacaaacagtgtttacaatattaaatggtagatgaagacaattccgtagataattcaaacaaattaacgaagactgggagaatttccactttaccggaagttgactaacttgcttggcaactaagcaaaaaagtcaactttatatattgtagtaaaacatatttcaccttgtgagcgttaagacatccattttcttggccgctaaggctattgattaactcacactcgtcataatgtatgtatattagtattatttttgttcaagcaaataatgaacttgattattattcttctgtttatgttgtcttctgtaataaggaaaaacatgagggtccaattattaaaaaataaagtgataattatattcaaaggtttctaaccaaaaccaacgtcataattaaaagttaatt

SEQ ID NO: 51014 - DNA, 1090 bp, Arabidopsis thaliana landsberg
aaaccacccgagagccggcaaaaaatcagctagattgtccgccgcttagagctttagaatctccgccactagttctcggggctccaagcttattcccgcctttccgccgtcatcttcctcgaagaatctttttccagtcatcattctcattatcacatttagggtaagacccgttagtaacgctcgtaactccacctagataacaaaaaattaaaatgaagttcttattttgttatgatttgatattaactggtttacgagccaatatcacattttcttattatttaacccaagatacattaaaaaaaaaaaaaaaaaaaactaagagacatttaaggatagatagtactttctagtttctataatttgatattgatagcaacggaaagaagatgaactgtttgatccacttactaaatcgagcaaatttagttctatcatatatccatatgtaatcaacgatttttaacaaggttaaagcttttaaaataaaaaaataaaaaatcattgtttatcaattcgtggattctatgtagttatttttttcttaaaatattattaattacctgaatttcatgttttctcaaaattttattcttagtgtaagctatttgttgtcttaaatttgacaatctataaaaaaaaatataaacgaaaaatgcaacgtgaaaacatatgattatataacggcagttgaatttgttttccagttaattttctcatacctatataagtataaaatatcatatacatattgtgtggtttaaacatttcaatgaattaaatataatataagattttaaggtatgatgaacctactttagccgagcgttcgacagataagccgtgaagcttttggagaagcatcttaacttcgtcatgtcggatttctgctgaagcgttgagtcgatttgtggagaagacttctaaagcggtgatacgacggaggtttcgccagtggtcaccgtaaggagccgtaaccatggaggtgtagtcataagccacatacttgcccatgatgaaacgaggccgatttgctaaaacgaagacgtttttcgtcaagaagcattcttcggctgccgtggagata

SEQ ID NO: 51015 - DNA, 855 bp, Arabidopsis thaliana landsberg
aactgaaatactgcagaggatggtgacaaaaacatatgatggtggtggattagagattatttggaaaaagggggcttatatattgggattgatgtgatcatcttacctactcattaaaccacttaaccccaatgttttttatgctcccatcatttcatcctttatcatcctacggtcaccattcatccaactttccatctccattccctctccctccaaatactattacataaataaataagatattgtcttagtttgttggttacatgcatttgtcccttacatagaatatgtcttcttctgttcaacttcagttggacggtgatattagccactaccatttgggaagcatttaaacgtagaagatattatcttttcatatttatagtcaagattttatattgaatttacattaaaaaaatttttgtttgtgttagatgtttttggacttggagccatagacttttgggagtgaagtgtcagggaaaatccaagaggagtcaacaaaatctggtttggcctgaaaaatgggtcttattttggtgtaagtggcaaggatttgtccaaaaaggaaccaatagttctgtaaaattttaggccaaaccatcgtctctgcgatatactacttatccgtcaagacacaagttgtatctttgtattggtttatcaaacacaaaagctaaaataaatcacagtattaagtgctgaaaatggaaaagcactaataatttagtcacattaagaagataaatcgctatacagctataattaaaatcttattctcattgtaatggtttgatatgaatcacaaagagccatgttcttcacagggaagaggtagtgagtagaagtcat

SEQ ID NO: 51016 - DNA, 852 bp, Arabidopsis thaliana landsberg
aacccaagtatcctttgatatttcaggagatcctcctaccccgtgtaacattatctcttagatgttatctagcattactgaattataaaagtggaactttatagagctttctgcaatagggtgagatagatctagctatgatttctttgaactagttgttgtctgatatacagcatgtgatacaaaaagtgcgtctgatgtttccaatttgctgcatgatttgcagtttctaacatgttgtttcttattccattctttttgaagtagtcgtaactatatatgttagtgtctctgcatgcacgaatcttgatcatgggcgaactcagttatgcttgagtacaacttatttgcctgtaatagaacatccacatatttgtatcaggcacagaatttgccagtctactttctttttcactatcttttctaattagcctgatcatcctacagctcatcaagaatggttttactaaaaggatttgatgagaatggatttgtctggttagtacattctctcccttttctaatgagaactggggtatgcaatctctgtgtccaacctgatgttacttgcttaaattgtaaaatataggttcaccaactacgaaagtaaaaagggttctgatttatcagaaaatcctagtgcagcacttctgttttactgggaaattttgaaccgtcaggtgtgtgtttccatcttctttaacctccttgtgtgttttaggctcttagttaatagtttgcacatccatttatgaggtgcactgtagtaaaatatatgtcctacaaagccaattggccaaccactgatacacaagaattagtaacttggtcgatgaagagtcttttcatagt

SEQ ID NO: 51017 - DNA, 2334 bp, Arabidopsis thaliana landsberg
tacatcggtcccttatgccttagcatccggaggatggctaagtttgatcatacttttcaccgtagcgatcacaactttctactgtgccattctcattaagagatgtatggaaatggatccacttcttagatcatacccggacattggctacaaagcctttggaaacacaggacgtgttatcgtctccatcttcatgaacctcgagctttacctagttgcaactagtttcttgatcctagaaggtgacaaccttaacaaactcttctcaaacgttggactcaacttcatggggcttgaattccaaggcaagcaaatgttcatcatcatggtggctctcattattcttccttcggtttggttagacaatatgaggattctttcttatgtttccgcgagtggtgtctttgcttccggggttattcttgcttctatcttttcggttggagcttttgaaggcgtagggttcaagaacaatgactcagaggtctttcgacttaatggagtcgctacttcggtgagcttatacgcgttttgttattgcgctcatccagttttcccaactctatacacttccatgaagaacaaacgccaattctcaaacgtaagttttttacataacggatcattaggttattcttgaccaaaactcacactaataattttgcatattttttttaacattttcaggttatgattatatgtttcacaatatgcaccttcatatatgcatcagtggcggtattgggttacttaatgtatggatcagatgttgaatcacagatcactttgaatcttcctactgataagcttagttcaaaagtggcgatatggactacattggtcaacccaatagctaagtttgctctcatggttacacctattattgacgcaatgagaagccggttttctcgagttttgcctaataaaagagcttctggatttttgctaagtacaatactagttactagcaatgtgattgtggcattgcttcttccgttttttggtgatcttatgagtcttgtgggagcattcttgagcgcatccgcatcggttatattgccatgtttatgttacttaaagatctctgggaaatatcaaagactcggattcgaaacattggtgctcatcggaatcactctaaccggtatcgtggttgtgataaccggaacttaccaagcggtcaaggacatttttggtcgattttgaaatcccaataggtgaagtttagcttatagagtatttgtttaggaagatatttgtactaccaacagtccaataccataatttgttttatttgattttttgtgactttcgttaacgaagtttttttgagttatgtaataatttggaatgagaaaaatgtgaatacgttaaatgaagacatgagttgatctaggtgtctgtattagacactaatcaagtcattgattcgaattctaacatcgccatcggtatttaacggttgatcagtatactcagacagaattgctcgaaactcgtctcccgttaaggtttctttctccaacaaaacatcaacaagcttgtctatagcttctctattattcctcacgtgctttttcgcaacctcgtaagcgtcaccgattattttcttcacgcaagaatcaatatcctccgcaagtttctcggacattgagttcctcgctagcatccgtagaaccacatcgttttgcttaaccgctgggtcggttagtgcccatggaccgatttccgacataccaaacatcgtcaccatctgaaccataagaataattagaaaatccaccgtttttttccggtttatgaaaattttgtttcaattactgtacctgtcttgctatctcagtgacttgctggagatcaccggcagcgccggtggttatctccggttctccaaaaattacatcttcggcggctctgcctccgagtcctccgacgattctagcgaacaattgctgtttagacaccaatgtcggatcttctcccggtaagaaccacgtgagaccacgtgcttgacctctaggaaccaacgtaactttctgaaccggatcatgaccctccgtcaaagtcctaaaccgaagaagaaacggttcaattcgacttaaattgaccaaaccggagacatgaaatataagtaattgaaattgaaccggacttacgcacaaattgcatgtcctacttcatggtacgctacaatcgctttacttttaccgtcgatcatctttgtcccttccattccggcgactatccgatcgatagagtcgtcgatctctgtaagggtaatcttgtcttttcctcttcttccggcgagaatcgctgcttcgttcataagattgg

SEQ ID NO: 51018 - DNA, 235 bp, Arabidopsis thaliana landsberg
  unsure (1)..(235): unsure at all n locations
tcgagtacattcatcctgtcaaaaatcttcctagcagccttaatattcccacatttcgagtacatatcaannnnnnnnnnnnnnnnnnnnnnnnnnnnnnnnnnnnnnnnnnnnnnnnnnnnnnnntgaagttgtttcccaaggtgcaaggtggctaggtgagcacaagcaggaatcacacttgagaacgccacagcccctggcttaacctttgcggtcaccatttgcctgaaca

SEQ ID NO: 51019 - DNA, 544 bp, Arabidopsis thaliana landsberg
  unsure (1)..(544): unsure at all n locations
atgcccactcggccaagcccgaccacaacgtcttcttctccctctgcacttccgctgccccatcatcatccccgagtctcacacactgcatgtagcccacaatctccccatcccccaaagccacgaaccccctattcctagggctcatcatccgcgctttgatccgtcccgtaaagccttccacgttatcctccgggtaagttgcccgaagtggcgataataaatcagaaagtctagtgtcccagtacgcacgctgcgccagctccgccatgcgtcgtgcatctgaccaagacgcatcgcggatttctactttcgactcaggttttggtgggggggacacacgggtcgggggcggatcaagaggcatgccgcagttctcatctgttgccttggccgtattaggttattatgatttagggtatgcaaaaccaatgatttgaaagaagatggatggcggcgacccggctggctttcttataagattattatcggcgcanatctgacattcacgtggagtaattttgctaactggtcgaaacttact

SEQ ID NO: 51020 - DNA, 767 bp, Arabidopsis thaliana landsberg
attgttcgagatatatcttgaaaagtgcgtttgacataaaggaaaatgtagtttcattcaactccaaatatgttttacacgttttattaatggtttgaaatattgtaatgcaacacaactgtatagttggtcaaatttgcagcaattagactagtaagctttttaattaaaataagatttactgagtactcatccacgaaatctgacgagtgtaattacgcaatagagagtcaaaaaataaaattacgcaatataggaatagaaataatttatttattcgattctccaatatttatgaaccgtgatttgcaagacacaagatttaaaacaagatattaaaggtgatttcaagatcaatataactgttagtttaatcaattctgagtaaaaaaagattatattaaattctgagtaaaaaaagattataatttaagcttgatttgcaagttgagaatccgttaataaattgtgatccatttttggaaattgtgcttttgaaaaaacccatttttggaaatcaagtaaatatggattgcattttaaaaatattgtatccacgaaaatctgacgtataataatgcaagatatacctgtcaagataatgagaaaattgatttatggtaggttcgtggatcagatcagatccaacaacatgttagctttcttgctacttggatccacgtcataaattgtcaaacgattaaaaaaatttccaagccgaacaagtggctggttaactcgttacctcctgtccggttggggtaata

SEQ ID NO: 51021 - DNA, 696 bp, Arabidopsis thaliana landsberg
tggtctcagggcttcttcttctgcttttgactcttctattccttctatctaaacctttcttgttttcgtctttgtgtctgtgactgttgtgtggattctcaattgcttctgttattgtaacactgatcaaaagaagtgtaactaaacatcttagtacaagtttcttcatatttttcgtaaggcatgcaagaactaaactatgcatgtgtatgtatttatagtcgaatcattgattgtcgagtatgtatgatttttggcaattcttatgttttgtctctctaccaaagactttagttttgtaaggattcaatgaatacattttggtaataaaggacaatatttatttggttacacaatccaaggtaacgaggcaataactaaaactgacttggaatttagagctctgaggtaagtgttagccagcacacggcctcaatgctcaaagaatattgaagtacatatagacagaactattgtgtttctgttgcaacaatctataaaacaaatacgtaacacagcataagaccatatctctaaaattcgattccggtttagataaaaagttgggtcaatgtggaaaacatacgccattctaaaactttctagttgttggattgagccaaaatcatagaaatcatgttctataagcccggtttgaacataaccgagtgtgcaagacgtcgcaacatctaaaaa

SEQ ID NO: 51022 - DNA, 962 bp, Arabidopsis thaliana landsberg
tcgtcgaagaactgtccattggatgtgagcaagagtgagaagaagtataattttatgatgagagacatcgtctcggtgggtttatgatttgcttagtgggaacgttggaaatcttattatagggagtggagtgattacttttcattagtttattttggtaaagtaaatttctatttcaagttttaactacccaccaaaaagttttcaccaacttaaaaatttgtgaagataatccataaatggtacaatttgcatcaaaatgactagaaatgacataaagaaatgtaaatagttttaaaagttgaagaggttaaattagaaatgaactgcaatatttctatttatttcataaggtagttttgatttgtacatgtaattatatgttttcacagaagatgtcggttaagtacaacttttgagcttgattggtggaactgttaaggcccttgaccaaaaagcatgtttacctctaatgatttctcttgtcaaaatagattcgtgaaagctaatgaaaagtagtaaaagggtaaaatcataattgcataaaattttataagacccaattacgaaagttagagaagtttctcttgttaaccagaaacactgaattaagcattgacataaagatatttttactcttgtatgtaatatttaccatctactatttcaataattgcactcatcgctagtcactttatcttagggccagtggaaagttgtcacacattgagctgcttctattaaggtttggttctttagtttttaaaaagacaaaactttttcccctatggattgattcactccttgtaacgagggctctttctccagattcatgagtcaaaattaaaaactctaaatcttcaccggtttaatgtcccatatgggttttagtgattacctttagatttcatcgaactgaagcttatacaattttgttacagaaacagggctcaataggtcta

SEQ ID NO: 51023 - DNA, 461 bp, Arabidopsis thaliana landsberg
cccggaagaaaaaaggaaaaaaaaaaaacaaaaagttttattttaaaaaaaacaaaaaacaaaaaaaagaaaggtaatttaaaataagggaaggcccaacccaaattaataaaattaaaaaatttaaaaaaaaaaaaaatagataaagcaaaaaataaataataaaaaaaaatcaaaaaaaaataaacaaaaaaaccaaaaaataaaataaaaaaaaaaaaataattaaaacataaaataaataaaaaccaattaaaactaacaaaccaaaaaagaaattaaatcaaaaaatcacaaacaataaaaaaataaaataaaaataaaaaatacaaagaaaaaaagctaataagtacaaataaaaaaaaaaaaattcaacaacaatcaaaaaaaaaaaataacaatctttaaaattcaaacaaaaaaaacataaaaaaaaataaaatcacctaaaaacaataaat

SEQ ID NO: 51024 - DNA, 543 bp, Arabidopsis thaliana landsberg
  unsure (1)..(543): unsure at all n locations
cctntatcgggtatcatagtgtcgcggtatacgattttccttcaaccgtttcgattcggtggccctgcgggatgtcatcaaagtgatcgaacaggagaaaaagagttttcagccggatgtgatctttacgcaccatggcggtgatgtgaacatcgaccataaaacaacatttactgcggtgatgaccgcctgcagacctatggagcacgagcaggtaaagaccatcatcagcttcgaaacgccatcgggcaccgagtggatcccatctaccgatccgaaccgttttgtgcccaaccttttttacgaggtatcgcgttctaacgtggaggccaagatcaaaggcatggaaagttacgaattttgaaaaaagggcataccctcacccgcgcttccccgaagccttgctggttcaggcgcagcgctggggcattaacattggcgtaaactatgcgggaggctttacggttgtgcggatgatctggcgttgatcgcgcccctatcctttctactaagaatcgaaaatttaatgcgcaacagcgaaaa

SEQ ID NO: 51025 - DNA, 657 bp, Arabidopsis thaliana landsberg
  unsure (1)..(657): unsure at all n locations
tgggtaaaactaaacttattacaatattatctatcaaaatgtctccagcatcaaatactagatgaactaacagtcttcgaaagccgagtaccaacccatacaagatgacaaaaacaaatttgatattattcatcaatcacaagtagagtgtcttaattttcttttccatttttgtatatatggatgttaataaaagacaaaataaaaaatataaaaaacaaatatttgattatttttttccctagcaggaaaaacacgtccaagcgacaaaagcattgaatcacaattcacacaaaacgcgcatcacaagccgcgtgactttggtgagaggcatgaatctcactcacctgaacggtgaacgctagacgagcgttgtcctaacaccattttcttcctggtgtcttgtgaacgctattgggcttttggttgcaatcagtgggcccatttacattttttgttgggaatcagtggaccgactaaagcaaacactcatttaaggaacaaatctgtattatggtacaaattgtcatttgaatgttatttatnnagacttggctgattgacgacaatctacacggatttatctccactaattatggtaacaatttctatttgaatgaatttctanacaatttttccatggattatagtcgtgag

SEQ ID NO: 51026 - DNA, 1232 bp, Arabidopsis thaliana landsberg
  unsure (1)..(1232): unsure at all n locations
gagttaactaaagtaaatctaatatgaacggcaacaaaaaaaagttacaagttaccgataaattctcaaaattaataagactctgaatgaacgaaagtcaaagaatgatacacaataagttacaagttatctggatatgatatgggttaataaggacagtttaaaacgggttaccacacaatgttaatagatgcaaaacgagaacaatgtaaccctaaaagggttttaatttgttatatcagaatgggtagaaataatatattggttaagagatacataaacacttaccccatatttaaattggtaatggataatttatacacaaagatttatatcacaagaagagacccatagtacagcgttggttatgtaaacaatattgggtaagaataatattatcgaatacttaatagtatatgggttaacaggtaagtttaaaactacccactaatattagaccactaaataagcaaacaaaataattagcaactaaataatattcaactaagtaatgagattaccaactttaaagaatgtataaatctaatgtgattagaaagcgtagaaataatatataggttaagggatacattaacacttacccaaaatttaattttggaatggataatttatagacaaagatttatatcacaagaagagaactattgtacagcgttggttatgtaaacaatattgggtaagaataatattatcgaatagttaaaattatatgggttaacaggaaagtataaaaactacccactaatatgagaccactaaataagctaacaaaaaaattagcaaataaataatattcaagttccgtaatgagattaccaactttaaagaatgtataaatctaatgttattagaaagcttagaaataatatatgggttaagagatatattaacacttacccaatatttaattttaaaaagtataatttacannnnnnnnnnnnnnnnnnnnnnnnnnnnnnnnngtacagctttgtttaaggaaagtttaaaaacgcgtgagctcacaatgatataattttagagttagggtctaataattataacccgtatgtgataactagatgattacttgctcataccattatccaagtgttcgggttggaaaactaaaacagtgtaaacctaaaaagccataaacacaacgtcagtttttgaaaaagaatggataattattaagttatgatgtaatccatcccgttacattgataatt

SEQ ID NO: 51027 - DNA, 427 bp, Arabidopsis thaliana landsberg
gctggcactatgtggtgtggttgtgcaactacttccatcgacttatctggccctactgcctctcaatgggatcaggggtgctttcaccaacacacttatccaacagtcatggctgcactgactcaaaatcacagattctgaaagactacgtccaaaatacatgacaaatcctctttctatgattatcttggaaataatccaacaaacggggggtgatacctagcgggtacaatggacaatggagatggaatagctggcggatggtcaggccaccccgtctatagaaataaataaaggcgtgaactttttgcacgccggatgcctactttttttgaaactttacccctatctttggcataccgagactgaattgccagagctgactgcccgtttagaagggccgaatcactgtatcctgtctaacaac

SEQ ID NO: 51028 - DNA, 595 bp, Arabidopsis thaliana landsberg
gtatctccatatttgttgcatgaatcacgacaagataccagtgcgtctctcggatgtttattggaataaacacctacaaacagttaaaaatacttgcataagaataaaatacatataaacactaactgttcagattgcaaactcatatgtaccatgtcatggtctaggtaaagtaacacccttcgttcagcgctacatatgtgtgatatgtctttaattggatatagctcctctgttttaatttcaacatcaccatctcgcttcaggaaattgaactggaaagcattttctatgtgaacgcgacctccagatcgacactttagatgcttttgagcttttatcaaattgatgtaacagtctataacctgcaagtgtgtaagttgtggttagaaataccaggatgagtacaaaaacttatacatagcaacgtcgccagatatgacaactaagcatggattacctcgtcacctaaatatgcgttcggctgaaataacactccatcacggtcctttaacagaggcatcatcaatagaaccgacttctaccattggtcacaagggattccttgataaattgatgcgacaagacacttgcg

SEQ ID NO: 51029 - DNA, 714 bp, Arabidopsis thaliana landsberg
tgagctaagcaacaaagtactgtaggtttatatatttatcaataatatataggcctgtttatatgcatataaagcatcaaaaatatataagaactcatttgataagtgttatttttagttatataggaatttgtattttaatagctattgtcaacctcacaattagtggagatccggttgcataatatgtttcattgattcattgattcaaactttcttatacacatctagaaatgttctatgcattaaacttgatcaacaaattttattttttttaacctacccaactttcttattattactttaaattcttttacattttaatcaaaaaatcttttacattttaataaaacacacataattaagaagaaaaaggcaacataattacaattataaaaaagacacgaagataaataactatgcggcacgtttgcatctctggtagtaagtacaagttgcaccttttggattaacagtccctatgcaattaccagcaattctaccatcacaagttggctgcttctgcaaagttttgtagcttaagtactttctttgttgtagaatccgccggactaccgcctcaactccttcctcatcctcctcctcaaccgttgcggttatacattctccaacggtgtctccaggagcacatccgtcatatctcaacccactagtaacattccctgtagatgcggttgcggaagttgccgcgag

SEQ ID NO: 51030 - DNA, 435 bp, Arabidopsis thaliana landsberg
  unsure (1)..(435): unsure at all n locations
accgcccggccgctgccttcggattagagactgtttaccgccttgtgcccgccatggccaagcccgggcaggaatgtgcgcgcaagcgcgacttcaatgccacgcccgagcccagcggcaagcgcagccgtggcaagcggaaccactcgctgcagttctgcatgcagaagcacgatggcaggcacctgcactacgacttccgcctggaactctatggcacgctgaaaagctgggccatccccaaagggccgccgctggaccccaaggtgcgccgtctggccgtgcacgtggaggaccacccgctggactacgccgacttcgaaggccatatccccgaaggccattacggcgcaggtgacgtgatcgtctgggaccggggcatctgggagcccgaaggnnnnnnnnnnnnnnnnnnnnnnnnnnnnaaactgcgtt

SEQ ID NO: 51031 - DNA, 627 bp, Arabidopsis thaliana landsberg
  unsure (1)..(627): unsure at all n locations
gggttacaggtaactgccttggtatcaaaaaggaagcagttgggtaaagcaaactttctccttggtttatcaccgcgcttaatcaagtaggaacccagttgggctgcttgaagctccgatcgagaacaaaccatgggggccatgccggatcataatttctgaatggccccagatagcgctaagctgaagggctcccaacctgagaattctcaatatcatctattgcgcgaacgggcatagaatgccacttccgaaacagaaagctattcggcttgttcgtgaaagcgcgaaccatctcaaagccttgcagcttatatttgaacgagaaagcccagaggttcaccggaacctaaagtggggtgacacgaacaggaaagaacctccttcggaatacattccccaagccataacctcgggttcagatgatcaagattcctttctttcagtggncggaaaccccgaatgctcttaaacacggatccgaccttaccagcaccagagggggtctaaacaaatgaacccccggaaaccaactttgttatctctgacagatatccaggcagggagaaaaccggtcccgaacaccaaaaccaatcccaaaaaagaaaaaaggggctaaagaaccgg

SEQ ID NO: 51032 - DNA, 570 bp, Arabidopsis thaliana landsberg
cctgtgtgtttagtaacttggaaagccaaattctggcactgcattttcttatttaaacaagtatatttcaggaaaaaggaagcgggagaggggagcccagtacttgaggataggagaaggattgattgtacataaatctctttcttttttgattgccaacaaaatcggcttcgggactaaaattagaactccattggagaatgagttagtcaaaaaaaaattccctaaattaagacacatgcaagcacaagagaagcaaaatctctctgtctcttctctgaattcaaaacaaaggtttttcaatctgtcaaagctcacaatgaaccgaaattacagagagattgactcgtcttcttcgatttttcttatctccttttacgacaaagtacctaatccaccttctccacccactcgccgttgtggagagggagagacacacggcggagttggagtgggtggaggaagaagaaaaagacgagagcagaaacagaggattcatcgatgttatactctatccaaaattgcagatttgcatatggtaagacttctttttcacgattcatgatcaca

SEQ ID NO: 51033 - DNA, 393 bp, Arabidopsis thaliana landsberg
  unsure (1)..(393): unsure at all n locations
aaatggaacttctaaacaggatgaagactccatttattatattccaaaagagtgcagctcctgaaacggtctgctttcctgcttgagacttcttcaaaaaaacaactgctctaaattttaggtatgcaattaccaaaaggaattgcatgagcataccaattattcaaaccccttaacttccttcactgagctgactgaacctcgccaaaaagtgatgacagaaattagtagagtgggttaccgcttctttggaggtttcannnnnnnnnnnnnnnnnnnctccgagactttctgaatttggcttcttttatcagactcattctgaccatcttgtgttgtcttactcttggatgcctcattgttcagattgccttgaagaatctcccatttcaa

SEQ ID NO: 51034 - DNA, 591 bp, Arabidopsis thaliana landsberg
cacagtttacttatcattttcatttgaaatgtattcactttctgataaaatgctaatcctacaatcaaatgcaagtggttccaccattgtcgtgataacacgtgtacggctctaaagcaatcagaacaatcattggacagtttttacaccgtcagataagtacctatccacttgctgactcagccggataaaccctaaaccggaagtttgccccaccgtcaaaattggaagaaaccggacaaaagagaatgtaaagactaagaagtaagaacccatcggacgtcgtaagaaggttaattaacacgtggaaacagctggtcagagttatccggtaacttatccggttacaagtaaaaaaataatttgttcccatacacgactccttcagaaccaaacgcgacatcacggcgccgtttagtgtctataaatagagcaatcggtcgtagaaaaccaagacatcaaaaacacgaatatcgatagtacacttctacgtgcaattttctcctttctcttcctggacatctgtctgtttattacattttcttgtaatctctttttgggggtttacaatatctatcccctaaagtttcg

SEQ ID NO: 51035 - DNA, 512 bp, Arabidopsis thaliana landsberg
cttttagttttgatttcattatctgcattatctttgagttttagttaaaattaagccaaaaacaacaaaaacaaagctgaaacctaatagactaaactaatgtaataccatcaaacttacgaattcctaatttcatttttaaagtcacagtgacttggattaaagttcccaaaatattataatctgaatgcaatttcttgtattaattacaacgatagtcaatagaggcccagaagaaggttcaaataaaggcccattatggcccaagttataacccgaataaaggatccgatcgagaaggagagagacaacagtcacagacacagagagatggcgagagagaagaagacgtgtgtagagtgtgggcacaaggttaaatctttgttcatacaatactctcctggaaattttcgtctcatgaaatgcgtaagcttttaccaaaactaattagggttcttaatctctacttgtaatcttcccaaagtttaaagctttatttgttgttcaatttt

SEQ ID NO: 51036 - DNA, 902 bp, Arabidopsis thaliana landsberg
tttgatttaaatacatgatttggtgaagacaaacgagttgtcttcattgacttacttttcattttatacatgatttacattaaacacaaagtacaaagaaaacgaaaaaaaaaagaaaaaaactattcacagagaaaacaaaaatccaaaactcaaaaacacaaacagaaacgttttggtttcgttttctcttctattattttctcaaccagatctaacaagatccccaacagctcagaaacatcaccgtcctcaaagattcctccgcttgcctcagcctctcactcgccgccgcaccaaatcgactcgattccagatctcctttaagcctcctcaccgacgacgacgacgacgcactctgtggagacgagaccgattctttgacggcagatcttaaagtcgtatctccgccgcttacaccggtaacactcttctccttcatcaacttaccggaaaactgactaatcactctattcatccgattataaaatttccgatccttaagatttttttctgctgatttatggcttctcagattccgaagagagttttttcttttgtgaagagtaagagatgttttgtttatatagacggagaagtgagtgagccatatgatttgggaggagctaccggttgagccggtaataaaccggaggcttgacgaataattggattactgttggataagtgactgacacgtggcggtttaaggaactttcgcgacatgttggtgtgggaactgtggatatgatcgaagaggaatggatattttattactttaattcattttcgttatttggaaaagttatttataatatcctggtcggcttccgttgattaatatgaatcataagatgtttttacttgacgaagaaattaggttggatgttcatttaatcgtt

SEQ ID NO: 51037 - DNA, 492 bp, Arabidopsis thaliana landsberg
tcgtttgcttccttcaatatctagcggttttcgccttgtttgctggatagtattcaaaactaagtacatatttagcctggatggtttgtcccttttacttgcagtgtcactatagttgttgcttacctcatgaagaaacacggtatgactttagctcaagcattgcaacatgttaaaagcaaaagacccgtggcaagtcctaatgctggtttcatcagacaattacaagacctcgagaagtctatgcaaggtatgccttactataatatcttgaggtctagactattaggttgagatctctgtggtgaatctaagttggagatactttgtctgtctgattcagtagtgagtgaccagtttttttccttttgaggatgaaaagcaagtggttgtggaggagaagacagctccatgtaaatatctcttacatgcatcttccttcttctctataaaacagggaagcaagttacgattgcacaatgtcaggcgtga

SEQ ID NO: 51038 - DNA, 901 bp, Arabidopsis thaliana landsberg
acaccataaatttaatttaaaaatgagggtacaatttaatttttattcgataaataacattataaacgaaacagaaaaaataaaatatatattgcagttcagatgagactcacgactttgatgaatctagggattggccttttgtttgagacatgataatctaggaaactttggactacatccccatgcatgatcttgtaagagaacttcgtagcttatcacatcttccgcattggtcttgagtgttgcaaatgtgaagaacaccataataagagccatatatattattatagcctttgttgatttcttagagatacccatatctttttctttctttttgttttgaatgaaccaaggaaaaaagcttgaatttatctgtagaaagattagcttttttgttttttttgttgtggagaaacatgaagggattatcaaacctttaaataatattcaagatgggagacaatattgttatgtttctttcctttttttggcatgtagatttggagtatctatctaaaatatggatattgttattttactattttactcctaaagtgattagaatttagtttcacgtctaaagagatatcgaaagttttaaagattttgttatcattgcaagtttgcaacaatatactggataaacagttcaacaaaactgaatcaattaccaaaacaaaaagacagatttatacttttgtttttctgaatggttcaaaaacaataaactgctaattacaggcaaattatgttttgattagttttttattttattttttttgaaccaagttttgattagttttcttaactcgttcaattatatggtttcttcttcgtaaatatgaaatgaatattagtcgatggatttacggccagtcggccgccttaaaaatcagta

SEQ ID NO: 51039 - DNA, 668 bp, Arabidopsis thaliana landsberg
tctatattatattatgggagctgatttttctagttttatgcttgagaatggtggcctttggtggccaaaggtggcttttctggatgttcgtagatgctcttttgctgtcaggtaagtctattctagcggttttgtttttgtattagttctcaaaaaaactattagcgtctttttgttttaaggttttgaagatagacctcataaagaaattgctcgtggtaacaataatgaagattcaatttttgttggagatgggacaattatacaaatgtctgagcctcacggttcaacattgatgttcttcatcgaacctatgctagctgctttccacttagcttttattatagttttcgtaagtttatttagttatagattttggtctttatatcttctttgtttttttctgtaatcgttttcacaatttaaaccatactaaacaacataaaattctcaaaattataaaataatcactataaaaaaaaataaaaaaggatcaaaattttatttaaaaaaaccctaaaaaactagttagttctaaaaagtcatgatcttgtttaaagaaaatcgtacatttaacaattctaaaatattttattaaaaaatataagattagtaaagtacaaaatatcacaatctttttttttttttttttttttgtcaagacaaaa

SEQ ID NO: 51040 - DNA, 774 bp, Arabidopsis thaliana landsberg
atcatcgaaatgttgtaatgcttagttctgagaagttcaggtacttttatgatatatgaagaaatatccttatactcaggccagtattgaaacactcaatcaaggtgaggcttttactcagaactgctgtttcatttacttttcaattttagatatggaaacgcataatgtcatattttactaaccagtgaagatcacggaaaagaaaagagaatcaaaacctggagatgacatcgctaaggaactttgggttcaaccctccttttgaaggatatataggatatggtctcccctgggctcgatgagatgattcttcttcatctttgagtacatctatattgtattccctcatttcaaaatgatcttctgcacgcaatgactttacctagaagtagaagagattattaacagattattgaattagcatagttgccaaaaactttcttcctcgtaaatctgtttctttagggatcttttatcgtgctaaaacaagtctaagcttgaaaagttgacttgaagaagagagctaaagacttatgaggcagtctgatatgcaagtaaaataccaaagcaagcaatacatacacatacaaagacaactttcagggaagcaaaggaattaccttcccactaatgcatacaaggtccccgactttatgtttctcttgaatagaattaaaaagggttgccaggtgaagcgagtccccctaaaaacttttcagatgcaaaatattgatttcctgcttatctcagcatatgactcagatcctcgag

SEQ ID NO: 51041 - DNA, 487 bp, Arabidopsis thaliana landsberg
  unsure (1)..(487): unsure at all n locations
nnnnnnnnnnnnnnnnnnnnnnnnnnnnnnnnnnnnnnnnnnnnnnnnnnnnnnnnnnnnnnnnnnnnnnnnnnnnnnnnnnnnnnnnnnnnnnnnnnnnnnnnnnnnnnnnnnnnnnnnnnnnnnnnnnnnnnnnnnnnnnnnnnnnnnnnnnnnnnnnnnnnnnnnnnnnnnnnnnnnnnnnnnnnnnnnnnnnnnnnnnnnnnnnnnnnnnnnnnnnnnnnnnnnnnnnnnnnnnnnnnnnnnnnnnnnnnnnnnnnnnnnnnnnnnnnnnnnnnnnnnnnnnnnnnnngggggggtcactttttttttaaaaggggcgggggcccccagggaaaaattttttttttaaaaaaaaaaccggggtaacaaaaaaaatttggggggggggggggacctctttttttttttttttttttaagcgggaaaaaaaaaccgggggcccccaccaaaaggggggccccccccccccttttttttggggggg

SEQ ID NO: 51042 - DNA, 662 bp, Arabidopsis thaliana landsberg
gatgacttgaccttatccagaaacccttaagctaaggtttgagaagtcttttctttatggaaatttgaggtaatgaatccagtttcaagtttactttagttgggcgtcgatgattctcgaatcctttgctttctttaaggatttcggtttcaagatttgtgataccagtttttccacaaaagactcgactacggctaatggatcgcgagatatttttctctgcgtacttgcgaccacctgttttttgcgaccacctgttttaggtacaagtgttttgacactttagccaaaagtttggaacttcaaaaccacacgaaatcttatacgtttcgtgagacaatgtatctcaaggtggatgacattctgtcatcgttaagtttatgccatatcaagtggtctactccctcggtagaacccactatccttaggatctctactctctagatccgttttttattctctagtagtaattttttgatgtttcaatatgtataggtgtttcgactatttatagaaaaagcaacctttggaaacatctatgaaagttcattggtctatgtttggttcttcttaccggaaaatctcatccatatagcttatcaaaatggagtattgttgagaaaaaacactaactttgtaagaaatgtttactatgcctaaac

SEQ ID NO: 51043 - DNA, 136 bp, Arabidopsis thaliana landsberg
  unsure (1)..(136): unsure at all n locations
acttgggtctgcagagcagtgtgtttctcttagctangtgggcggtaacacttccttatagtttgttgagcctttctaaaatgcttaaactctaaggccgtgttatccccttacgatctcaaaagagtcccaccca

SEQ ID NO: 51044 - DNA, 590 bp, Arabidopsis thaliana landsberg
ataatatgttttaccatgataacaatagtcttagttggataatataataagacaatttatgtgagttgtcagcataaacatttataatgagaatatttgctaacatttgcattatcgattacaatggtgacaaaactgttattacgataattggtgtcttatgttttcatgaaaccctcaacagtaaagtgaaacgagaagagtttaagtatatattaatgtggatgggtaacggtaagggtaaacggtaaaagtggagataatatgtttatcaagataactgtgtgcttacctagataatatagttacacttacaatatgtagaaatattaatcgtccaaacacatcgtgaaaatgagggaagctaacgttttgattatcgataataatggtgagaacattggtatcacgttaatgtgggtttagttcttcacaaaaccatgtagaaaataggtaaacatttattatgaatgaaaagtggtgataatatgattaccatgataaatgtggtcttagttggataaacaattagacgattggttttctagaaagagaaaaagtattgaatcttcaagaaaaaaaaatcaaac

SEQ ID NO: 51045 - DNA, 1163 bp, Arabidopsis thaliana landsberg
aattttaattcgaaatattactgattaagatagacaaccataaatttttttatatgaaaaagagtgatattatagttacgatttttctatactgctagatctgataattaggaatattgttcgctaggcatatatgatataaatagttatgaagattttgaaatttaacttatattgtcataaacatataaattctagagaaattgttaacaaccctcatacttatggttaggagcaaaatgacatttattttagaaccaaacctggttctcagaaatccctttgggccttggcccttgaaattaacagatcgaatcgttttcgtcttgtccaatcgctccacagtcgtgtgagtggaagattttagttattaggctctattatggttcaagttgggtaaattaatgtaagcctattttacaaaactattgtggtgggatactattgctttccatattatcgaaaattctagtggcttgaaaaattgtattttgaggcaaactagtaatgtttttttaatattaataatttaattttagtaagtgttattctaataaaaaattcaaacaaaatatgtaaacataatttaagcaatgaaatcatcttttaagaatcaattaagtagaaattttggaacaactatatttgaagacaataagcaaaacaaaagcaaaagagaagcaaaatataagcaaaaccatagcaaaaagtagtaataaattatttttaatgccataataattagtttagaaattataatttttaaaaatgtataaattgtctattataattcttttttataaaccactcatgaccatcaaagcacgttgtaaaccactcatgaccacttatcctacattttcgaaaaactgttcatgtgacttctttattcaacttatattgatactatatttttttataactagagagagtccagatggagacattattgaatgcatccatacgagagatcaaccttcttttaatcatcctctcctttggcggaaagattggtttcccacaagaccggagcagcggaaagagtcactggaggacacgaggcaagtatccaaaatccgactcccacaaatcaaagatgtcgagcaacacgaaatttcaaatatgggggatttgaacatgcaggagctgttcagcttaggttc

SEQ ID NO: 51046 - DNA, 1771 bp, Arabidopsis thaliana landsberg
gtggtctgacgccttccatgatccatcaaactgacatccaatgttcaagaacataagttatgaggttgtggagtcaatttgtttcctcaagagcctctaattgtgtctcctccctttataattgttaactttgagcataatttataatattagtgggttcctcgtagagtctcttaaacactttatcattccatgctttccacataaaccataaagtccatggaaacaaaattgaatattgtgatttgtgaaatggcaatgtataagtgatgtgggatgttaaaattgatggatgatcaagatcgtcgtttgatggaagtggcccaactatttcttaacgggcttcttaatgggttttaaggttgcccacaaattgtgtgccacaatgtttgtcgttgtcgctaattaatggcttcgttaattaaacacttctaataattctccaatggagtttacgtgactctagagtctctcttctccattctccaatttctacaaagataatgtggattcaccaaaaattcagaggaaggacacgacaatggtgaattcgtacgttcctcttcgtttcaccattttcatctccttctccatcgcagcagcttcatccttcaaactccactccgcttctcattctccgtcgtcatttccgaaagccaccggcgacgatctactctccgttctcggacctccctccgccgcgtcgtgcctcaacccaatcgtctctcgagagatcaaatcgtgtcttaaattcctcgtcccattcaaatcggataaacctaaacccgaatttggacgatgctcgcctcgtactggactctgttccggaaaaattgacgccgttgagagacggagcaagtttgaagaggagaattctctaatctggtggccaccggaatcggttctagagcttgctcgtctcgctgttgactccggtggtgatcccggttcaattcagcgaactctcaatccgaaaatgatcccggttcgtcttcaatttaatggtttgatttggtttattgttcgttagattgaattggttaaaatttggttttataggttcctgatgttgaacgatcaagaaaagataaatgtcaacttactagaactccttatggtcgtcattttatagcagaggtaaaaaaagaagctattttgtgaactgtttgatcttatggtgtagtgatctgattgatgatgttaatgaacaggaagtgaactcatatttcgagttcttgtttcatctaattgaatctaggggacctagtgttggattgaatgtttcattgagtagatatgatttgttccatggccatttattccttgcctcagaatctggacgccttggaatattgtaagtctcctttgtctcctcaacacacactaggactcttgaaatagtaatgatgatcatgttctgttactgacttcgttgtgtaagaatcgagacgctttgataggcactagaatagtagatataagggggtctagaccatttggttaattgggagcatttaggctttgagagtgaagagaactctctagggtttgttcttgtgttcttgaatgtaaccaacagttatcaataaaggaagaatggtttctgattcttaacacaattgttgcagtgtttttagaaaggttgaacgtaagtaatgagttttggggaatatttataaaaagttacatggttgagctaggttttgagtactgttgttgactagtatatgattggtgatggtaggtttcatgctaaagagtatccagccta

SEQ ID NO: 51047 - DNA, 978 bp, Arabidopsis thaliana landsberg
  unsure (1)..(978): unsure at all n locations
tatataattttaagatacgaaaagaagcagaagagttcttattacccgttgattctttgacaagtggcttcttacaaccgtacaaaaattgatgatgatgatgtgttctactttatccaatcgttttgcgtgtgtatgaggctcaagttatgtacacgtggcatactcatctgcctttggttcttctgactttagctcgtggagattactagggaaatcttatgatttagagataagaaagactttataatttaattatagcctatacggagataatactttcatgaatgttctagaaatagtgttggttaatttttgttttgtttagtcgttattgataatatccttctttaacaaaaagattgattttgagttgaccacacaatttgatttggcttttgcttcatcgtaataacgtgggaattagtcttatcaaactgaatctagtttaacttgtccggggaatctattatctatattatcaacttataagattcggaataaagcatgttttgttgttgttgactttgatggattgtgtgaatagtttaatacaacaaaacacaaaattaagatgtttataattcgttgacaaaaactcatatattcatatcataggatttgtgaagagatttaaattatatgtttacttggtcgttacgaatgataaaagtattgtccaacttatcggcgtgtgtggataagtattaagtattacaatcgtcgtataccttattgttatagtttttacctgttttagataataacatgattcgattttgtataaaacgttacactaaatgaacccaaaaaaaaaccaaaaaagaacttgcaaacaaaaataggttttgttttagtaggacatattctctcaatacataacgttgacgtatgtatataagaataaaatacatgtgcacgtaaacgtaacaatccttcacaagtttattaataataacgtggaagtngcagtaacat

SEQ ID NO: 51048 - DNA, 1192 bp, Arabidopsis thaliana landsberg
aagtagaaagtgatgtttcaaatacaaaatgatttaaacgaatttaactatataaaaaacattatctatttttcttgctttttattagtaattaaaatttcacgtaaaattagctttctttaatccactattaaaaaaattagagtataaaaatttaaagtatccatatctcagagtttgatttgtaattttaaaccgtaacagtacaaatgatatcatttcaacagttacaaatcataaaaacgatgtcaaaagcgttactaaaagtgttattctcagctttttgtactgttatcggtttaatcttcaaaccgcgtatatcgttttttctatctcctaagaaaaatattgtacgcttttatgtttaccaaccaatctaaggaaaaaaaaaatcggagctgaaaacattgagaaaaatcacgagtttggtatgagttagagaatgagtcaactcgcgagtaaaactgtaaaattcaaaaacagagcaaatgggtaaaaatggaatttgagagatacgcgacgaaacgaagagttttgtgatatctaaaaaagattaaaaccccacaagacagaatcttctagctttcctcttccttcaatcaatcttctctctttctctcttccaaaagattccacaaacattgttctctctccctctaatataaaatcgcttcacacagatctcatctcaagttgtttcttcttcacactctgattctcttactattttactctgttgttgttgttgctgtgatatcaagagagtgggtttgagatcatgccaaattctggaaaaagtttgagtttttaattccaatcgagaaaaaataaaaatgggttctttaggtgatgagcttagtttgggatcgatctttgggagaggagtttcgatgaatgttgtggcggtggagaaagttgatgaacatgttaagaagcttgaagaagagaagagaaagctcgaaagttgtcaacttgagctttctctgtctttgcagattttaaacgatggttcgttgtttttgattgatctctcctctgtttcctctgtttttaatcatttgggttgctgaaagttttgttttttttgtttgcagcgattttgtatctgaaggataagagatgttcagagatggagactcaaccattgttgaaagatttcatttctgttaataaacctattcaaggagaaaga

SEQ ID NO: 51049 - DNA, 1070 bp, Arabidopsis thaliana landsberg
ttatcctataattttgttgatgggtcaacatccactccttgtcattacctaaatcctaatgccacatttcagatgcctttgctttattagaaattgttatatgcctcctttgattcgtatagctgttttagtcaatgcagctctcttgcaaatccacatttgtcatggctttattcctttagtttgtgtcataatgaccccctccgaattgagaatttatttttgacggctctttagatgctttttttgggttcggtagaagtatataactcacggttaagcttttatagaatctcaatattaatttgtccatcaaggcatcaaaataatgtttagattaccatctcagcccaataccggccataatcttatatggaggatgcatattattatgtagacatcaatgatcaatcactttgggacaactactcaagctcgttttctaacgaattgggatttttgaattacttactcaaaatagtgtagtcggttttggtctagcatgatctaaaaagtccaacaagccgagacgcccaaaaccctaatattcaaaacttcgtggcctaaatgtttcatcctgtgtaattttcttcaacaaccattatcttgggtgaaaattgtcaaatttgcatattttcattattgtcattgactttctgattcggtaacagtcatatgatgtaaaaatgggccacatccttatttggtttgcttcaggcccatattcgtttgggctgttagattgtagcaatggtacaaagatctgcaattgaccttggttaatggtgtaattttattttattttgttggggtcaaactgaaagcctcaaaggataagagtttttttctgtttttatttttttttcacacttttttttgttttgttagaattcataaaagggtaatataaacttgttaaaaagaaatacagtagatacgtcatataaacagaaaaagtaagagagacagatgttatcaaataggggggagtaaaaccactctaatactacttgttatgcttaaatctacaaatgaataaaagacttggaaatcaaataaggaagtgagtg

SEQ ID NO: 51050 - DNA, 483 bp, Arabidopsis thaliana landsberg
tcggttaaagtataattcaagtcttacaggaaatttttttgtttttctttacttcagattcttttgggttaatggggttctgctcctaagtcctaattatgaatttatgatcatcagattatactctctagctgcttttgtttctgcaccttcgagagttttggtgtctattataattttctgacggatgtgttacatataaacttttttaatcctgttttatcttcatttatcaagtacatgtagatcaaactaactcgcaaaattcacaccaagaaaaaagaaaaaaaaaaactaactcacaaaagtgccctttcagagagagttgaggttgagggcctgaggcaggttcaattgggcttggaagaacgcttaatttggtttgaaagccctaatatgtcattacacaatacatgacccagacggatgtagctagctcgtattagcccatacggatcatataaaggaataaactcatcagac

SEQ ID NO: 51051 - DNA, 763 bp, Arabidopsis thaliana landsberg
gggccgtgtgactttttccaattctcaattctgttgcaaatctcgtacctgttgccgtcgtgctcttctttcaaaaccacaggtacaaactctaccccagtaacaatgagcctgtcgacgatgtccacacttacgtacttacctcatatccctttactgtaagtgcctcaacgtttagggaaccgcagaatcctaaaccattcatggccgactttatggtctctaagactccgagagcgtcgtagccacttggaaggccaccgctacctaaatcccaccacacaacgatgggacatccacgattctgctcctccattgcttgcgaattaggctttgttttctagggttttctcccaattttagtgacctagacctttttataatgaattgtatttttttgttttttatacttctttttctttcctttttccccaagctttacgcattaggcctcatttttcttccaactattggccaaacaaattaaaagatcagccttgtggtaaagcccaaaccaacttggaaattttaaaaattagaaccggtctaatggaaaatggaagaattgaaccaaatcaacctcgaacattgatattaagaagtgaaagtaagatcctctctcgagaacttgttcaaccttattgtgcataggttttcaacggtgtatcaaacatttaaaatttgagtaggtgtggtgaagcattcaaattttcattaatggtaagatgcgtaattttcccgatcaagtgatatctagatcaaa

SEQ ID NO: 51052 - DNA, 522 bp, Arabidopsis thaliana landsberg
atctatttttcttggtgtgccttttttctagctagaagagatattgggtctgagctgtctaatttatattttaaaagtaagatctttgtattagaagaatatgtaaattacatgatattctcgttcgtaagcaacggtgaaggaaagtcggccaaacttgatgattttgtttctttcggggtgattgtcgcatagaaatcaaaataccgtgtgtgtggacttcttttaaagtttttgaaagtttactcttctagtcttgtgaatgtgatcgggttaatacataagcaaagaggtgacttaaagagttgtacaatataagtttgtaaaaccataagtaacaaaagctgatgatattgacaatagaaaaaccagcccctaaagaaaaacttatgtttacatgataacctcaaactcttgaatttcaacgggaacatcctcgtgacatccatctttgatcttaactaattcacgatcatctccttccaaataagccttcaaaaatgattcaacaagtccaccacg

SEQ ID NO: 51053 - DNA, 879 bp, Arabidopsis thaliana landsberg
  unsure (1)..(879): unsure at all n locations
taattataaatcatattagtttttatgatttacatttcctaaaaatcacatttttttaatttcaattttttttctaaaaaatcaattaataagaaccaaaagaaatatatgttatgattatgaaattttcaaattcctaacaacttcccctcattggtgcttgaaaaaagcggggggggccggaaacttttataatctaatcntcaaaaaacagaatttagaagatattatcaaactttgctacatatccaaatttggttagtttattcaaaattaagaagttttgctaaatatattattggattagtaattagaaaatatacaatcaaatcgtaaaaaaatgaagtagtggatttgaagtgatttaaataattttatatgacaattcaagaaaaattttaggttaaaaacaaattcaaatctcataattttagctgaattttgaaaaaatttgaataacaaatttcctaattcaaccaagttgaccagaatcataccaaaacttattaaaactcaaataacttttaatattttgtctttcaatacagtctccttacatttggtcatatttaaaatcttccatttatttcggttacgaaacaattttacaaggcccatctaaattccgaatttagtgtgtataatggattaataatggtcattagtggaaacgtgtagtgtttaaatccgtgacatgcgtcaaaagtttcttccttattaataagacggcacgacgtttagtcatattccaacccgtttaaaacggcaccacgttttttcacccgcctttcatatttcttctcttattccttaagtttttctcactgtgaagtcaaatcgatgcctttcgttctatcaccgccatggagaaacagagat

SEQ ID NO: 51054 - DNA, 735 bp, Arabidopsis thaliana landsberg
atataattattacattatgtaacgcaattgtattctgcttagttgactagctgtgacgcatttgggtgtaaaacaaaacttgtagtgaaataaataaaaattgaatagctattgcttacctaaagtcttaaatttaaaataaaatcttcgtattgatccaatttctaatttatttaagttaataaagctatctaatgagacaaacaataggaaaagatcatctcaatttgactctagtgaatttatttgttttctataataagaggaagatgtcagaagtccaataataatctcaaaatttggcctaataacgtgactatagtttatcaaaattgatctgtttttaaaacttggttcgtatatatacatacatacttaacacgaaatctatatttttttttgtagatttctattttttaattttaattatgttttgatatttgttaattagtattaatattaactaagatatataattgatatgatatacatattttagttattaggtaaagaattaaaatccaaattaatatgataaaatagatagctaaattttattacaaaataaaatgtataaggttgaaatttggttttaaaaaaatatcaaattaaatatatattaaatagaatatttaaaattaaaattttgtttagcaaaaattactaattaaatatttttaaaatatgtgcattactatttactattcaagatagttataataaaaagacaatttg

SEQ ID NO: 51055 - DNA, 796 bp, Arabidopsis thaliana landsberg
aaatcaacccgcgcctctttttcttcttcctgcgtctctctctggtggtgacgatcgaagagagttcacggattcgtacaaggattaaattaattattctggcaaattaatcgaagcgtaaggaattggggagagtgatttttctgggttcgaatttggtggttgattcaaaaaaaaaaaagggttttgagatttgggtttttttgatttcgaattttggttatgggtttaggcaataagggtaacaaattcaatttcggcgataatgatctcgccgacgaagctagtggtgccgatggcgacgaaggtgatggttttggttcggttgcgtgttcgatttgtctcgagacggttgttaaaaacggcgatcgagcatgggctaatcttcaatgtgaccatcagttccatctaggtgagtttgtggattctgatacgatactcttttttttgttctttttcattcgattgtttgaaaacaagtaaagaatttgcttcagattttgatttgaatcacccagatctatccttatttgattcgatttatgaataaagaacctgttacattctgtttttttcgactaccattgtttgtgtgatgtggctctcatgatttggtattaagctctgaaactaatggcttcatgcttgatatagttttgatctggtcgaattattattattatgtgaggttacggacatagcatcaattatgtatagcatcactatttcattgcaactgccaagtttcttagattgatctctccaccttgtttgatgcatgtattggctcataatc

SEQ ID NO: 51056 - DNA, 676 bp, Arabidopsis thaliana landsberg
  unsure (1)..(676): unsure at all n locations
tttattatttatttttaatgaatatatactcgttggttttctaataagatccacttttaaaacagtcctgtgtgaaaaataaattttgtcatgaaactaatccttacaataatagttgaattatgaacctgattccaagtagttgcttactaggcaaccacacaccacgtcgacatttgttttcatgtcaaacccatgtcttttttccaacattataagttttgacccttctatttttggtgagaaaaacaaatgtctacatatagtatcacatttctggcttattatatatcatcaatactaatattaatacaattattattgatcttaaataataaattaaaagagtacataagaattattgttgagacagagacagtggaagccactatatgaaatatcatagatatatataattgttcacatttcatttagaatttatataaaattatatttaaaaaattcttaataaaaaacgaaatacagaatctaaactatgaccaaaacaaacaaaaattagttttggtgttataaattattttttacaacttttaaatataagctgaaacttattttgataaagaaagaactgctaattcttagcgaacccataaatttgcttatttttggatttgtccatcaataacaantactatgtcaaaaaaaaaaaacaata

SEQ ID NO: 51057 - DNA, 1271 bp, Arabidopsis thaliana landsberg
attgtagatacttggtcccacgagacatgactgttggacatttcatccatatgctaagcaaaaggatgcagttagatccatccaaagctctctttgttttcgtacacaacactcttcctcaaaccggtaagataagaagtatcatcatccatgtagagtgagactttacctgcagttttccaaagctttccattaacacttgtcttgaattatgcagctagtcgcatggactctctctacaatactttcaaggaagaagacgggttcttgtacatgtgctacagcaccgagaaaactttcggctaacaaaagatttgtcgcttcatatcgaaatcgaagcgcactctgaataatccatttgtttgattcttatgtttgtgaataacgtcagctcttgttgttactgttattgttgttgttagctgacattgtacagaaaagctaaaaaaaagaaagacatttgactttgtaaattatgtataatccaactatggcaataataataagaccaagtgatgatgattcacacgaaaccctttttggtttttgttcttccctcaaaaaaagaaaggaatatagatagtttcgtggaagcacgtaagtttggggagatgtggtaaaatgagacctaaagaaattgcaatgtcggtgcggcggtaaacgtgtaccctacgacttggattgtgtgttttatgcgataaggtttttaagaaaaccgcaatttttagaatattgtttgtgtatatccatccatcatatggttaatcttctctacaaggttattttgcctcttttgtttatacacattttatgttccgattacatattttattccttcttaataatcacttctaacatgaggatttaaaacttttctgtttccaacgagtttataactacttaattaatgcctctattttagttcaatagtgattaatgacgcgttggcaccatctcaaactaaactcaatatttcggagcaaataaaacaaaatttcacaaggagaccaataattgatcgagtatattcttggggggatgttacgatgccatccatgtccaaaactatttggatcaaagcttctttttggaatttttgtgctctttcatttcatttgtatatagattcggttattccttgacaaaaaaaaagatggttattcctaattaactgccacattcttatttataaatatcaatgtcggttacaaacaagatataataatgtaataaaatagttgatccaggacgtaataattgcgctcccagtg

SEQ ID NO: 51058 - DNA, 1024 bp, Arabidopsis thaliana landsberg
gtaaaagtaatcaatgtattcattctttttttcgttcaaactaaaaaagtattcatttatttcattattcttgttagttactctctcggagaaaaaaatattccattgattactgtatatttcgcaaaatgataacgacgtgaaattcggattgaagtccaattatgttggtgaccaaaaaaaatacaaacacaccatgttatgcattggagaatcatatacattcaacattacctcattcacaaaaattcgtcaccgaataaagttagaaaatgacagtattaattagtttctaatttcttttttcctaatagagacaggggccggtctaaatgacgaaaaaaaaaaaatgtcaataataactctaaacgaaatttagcaaacaaatttttaattttcgttattatcaatcaaattgtttttttaagttttttataacttaaaagaatctaagtacactcctaggatattattttttcttcaccacttaaagaaaatttcttacccactatatctagttaaccacccaataaagttgctctttgcctccaacaagtgggtatagtctatctaatgatggttttacgaaacaacaaaacaaaacaaaggagatatgttttattggttaactactaaatttaattgcaaaacccctttagaagcgatatcgacagaataatttatgactaaagttaacggccaaagaatccgcctaagtgtgtgatggaagaaaagaacaagtagaaaaatgagggaacaaaattctgatatcataaaaggacatcacaatatcgttgatctgatctccatagagcagagtagtgattagcccttgtcaattagattcgtatactgcagggctttaaaacatagccatttggtccaagattcttgtaaataaatgaaaacagtgttaagaaacctcccgaatttttctcataagatgtgtccactatgcaacgggtgtatgaacacagtctggatcatttaagatgagcgcgttccattgagaaagttttttttg

SEQ ID NO: 51059 - DNA, 803 bp, Arabidopsis thaliana landsberg
ttgacatgtttttatgcatattgttgtgtagtttatgtatttaagacgtttggcaattttataaacttttgtagttttaaaaaaatccgatataagtaaaggctaaggtttccaatatcaaccgttcatatataatcattcaaatgtatcattaaaaaaagaagcgattacatgtggttgaactatatttttctatatatatacgaaatataattagaagttgaatccactatgcggtaaaaaggctccaatgatggcctttaattagccgtgttaatgatatcaaacgccaaaaataatcgctttcagaaatacttagaccaaatcaacggttgacgttcagccaaactttggtgttgacttgaagctttttttttttgtctgcaaatcaaaacacaaagaagtcaacaaaaaaaaaagtaggcgtgaagaagattccaactgtctttagattctcaatgatacatgcttaatttttgtttttatccctcatgtcacgttcgagcaagtaaccattgtatgcctcttctaaatcttcgatgactggttcttccaatgtaatagtagattactagctagtagctacaaagggtaaagtaggttctgctacaataataaattatctcagtgcatgcatcaacccacagtgaatcattaatttagctactataaacggtaaacattcgaattaagattttcttaaaagtttggaatctttgcaacctgtcaaaccaattaccagtggacataattttttaatcttaccaacattttcaatcctttcctttttcactgataaacat

SEQ ID NO: 51060 - DNA, 697 bp, Arabidopsis thaliana landsberg
aattctacgcctgctatagagaaactcaagttatatcttaagaaacaattacgagtcctgtcttttagatgtcatatcagaatgtaattagtatagttcgatgagtcttttatttatttatttttgaatgaatgttcgatgatcagtcttacattcctagctcacatcattattatattacataatgtgtttattttaaatattcgtttttggcattctcttaaattgggtgtttgccaatttaaaactagaatgcattgtaaaataaactagaataataatcaccatctacaactaaaagaaatcacctaactagtacttaaatatatgaatgatcatcaatctaatccttgttttgagttggaacccataacccctagaaaacaatttctaatttcttaacatacaactacgaaagtagttaagtacacaaacaagaaccattaataatagtttttccacttattataaaattttgcaacctaatgagcaaagactggcaaaacaactttgctgaaccaattttatgttaaggtgttttttgcaaaagaaataataattctttgggatcgatcgacggcgtcttcgactttattatcaacatacaaagacaagaaagcatgtcatgcacgttttatgggccgggaataatgatctatccacaattatatatgtatatttggggtcacaccataac

SEQ ID NO: 51061 - DNA, 589 bp, Arabidopsis thaliana landsberg
gagggaagccccacgatgctaccatggttgcggtattatctgcatgcagtcacacaggactttttgacaaaggcaggcaatatttctatacggggactcaagactatggcgtaatgcctaactcacagcactatgcttgcatggttgatcttcttggtcgagctgggcttctagaagatgctcacaatctaatgaagaacatgccctttgagccagacgctgcaatttggggaactttacttggtgcaagcagagttcatggaaacacagagctagccgaaacagctgcagataagatatttgcaatggagcctgaaaattccggtatgtatgttcttctctctaatctatacgcttcttcgggtcgatggggagatgttggtaaactacgagtgagaatgcgggataaaggggtgaagaaagttccagggtacagttggattgaaattcagaacaagactcatactttctcggttggggatgagtttcatcctgagaaagacgagatctttgcatttttggaggagctggatttgagaatgaagaaagcagggtatatttcaaagacgaatgtggttcttcatgatgt

SEQ ID NO: 51062 - DNA, 659 bp, Arabidopsis thaliana landsberg
tctatatcttctcagtctccatcaacgtcccctaaattcggtcctctatagctacagtgtcaacaaacttccttttctccatttatttagtgatttattgttttgttttgattacaagataattaaaatacctcacacacgagataataattattacattttttgaaaattatttttccgaagtaagtcgtatggaaaaaatatcggattttggtaattgtaaaattcattccaacaaccttattaatagaaatttttgacatgtattaataaatatttttataatctacaaacactaaacaaattcgtataggttctcctctccatctccacaggagatcccattttcttttcttcatttgctttgtttttttactgattgtcggtgctttgcagtgaacaatcacttctctctccttgtgttgctcgctttgtttcccgtcgtcgacgccgtgcatgtccacagtcgccactgtggcgacaaagattgaggttgttgtcgctctcgaagttcctgtgatgtgctggtgtgcggctgctccagccaggtgatagtacatgggctagcaactctaggcttcatgatggattcgagtgcaccgtcgagctcaccggcgggcgcgtcagagtgcttcacgatgggaagagagtcgaagaga

SEQ ID NO: 51063 - DNA, 592 bp, Arabidopsis thaliana landsberg
  unsure (1)..(592): unsure at all n locations
aaagatcttaaaagcttttaaagggttttaaaaatatttatagggattttataagttttttaaaaagatttacaaaagttttaaaagaatttataagaatttaaaaagattataaggatttcttaattttttggcatgaaaaaaaaaataaaaaggaaaatatgagtaccaaattatttttagcgagaaaccttttttttgcaccaaaaattactttggcaggaatatttgattttctcattatattcattcaataaaagaaaagtagtttcgacgtttagcacataaaagaagtattttaaaaaatagacaacatanggagttattcttgaaaaatgcatttttgaaaatgcaccacaaaaaaaaacctccatttctacaccaaagaaagaattgataatgaggacaacttagtacacctncctcaactagctttacttctatatatcgtttcacgcactccaaacagaattgatgatggcaaaaatcaacagttaacatctgctcagcttccaagtcatggtcgaaacagatagggcaagtcgaaggcatatctntgctaacctcatgaagtactaacgttccaaacttt

SEQ ID NO: 51064 - DNA, 1552 bp, Arabidopsis thaliana landsberg
cgataaattgctcattctcctaatttaaaaagtcactttatcatttttctctaattccaaacctttctatataatcactcttaaaccggccgataacttgttttccaaataatctaaaacttatactaaccaaatttaactaaaatagtaataatttcttacaaatatcaaatcaaaaaatttcaaatccctgacttgtcaaatcaaccatgtttcggactgagaccaaagtctctgcaattcaatgacacatgtatattatatagtattgtttcattaatcacacatgtattttgaccgttaacatgccttgttctttacgtatgttgcactgcaacaacgctttgtcgttaatttacctaacttagtaaaaacaaaatacatgtcttagattatcagttattcaaacttgtcgttatgtaattgttattgaagtaaacagaaactctggtgcgatgcaggacgttactcaaactgagtcacttcgatcggatgtcttaattcaagcaggacaatctagctttgctactgaaatttgatgacacgatgatatatatctatttccaaccgatgaagcacactggagatccgtttggatttttattgtttttacttttttacactatcgtaatcattctttacatatttcctttttattttctccttagaagagaaattatttgtatacaaaacttagaaggctaaataagcatatttattcagtataatcactgtaaccacaccttattcaataaaattcttattttgaatctgtctatttatgtatatgatattgctatagtgatgacagatgagtaaacattaaacatacacgcaacatagctatcttgaaaactgtttgatgatttgagacaaagagaccaaaacaaatggaaccttcttcacatatctatcacacgtcctcatacaccacccatattctgccatgtgttctcactccatcaatattatttatttttagggttaatagagatggtttagtctcatgctttttgtttattactttttttctttggtcagagctttttgtttgttagtaaggactttaaagatagagagtaaaaattactcttttgttttgtcaacataataagcagtttttttctacttcattttgtctccgtatttcatcaagaaaagacacgtatttagatagatgatggaagggcggtaccaaatctccttgacttgactttgcatgtaccatatatatatttgtatatacataaatcataattcatgaagaaaccaaattttctctgtaatcaagttctcaaagcttattagcttctctctctagttctctcacatataacatttgaaaaagatgggaaaatcttcaagctcggaggaaagtaaagtgaagaaagggccatggactccggaggaagacgagaagctccgaagctatattcaaacgcacggtcccggcaaatggcgtacccttcccaagaacgccgggaaattcctaccctaacgcatgtttatatacaaatagctaaatcctatcagctacaatatgtttttcctg

SEQ ID NO: 51065 - DNA, 890 bp, Arabidopsis thaliana landsberg
agccagtatcctgaaatccattgttcaatgataagtttgcaaaaaatttctgaaagaagttaacgaaaaaagcatgaacgaagtataatacctaacaccagaattgaaggcagcaagccagtcttgtttgtaacactttcttcttccattgaaatcgttaataatcccaccaaatgggaatttaactccctccatagcaataccaatgaaggcctcctgtgtgtggatccatgcaatgaaattaacaacagagatgattataatggaaaggtagaagaatcaaagcctaaaaacacttgagtttccatattaatcgaacgattataaagttttgattcatctttcaattgtaaaaacgcgtgacagatacaaatcgatcaaacaaacgagaaaatccgaaatgaaatcaatgacgtacgtacagacagagacacagaggtgcatgcgtaaaccaaaagtctcaaggaagaaagtaagatcgcacgcacctggaggagaagaagaaagcgatggccgccgccgtaatagaaattcgaccaacgtgagagatccgatttccggtgagatatatattccggtggggagcgagggagaagaaacgaaacaaaaaaaaaaagcagataaaatctgttatcgttgaatttgggatctctctctttcttttgttttagttttagaaagaaagagatctctctctttcttttggtttagttttagaaagaaagagagagagagagagagtctacccctgaaaggaggcagagatgaatatttggagaaggcaacaaaaaaaacgcatgaaagagaaagattgggtgagatatatttgccacatcccgcgaaatatttgctctcttcgctaaaaacaatttttcaaatattattttttt

SEQ ID NO: 51066 - DNA, 873 bp, Arabidopsis thaliana landsberg
cgtatggttccaatgcaatcagatgtcccaattccacgtttcttaaatttaaaattgacttgtacaaagcaatatcttcgtaataattaatcaaagacaatattgtctatctcatttcttatcaaaacgttttgttattttattttccataatctcttctttctcataagtcataacgtaattttgttacatcgagaggataaaattcaaattttgcggaaaaatatataaggcccgtttagatatattagtacgttgaaaagagcgaacttattagtataaggcccatttagatataatagtgggtcataagcccataacatatcctgcaacagagaacaaagaagctgcgatctggctaataaaactttcccgccggaaaaagtttctgcagtttccaacttcttaaacctaagcgaagcagatagtctttgattgggagattgagagaggttagtgaagaatggagggaaatcaagctggatcttctctagattcgttgattgcttctttcaataaacgaatcggcgaattgcaggaactcgtcatcgccagaaacagtgagtcctagttctaaacactcaatactcaatttgttattcaatatcttcatttgatgacctaatttcaatttcctgcagtgtatcctgcaggtaccatcccggatttatcggcgattgacacagcgttgagctcaatggagcttcaggtacaatcgatcaaggaccgattacgtgaagaaaccgaagctattccaaaagctaaggtacgttgtatttacttccgagatttctgaaattcagattctagaaacgtcgttacactgtaagatgatttgaatttgagtaatttagggtttagaatctggacctt

SEQ ID NO: 51067 - DNA, 1546 bp, Arabidopsis thaliana landsberg
caggcattttaccagctgttttactacctgaataataacataaattattcaaagaggatgtgagtttaatgatgttaagacttaagaatgacataaatgagtgtttggtctaacaacttcttggtcaatttaatttctgatagtatgtggttatattgaatcacatattcacatcccaaatatactagcgtataattaaagagaacacggatcaaccatttaaacatcttatggacgataaaacaaaaaagttcaaaccaaatttgaatgactgactttaaaagacaaaaaaaataaaagagaaagtacataccttgtcattgttctcgtatgcagctaggtgcaaaaccgtgttgcctccacgatcacgtctgtttaggacgtcgatgaacacatcatcactatcgcgcattttctgcatccaccctgtgagaactttgagctgttcgtatttatcgttcataatcgtgatgtgtaaaatcgtttctccatttacattcacatctttaatgctttcaggacatgctaggagaaaatctgtaagaaggtctacgtcacctttctttgctacaagatgcaatggtgtcatgcctgtcgtcattataaccatataaaaagtctctagcttatcaagtaactttatattatatgtttcaaataaattctgttaaagattttgaaacttatattaaaaaatgattttgaagaagctatacctcctctaccacgaatacgaacaagactgggatcaaccttgactagctctagagctaactcaacctggtcgttttcgacagcgagatgcaacggacttaacccatactcgttaagttttttggcaaaagatggctttagaatcatcagttccattgccaaatttaacttcccagcagatgacgcttcatggagaggtgtgtggatgataggtaaaacgtcaactttttgaagaatatcgggagccgcttgaataagagaatataaatcatcaacactacccgattgagtaaccaaaagcaattttgaatccatacttacaaagaaagaaaaataattgtaaggaccaagaaactagtgtcgttatatttaacatatgggagcatagttattttgtagtatttttcatttctgagtagtgagtctattgactattgacttaattggcaccacttaaattggtcactcgagtggttgccaaaaaaactggaaagaagaactaaaaagcttctcacctaatgcagaataagtaaatcaacgcttggctaggatacaaaaaagtggtaatagtatcatttaggttatgttcttttcctcatctagaatttgcatccaaatcgataatttgttattttgactgaatcatctatctaaatgaattcgaaaaattgacctaatctttaaaactcatgaatgatgctcaattttgcatatacacgtaaatcagtttgcagcttcatccaaatgaattatctgaatgagctttcgatcaacgataacatgaccttactctaatggaagaagaaatataacataaggtaatttaggggtc

SEQ ID NO: 51068 - DNA, 572 bp, Arabidopsis thaliana landsberg
ggtacctgtgcccggagccgtacccggggacgaacacggagttcctagaaaagaatgggatcaggctccaccagttcggaatcgaggggcgcaaggtaaatcctaaatcaattaacaatcgggccacgtgttttcaacgaaatcttctgctgctttgcggtcggttagcgatggttcatggaggcgtataattactctggagagattaaattatggtttgctttaggtaacaatcatgatgcacggcttgtttgccccgagccgacgttgttgatcatatgtcgtgttgtgtatcctaatttaagtagtatttgctgcacttctacttcaaagaaaattggagtatttgttattgtaaccgacttgcgtgaaaggggccataaatcctcttcacgtaggcaggcagtgttatctggagaattttcaaaattcacggtgaatcggtggtggtcctttcagcattgctttgattaatcaagccagctgtgctgctgactcttttctcgatattctcaagtggttttttatttgttgggttcctatgaattcagcctacactagtcactacagcg

SEQ ID NO: 51069 - DNA, 925 bp, Arabidopsis thaliana landsberg
tgaccaatctttttctcagcagcatgatatgaatatgaacataaactggataccaccctttttgcgatggtgattgcgtttaataagactttattttcaacgccctctcgctgaaaaattattagcaacgtcatacatcaaaagttgttaccaatgaatcattttagttggtcactgtcggaattaaaccagaagagatgaagagaaaaaaagacaaaagcctttatgtcatccctctcacgtcgtctttggcggcttcaaagccttcatatgattctgaatcacacaaaaaaaaaagaaaacaaaatcaatggtatgaatataataatttatccattccaataatttaatgaacctaaaatattcatttactccaagaaacagctgacttactagaaacagttgacttttcttcttcaccattcctataaacccaatcagaaacttcgcaaccaaatcttacagaatcacgatgatctcgttttcatttcatctcctcgtcttcatcctcctaagtctctcttccttcgcaacagcacaacagccttatgtcggaatatcaacaactgattgctctgtttccgacaacacaacctctgttttcggctactcttgtaatggtctcaacaaaacttgccaagcttacgtcattttccgatctactccttctttctccaccgtcacctcaatctcttccctcttctctgtcaacccatctctcgtctcctccctcaatgacgcttcaccttcaacttctttcccttctggtcaacaagtcattatccctttaacttgttcttgcaccggtgacgattcacaatccaatattacatacacaatccaaccaaacgattcgtatttcgccattgctaacgacactcttcaggggctttcgacatgtcaagctttggcaaaacagaacaat

SEQ ID NO: 51070 - DNA, 605 bp, Arabidopsis thaliana landsberg
gtcgaacataatgcccgccgatttggttctacctcttcaaccctctcaagtgaattcattggaagtcatcacaccagaaacagctgaaacttggaggtgctacttagctacttgcaaatcattatcacactccattgggcaagagttgcaacaggtatgtatatatctattgcattaatgttagaatctgccaatctggtacttctaaagaaatccattgttttcagacttttgactaatattttctgcaaatttttgttgcaggtggtggagaatgatttggttgcagctagacaaacagatcgtagtttaggcagccaagacttgagcaggtacaaaagccctccttagggtttatccttgtcaaatatgtgcaaaacttacaattatgttgtttggttccacagattgttgacaatggctcgtatgatatctgtgagttatggtgagactacgctttcactagagcactggcaaatggtgttggaactagaaagacttagaaaggagaggctcaagtaagacaccgtaacgacaagatgtattatggttcgagactatttggatattgtaatttcactagttatttgagtaagagaccatat

SEQ ID NO: 51071 - DNA, 787 bp, Arabidopsis thaliana landsberg
  unsure (1)..(787): unsure at all n locations
acattaatttttcttttatgtacatgagacagtatataagattaactcaactaacctcgctaggttagcataaatgaatgaggaatttacgaataaccgtcatcttcgtattcagatttggactatattcgattgacctattgttttacattgcaaaccgaataatatgtacatgtgatcgggtctttgggttctcggatccaaaataatggtctccgagaaaatggaaattgtcgtgtagctagagaaaggtgaaaaatagaaaaaagctgacgcaaagaagagaatagttttattgtgaagaccgataaacaaaaaaaagtgctggtttgaaaagatgtttaaagagtttcagctttctgcatttattataacttcacgtacaactcttgtcgaccttctgtgtcttttaatgcctatcattttttatttaccattttgccctatatttctgtcttttgataagcagaaagtgagctaacaaaattaattatatgttttatagtgcttacatattattaaataattggtttacaaacaaacatattagtaaataatttaatactcagatgttgtgtataagttttatatttataaatttgttcccaatataacataattttttcagttctttttataaatagaaacttgagttttctaaacttcacaaaacattctgtagacgagtttgtgacgtagacgagtttgtgacatttttgctacagaacagctaacattnttttcttctaagttataatgtttgagttttttttttctttttaccata

SEQ ID NO: 51072 - DNA, 488 bp, Arabidopsis thaliana landsberg
agaacggagctcaggctaatccttatagtcgtggttgcagcaaaattgctcgttgcaggagttagacctacaaacaagaaagctatcttcttgatcttgacttatgttttctttgatccatcaagcgttttcattttaattaaatctttaaatattcatcatgtctctgcacaatagtaaagacctatgttttgatcaaattgggttgatttgtaatattttatgtgaataatcatggtcttaatgatccatgaagttgtttggtttttaattattacaaagagacgagtattcaaagagttattacctacgtttgatcaaaccgggtttggtttgtacctcagccgctttcacagtcggattgaataaccggtctcaagttgcaacacacaagtgaccaactctcaacctaaccctaacccttaccaactctcggcgcgtttacgggaattagtttgttttgaaaattaatattttatatatattgg

SEQ ID NO: 51073 - DNA, 589 bp, Arabidopsis thaliana landsberg
  unsure (1)..(589): unsure at all n locations
aaatacctaaaagagacatcaaactcagcaccaacatctttagatacacttctaagctacttgtatcttcgggctactctgaggtttttggttcataaaaagtggagctaccaaatcaacaagcgccatgtaaatcaagattccagaggccgtggcattaagaaaaccggaaacttttagggccattgggctattctcgttgtaaatctccgccactccaataccaattcctatccctattggtgccgtgagtgcaaagaacatcaacataacccaaattttctttactctaaactttgcctcagagatgcaaccaccaaggccaaaaccttcaaacaattgatggaaagtaattgcagctatgagaggctttattgtgctcacacttggagatgctcctagagatattcctattatcactgaatgaaccacaatccccaattccaatatctaacaccataagaaaaatagacaacatgtgactaataatacgggtttgtctttatctaaatcaagaatttccaaatactttaacgtacctgagttacaatctttntcctcataataatgtgatcatcatcttggggaa

SEQ ID NO: 51074 - DNA, 582 bp, Arabidopsis thaliana landsberg
  unsure (1)..(582): unsure at all n locations
gctagcccctatgggatttcgattttggactgctgtctgagactttgcttcctggagaaggatgccctgtctgccatttatgggcagtacgtagggatgcactcttgcagcatcgatcgagctgtgcgtgcgtgcttgggttaagcattccgctcttgtctccttgcgctttctaacattaattgatgtgtagtcatcatgcattgctggcctttattcgtgaagaatgaaatgagcatatgtaagctttagtttaccaaagtacgtacgttatatatcgctcaagaaggaatcacttctctgccaaaacatacatatatatatatatgctagcatcactcactatgatcgatggtcagagcgaggcgttgaattatatatatatatgagatatatatatcaatgaccatatattattattcagtccctcttggtttaatctgatgacgaaaaggcaaaaaaaaaggaaactaggaaaaagaaaaatggctttagagattatttggtgctggcatctcagattaaaaaaaagtatgacttgtcatttagctgtcgtcntctttcctaaagtcatatatatat

SEQ ID NO: 51075 - DNA, 574 bp, Arabidopsis thaliana landsberg
  unsure (1)..(574): unsure at all n locations
cccaattccatagcttaccccaataccaactgggcctatgctttgtttaataaccgcctcacacaaaagcatagtgtgtctgttaacggcggaacggataaagtaggttacctgttttcttttggttacctcgataacaggggtacgattgaaaacaccggcaccaagcgttaccagctgagggccaacctggatgcccgtgtgaataaattccttacagtaggaacgcagacatttgcttccacgcaattgtttgannnnnnnnnnnnnnnnnncgcatttaatttcctgcgccagactaccccgggactggttccttactggaatggcaggtacggatttccgcaggcggctgaagagtcttccacagccaataatatcctgggcttcctgaacaacactgcgggcgatgaccagacctctcgtttcaacacaaccctgtatgcaacggtacatatcctgaaagggttgagttttgaaagccggtacaactaccagatcaggcagaacgattacaactcgcatacaaatgcaggaccgagtgaaagatggaattttgcccaatgagcagaaa

SEQ ID NO: 51076 - DNA, 592 bp, Arabidopsis thaliana landsberg
agggcctacttgcagaacaacaggtccggtgaatgcgacatggtatcatttgttcgaaggccctaaagaagcagagcgatggggctgctccattctttgatcttcctttccttctctcaaaatatttttgtctctacttcttccagaagagtgagtttgtgtttttacgttcccgcggcagtgaatttgatgtaattggcaaaaaaaaaaattgattcatttgtgcagtaaaaaatctattgatcttgatgtgtctcttaatttaagaagaccacagtgccaaattcacgccaccacaagaaaatctagcacagtggccgtcggtgatccccacaccaatgcatctcagatccagattgtcttggaaaagttctcgattctcgatggtttacatgtcgtgttcgggcaagttgttgaaggactcgacgtgctcaggagcattgacgacgaggttggaactttgaacaagattccttccaagccggtggttatcgcagactgtggtgagctctgagagaggctacaatggtgtcttgtcttgttttaatggatgctctgtaaaagatactagctcgaaaggattttgaggttt

SEQ ID NO: 51077 - DNA, 654 bp, Arabidopsis thaliana landsberg
ctaatatttttttttttgataaatatgaaatagagcatgtaccagccaagaatgagcttattagatatgtcccacattggttgggtatgtgagtaatgtgctccttaattatgtggtgtggcataccgacttctagatgatatgtttgtgacgggagatgaggtgataatttgttgggtgccggaccataatttttccttccacggattgtaattcactgcttggaatggctaagtggatcaatgttgattacaagccaccaaattttgaagtttttggtacaacaatgtatcataccaattcgatgtcataccaaacagtaaatagtggacatgcgaagaaaaaaagcagttcctcttttattggttcgtcacaaaagagacaaggctatcgatctcccatatgctctcatcctttcaccgttgaaagactctagacggcgatgttacttataattactcattatttaattttgtctactgaatatttttcaaaacattaaagaatgtgacggtgactgtggatacatatcttatttcagttgtgatgtgaaattaatagagattacaacagactcatcttattgtaagtctattaacatgaagagagaggatatggatcatatatctcgagtttagtgcttgaatactgata

SEQ ID NO: 51078 - DNA, 546 bp, Arabidopsis thaliana landsberg
gcatagagatctgtgaagcagaagcagaagctgctgcttcagctattgctgtggcagccataactaatgatgaaaccagtgggaatgccttgagtactggctctgtattacctgttgaaaccaaaatttatggaggaacagagttagatgatggggcagcaagtggtatatttgctttctgtagggtttatgcattcccaaatggttgtttgttgtctgaagtaatttcttttgctttggcaggtactgttggtgggcagactagtcgatcaaaagctgaggaatctctcattgtttctctaccagcagatctttcagtggacaccccaatctctctgtggccacaattaccaagtccacacaactcaaaccaaatgatcactcacttccctccaggccctcctcattaccctttctatgatgtgaatcccatgttaagaggacccatttttgcttttggcccgcaccatgacgcaggagcaacccaatcacagtcccagaaaggtccagtaacagtatctggtccacctacgacctggcagcagc

SEQ ID NO: 51079 - DNA, 117 bp, Arabidopsis thaliana landsberg
aaaaagtttgcatcaaaatagtgcacactgtcaagttccgttttaactagtgatgcaaaccttcttatggtactgtttaaaaattaaaagatcgttgtcaattgcgtacccgcacgt

SEQ ID NO: 51080 - DNA, 504 bp, Arabidopsis thaliana landsberg
tgactgtataacaaaagaacaattctttggtatgtcagatataacatgacatttcattgcatgctataagtgaagaaattcaccaactatgtccaattatgagaatgatctaaacaataaatgatgaagaaatgttgcgataaaaggaagagattgtctgaacccactaacgagacagaagacactattgttcttgtgatataattataaagggggagagatttctgcattcattcaatttttcaaccatttagaaaagaacattaaagattcatatagtttttaggcaaagaagaaagatcccttttctcttgtatagttaaaaaaatatagatggagataaaagtaaacccaaaaggtagataaagtgtaagacttttgatctgtgaaccacattgttagggctggaaatttcagctcaaacttccatggtaaaaaaaactattttgcggataaatgaattttatgatccaccatattcactgagtacgaatgcactagaca

SEQ ID NO: 51081 - DNA, 499 bp, Arabidopsis thaliana landsberg
gagccagaaaataatttatagcataagctatatgtaattatgtataacatatgaagcatttgtgacccaagaaaataagcgaattacaaacttaatttacagccaaaatcaagataatacctccaacgcatgtagcacccacatcatccaagtcccttcttgcatcatacttcaagtctgagccaatagaaatccacctatgtaaatcataaaggaaaaggagcaaatagtattagaactcatcctactttaagttatctaagaaaccaaaaaaggacaccgtagacacaattatgcaaatgtagtataatcataagtcagattgaattgagctaacaatatcttatcaaggatgtaaatggcgcagaagtatctttctacaagacttacaaagctttcctccttccatgtttccaattttcccaaatcaacccggcaattgttcgccccttgcccacaccagcaccatcttcaacataaaagcctgctctggtaccat

SEQ ID NO: 51082 - DNA, 1178 bp, Arabidopsis thaliana landsberg
acgtcgaaacgctttcgaaactagtctgagattacgaaccgctgacaaggaagaagctccggtacatgaagaaatctccacgagaagatcttctggtaaagaatcgagacataagcttgcttttgttttcgatttcctaatagaagaagacgcatgcaaagacaaggataccaccatgttgagagagattcaagagtgtctgttcccaagtttgccaatttgattatttatattaagagggataaattcgtttccttttttttgaggaggagagacagattaatccttttccatatttaaaaaggaaaaaaaaaatagatagatgactaaatttttttttttttttaagcaaagatattaaggaaaaaatagatagatgactacaaatattaaggagataaaacttaccaaaaaaaaaatattaaggagataaatacttaataggctttaaaatcctcctattcttaactcgtctagactcgagaagtttatgagaaattgtatccatcggacaggatcaagaactcactttagccggtttccttttcgaattgttctttggtcggacctttacaaaaacgttttggagatcctgcaagaacaaaaaggtgtctttggaatcaataaagacattaacctaggctactgaattgttttctcaatgaatcgatgagaaaggtagacaaaagaaacagaagaatgtaaagagcttcaagagatcaggagataaatgtaaatcaatactaaaagagattctgtagtagcaagagaagcatcagatatgacatttaataactggctaggttcaatcaaatactcgagagacagtccttgtcgaatgctcataacataatcaaatctcttatctccataatagacataaccccaagctaaaagtttcagcttttattcacgaaattagcagtaaccacttatcagccataaaaaatctatatgtaaggcgttcaaatgtttacctgatctgaagtatcagtaccagaggattcagcagaccaaaggctttccaaattgaaataacctctggctttctcatcaagtgcatggactacaaactttcctacacgtatccataagagctaattacagccaccacaaatcaaaaatgaaaaaccaagacttgtagatacaaaaacgaaccgtagtctatgacaatccac

SEQ ID NO: 51083 - DNA, 650 bp, Arabidopsis thaliana landsberg
catctaaactattccttatttgcaataatctcaatgcttgtggtacagtgacttgtctaactgtctcatacaaaacaaacaatatcatcaaaccttgaatctgcatgttcattttccttctctctcttctccagctctactcgactcagcctcaatgaaaaaagaatcacatgaaaccttctattttccctttgtcgagacaggatacctctcgagagtctctataatctcctgtaattcgaattcttcgtcaatgtccgccatcatcctcaacagatccggagattgctcctcatcactgagaaccgccataagcgcttgcatctcgacttctacacttagaagaccctctaacatactaactactgctaacattggtggcctatcagaagctgcacgactcgtatagaagatctcaactttgattgtcttcattacctcatccatgtcatagctttgtagtcgcagatctacaaattgcgccaagttgttatgcttccatagatgacacacctaagaatacaaatgaattcagattagtaagttagaaatcatatgcaaaatatgaactacctataaaccactaagtattattaaaactaggttgtgtcagaatttattcttatttttaattttaaaacgagctcatt

SEQ ID NO: 51084 - DNA, 1159 bp, Arabidopsis thaliana landsberg
acgttattaaacaaaaaaaaagactttcaacgtaataaaaacttagacttattcattgttagtacttagtggcaaagggcatggtaaataaaccacctaacaaaagagagaaaacaaatttttattattattgcatagaaacaaaagagaagcagcagcagtgaataatagaactgtaaaattctcaaattccttattctattattttctgtccactaataataactaaaacaaaaaagagaaaaaagggaaaagaaaaaaaaaactgatgtccgttactttattaaaaggtttaggaatcgagagagagtatattacttatacttggacttagattgcagacaaagcaaagcatcaaagattcattattcactgcttatacatacacagatacatagagacacttgttgtatataatacagagaaagagagacaggtgttagggcaaagttgatagtagtggtgggtctgatttctgacatagtccccatttcccgccttggatattgttagaaaatctctcctcctcctcattcttcttccactaaagacatatatagagagagagagagtaccttaataaaagattgagactttcctcagagataagaaagagagagagagtgaccctgtgtttgtggatgtgattttttttgtttgtgtgttggaaaatggatacccctcagaagagtattactcagatcggaactccaatttccaaatccagattcgaggtttttcttcttctgtataactctaatcattggtttggtcaaagttctgtgtttttgtattttaatgaaatgttttgctgtttttttgtgccaattatcagatttctctgaattcttttctaatttattgtcatagaaattcagatttcataggtttaatggaccaattattcaattcatttttttacaaaaaaaaaaaaaaaagtactttggttttgtgtttgaagtcaatgcagttagttcaaagacataactgtaactggttttagatttgtttgactttgacggttttagttgtttcacatgttacagtgaagtgctgttaattatgatcagttatctccaattctcactacaaattctatactttttgtttctgtcctgtttttcttaagattctttgaattgtggaaattgtaacctta

SEQ ID NO: 51085 - DNA, 575 bp, Arabidopsis thaliana landsberg
aaccttgcaccctccacgcacaccctccggaacccagaacgcacacagtaaatatacttgtcggagagaggtacggtacacagacaatttacgcgccaggttggggccttgtgcattctgtgatgagattatccaagcttcgaatggctagcaacgacatcggagcggtctggactcctgggacgaccatttgcttcgagagtctggattttgtcgtcaacgaagaaagagagatgacgagggcctcggaagcctcgtctcccatggcaagcgacttgcccaatgtaacaggaagtctcggtgacctccaactcaacccacctgaggagaaccatgagtcgcagggcttgccacgacccgatcgcactgaggttgtgggagtacaggaccatgtccgggactcgttcctggacatcctcttgtgaggcttggaagatggactcatgtccctgcctagcgtggcaagttgcgaccctggtcatgaatgccttgcagccaacaccatagaggatcgtttctctcacgtggggagcatgagcgaggcctcgcccagtatcatggtgcgcacacggtgt

SEQ ID NO: 51086 - DNA, 684 bp, Arabidopsis thaliana landsberg
tgagaatatttcttataatcacaccaaaattgaaattttaaccccaaaaaaaacatacccaaattggatgagataatatttataaaattcctaaaaaaagcataaacacatattaccttataaagaaagttttagagaaaaaaaaaaactcaatacaaggcagtcaatgacaaatctatgaaaatctttgattttcttttttgtttgtaaatattgataaacatatttttgctaaatccactattttttaaaaatctcaactttttaagtcagtaaatctacacatatcaataacttcttttttttggttttaatgttaaaaaaaaagaaataactttgataagttttctgtattatttttgaggaaatagaacaaaggaaggaactgttctaattttgattttcatgaaactcccacatgtcatcttctaaaattaaataatttagttttgattttaaaattacaatttaattatttctttgaaatattttaaaataataatactttcttgttaagatactcgttttggtatgtaaggatggagttggcgtcaatagtttgattcaagtaaattggtaagaaacaaagaaaatgtcggatttggttattgcactcgtagccttcgacgttctttttgtggtgtttatcatcttaagctgcatcatgggcggcgaaacagatgc

SEQ ID NO: 51087 - DNA, 522 bp, Arabidopsis thaliana landsberg
gctgctgccgttgttccagtactgaccgccgcaaaagccgggctggccgtaaccggaaggctggccgtagtttgcggtcgtgcagctgttgccgtaatacatctgcccggccgggcaggttcccgcgttgtagcactggttgttatacatctgctgtcccggagcgcaggtcacgcccacggccgccacgttggcagccggctggtcgtccttcttaccgcaagctacggcgaggaaaacgaggggaacgataacgagaaatttcgacttcatcatggtggggccactcctaatcaaaagcgttcgcgcttcaaggcccccccggaccgacgattccctatctcgaagcaagcgcactatatcgcggcaccgccaaaaggtaaactaaattagtacagtatttatgcctattattttcaataacttatgacgggctcaagttaagcttcttctggaagacctggaactccacgcggcggttcgcggccgcagaggccggcttacctttggacggttcagccg

SEQ ID NO: 51088 - DNA, 485 bp, Arabidopsis thaliana landsberg
gttccgggggcgatatcagcgccgcggagctgatcgacaagatcggccagttcgcggagatgggcgtcagcggctgcgccgtcaacgccaagggcagcacgcgcgccgagtggtgcgacaacgcgcgcagtctggccgagaatgtattggcgaagatcgactgcaattgaatcagacagccgtcagcccgcgcaggcgagcatcgcggacagaaccgacacttgaagaggaacgacatgcgcattgcagtcatcggcggcaccggcaaggaaggcggcggcatggcgctgcgctgggcacatgccggacacgaggttttcatcggctcgcgcgacggcgccaaggcacaggctgccgccgtggaactcggcgccgcagccggccgcacgattcagggcggcagcaacgcggacgcgatcgccgccagcgagatcgccgtgctcagcgtgccgtatgccgcgcacgccagcacgctcaatgagctg

SEQ ID NO: 51089 - DNA, 1142 bp, Arabidopsis thaliana landsberg
  unsure (1)..(1142): unsure at all n locations
acacttaggtggaatgtcacattgagatggttgttcatctatcgtaagcaaagcgcatcgaatcagatcagaatgtcactcaaaaaatgcctccacacgtttgctccatatgtcggcagatacatacatctatccacttatggcatccccagtagtctaagataaaaatgataagctacagatatattaaattagagataattgagcaagaggctccacctgaggattggacagagcaatcaacctcaaaagtgatgtcatcagacttgacaaacattggagtatgatttgaaaggaagaacctaaattgtggaccataatgaaagtgtactgaatctcagagctccactctctgcatcaaatcgaagcatccagttcctgaaagcgcaggcaagccaagacagattctagcagagggggtttctaatgtgtccttttctccataagtagctgcttggacaatgaacttagtggctgtttcaaaagtcattctgcagaatggtgaagttgattctgcaattcctcccatacggctcattggtcggtatccaccggaaaaggtcatataatctgcaatgaggttcaagtgtctgatgcttacagaaatgccatatgatttgaagacgtggtttatttccctgattattgtttctctagctgcttcaactccaaaaatgttgagcatatcgtgaatgctgttgctatacaagtacctgacgtcaagtttatcttggaattcccacagtgcagggaaatcaactcctgatgcgtggagagctggtgaggctttcttttcatcgttggatatttctcttctctcctttggattgtctccatggtagatcacctgaggatcaccacaattagccactgtgcatcgttcaatcttcccagaattctggatgtaaaccttctgcgccgtttgttgagcaatctgtaagaaagaaaaataagggctttgctcacatcatcaaagtcataagagacctagcttttatataaaaaaaggtacctgggcaagtaaaatatgagggtcatctgtagcaaacttgaaatggacctcaaatttctctccttcacctttcacaaagatatgtctgtcacttttagctcgaacatatnntccgctcttttttttactc

SEQ ID NO: 51090 - DNA, 753 bp, Arabidopsis thaliana landsberg
  unsure (1)..(753): unsure at all n locations
gaactcagacctgaaaagagtttgtgacattaaaagaatggatgttactctgaaaaatagcttacttgcggtaaagggcttgcttttcatcacagaattttaaccctcttgaaacatcatcagggaacagaagtagagcaatttcagaattgtgttttccagcaatgttctcaacatagaatttctcatcgattgggacaccattgttaaaaccaatctgcgaatgatagaaagaaacaaaattgattgacacaagagcttgaaactgagtaataacaaggttccatagcatattattcacagttttctaaagtcttgttgtaaatttgaagttataattatgacattaaaaaaagcaaggaacctcttgaagcagttcttggaaggcaataaggtggatgggatctgagtcacagagtgttccatcaacatcaaacagaatggcttctaatggagctagttgtgacagagaaggtttgcttcaccacaaatcaaaagagttcagtaatattaaaaccatgagaaactgcgatgagattgcatcaaaaggatcaaactttagataccataatcaaatgggtttaagatcaaagaccaattagaaacatttgatgtttatcaactaaannnnnnnnnnnnnnnnnnacgagttccattgatcttggagaaacaaacattagcacaaaaatcgcagttttctaacaaaagtaacacaaaatcctagatacatagtgggagaccgaaatggaagct

SEQ ID NO: 51091 - DNA, 927 bp, Arabidopsis thaliana landsberg
atagaccattgtttttttggttttaggacattttggataaggaggctgtgtctgggtcaaccaattacggccagagatggatttacttctttttatcaaatatctctgaacacacgtttctcatcgctttactcaatttctattctttttttttttctaaataaattatgagagaaaattattaataattatctatgttaacatatatatatatacatcgttataagttatatatatagacatatgaatatgaatcattttaattttaattaaatgtgcattcgacaagtaaatattaaaaaaaaaaacaatgtgtttattgctgccgcttaattttataattatactttaaaatataccgtaatataataaaagacacgtaaacaaaatttttatttaaatattctactcatttttatttttttgaaagaatataacttgagtgattatttgttattgaattaaccacagtaaaaatttgaagaaaacgcttatgaaatgcatgaactcctatctaagtttacaacaaaattaattattatgaagtttgatagagttacaggttttcatcacaaaatataaaaaaattacaacaaacctttatgataaaaaagaaaaagaaaaaattagttcaaactcacctccatattgtacaacactgcatcataactagatttttctttctttttctttccattcaaatttaacaacaaacaaatgaataattcagacacagttggtatttgatggtcaaatcacaaaccatgattagtgtcttcgatggctgctagctccaccagctgatgaagagaaactgccatcagacatgaatggttcagaatgtgatataacatgttgctgttgttgctgttgcatcatactcatctggttcatgtcaatgaaagattctgaaactccccatacttt

SEQ ID NO: 51092 - DNA, 758 bp, Arabidopsis thaliana landsberg
tgagactctgaccttcgatctcttcttcactgactcctcatggaccacacattgcactgtgccttggcaaaattgcttgattcaaacataagctaccgacgaaatgcaccttctgcacaaagaacagagaacgagaatttcagtgaatgtatttgatttgaaattataagcacttcgtctttatttgctcaaaatggaggaatatcactgaggatatagggcctcggatatggtaaatgcttgatatatcagactaaaaacttgccgttttctccatcggaaatatctccaagctttgcaattgcgcccacaagtgcatgctcgtgctcctggattaaaggtaataatagagcatctaagacttctgtatatataaatcaaaactatgtacaaaaggatctttgttgttgaagagatcaatcaaacctccaaaactctcttagccctttcaacttcgtaaggatctggattgtgtgaacgaagaactctctccacctatcagataccatcatcattttgagatatatcgtgctgcaaaactaaccttgtaaataattgataccaacctctctgattaggacatctgtttggcggattcgtatatcgagatgtttcttttttccagttccattctgggatgttctgaaaccctttctgatagtgttcttctccaaaccgcttcctcgttgtggaacacagttgggtccggtagttctattcagtccatgaccttgtccattatatcgattaccaagcgc

SEQ ID NO: 51093 - DNA, 771 bp, Arabidopsis thaliana landsberg
catattaaaaatcgtctataagcacaaaatcagtcacacaacacagagaaacaccaaataacccatttgtataccttatgtgttgagaataaactgaagcagagattcctggcaagagaacatacctccatgtggaagaagagagcaccggagaagcgagagagattgagattcagaaactgagatgatgatgatgatgaattgtagcggtgaagtctacgtggcgcacaatagagacgaccataagctgttattgttggacataataaaacctgagctctcattttcttttttcgctttttaataattttgtcaattctagtttcttctctgatgatctgttgttctgtttgtgtgttcgtgttcattctccagagttggattcattggttgccacgtggaccatgacgtgatctctactctttgcactttgcaggaacagaacacaatgtaaatgggcttttataggcccaataataatattgctttccggctactactaacaaaacttcaggtaaaacggtgcaattaaattctaattaatcaatcattaatacaaaagctgattataatcaattttcaataaactaaatttgtgggggaaaatccccaattcacttgcagcttttgtaatttctctaatttgggtcgtaactcgtaagcggccgtggaattcaagtcgccaccggatccgatcaaagtcttccgttatacgcaaaccctaatacctcactacacgactctttttgatctgaatcgagagatgaaagc

SEQ ID NO: 51094 - DNA, 394 bp, Arabidopsis thaliana landsberg
cgagtctaaaggatcaattgtatttcattttaaacaaatggtaacaaatatgatatgccgagatcttctaaccgtagaaattggctccatgacattaaaaataaccaaaaatatgttcttccgtagatcaccaaattttttttgggtggtatatggaaaactgtcaacattaattctattctgatttctgatttatgttggatttttttttttatatataaaataaaacagttttctggtacattacaaatgttataataatgatcaaatccatacaattaaataggaagattatcattcatgtttttaatctttaaatcacaattattgtccattaatcctgaccatatttattagggacctagttttatcactttaaagtggtttgggaaag

SEQ ID NO: 51095 - DNA, 134 bp, Arabidopsis thaliana landsberg
atagaaactgaacgcgtctgcttcccgactcgtatctagccgtgctgtctgcgtttttatttttctccaacccacttgcgctctgcctgagcgagctcactctttatttgtcacacgggcggactacgttttcg

SEQ ID NO: 51096 - DNA, 520 bp, Arabidopsis thaliana landsberg
  unsure (1)..(520): unsure at all n locations
ggaaaaaacaacannnnnnnnnnnnnnnnnnnnnnnnnnnnnnnnnnnnnnnnnnnnnnnnnnnnnnnnnnnnnnnnnnacgaacttcgaagatcggtgtgaagaagaagacgtctctctctttgcttacacaagtcaatgaagatagttttttttttaatctttcactaatgtattttactctcttctcattggttgtaagtatttactaatttcgattttatacttttttgtgtagtagacaaagtcatggatttggattgagatttacagaaaaaaaaaagtaaaaaaaaaaaatgtctttttcagaataggagtaaaataatataaatagagcggacgcgaaaaataaaatgaaatagagtttaattggaatctttaggttacagggattattttctctttccttcttcttcttcattgttctctctctctctatctcctcttcttcttcttcttcttcttcttctttggattttgtgagctaataaacagagaggaattgccataaaaaacctac

SEQ ID NO: 51097 - DNA, 1089 bp, Arabidopsis thaliana landsberg
gcgaagatgatgcctttgcacttttcgttgccgataattttgatgcatttatttattttaaaataataatcatttgtttttctccttttctgacatccaaatatcatttcatattccgtattatataatatgtcttattaaaatcaaacaaatatttgtcatttctattagtgttattaccaaattcttgtatggattagtgtgttgtagatgataaattttattattgttataaaaaaatagattacctagagttgccaaaagaaaaaatattacttaggatactgaagaaataaaagaaatttaaaagaaaatttcattctcaaaacctttacgttttaaattgaggataaaagttactcaaataaatttttatgaaaaatataattaattttatgaacgattacttttatcttacattcaaaatttttttaacttataatgtacaatatatgaatagcagccaatgattttaaatattaatgaaatgtcttcaacatgagacataatccgcatcaaaaatacaaaatcatttttttgccaactacaaaatcataaagcacaataatgggtataattgttttgttacgataaattaaaaaaaatgtatatatatatatatatatatatatatttatttgtacttgtgcgaggaaggtatgtgtacgtacttatgatcatttgaatgatacatataggacggaggaatgatatatatatgacttgatccaacataattccatcgtgattttttcatcatgcattcatttttttttttcatgctacataaagaaatgtgccaagcatggagtatttggtataattttaacaggagcatggagcatggagtatttggtataattttttcattataagttttattatatgttataatttttgacaaaaaaaagaatgtttgttataattctcttcctccaaatactttggtgaggtttacgataagattgttacgttcaatccttgttctgaataagttttggttagtgttgtttaaattaatcagtacttcactactaaaaaaaaatcataaatatgtggatgcgtaatattgtattcgtgttgcttttt

SEQ ID NO: 51098 - DNA, 1103 bp, Arabidopsis thaliana landsberg
gaatagtttcgtttctcttatactttaaattaatttggtgttgttattacagagagaaatggcgttaaggcagaagttaggatggtcagaaggagatctgatgagatcagatgctaagccatgttcaagactgatgaaacaaacagctgccattttcactgttggtggagctcttggtttctgggttctttgcagacttcactatggtaaacaaagttctctcctttctaatcagtgatttgcgtttccatcaaaaggttgttctccatatagctattgaatccagtgctctgcataattgattgttagacagatttcttgtagccttatgaaaacataccaatgcgtattaccattctgttttctgttctgtagtatccgtttcttatttgaaaaatgaatccaaaaggagctttgattgaatagtttgatgtggtgaaagattggatctttacacgttttgggaagcaatacactttttctttgattcctattgtcatgaaaaatgattcttggggttggtttgttgtttatgtggttttaagagtaaaaggaacgtagaatagaatagttgagtcaattctaagatagaacggttataaaagcaaataatgtgtaggtccaaggatcacagtgccaaggagtctgcggtgggctgggtgtggtgctttgtccgtaagcacatcaactgcaatgcttgtccgtctcttcagccctgaatgtgaaccacaaaacattgctgcgtatgataacatcaaaacccctcaagcttcactcccttaaaccccatcataatctggctttacctatgatgtgtatggacctcatcttctgtacattttcttgcagtacatgaatttaggtaactatttataatactaccaaattctgtcactttttgtttcctttagaaattatggtgtattttttcatatagcctttaggttgatagagttaagagtatcatcctatgctcctctgtcattttcgtgtgtgtttgattatgagtgtagtgtaattggccattggtcacactctcttgggagagtgtttagctttctaaagcttttgctgtcgaagggaagaacctttgatttatttgg

SEQ ID NO: 51099 - DNA, 1590 bp, Arabidopsis thaliana landsberg
agcaattaatctgtttaccgtcgtcaaaaaatatagtaaagagccaaagacaatcctaaagtaaagtcaagtaattgtattcaaaatcgaaaacttagctttaatctttagtattcaattcatacctcttgagggatttgtgcctccgggaatatccacgacaatcctgaaaataagaaatataattaatagtgttttattgcacctttatttatacgttaaattgtttacgttggtgtacaattgcttcactaaaaaaaaaaaaaaaaagagtgcgtaacttggtacgcaccagtggacccattctctcatgttcggctcgcttgggctaggtgcgtccgggtcagtcatcacctgcatgcatcgaaatatttgcattcacatacggccaatgaaattgcaacacatgcaacacgtcggttagctcagataactaattaaacgttatttttgtaatcaaaatttcagctaaaccgtgactaacacatttaattatgtgttagaaactcattgatatttatctatctattttaatataaaaattacgtcaacatctatgtgagtgtaccagtaaatatgtgtaaatagtgcagcacgtctcaaaattcatgggagtctctgcaaagtttggtttttagtatatctaaatggattaagaaaatagatgttaaattaatagatgcttcaatgtaataatatatatacatgtttaaatttaaacatttcttgaatagagattgtgttcgactgcattgaacctcttagaaatggctttgaagtaatgtatgcatgcatgtttctactataatgatgacggtaaatcatgatgacgaggaagcatgtaaggtatgtgcatatatacacatatatgtttataaatgcataaatggatatagatgtgagaagatgaatatacgagagtgtaaagctcatcggaatggcccgagatgttgacttttggaggattgactgcggtggagggtttgatctcgcagccgttagtgatgtgtttggggccaaagtagacagacatattggcggttgggatgaacatgtccaacacatctccgatcactcttccgaccaccaaaggatcaacagaagccgccatcgatcagcggggagggagatatatatagagagagagagaaacagagaggttcttattttaaaagaatcgttgttttgttttgtcgcatgtccgaattcggatgggcatctatgtcatggtttatataggaaataatttccttacatcaagttttttttttttctgtcgtacatcaagaaatatttaataatagcatcgacaaatacaatgaatttgaagcacgttggcgataatttcctctttcttcgctattcactatttatttccacgttaattattttaatgtttttttcgaattaattattttagtttatgtaaaaataacaataatttagttttcaaacgaaatatctattgcagctgtaaaatgtataagttattaagaagaaatatatatcttcgaaatgtatttcatatatttattttaataacatgtaatatttttatatttgcataatataaaaaagaaaagataacga

SEQ ID NO: 51100 - DNA, 611 bp, Arabidopsis thaliana landsberg
  unsure (1)..(611): unsure at all n locations
cttgaacttgcctgccgcaagcggggtgtccggttgctctacgaagacgagcttgatcttcctggaatcaagcaaccgttccagtggtgggtcaagattgccggcggcatgaagctgggggtcattcccgaccgggtgtttgctctggaatatgcggatcaagccggtcagatgcagcgggcatatttctttctcgaagccgaccggggcaccatgcccgtggttcgcaaggggctgacgcaaacctcattcttccgcaagctgctcgcctatgaagcgacgtggacgaacaaggtccaccagcgccagcttggcattcatcgtttccgcgtgctcaccgtcaccaccattcccgcccgggtgcagaccctgctggcagcgtgttcccaattgaagcgcggccacgggttgttccttttcgctgacacatccgtcttggaaaaggatttgttcaccgctgtctggcgcaatggcaaaactggcgaattgtctccgctcctcgacttgccggaattggcaagttcacccgtctcctgattcttcccgccgagcggtagcgtgataccagagacaatcccacttncgggactgtccttcggtcatcaccccac

SEQ ID NO: 51101 - DNA, 1104 bp, Arabidopsis thaliana landsberg
atttttgctagaacatgttttcaggtttatgttggtgattagcttgtaagcttgaagcagtggttatggccatgagcatgtaatagactaacatatctttttgctctttggctgtagtgttaccaaatatgtaagtcaaagtttagaaaatgaagttttgcaacaaaattttagcttaattattcattttgattaagagagccaaaaagttgggatgctagtctaaagcaaatgttacaacaagaagagtaaaactctgacacagttgaaaattttgagtttggatgtataataaactagagggtcatttggctttcacttcatgtattcagtgacacgctgcgaaatatcatcgaggaaagacacgaaacccatggcgctagcaaaaccattaccgtccacatcttgttcttctataagatagttctcaaagacagtagcatcgtctcgtcctcctcggataaacactagttttggtgtgatgctcctttcttgcttcactttatttatggtctgcctcaataaacctgtaagatataagttttcgaatcaacatagtctcaaagatctaaaggtggttgaactggatttcatttggtgagaaaacttacagtcttgaggtggagggaaaggtattgacgggtctgctgttgatgagtagaggactatcaaagtggtatatgcatctaggaaaaatatcggactaccacttgttatcaatgctgcacggctcaacgaatgacgcggatatgccagtgtatccggtgttgaatatgacattagtgctgggtaaatgccgcaatgaagagagctcgggtccaacacactgcagttttaaggaaaacaaaacagaagaacacaaacacgaaatttagagactaaagccttgcttgtggtctgtttacatgagataccaaggtattttttccaaataaatccacgatcgaaaaaatacactaaatatacaatattgttcacgctgactctaggttggttattagtagttcattgggatggttacctgaaaaggcattgcaagtagattctgtaatcaggatgaacaccttcttcatgaaaccggagaaggggattacggagtaaggc

SEQ ID NO: 51102 - DNA, 874 bp, Arabidopsis thaliana landsberg
gattaccgtgttgataaattgaaatggcgtgaattattttactacatgacaccaacaagaatgtggtcgtgtatcattataaacgtggtcacctacccaaggtattatttatttattcaaataatagatattggttatgtttcgcacacacacaacaacaacaaaaattagatgtagaaatatttcactggaattcacctttcaatgttttattgatgaaattgatagagcggagagtattcaaaactttcaaagaatagtttttttaaacagaaaatagataaaaatccaaaagaatagttataagttaaaaaaaaaaaattgaaccatagttgatgattttttttccccggatttttgggaatcaaaaatgaattgaagtgaatcaaagttgatgataacaagtgaagaccagtttaagacaaaacaatcggattctttggttaactccgattcatgatccagtttgctgctaagctaagagaaagatcaaaaatgaaattttcgggagtaactggtaggagaatgggagatggaaagccaaaggttggataagtgtataaaaagagagagtcggatgttcataaattttgtaataaagaactgcggttaaaatcttggatccctccactccacggctccactgtgtagagtaaattcttgacgcatgttcatagacatagtaatacgtgaaatgttgtgattcgctttttttcctttggagggaaaatcccccttgtatttgggatctctcatgttccattaaccttatccagattccaatattgaaatatcgaatatatatagtcgtgtatattagtgattaaacatatatcacaacaccactttacagtcacatatacatatttatttg

SEQ ID NO: 51103 - DNA, 1252 bp, Arabidopsis thaliana landsberg
cctagtttatttttatttaagcaataatactaaaaacatagcataacaaacgatattaaattaaatatactactaacgaaaaaacttttaaatccattttatgctcacgcatagtgtgggctagttaatgacatcgtgtttttaaaaaattcatacatgattcatagatattcagtgaattattttatctagttacatttttttaatatatattcttaccgcaaaccccaaagataacatatatagcttctataacgaaattaaaatctaaaatatctcagctccatattaaaccccaccccacctaaaggcacgttccggtggtgaaaaagtattgatctttacgtatattccatcgggtctggcactatagacgcgtaacttatcacatttaggcataaaaattgcagtgtatgtcctgaaacgagaatgagtaatcattttagacctagaccattgctcaaagtcccagttccaatggaaccttttacggatgcacccacagcaaaactaatacgtaaaacctcgtgatgtttcacatctttgacaactcgacggttttcgctggaaacgcaagtgactctaagagtacgaccattaacaagctcgtttctaaatataagacggttatctttgcaagcttcacttaatccaagtaacaaaggagctatcatatgattcattttttcttaatattctagatcgaagtgatatggatcagtgtagttaaaaaagaaaagaattagacaattagtgtacttatttatagtccttttggtaaagattgtttttagtgtatctataaaaggaattttaatgaaaaaaaagccacaagtattggccaatctattttaaccctcaactaaaattttaatacttttcttctctcaaattaatccctttataaaatagtagaaagtttatggccatgcaaaaatttgaacacaaaggtgaaccaatcaaactcgtgccttagcttagagcatttagtgccataaagttaggttaaccattaaggttaaaccaaatttattattacaactccaagaaaaaaagcaaattataaccgttagagcattcagtgcctcaactttcacatttcgttgaaaacatgtctcaactttgccttcgataaaatatatagccaacttttattgatttttttttttttataattttttttgaataaaataaaatttaaaatttattcgaaaaaaacttgtttacattgattgcaacgtttgcctttaca

SEQ ID NO: 51104 - DNA, 715 bp, Arabidopsis thaliana landsberg
ttcaatctttcttcttcgtccatatgagacatatcatttctttgtttatgtttcttcgttaattacgatgatggtaattaatcatagagatgatcagatgaatatttccaatatataatactatgtttaaaaataacctttatatgttggtcaacaactctatatcatggatgtactatactgcgcatattttttggtgccgaaaaataatgatttaactctttggattaacttccgggaactggtgcacttagccacttaccatttttgtttttgtcgaagttgagtatttctaggattggaatttcgactgttgacattaaactatttatcatatacattgagttactacataaacctttttaccgaaaattaaaatccactcctaagaatcaatgtacacttgattacttgaatgacccaaatgaacgaaactttctattaatgtcaaaaagatgatctgttttgacataaacaaataattgccagagaaagaagtgatctagtctagattgctgtctggaaattctttggtgttgtattgtaccaacagaactctgtacataatattgtcgaaactcgtaattatggaaatctcgtgtcgaattattttgccacatatttaatatataatgtacacacattccttcagctgaactactagattttgcgctaacacccatattttactgaaataaataacataatcagcaaa

SEQ ID NO: 51105 - DNA, 657 bp, Arabidopsis thaliana landsberg
tataatctcatttatgtttgacaactttaaatgaaactcatcaattgccttgatttgttaaaaatgattttcttgtatctctctatacaataccatcaatataacttaacttaccctaaacctttaccaagttattgtggaaacccaaaacagctttggcctataaacttggaccgcgacgacgccgtttttttgttcttttacgataaagagtacgcttatcgaaacacgtcgtcgtatttgaccatttacagcaaaacgagttagtaaccgtttgatctataagttgagatgattttatagtacaccgcgaaacagaggaataaaaataaaaatccacactcaaagaaagaatccccaaatccacaggtggctttagggttttcgtctctttcactcgtaaccggaagagaggacaagatcctccactaatttcacaaaaagctcatctttttattcgttttcgaatcgattcgttatctgggttcaagtatcaaattctctggtttcgtttttcgtttttgatttgttctctctctttcggaaaaagtttggtcttttttttgtttgaaacaatgggaagaggcaagttcaagggtaaacctaccgggcaacgccgattctctagtgctgctgatattcgtaagtaattttgat

SEQ ID NO: 51106 - DNA, 1003 bp, Arabidopsis thaliana landsberg
agcccctcttcaaattgcctcgcctgcagttatagttaattagagttttatatgtgacaatgtcaggataggaacctggactgccatgtcttctaaaacttctatagctcgagcgcttccacagtacctgcacacgagttcgaccaaaaccgtgtatgtaatcataaatggacggcaaccattctgcaggtgatccttccaaaacctgatggcttgctcagcattcccataatcaaacatacaccgaatcactgtgttatacgtgatcacatgaggagggctcccactcaaactcatatcttctaagaggaccaaagcagttcttatatgccctttcttgcaaagatttccgatgatcatgttataggtaatagtatctggaaccccaccagacattaccattactctcaagatacacattgctttatccagttgatcaattctggctagaccacggactaagtttgagcaagaaggaaaatgaggaacctgattatgtcgtgccatcacctcgacaagtttgcacgcatctgttaacttcccattgctgcacaggttatgaaggatctcattgttggtctcttcgtcgttctctgtaattggtccatcagatgataaaccaaattgcttcataggtttcactctggctctcaagttagtaccgacaccatagtgatggaactctgagcttctctcagcatgatcatttacattgtcaatgcacacactacttaacaagccgtgacatctaaaaaaaacatcctttttcagcccaatttcttgcttccaatctaaagaagaaaactttctgcaagataaaggattcgcctgcttttgagacagactaggaatatgcaagaactgaacctcaagtagcaaattcgacgaagccatttctcagaatccagaagctattttaacaaaacagagatctttccttttacaaaagcttatcaaactcaatgaagaagaagttagaccaataattatttgctggtatgat

SEQ ID NO: 51107 - DNA, 948 bp, Arabidopsis thaliana landsberg
  unsure (1)..(948): unsure at all n locations
tatcacaaatgatatttttacccaaaaggtcatgtgcaagcttcaaattcacatgcgatcttgcattttatagtgtcagaatctgggaactttgggcatgggttgatgttcctcggtgtcgtcatctaatcttttgcagcgcttcaagaacggttctaaagtttgctgcttcgtggggctgtttcttggttttgttggactgctcatcatatgactagatgcaacatccaaagcattctcttgcccatcaagcatctgtgttgcaaattgttcacaagcttagtttccagcatttcgaaaggctataccantgngnaaattcaggcaatcaaacatctacttttttttatgaatcactatgcactctncagtaattatagtcaaagccgtactggaatcctcatataatggatgtgtatttgacaccaagagattttctctccatgtggagagacattgggaaagagtatacctgtcctagattatccagcttgctctgaacaacatccctatacgaaaagtgagcaaggcaaggagaattcactgattcagcagagaagaacataattttgagaaattattgaactttcaacggtaaatgtgaatgagagagaaccagatgatgtcgtcaacagtgtcatttgctaaaaggtagtgaatgtttactgaagaaacctgtagaagtgaagcaaaatcacaggcagagtttaaaaagtacactacaaatgataagcgagatataagagagtgattctgatttgtaactccactaaactattgttcatgactcacctgaccaatcctatgtgcacgatcttctgcctgaatcaggtcacccggagtccatgacaactctgcaaagaatacagtgcttgggctgtcaaagttatcccaacaccagcagctcgtattgacagctgcaaatccattgtaaccaaaaaaaaaatc

SEQ ID NO: 51108 - DNA, 951 bp, Arabidopsis thaliana landsberg
gaagtacacaaaaatgctcaaaccgatgtattgtgtttcgaataactcagacaattaccttgtacatggaagacaaagtgaaatagtagaagctccatgagagaacacaacacaaataataaaacaaatgatagggtaatggcatgatgaaaaaatattttaggtactgcaacgtctgagaattgtaattttttttctttgtcgagagaacaagacgagctacttaaatggagtcatattttttgttcagacgacttcacccttaccataatatattccactaaagcctttgtggtatacattgagagcaaattggtcatttacaaaaacaacaaatggaatatccgttgaattaagcatctgacttttgccctttgttcaaatcaaatgcagttataatgggttgagctaagttaaagcccataacatttaaagcccattgaataatctagaaacgacgacgtcgttttattagagaaaccccatttctgtaacacagctcctaaacccatttgctcacttcgtcgtcgtctctctctctcactggtaaaaagcaaacaatgttgctccgtcgtgcaaaaacactacccaaaaccctacaaaacctccggttattctctccggcggcgaacgcagctctatccctagatcatatccaagaaacccaattaacttacctccctggattccctcgacccgatccaaaacacgcagagacgatcttagccgttccaaggtctgtctccggcaagagcatatcaccgaaagagcgtaaagcgggtcgggttccttcgatcatattcgaacaagaggatggacaacacggaggaaacaagaggcttatttcagttcagacgaatcagatcaggaagcttgtgaatcatttgggttactcttttttcctctctaggctctttgaagttgaggttcgagctgatattggatctgatg

SEQ ID NO: 51109 - DNA, 1293 bp, Arabidopsis thaliana landsberg
  unsure (1)..(1293): unsure at all n locations
caaaacagtagatattgaatcaaaaaatattagaaaatctttatctttttatcttaatggatgcaatgagctgggtgatatggatcataattataaacgatgggaaattggccttctggttatcgctaattatattgtccattggactaatatgaaaatggcggaccaaaaaacaaaattactcaaaagaaaagatcactctagcaaagggatctcgccggcactgtattaaataattgataattctctgcgttgattttagtagaagtcaacataggagtaatctatttggttcaacatcacacagcgcaagaccacatagcgaatctatttggttcaacatcacacagcgcaagaccacacaacgacttactattattaaattcatctcatgttttttacattaaattcatttcatgctttgaccaaaaaagagaggaagaaataaacgttcgggatacgtagatgtaacgagttggactaaatgatgtatgaattttccacgtccctttgcctatatataccttcacatatctcatcacttctttcacaactcaaccatctccacaatattctttcgtttgagaaagaagattaaattaattcgcttatttattttgcaagaagagagaaagcaaataatttgcttcattatttcatatttgaaaatttaatcagcttcattcgatattaagaaacaaataaaaaatatctttaaattggtacattttcttctcttatatatcaaagttatgttataatgattttagaaattctcttgtgatcaattggctcagattatataatcttgtttatatcttatgtagatttataagttttctgcaaaagcccttataaaccattttcaacaatgacgcagtaagtgagcaaactccaacaaacaaacacttctctacaaatctttataaaatagtttctgacaattttgtgtgttaattaatatttacagaaggaagaatatgtactcgaagaaaaactcgttcggccgatcagatttcccagagggtttccttttcggtacagcttcatcggcttaccaatatgaaggagccagaaacgaagctcctcgaggagagagtgtttgggacacatttgttcgcaaatatccaggtttgtatataactaaaaacctactttttgcaatatttaggtttatatattttcatattggtattctttnnnnnnnttttttttttttnttttttgtcaggtcatattggtattcaatcatgatattcatcaaagtaactttaattaatgaaatgaacattt

SEQ ID NO: 51110 - DNA, 593 bp, Arabidopsis thaliana landsberg
agacaaaacgaccagtaaatatgttaagtaacatattaatgatattattaaattattttaatattgcataaagttttaccaccagtgtcatatcaaggtctccaccatattctttaaccagctattatttattttaattgtaacacatttgttcaaaataacactagatgttttacggatggagattttaagatgtttagatatttataacagaaagtcaggtcgatccaacattctttcatgccctacacaaataaacatattatggcctgtaatttttgtttttacaaattcacaaatcatagtaataaagaaaagatcatactaaaccttaaataataaaacagtttttaaattcattagcagtttgtaaaaagagaaaaaagaaaagaaaaaattacatccatttttttttggtgagggataggggacaaagtcccttaccatttgttaagaaaacttaaaaagaaattagaaaggaacgattcaagctttagttataaaaaaacttttaaaaaatatatcatttaaaatagctctagtacattttacctgcaaatcattcatctagtagtcaagttttacacaaaata

SEQ ID NO: 51111 - DNA, 936 bp, Arabidopsis thaliana landsberg
aggtaagaatctttggtttgtccagttgtagatgaacattttgtcaaggtttggtaattgagtcatctttttacacaaactaacttaacattttgtggtgttgtatgttttggttgcgcagtactatttgaagacaggaacctgcaagtttggagtaacatgtaagtttcatcatccaaggaacaaagctgggattgctggaagagtctctctcaatatgttaggctatcctctacgctcggtatatttgactttttgacttgctgatttcattacttctcattgtttcatcatcttagtgattctctgtaatgtcatatatgcagaatgaggttgattgtgcttatttcctaagaaccggacactgtaaatttggtggtacttgtaaattcaaccaccctcagcctcaaccaaccaacatgatggttcctacctcagggcaacagtcttatccttggtcaagagcttcttttattgccagccctcgttggcaagatccgtctagctacgcttccttaatcatgcctcaaggagttgtcccggttcaaggatggaacccttacagtgtaagttttctaaacaacattgcttatactcttcagactttatatgacttggttctgatttctgaccagtgtttctcggggttcccattcagtcagggtcagctgggatcagattctccttcaggtaccggaaatgatcaaaactacagaaatttacagcataacgagacactagagtcaggctctcagtctcaaggatcattctcgggttacaatacgggatcctgtgtttcgctaggagggtattatgcattgccgagggaaaatgtgatacccgagagaccaggacaacccgaatgccaactctacatgaagacaggcgactgctaatttggcacagtttgcacattcaccattctagagacagaca

SEQ ID NO: 51112 - DNA, 906 bp, Arabidopsis thaliana landsberg
gtcaaagaaaataaatgatttatcataaatattacactgtatattttataattcaagtaattgatatttccaatcgactataaatcaatacgtacatctactgggttgtagaatagttgatttgaaatgaaagctatcaacaaatcaactgatatttcgttgcttgaaaatgaggtataaatgtacaattatgatatacgagactgatcataagtactcacgttatatgtatttatgaggaatggcgaaatgggacaaaataaaaagaggaatggcaaaaaaagataagagagaaaaaaaaaaaaaaacatttattctcgtatacatcacaaaagggttgctcagcttttcctctcttctcagtaaaacttacccctttttctctatttgactcttctaaatatcaaactaataattatgcatggttttattttttagccaaaaaaaataataatcaaaaccaattcatcgatcacacctccaaaaggttttatatggaaaatttgagggtttctggcctagtgattcttcgaccatacacggtgtgttattgacttttagtgcggtttgcatctgacataaattgaaaacaatttttatcgttatttattcatttaagttatattgataaaacttactgatgaaatgcatcatatgagtttatataggagtgaaatcgttgtagcataatctataaataggttacccgataaatagaagacattaaacatctctatcaaaccttaaatttaaagtgtcatgagtagagacatatacttctgtctacaaacaattgtttttatctatgaacgacctataaacttaaaactcctcgcctcttggtgtataaaactttgggtattacctatccgtcaaccgctttaaacagaaacaaatgctatttgt

SEQ ID NO: 51113 - DNA, 663 bp, Arabidopsis thaliana landsberg
tgaactaaatagtagtagctcccagcagacagttttcacttcaaacaccacatgcactaataatactagacagatccgcgtccaacgcattattgcacatatatataattatctatgttttatgtaagaaaaactataccatgtccttttccaaaattaattatctttcacatcaccaaccatgcatacggctgagtacagtacaatacgaattcgttatatttacttcaacatacgtacacttttaactgttcattaattatccataaatcctctataaatttgatcaaaaaaaataaaaatgtttattaagcactttggacagtacccccatgtggtcataagtcgtaacagagcaatccatacgctttatacggtcaaaaaacaaagaacggtatccgttaaaacggacgggcttgatcgtcgttatccaacggtgattgtttgtttgtccttatttaacggttacctttaacgtcgtttccttcaggaatcttagccagagaagagaacctaatcccaccgacacacgtctatgaaaaaagtctaacaatatatatgtagtatttatcatcccccatgtgcacatgttctgatttgattttgattttggtttttttctttctttcaaataatttatttcaaattccatagcgaggtcca

SEQ ID NO: 51114 - DNA, 586 bp, Arabidopsis thaliana landsberg
acctccctctgaatatgtatccatctatgaattattagatttgttcaagttgcagttgacatgtgactatcgtttggtgtccgaatgatccgaatcaattctcttgacttctcttcttacttgtatgtattttttacaaatatcttaaaatttgccaggatttgattcaacattttaacattttctagatgtattgaaggactaggataaaagttaaataatcaaaccataaggacaataaatttttatgtattttcaaaaattattaatgaaacatttatgatcattaataccaagtttttcttacaattatttaaaaaaattcattcaaaagaatcagttatcaatcataatccactgtcataactcataagtacttaatagttgactatatttctctaaataatttgtatataagcaaagacatatcacggagatagtctttaagagttgatcaactctaattctccatgtatttaacttttaaatgtttgcattttacatattctgagggttttttagagtttagcatattgtctatatttctgttgttaaaaatataagatatcaactcttcatgctatac

SEQ ID NO: 51115 - DNA, 1083 bp, Arabidopsis thaliana landsberg
gaagaccaagaactggagaagaagaagtaacaaggacgaaagcagaacgcaaatgagtccacggagatgacggagaagaaggatttggaaacgtagacttcgtttgtattcttcgtagagctttcatcgaaacccaaaactccttctccttctctctctgtatctatcttcctcttccccaatttaaaggtccaaacttgcggaacaatgtccgtaccaatcggtaacagatttgatctacaactccggcgaaaaccatacgacctttcttctccgtcttagccgcgttgttgaagaagtagcttccgcttctctgtagaaagttgcgatttttctctctatctctctagaatctgaaaagagaagtcaaaatcagagtaaatggtcattggagccattaaagccctttttctttggctttttttataaaagttcgttacagtaccccaccatcaccacgtagccaaatactctatattacacttttagcccttttacttttctttttttatttatctacccttatcattaatatacgatcttcacatgtttagatgattgattacttgaatttaacaaaaaatctcataaaaattaatttagtatctaaagatatttggattatttattactaaatataaaaaactagacatgtaaaataatgtgaaaccacacaaataatggaaaataccgtaatgtcgatctattaccatatatgttttcatcaaccaatctaatatatgattcagaaaccatttattcctcattcagatgaatcagatctcacttcaacaaccatttctatttatttctagttctgtaataatttatacatgtttaactttaggaaatatatctcctctcactcactacaactacatgtactaatctatttgtaactctcaaatctcggctacacaaactaaaccaacttaggctttgaatgcttggttcatacgttacggattggatcatgcgtattaatattttagcaacgcttagcttattagtaagcaaaacgtcagacttaagtattgaacagacaaaagtatgcactatattgttactattagtatgaagttt

SEQ ID NO: 51116 - DNA, 591 bp, Arabidopsis thaliana landsberg
tttatgcaagaaaaccccaaccaaaaccaaaaatgaattagtaaaatataaagaagatttgaaatatattgtatcaaatgtaatattatatccacgcttctgtagttcattagttgaatctcctgcagttccttctgatctcaccgttacgaccagtaagcacatcaacggctcccatcttcaccattgctctaacgaactgacgcttgaagaaggcgttgttattagcataccgagccacaatcccacgagtctgtgggtcggatgcgaggcgttggtcaacttgcaacactcctctccttttacggatttgcttgaagaactggttgtcgaatctcaatggactcgactggtctagtgccgccgtcgcgctatttctgcatgtgttccttaggctacatacattcacaacagaataagaaaaacatttaggatatatattaatgagacaaaataagaacatggaactaatttcgcttaggtctaaggatcggatcaaatatgtttaactttagaaaaaattggttttaagcttgtgtttttttttaacattttgaaattatcattaattaatgataaaactggtttttt

SEQ ID NO: 51117 - DNA, 1072 bp, Arabidopsis thaliana landsberg
  unsure (1)..(1072): unsure at all n locations
gttcttccactgtcttgtggtacttacataacttcccccagaagtttctttctcttaagcacttgttagtgaatcatagtcacttgactgctctgtatattaggatggaacttggggaaccatcaaagggagttgcattgtggttactgattttgaagatttttgttaccattcttatccactttacttaaaggagttacgcgaatccccggtttcagatgagcttcaaactcttaggtaaagtaaaaacttttgtcctaaactattccaaaagagtttttgctgattcttgtgtctcgtcttgcaggttgattcatgttccaggatgcatcattgttgggattctaggattagtcattgatatccctcttgtcactgcaatcgcggttattaaaagcccttaccttcttctcaaaggctggtaccgactagctcaagacgcgattaatcgagaaggaccatttcttgaaatagcttgtataccagttgctggtttgacagtactgttatggcctatagttgtcattggttttattttggtgaccatcttctccagcatctttgtaggactatatggagcagttgttgtatttcaggtacaccatgatcatattgaccgaatgattcgagaaaaatatcgggtttcttactcattgttgaatctctaatctgcaggaaaggtcattcagaagaggagtctcttatgtgattgcagtagttggagaatttgatgagtacacaaatgattggctttaccttagagaaggaaccatcttcccaaagtatgtctctctttgatttccatctttttacattccctttctttgcctccattatcctaacaccgcgaaactgtaatccgtgacacataggccaagatatcggatgggaagaggatcgttttcaagtgaagtatctgtgatcgttcacccttcagatgtaacaagagtcaatagttctggttctgtcgatgctccagcgatgctagtaccgagcctagttcactctgtatctgttagagaagcaatacangaagtgagaatgcttcacgtatatatcaaaagttttcatt

SEQ ID NO: 51118 - DNA, 500 bp, Arabidopsis thaliana landsberg
tgtgccacaatactataacttgttctaagttttgtatcttagcaacaagaaaaggtcaggataaaggatcagacataagtgtaaaggagctccctagagataaaactttcaagatggaaatcttgaattgatgacaaaaggaactctgcctacttagatggaaagtacaccataacatggtaaaggtacaaaaggaggtattgacctttttgcatatttgtaccttaatttttctccaatgcttgtgttgcatatgtttaatgtgtaagggggagtaatattagtgtgttgcattttccctgcttaataccctgatgtcccttaacatcatcctatgttcttgcttgaatatggttttggtgtttgatgtcaaagggggagaatttgtgcattaaagcttaccatcgacctgagaggaaagcttatcttaagggtgaagattaattttttgtgtgctaaaggactcaaaggggtttccttgagttccattgatcttaaag

SEQ ID NO: 51119 - DNA, 874 bp, Arabidopsis thaliana landsberg
aagagaaccataacatcagttttattggatgccttaaaccgacgtttacacctaagttaaccgacgttaaagtccgtatgatttgtggagaatgttgacaactaggtgtgtaatagcggattctgacacatttggtctcacaaacagttaatgagctataatgtctccaaaaaccacaatcgtagcaaagcaaactgaagaagaagatacagcaaacaacaagtgtgaatagtacaagagaagagagacatgcaacgaaaattataaccaaaaacgaggttctacatattaaagacatcccatcttaaaagaagctttaaaccttgcggacttggatgttatgtgtcgattgagatcgccagattggctgtgtaccgctctgtacgattgctatttcctctcccttcttcaccattccttgtttctgtttcacccaaagttaactctttagccccaataaaacactaacaaaagctaggggcaataaaaatttaccagtaatgtagccaaagcattagcaaaagtttcttctgcatcatctgtgaactccatatatatggggcatacaccttgatacaaagctaatctttgttgtatttttttcctacagagcaaaacctctactgtgagttcctacgacaaaatacattgttctaaaagaataaacatgaaatacttactcatttgtgaaggcatagattgtgccggaaggacgatagtgacttaacaatatggccatgaaaccggttctggtgaagacaacagttgaagttccaagtgtgtttgacatcatggttgcatggtatgcaaacatctcactcatatggttctgtagtagcaaaaaaatgttcttggtattttggattagataaca

SEQ ID NO: 51120 - DNA, 967 bp, Arabidopsis thaliana landsberg
tttggcgttttgatagatcaaacagttgtcatattttaatttttgtaaaacaaaaacaaaaatgatggtaatggggatgagatcatgagaataagatatgactacgaattattccacattgatgttgaaaaaagaggttcctacaacgtcaccacctaatttatcttctgaagtatgattatctttgttttaaaaattgggctggttaagataatcctatatagtttcactaaaacttataagactttagcaacttgtaaggatattgaatttgtggccaagacaattgtaagatttatgtatacggactatttgacgtaagtcgtagttagtaattaattaagtttctaaaagagttttcaataataggaccaaacataaacgacatactagattattaagactacatgtacaatataaccacttacttaggtcaatgtcttattcttcattgtcgttttctaatcacaaagtgtattattaacaagtggacattcagaaatttaactaattatttattcaatattacttgtttttggggatcttcatatataattacatatagacagtgactaaacagtgacaagagtctgcctccattggagctgactttgattgctagttagctagcttctttgttaatggtttatgtgcttctctttcttttggtttgtaaaattaccgaaagcatgattatagaatatatgaatatactatattatatacatgtttaaaatgtaatatttaatgtattataaaaagagaagcaatatttctatttttatatatttttgacattttatttcctcaatattaaatgtgaatcacgtaggaatgagattcacacaaagtcacaaatattaactctttttttttttttctatgaaaagcctcgttcaaatattatttgacttgaaaaccaaaggaaaaggtacctattgactgaccatgccatgtttttgttact

SEQ ID NO: 51121 - DNA, 431 bp, Arabidopsis thaliana landsberg
tgcttcatcactggcctaatcggggatttatgtggcttggatatggacgacgaggcatgggaggacgtacaggaaggagttcgagaacgggggcctaatccgtaccaaatctggaaaaggcagatgcagggatcgggaaactttgccggtagccaagaacaacacaagcaagcacgaaaagcagcggagatctagcgctcagtcacaagcagtgagagaagcacgcgagaaatcccaactccgcctgaagagatccattccgcagacgccaatcttccagttccagcgatgagtctcgtaaggggaagcgacgcgcaagagcagggaaaaatccaacagagcggattccagtcaagcaaatcgagaaccgcctacgaagtcaccgcacgtactaactcggagaactccggcagttctcttaccttttcttc

SEQ ID NO: 51122 - DNA, 1586 bp, Arabidopsis thaliana landsberg
tcagagcaaccatctggactttagaatttttacttcctaaccgtttcttgatctaccttcattgcttcttttgcttgactagagaaacaaaacagggtcaaaactttaagcatcctaggctcctagcctagactcaatcaaatatcagtagatctctatagtcattaaaacgacttaccttggttccatgttgataatgtcacacagttcaatgttgatagcccaatctggaccgatcagcatatcgtttgtagccctctcagcacaagcagccgcattattcgccatcgcaagattgctttttcaatcaaatcctaaagttccaagtttcctaatgaacacaggttcaaaaaccattaacataatctcttaattccagatataacatgcaagttaaagatcaaacactttatcaatatcactgtgatcagactctgaaaacaaacaaaggctatcacaattcacaaaccagcttgtaaattagaccagatcacgaagccagaagcattcaattatacaacagactcttaaaagatagcaattcaatagatacacaggacagattaagccatcaaataaccaaatccaaattcaaggacaaaacataaataagaaagtatgaatcaaagtattggcaagagtttcaaattaaacccataatgtgtctacatctggaaaacaaggaagaagagaacacaacataaacagaaatcataattgaactaaaacaaaggcaaagacctttacctgtctatagactctaaacttgagaacagatgatgaaagacgaagcgaagatttatgcgtgtgaagatccaaaagttgaaacaattataagggttctcagaaaaatctaaacttgtaatcgaacacgatcggagttttgtgtcaggtcatcatcagccttagccgtccataaaatcaactgcgacttctttgttctattatttttgcaagacaatgcaaaagttttgtgctttggcttttgtctctctatatgataaagtaacagtcggtgacgcaaattaaaataagaatcttaattattcttttcgttaacattagtggaatataataagtttaggtcgtaagtaatgatcattagccaatagcaactgtataccaagaaatttcccaaatcgctttcattgttgacttttcttatcgcaaaccacggtaaacgcgtttcccaaacgcaggaaatgaagacgcgcgtttggatggaacaacaactccaaaacaaatattctgtctcataagtccacaatgggaccattctcgtaccaattttttcacatcagctttctctttgaacaaaaacatgacactccttttaaggcaaagattattattattggttttaggcttttgataactaaaggtaaaaaaaaatcaagtagattctaaacactaaacaccactgtacattagaattcaaaatccaagagttgtgagagactaatcagtgcacaactgcacattaatctctatttacataacttaaaaccatatccaaaaggatacttaggcttttgcagaagcaaaaatttatcggaaaagtgatcatctttgtgtccgttctctga

SEQ ID NO: 51123 - DNA, 678 bp, Arabidopsis thaliana landsberg
atatgccatattaggtaaatcatagtacaatgtacagttttatgatttagattatgaaatattcttcattttagttgttatacgtcccatatggaaataatttttaaattccattgatttgataaactaatgataagtaccttttttactacctagtacaattttttattaattactgtgaagttttaaattaagttagttaacatattttatttttgtttgtttgcatatttgatttatgcatggtaaagcgattctgcatctacctcgtaactcaacattggctaaagagtttgagaacttaggaaggattgaagacaactacaactccacatctcctacacaaattcataaaggtaattaactttggttattattaattgattttcacagttttattatctaatacgatcataaacaattagatcgataatcagtgacaattaaaataaacagattttataatttctttatatgatataaatagatgggacaggaggaggaaaagccgaaccagtgaagagtaatggatggaaggagaagagttggttgggtgttgagcttttaatatatatgctagtttctctcatcttcttttaattacttcctttctttaatgttcctttgctttattattacaataacttataagatatctatttatatatgagacacatg

SEQ ID NO: 51124 - DNA, 538 bp, Arabidopsis thaliana landsberg
acctgtaagatttattggaggctcttcatgttttgggttctgaagaagaagaatcattcctcaagaagattctttcacatgaagatgctcaaaccttgggagattctaagagagtagaagacgaaaagcctgaagtagtatcgaagcaagaggcggtggtgataccgaagaggaaagctaactttttcagcaggaaatggaaatcagaagagaggagaaacagatctcaagttgcaaaaacaattgtggttttgaaacctggtccaaatactttggatgttgattcttcaactggactgcattctactgccaacaagtccaaaaccgggaaaacattttctcgcttctttatcggtttagtcaagagaagactacaatctgctgttggaaagaagtcatgtgatgtttctgttgataagaggagccaaaactgttctacgcaagaagagatacagagtaaatcagaggagaagcatgatgtttcggataaagaagaaccgttctgtgacgaaagaacgaccgaggatggtaaagagga

SEQ ID NO: 51125 - DNA, 1100 bp, Arabidopsis thaliana landsberg
tactgactaatatagactactaaacatagtagtagactttagttttttaaaaaaaacattgattggtaaaaggattgcaggaaacaattacaaaaaaaaaactaacaaagacaaaagtcaaaataaaaattatgatagaagttagtctaatagtactggaaacgagtataccatggcgtcaattaatctaatgtaccatgtgataacaagcaatgtgaagctaaataatataggcgttaatctaagaattctaattcttagctcttgccattagatattaattatattcttagattaatcaaatagtaattgtaacgaatgatatcatgcaatgtgaagctaataatatgtgcgttaatctaagaattctgatactagctattgccattggatattcttaaaaaaatatttctatggttttggttttggttttcttcattctatatctattgtatttccaaaatcgcatatctaatgaggttatctataactcttcttcttctttttttggtatgatataaactcggaactattacagagaaccaaaattctgaaacattggaatagttagtttactttttcttttgttggaatgtgacttccactccacttatcaaaagctaatacaccaaatatactttctctctgtctgaatcattcattatgctttctacgaacaaataaaaaacaagaaaaacaaaggcaaagataacaataggaaccttccacttaagaaagatcaagagataagctttgacctaaatgtattagactattagtctttttcctttctttttttctttgtttgttgtcaagacattaaacgtagacttcaagtaatcttaaaaacagttcatggttccttaaaacataatttgtatagtacatatagctttcaaaagagtgacggtaaaatatatgtagtacatatagcttgatttagcttcccaatggagtaatcacaaatcgtgtagtacattacaaaaaaaaaaaacgaaaaaaaaaagaacattagaaattgagtaaccaaagacatcaattatgcaatctttttaaaaaatatataagattgtctattttcgtttgacacttttcctttt

SEQ ID NO: 51126 - DNA, 619 bp, Arabidopsis thaliana landsberg
ccaaaaaaaaccacgaaagttgtgttctttcagccttttacttaatgtaaatctacgcaacaaggttgagtccggatcttccaaactaaaagaaaaagtacgttgcttcaagctgaagaaaacacagagtggctgaggtagaactagaagcttagtaagttattactaattgaaaacacttgactcaatgttgagacattacaatctttgtaaatgaactattatagatcattgtgccagcagatcatctggtgggataatcaatctcaccactctactttacacagccaacattaatctaaatctagcaagcaaccgatgaactgaagaatgaatcaaccacattcatataaaggagaaagatagagagtcctaatcacattaagctacaggccaattcaatcaaaatctcaaaatccgcttcgggaagttggagaagaatgtaaatcgaaacttgaatcaccgaagatcatgaaaaattgtacctgaccaggcgtaaatggctgtgacacaaccatatctactggatccatagaggaatacccagagattcaaacactagatactgcaatatacactccaattgcaattagttcaatctaggggatgaagagagaga

SEQ ID NO: 51127 - DNA, 551 bp, Arabidopsis thaliana landsberg
aattggttgtgcattttaggattcaaaaccgagtgtgaatttgaatttaaaataaagattcaaatggacgggaaagtgaaaatagaaaataaagataaaaaggaagggggggcggtcgcgtgggctgaaatgcaccaaaaccggcccaccttgctgccgctgtactcaagtgcgctgccaaatgggcccaggacgtcagctatcgcgcgcacgtgcctcaactccccgccaggtcggacccccgcgtcagaaacttcatcacctgcgcaaactccgtaacaaactcgtgcgagcgctgtggcctccgccgagatctctgcgcgcgctttttgggaggctggaggtatattcccctcgtctcctgggtataaaactcgtgctacatcccttatcgccttctaccttgagccacaactcctttcgcctcgcagcagcgccgcgagagggagagaaatcttgccgccatggggatgtcggagttcggccgccaccagggcctccaagctttgatggggtgttgctgtgcctagggtttgtgttaggggtgcgat

SEQ ID NO: 51128 - DNA, 738 bp, Arabidopsis thaliana landsberg
tagcattaagcccacgatgatgaagattatctatgtaaattcttgttatggttcctaacttttaacacataattatctattaaatgggcgatgggagtaaaataaatagtatacgaaatcgaaccataacactcaataccatagttgatattttcaaaaatacagctttgttagttgttatcatgctgtagctagcctagaattagtactcaaatttaaatatgatcgattgcgtgttagctgtaatgtatacgatacaattttgagaaaggaatctctttgaaaataaaagaaaatgagcttaaaaaaatattgctttggtgttttgttgttgttgtcttttacgtgacaattgaagaaatgccagctcaataattttcttttagtagtagtttattagcaaagagccattgtcgacaccagccgtgaagtatgaaacatcacttttaatagcaaggcatgccatccttttctatcacatattttatcataaaaaatcgtgggaattgaaccgttacatatagacatcaatttgacagcccaatcacatatgacagacacgaatacatataactagctaggttccctcaactattcatttgacttctgaaaaatggtgatcactaaagcactcgccaatacactgctattatcattaggagggcgtatggacaataatccatcaatactgttgtgactatggttgtgaaagagttaggcctgatctttgggttgtgc

SEQ ID NO: 51129 - DNA, 210 bp, Arabidopsis thaliana landsberg
  unsure (1)..(210): unsure at all n locations
aaaaaaaaaaaaaaatttaaaaaaatttttttaaaaaaaagaaaaaaaaaatatgngggaaaaagggggaaaaaataaaaaaggagaaaacaacaaaaatacaaaaaaaaaaaaaacaaaaaacaaaaaatacaaaaaaaaaaaaacaaaacaacaacatataacaaaaaaccaaaaaaaaacaaataaaaaataaaaaaacaaaaaaaa

SEQ ID NO: 51130 - DNA, 595 bp, Arabidopsis thaliana landsberg
tggaaaaatcaaatttaacaaacacaaattactgtttgaaacaagcaagttactatatatgtagtttgatttcacactagagaatctactgataatgattttttttatatcgtgaagctgaaagtgaaattataactagctagttgaattgcttattatggttggaggggagccgatgaaaaattcttcgaccacacataaagtcacctttctaaagaacacttgcaccgaccacatcaatcacgcattcataaattttcaacatttatataaatgtaggaaaaaaacaaaatgaattatagagaatacaaaatgacagttaacaataaatatatcacaacataaattttatgtaagaaggttagcatgatttttaaaaatatattgttgtgattaaatggaaaataaaaatgtagaatacttgtttctttaaaagggtctttcttttgattacaatttttttttatttaaagaatacctttaatattagggagaattattatagtttataatatgagaatacctttattccctaacacactcctataaatcctacatataattacccattatttagagcatcactaaacaaaaa

SEQ ID NO: 51131 - DNA, 568 bp, Arabidopsis thaliana landsberg
ccgaagcccaaccaacattgtcatcatcctctacatgatcattctctctctgaacagttccaacgaaaacaacatcatcatcatcatctatagggttaaaattagaagctttctcttcacatcccaaattacgatcatcagcatcaaaatcacaaaccctatcaccaaaatcaaacgatttcgattgtaaattcccagaagtagaaccaacattctcatcatctcgcttaccttcaggatattcagttctaacaaatacaacatcgtcgtcatcatccttcctccgccgtcgtttcttcttcctcggagaaggtgaacaagcatcacgcatgttaactctcctcttctcagtcctcgaatttacacaacccagagactgatcttcttcttctccagaaatcccctttgatttattgagaatcgagttcaagtaagattcagtcctcgaacgagttcttctagcaacacaactagtcatatccatggctgaagaaagaaatcgaaaaccctagaatagtggatttgacgaagaaggaagaaagctcatgtcctctctcctctgttgtct

SEQ ID NO: 51132 - DNA, 830 bp, Arabidopsis thaliana landsberg
atagtgcttggatcacattagttttgggtttatttccaaaatcttttttttgttgttgttggttttgtgtatgggcatagaaagactgtttaacgttgtgtcaattagacaattagtcctttaatatataaattacattttaccccagaagttatgttcttttgcatagtcatcccccaaaagtatcataatttttaatatctctaattctatatggaagtttcaatttagtccacattcctcctaattgaatggcttgtcttcttcgcgtggctctaaaccctacattcgaaagatcaacggtcgcttcacagagacaaaatccaaagaccattctaagttttcattgcaaagtttcgagctttaagaccaaaacgatgtcccaatcttttgctcctcgcgagaaactcatgagaaagtgtcgagagaaaaaagaagcagaacgagaagcagaacgagaagcagaagaagaagaataagcagaagaagcagaagcagaagcagacaaagaagaagcagaagaagaatcagaagaagaagaagaagaagaagaagcagaagcagaagaagaagcgcttggaggagatatagaggatctctttagtgaaaatgaaactcagaaaatcagaatgggtttgcttgattggtacgatgtgaataagagagatcttccatggaggaacagaagaagtgaaagtgaaaaggagagaagagcttatgaggtttgggtatcggagattatgcttcagcaaactagggttcacactgtaatgaagtattataaacgttggatgcgcaaatggccaaccatttatgaccttgggcaagct

SEQ ID NO: 51133 - DNA, 638 bp, Arabidopsis thaliana landsberg
  unsure (1)..(638): unsure at all n locations
aaaatgcggagattggtagagaaaatctttatcaggacaaacaaattatggtagggaaaaactgaagtgggtggttatagaacaaacttttcatatgaatcagtctactcgtaaattattatgcaagtctaatttaccattccaagaaattattgaaatgtaatttgaaattgataaactcgtgttgtaaccacttgtttttttggcagagttaattcttgcagagttagttacactcgttttacatgtgtttgaaacattgtttggatttttagttactgatgatatatgtatccatctggtagagaaatctttcatacattaattgagaaatattttagaaatttaacatttattaaatatatcagctttttcatataaaagtagaatttaaccaacaaatccaaaaaaataataaaataatacattttggatttggtaaagaaaacacaaagtttaaccacattaaaagtacatatcaaccatattaaatttacataattatacactactatactaaacttaagtataaaatctaaattgtactgtataaattatttaaaaattaaaaaaaccaaagtagatgaacataaaacacgtgtctctcctaagtcctccnaaataattggtattgagtg

SEQ ID NO: 51134 - DNA, 1119 bp, Arabidopsis thaliana landsberg
  unsure (1)..(1119): unsure at all n locations
cctccctctaaccggcatcggatgtcgaactagctgaccagtctgtgtttgatcttcaatgcccgtttcttgtcgcaggaactgagttatgtcgttgaggtaaccgtgcattcccatcatctatccatccaaattcaccaatggaatctaaagcacctcctatgccaaccttcttagccgtgttcacatctaagctcctttcctacataccaaaagatcgataactatcacgatctttctcaatagacaacacagtttatttaactctctgaacaaggaaccttacatcttggttatatccttctaagtcatcattgctttgtagacttttgaagctgccttctttgctaagtgtttgatctttattttcctcaataaatctacaaaatttgatgttaaaaatctcttacaaagaaaacaggagacagcaaccacagaaaaaaaaactactcttactttaaatcactcgctccttgtatcttatggattgtcacctgcaccaacaaccaaacagtttatataacatctcatacatttcttacatatttgatgcaatttctaactcaggtttcaaaaaggagaagaaaagagattacatttaagacagcaccagagttggcaaatttgagaggtaaggagacagttaatggatctgcttctgtcagaaaatctgcaaaatcaatggaagcttctcctagaaaacccgatttcgaagaaccctgaaacagattttggaaaaaattgagcctttctttttccagaatgactcaaaagacatagtcacagagattgtttgttttgactcactgttgcaacaacgaaatggtaaatcttctcacgaacaatcccagtttttggttctttgattagcttcactgacacataaattggattctcccatgaacagatcccttctttaacctcagatttctcaagcttaaatgttggcttcccaacatcatcaggtaccaatgagatcatcaaagcagtcttcttcagcttcggcacctgagatcatgcccagattttcacattcacattcataacanatcttgaagcttacgagttaacagatctagaatatatagtaaacacattggtctgatttaacagagaaat

SEQ ID NO: 51135 - DNA, 939 bp, Arabidopsis thaliana landsberg
aacaccgtaaaaaaaaacagatagctagaccacaactagtgttatgatcaagcatgtaaaagtccttaacattttagcaggaccgcaaacgaactctcgcataatctttgcgtatgattcgtctatgatctattctctggatgcaagtattcatatatttgctgacttttctccctaatataaattcaatagttcattgtcattttatgcatccttctttctttatctagtttagtttattttagttacgtttgtaatgcttagttctttataaaaacacaaacaaaaaacttactcatttcgttttagctgtttctaacaaattaagcggccaacatctccatcttttgtagatttgaatcgtactgagatattacaaccctccatttgtagattacaaagatattgcatttgcgcacatgcgaccaccaactaacattaacgcatggattgcaaatggaattctagagtttatggtttccattgacgcaaacagggcagcaccgacatccacccatatgccggtggatagtcagggttaaagacttgattcatcacaggcttgttacatagtagagagcatgatctcaaaacttattagaccgtttatatagtagatatatctagtaattttttgtggagaaaattgtgatattctaatttgactaaatgctacatagagaaagattcaaagattttcatttttttagtccaaccgttcttttgcttctctatccatgtctttctattcccatatttctgcaaatgatttgctatacattatgtgtgaatagttatataaattcaagtaaatttctttgaacaattacaatgatcgaaacaaattgattggttcaacaaatttcttttaactgttgaaattatatatgtccttttactttttagtttctacatatgaagttgggagtggttggaata

SEQ ID NO: 51136 - DNA, 683 bp, Arabidopsis thaliana landsberg
  unsure (1)..(683): unsure at all n locations
acttacgtgttttgagagaatataaattttatactctttgtgatttgttttctaacactttttaaggctattggtaattttcactttgatttttatgagttaattttttttttttttttataaaaataaaaattaaattaaataaatcagtagcaacttccaagtgagaaattcatgttttgtcgactcaagacacattctttgaggttcattcgttgtagattgatttaaaatttatttgttgtttactgtaggagtggactggctttacacatggtttatgaacaatcattttcgaatttttttttttaaatatcaacacagttaaacttatagaaaatatacctaatagtacaacttgtctcaaaatatcaattaatcaactaaaattttacatagaaaaataaaaaccataaaaactattaaacattaataaaatgaaacccatgggcaatggagtattcgacgagacgatcgagaagtctaaaagctaatgagatgaactgaaagttggtatatgtttaccaacaaaataaactatatgtaaatttagtcaccaaaattccttcgctcccgtgtttttttactttcttataattaacgagtgatcctaagtgatttaaatcagacaaatgagtttggtgagtatataagtatggaaagtacgtcaccatntttttttt

SEQ ID NO: 51137 - DNA, 703 bp, Arabidopsis thaliana landsberg
cttcctctattagcttcagttctgcttcgcgctgtcgcctggtagcaaatacagtgaaaaattagaggacatccacagcaggttcagaatattgaatatcacctgaactttctcatttcctgatgtcttcaatcttgaacagcaaaagaccaaaaatttattgcaaatccgtaaaaaatgttgagatcgtttccattttcactcctcccaataccaatggtaaatttcgtgaagaaatttcttttttgtcaccataacacaagcaaaccttcaccaagattattcttgtgctttggacatatttacatctctaagtcaatcatgatccatgtaatgaacaaacggtaactcatcaaatcgagatagtacgaacatttgtgccagaggatcaaatataaacaaatcgaaatatagcttatcttccataagcaaagcctgtgagagaataccataaaacctgtcgcacttttgagactaacaatcaaggacttccacactacactaaaataacatttgagaacaaaaaaccttaatttcaccataacatccatcttacttcaaaattttgtattgatttacctttttcgttcttcctcttctcttttaagtttttctccattcctatttttggctgactcaagggttgcggcgggagatctttttgcaggagatggagttgaactcctactcttttgtcttttga

SEQ ID NO: 51138 - DNA, 700 bp, Arabidopsis thaliana landsberg
gctgctgtgcctgtgattgtatatctggctttatcaatcattttatttatcatcaaggacttcttgatcttgggggtgggaaccattaccattactcaagattgcaaaagaaaaacatcaaagagcctttttatgaatgtttcttgtttcacagggtccttgtccgaattgtggaacggaaaacactccttctttggaacaattctgtcaatctccagcggcggcaaaaccaacactgtcaaatgcaccaagtaagattttaccttcgaatatggtttcaaaagtgtaacatattactatctgattctttgattatctctgtttttagctgcggaaccgcgatggtgtatgactcgggttctaggttgatcacattgccagaaggaagccaagcttaaaccctgtgaggtacacatctcatttatagtaaattctttagatcacatggaagtcagagatagtaaaatttgctttttccagctagatgaagatgggaaaagaagaatgggttttgtcagaagcaaaatagattcgaagttaaatgtatatgtaagatcttccatgttagctctctctccttcacatgttttctgatttgtaagtattgtgtgtaagcaataagagatatataatatgagcacttcttcatctacctttgtagataaaaatataatcattactatagattaaatcaaacgtt

SEQ ID NO: 51139 - DNA, 620 bp, Arabidopsis thaliana landsberg
ataaagatgcacttactttgttcttgttaccacactcaaactcaaacaaaaggttatatcaacacgtaaaaattgagaatgaagagtggattggataccttgctcttgaagatctatagatcaaatctaatctttcgttgaatcaacaaactgaagaagttgaaaggattacaaagatgaaaatagataagaaacaaatgaaatccacattgaccagaaaactgagtgtgggcgtttcaattggagcttggcacttaggtcggtgccaggatatatagcacctacctcagtgccatgaccaatgacactaatatgctgccacgtcgaggccatgcatggtggtgtctacgtcaattgtgagtggtgacatggtatcttggcattataacctatagtttagagttatgtcagctcggtgtcataagtcatgacagcaatcctaggatccaaagaaggtaataatcttatcaccatgatataaatatgaaattttgataaaaatggctaaaatgaaaagttagcatgagagacggtgagtatagtaatagtaccatagtgtctgcgtactataatatattgtacactctgctgcaaacatgcacttatgccctgaaagaggt

SEQ ID NO: 51140 - DNA, 326 bp, Arabidopsis thaliana landsberg
tcatcgatatatgctgtataagaccatttaattccaagtgatatatcatgtatatattccatccgcataggaagtctacatcatatctgtcgttgatggaagtgcatgtaagtaccaactcatattccaccataatggaccaatatcactttatcctccatgatacacatagtaggtgatccaatctctcagaccgcagaacatgactcaggtcggagtaagctccaagaagtacggtccacagaggagcgatgctgtgttacagtaatggatcagcaggcactaggtcaagccgagcctgatcagggatagcagtctaccaacga

SEQ ID NO: 51141 - DNA, 485 bp, Arabidopsis thaliana landsberg
aaaaccttagccagccctacgctcgatccaagccgtacactttccatcctatgagacccataaaagtttattgtatggtgtttaatggtataaacatatattaaaaggggttaactaaattgtgattcgttgattagacttgcctaagaagtgcagcgaagatgaaagtgaccaatggagtgagaacgccagcagcagaggtgaatgttgctgacgttagagctagacccgtaatggttaggatacttggtatcaccacactgttcaattatcaccacattaaagaagtcttataatcccaatatatatatatattcttcaacaattttacattttactaatgataatcaatattatcaactagtattttcagccaaaacgtagtcttctatgttttttggtacatgttgggtgttatagtcaaaccactagttggtaatattgagtagaatggttaaaactactaagtactaccctgtttgaat

SEQ ID NO: 51142 - DNA, 696 bp, Arabidopsis thaliana landsberg
gtctcgctactttccttaactccatattcaccggcgccggaaacactaaaaaacttaacaaaatcaacacaaccgtcacttccaccaccgccgccgccgccgcagcgtcatcaaccactacatgctcctctgcttcatcattctccagatcttgcttgagcaaaacgccatcgtctagcgataaatcgaaaagatccgtacgtttttgtcccgtcaacgtcatcttcgacgaagactcctccaagtacaacaacaagaacaacaaagtgtacggaaacaacgaacgtgaatatgaatccattcgtcatactctagagatccgagtcatggaagagaatcgtcgcgtaatcgaagcagctaaagaacttctgagaagttaccagaagaagaatatagaagtcgttgaagtctccgtcgaagacgaagaagaagacgacgacgacgatgcgttgagttgcacaagctctgatctgttcgagttggataatttgtcggcgataggaatcgataggtatagagaggagcttcctggtttacgaacaactcgcttgaacactaatcgtatcatttctagatgattataataattaattacttggtttgggttggggtggattattaccgatttctgagtatatgctatagcttaatagtgttgactagtagtaaattgtgagttttgatctcattctttgg

SEQ ID NO: 51143 - DNA, 776 bp, Arabidopsis thaliana landsberg
ttttgttgctattgttgtttcctttgtttggtttattttgtaattcagatgtcaatttgacaatttcaatgaatcttcttcttatcttcagtctggcataaaacccaaaaaacctgtatcggacccgaaaccaaaccaaataatcatataaccggagagacttttaaataattttacacgaattatcccaactgaacccgaacagaaacaaaaaccaaacagtatatctgaaaaatcgaaacaatatctacatattcaaaattattagatgttttaaattataattatacctaaaccaattaacaaaaatatccaaaaatatcttagatatattatatatatccaaaatatccgaaaattcttagtattatacctaaactaaatgacaaaattatatattttttgtaattcaatttttattaaaattattagatgtttttaattataattatacctaaaccaattaacaaaaatatccaaaaatatcttagatatattatatatatccaaaatatccaaaaattcttagtattatacctaaactaaatgacaaaattatatattttttgtaattcaatttttattaaaattttgaaaaaatatgtagttttttccaaaaaccgaaccaaataatcatagaacccaaatatatactaaatttttgtatcggatgaatccaaaaaatctaaactgaatccgatctgaaccccgaaccatgcatacttggtggattacccagccccgttcaggtgaaaattttcagaaaagacggtaaa

SEQ ID NO: 51144 - DNA, 527 bp, Arabidopsis thaliana landsberg
tcataaaccgagttatgcagattcgggctggagcttttgagttaaatttgaaggctttgttacataaagagtccggatagactcagcatggaaatggagcataccaacaagatccgattcccggacatatgaacatgatggatctaaacacaagaatccaagaagaaccaagacattggaattcctatggccatgcaactctaattgacctcaatggatcagtataccaagattcaagggatcagttcacttcatatcaagtccataatgggaaagcagaattgcacaagatgacctcatctgatcctcctgaattatccactgatgatctgcagaaaattcaggtagtcttcatggctttttcccctgtgatgcttagggtgtcataattgcgtttcttttggtttggtttgggcagatcggttcagttttacatatggtttatcaaacttgggcattctttgtatcatcgtttattatatatatagcttgttcttctcatgccagtctttcttttggtactattt

SEQ ID NO: 51145 - DNA, 580 bp, Arabidopsis thaliana landsberg
  unsure (1)..(580): unsure at all n locations
aggatacacttggaagaatcagacagggcaaggtgtaaaatttttgagatgtcaatacaattatgggtgatgagtatgagtagagaatcaaggagaagcagaaacagaggagggtacattttggtggaagcatgaagttagtatggctttgttgggactggtagcttggatgagtagtactaaagtggattggttgacttagacttagagtgaacaaaaaggggatttaagaagcagagttaatttatacctgatttaattttgcttttcattatggtgggagtcgtcagtaaacaagtgaagatatgtaaagaatatgttgaatccattttctatcaaaatccattggtagtggtcttgttagctctcatatagtcatgttacccttctctcttcacaaaggctaactacttttgctctcattagtgtacaatggtggatccaaatgctcagcatattaccatattgaccaatttctctcttttgtcttagtaatgtccttgagatcaatcggataactttgaaagttctctcaacttctcttgacttgattnttttttcgtaaaatggatttgctaat

SEQ ID NO: 51146 - DNA, 485 bp, Arabidopsis thaliana landsberg
  unsure (1)..(485): unsure at all n locations
ttatctcttaagacccatgaacaccccaacacttagttttcagatgaccaagcacatcccacattggattggagcctagaactaggcgggggtttccacacattcggacatgtgggactaggcgtgacagtgctacctaactccaccacgggggaactggggctctctccaacagagccatnnnnnnnnnnnnnnnnnnnnnnncgcaaaccattgctgcacatcatcatcaatcttgctaatagtatgcacttgccaagaactgattcccttcaaaataacaaagagttcctatttttccagattctccaaagagatccatggaaactctttctgtaaaagagatggccaattcctgttatctctattaataagaagatgattaatgctggagaaatcagaacctttgtcacaaccaatctctggcgatggatgatcagacacagcccagatctgtctcgcagtagggcaggataacagaacat

SEQ ID NO: 51147 - DNA, 373 bp, Arabidopsis thaliana landsberg
gtgatcttatggttttggtgtcggaatggtttcagaattcgagttacttaatataactagccgccctagaacatttaagcagtccatcagttattagctttagttttaatcaagttctaaataaaatccatatgcacaaaatatatcccggactggttccattgttttgtggaaacatcaaaagttgaatgaacatacaaatcaaattggttgtctgataattgtttattgtagaccagtgattccgtacattaacagctcatagggcattcactaacactctccgtagtcgaaactctaggtctctagcttctgcaggcattgaggtttggaccgaaagtcggggaacaccaagggaggaacccccttggtg

SEQ ID NO: 51148 - DNA, 668 bp, Arabidopsis thaliana landsberg
  unsure (1)..(668): unsure at all n locations
tcggatgagtgaattattcttttctctctcacgaattaggcatcgatattattcaaataataaaataaataataaaatatcatcacatcatgttgggattattttgtttgttaaaactcagaattgaatttatttgaagttcaaactcaaaagaataaggaataggaaaacaaatcaggaattataaaataaacaaaaggaaacattaacctacgcctgggccgaaatcgccaggcttgggcccatctgtgctctctctttccagccgagttgtgggcttcacccagtgcctatgacagacgggcccactggctagtcgcccgtgcgcgccgcggtaccaaactcacactgaccatgtgagcccaggttgttgtgaccattgggactcctaaatcggttccattgctcgctgcttcgtggggtcgagtacacagtgtagtcctcttcctccttcgttcaccacggctggctctgttgggtcggacaagatctccgctaccagaagtctgcgaaatcctcggaaccaagctcctcgtcgtgcgtgtgtcctgggcatcatccgctctgacagtggggcactgcgccagagacctacancctgctgtcggtagtcggttggcttgccggcgacgagacctccacatgggcgatccgagtacacagatgtg

SEQ ID NO: 51149 - DNA, 1970 bp, Arabidopsis thaliana landsberg
gattagatttgagctcgatttcttttgtaacaaagtttcaagatgttaagcaatattacacattgaaaatttggaactggttgatataatattgatatgatatgatattctctagactccattgaaatacaagtcaatatcaatatcagaactggatttagtcaaaataatttcacagtacaagatgttcaaaaaacagtatcggagtagtaacctgaacaactaacaaccggtttattctggtttcggactcgtaaaccgtacgaaaaaccaaacataaaaaaagcagactatatcagtcttgggttggtgcgttctgattgagctcagcaaaccgcataccaacacgcatcgtatgcttaaggaacttctcagcgcaacgcatcacacaagtctcctcttgtttctgcagagatttgcgtgtgaagctatcaacacagtccacgaaacacctctccaccaatgaattgtacatcctcaaactgaaattcaccaaaaacaaaactcaacaaaagtagccaaagttaaggcctaaacacaaaacaacaataggcattgcataagttgttacaacctaaataatgtgaagattttgtgagttttgacaacaacacacaaaatgagacaacacagttacatcttaaagaacaatttcactaactctaatccaaacttttgtttatcaatgaaccataaggacccaaagatctataattagccagaaataagtacacactaaccttgaatcaatattctaaagcaaatctaattagctttgaactataagaacaaagatttcaaggagctaaaagtcaatttttttgggagaatcctaaatgaaaaacagagaaaccgatctaagtgacgaacctatcacggagctgaagctgatcgatcatggaggccattttggctttgtcttcttcaggaagaccatcaagtccagccatcatgcttgcgtccatttttttcccaactcttttctttcgactacagattcaattcttcatcgcctccttgttctgtgcttaagacttaaaccctagcgattttctttattgggcctggtgggctttattacttagacttgattaaagcctaatgttttactaattaggcccgatatatagtaacggtaccatatatatattactcgcctacatacatatggttatcttacttatctaaatagtctcataaactatttgaattcctttctaaatcaaatacactaaacttgagggaaaaaaaacaatctaaacggtattcctaattcgatattttatctaatcaaagtaattgcattgtactattgttgattaagattaagtgactgcagcttaattaattcacagctaaggtactcacattgaaacggtagaaacgattatgacattattattaaaactataccccacggtgggcaccacataaaatacattaattttatttcaatcaaataaatcttctcaccaaaatctaatcactacaagactagaagtgtccacaaaagcatctctctttctgacacaatgacatctgttttgttctacgcgtgaacttcaaactcccaaacaccgcgcgtcatacaattcccaacgatgtctctaattttaatttcgtccaccaaacttcactcacacatcactcccatctctctatccactcacttccttctctgtgttcttctctttaccaatctcatgacctaactcaaaaaataatggcgaacgtaatctcaatttcccattttacccttctcgcattaccttatttacttctcctcctatcttccaccgccgccgcaattaacgtcaccgccgtcctctcctctttccctaatctctcatctttctcaaacctcctcgtctcttccggcatcgctgccgaactctccggtagaaactcattaaccctcctcgccgttcccaattctcaattctcctccgcctccttggacctcacgcgcg

SEQ ID NO: 51150 - DNA, 854 bp, Arabidopsis thaliana landsberg
  unsure (1)..(854): unsure at all n locations
gaaagacgcaataagcaaactgatagctaattagtctaaagattgattagtctcgacaccaattaatatcaaatagtcaaagttgacccatttggaccaatcnnnnnnnnnnnnnnnnntaatacagtgtaaagataattaaataacagtataaaacgtgacaaaaataaaaactatatagcataataactaccaattatcttttgtcaaaaggttgttttgacaaaaagggtcttttgacattatttaagattatttagtattttataggagggatgtttaatattgaccgttataggttataaactctgtagaaaaaagtattcttagtagtgactttttggtaagataatccttttaaatggtactaatataatgggacaacatttggcatgtgggaaaagaaatatacaaatgaatgcaaaaaggtaccgctagagcctagaagttcaatatacaaatgaaagaatatcaataaaagaaaccgaggataaagcaaaagagaaaggagagatgaatattaaaacgctaattcatgatgtagaatgtagatgatggcaatgttctcaccaagattgtctgccttaaagtcggaaaaaggtagattcgacgtaaacccatattttgataaaggtttataagaccaatatgccatagatttaaaaatgattcgggatatataaaaatgcagagaatatgtgtaatctatttgctgagattntcaagataaattgctccggattgtagttcatttgatagaaaatgaggacaatggtttctagacatgaacgtacactattagaacttacacaaagncataaaaagaagaagaaagcaacttagttttaccaaac

SEQ ID NO: 51151 - DNA, 1210 bp, Arabidopsis thaliana landsberg
  unsure (1)..(1210): unsure at all n locations
tggtgttagtgaagcaggtttgagcttactccgtgatcaatgaacaatgatgcaatgtttctagtttcttgactgatatgaaattttcatcaggacgtggtgctaaggaggcaaatctttactctgagatagctgaaggcatttcttcttatggtgtcacccgtcatcgccatggtatgtcacaaactaattatcacaatgagttaaaattttgccatgatttgaattcaatatctcttttgttttgcagttcctgaaattgaacagggattatctgatgttgcacagtcaaaagtaacagtcagttttacgccacatctcatgccaatggtacaaataatcttagcatgatttctataatttttaaccttaaacccattaactgatcctcagttgtttgggtagatccgtggaatgcaatcgactatatatgtggaaatggctcccggggttagaaccgaagatttacaccagcaattgaagacgtcttatgaggtgatgattactcttatgttgtaagccaattactacttttgttacttattatgtttcaaaaatgttttgtaggatgaagaatttgtcaaagtgttggatgaaggagttgttcctcggacacacaacgttagaggatccaactattgtcatatgagtgtctttcctgatcgaattcctggaagagctatcataatctcagtggtaattaagcataaccatcctctgttataaactcatctttagctttcgacaatattgctttgtgtataaaaagctctctggtgttgcagattgataatcttgtgaaaggagcttcgggacaagcgttgcagaatcttaacataatgttgggatatcccgaaacaacggggctcctacaccagccgcttttcccttaaaaatcccacctttaaatcggtaaaatagcattcttctctcttgttggctctgtatcttgaagatatttctgtcattagatttgcctgcttaagcgtttgtctttattcctatcttcagatgaccaatctgaagctgttgagacggcaatgttaagcataaagatggttggttatatgattcatatttatagacaataaagcctcttcttttaccattacaaataaatggnnttgttgtttgtttattaaggttttgatgaacctttattcttgttatctctattttctgaattgcaattttcgtttgagtcacaaaa

SEQ ID NO: 51152 - DNA, 718 bp, Arabidopsis thaliana landsberg
tgtgatagaaatttataaactgatcacggtcatgttctttttgtaatcgctgcgtcagcaatcagcgacacaaagttataacttacaaagtatgtggagagtattttaccacgacatgatccacgacatacaaagttataacttacttgcatgtaaagtatgtggagagtattaaatagcacgaatattctctaaataaagattgaaacttggaagatgtctgtacaagacaaattttattctaaataattctatcaatatttttctcttaaattttagttttaagtatatttgatttttttttgtatttgttttgattttccaggaaatgagtaaatttcgtcgagtccctctaatatcgaatctagtgttttttataattattttagtaatgcatttatgatgttttatttttgtggctacgagaagaaaggccttgaaatcttcgatagaattttgtcttgttcagacatcttccaggtttctattttgttttttgtaaggaatcttccaagtcttcatgcgggcggacaaagctactatcggtctaagtctccgcctatgagtctcctgctatcttcctttttaatcttcttggtgatagttacgttgagatatgcggttgcgtttttaagcttaaaacttaagcttctttaattttataattccaacgacagctttacacgaaacaaacaaggcacagagattaatgacgagg

SEQ ID NO: 51153 - DNA, 1011 bp, Arabidopsis thaliana landsberg
ttatccatattccatcaattaaaaaacaaaagaattatcgtttttacgttagtttttttttgttttcttacgcattataggcagactgattatagttgcaccggcctatatatgtcccatcttctccgtctacccatttgaggatgttttatttagtctcatatatataggaacttgtcgtcggataaagagatgaatacatctgaattacccgtttagatactgcattcagataaccttgacaatgttttgctcatccttgatatcttgtgtttagcttcttactttttcccgaaagctctttctttaatcacttacttcgatactctattgcataatccaatcctctgaaaccctctttattgttcagatagccaactagttgcccaatttggtgccttgatagtatatggattaaagtctatgataactccgagtacactatcacttgataattatattgcatcgtatacatgtactttattattattccatctcttcaacaaagaatatcattttttaaagttaatttttgttttctgttgtcacttgttagtttgttactccccaattacttcattaacccgttcactataatgggaaaaaaaaaagagttattactaatgggcctttacggtagcccattagaggagctcaactttcactttcggcctattaaaccaaactgacaataacgtctccaacgtgtcaaaactatatgactttggtccgaaagactctcaccaacgcccaattataaagtgtttttggacataaaaggtctcagtcaagtaaacgtctttgacgcacctacgcaaaaaacccatttcatcgaaatttccacttgacgttaatcccaactaccaccaattcaatccatttctcaaactctcttatcatatctaacacacccaccctacctacctacatctgtctctctgcaacagagcacaaaaatggattctgcatcgtccaacaccaaagctatagaccctccacttcacatgttgg

SEQ ID NO: 51154 - DNA, 625 bp, Arabidopsis thaliana landsberg
cccttataaggttgtttattttcaatgattctttatttttagtatagattaatattaaataaatggatggggaactctaaaatatctattaatattaaattaattaaataaattttaatcaattgatttgtagtctaattaatccggtaacccaagagatagtccaattcattggtcaatactatcattataatcaaccgatcaacgatatttttcctaatgtcatacaattatttttgctttttttttggtatcaaatgaatgacatacatcatcggtgatgatagacagaatcttcgttgttaacgttcatgtttctttccgattgtgactaatgaccgttatgagcgagctttctcaactaccaattttttttatgattaatagtgtacaggggaatataatcaaagggatttttacaaaaaccctaactcacgtacgtctataaatataatgtctaagctagctgcaaaacaaaagtagaataagcctaaaacgaaaaggaaaaaaatatgtatttgacaataatattcctcttcattagctccattattttccctctcctattcttccttggaaaacatttatcaaacttccgttatcccaaccttcctccgggaaagat

SEQ ID NO: 51155 - DNA, 121 bp, Arabidopsis thaliana landsberg
atctagaggatagacgagtctgacaggcagttagatctcgcgagaggtcaaataggaaacttcgctcagctcgagttgaggtgccagattcggggtaagagccggaacacggagaactcgg

SEQ ID NO: 51156 - DNA, 950 bp, Arabidopsis thaliana landsberg
cgtcatgcattatcctcgtgttcctttttcatttttgctttttttacgtatgtttcctcctgagtcgggactatggttgtacacaatagattaaaccaaatgcaactaatataatgtctcatgtttataaaagtattacttagcatttttgaatgtgtgtatttatgtttttcaacgcacgtggaatcattgggatcacatatatatcattcaagtcttctctccaattgattgtttctccttttatgtttgaacaatgagatgattgacctgtcttgttcttgttcatggccattgtcataaagctatatgtatagtaaatattggtatagtcaattacaatatattaatattaatatgagaagagtgagaaaaaggtgctaattaaactttaacttcttgaaggttttggagattgtcactaccaaacggtgcaacaagagatcaccacatggctaacccttttggaccaacgagtcctacactcgaatcaattagcttagagccaatgttggtgattgtcggcggctcagaactcttgagagatagggccaaggaatatgcatataaattaaagaagatgggaggaaaaagggtagattacattgaattcgaaaacaaggagcatggtttctactccaactgtccatcttccgaggctgcggaacaagttctccgtatcattggagactttatgaacaacttgtcttaagtattttagcatttggcttgttgaaggtaattaagtgtttaattcaattaggattccatctcaataatattaagtttgcttggtgattggtgaatcatttatatatacacagcacacaaaacacataaaatgttcttggtttcgttataccttgttcatcatatccgatcttaaatggaatatttttttttttcttttctaggagattaaatgaaaagttggtcgtacaagttgaaaa

SEQ ID NO: 51157 - DNA, 797 bp, Arabidopsis thaliana landsberg
aagaaaatacacaataattgggaatgtggaagtttacaaatgtagtaaccagcttgccttattatggacacagcaataaatataatagggtacaattaatgtcagattgataacgacgatccaatagtgaaccacaaatcacgaattttcaactcacaaatagactcgtttctttgttagatgaaatgtaccaatcatataaaacgacattgtgattggcaatcacaaagaaatataaattgtttatgcctcattaaatatattacttgaatggtaaagtattaagatttgttttgcgatcatgaaagttaacattcttatttgttgtgtatatctctgaacgttcttattggattatgttatgtgggatctgttgctgaagtatccctttagattcatttcataatccaattttctttatttgatagtatatttgattgcagtcaataaataaataaactccctatagattgttttccatcaattgtaagagttttttttttctatttgtaactgaggttttgagcaaaaagtccatggtataaaaaataccccttagtcaaacatgagagatttcatgacgatatataaagcgtaaaatcgggtaaaatataaagttataaactaattgttgatcttagtattaagaatttattgcattcatttcttaatttattgcgtaaaatcgggttaaaattaatcaaatggttgatctcttcagagctagggcttcatttcttacataaacgtcgtgaaaatttgattattaaagtcctccaaagattaataaattaaaa

SEQ ID NO: 51158 - DNA, 860 bp, Arabidopsis thaliana landsberg
atttttatgttatgtatattcttgataactctatctaacttggcttgtggcggcatttgcagtatattcgaaagagtttgcattgtcaaatggtctgatgaacaaatatcagattgtgttaatgaatgaagaaggagaatcatggaagatagacttgagacgcgaggcatataattacggccggttttacatgagaagaggctggagaagtttctgtattgctaatgggaagaaacctggagacgtttttgcattcagattggtcaaaaatgaagaaacacctgtgatacagttgttccctatgaccattgaagatttagacaaacttcgtaagttaattttcataatccgtttgttattgataaaattcttaatcagattctactattgatacagagagccttccaagacacaagattcgaaaaacagaagcagctccttcttcaccagacctttcttcttttgtagccactgttacggcttcaaatctaagccgcgatagactggttatgatactcctgacttacatatattgattttgatatgattgagaagtgttttaatgattttcatgatgactgtacttgactgcagtatcttcccaagacgttcattatgtcaaatggtttgttgaagaaatttcagatgtgtctaatgaatgaagagggagaatcatggacgatagatgtgaaacatgaggcacatacaggccggtttttaacgataagaggttggagaagattctgtgtggctaatgggaagaaaccaggagacttgctcaaattcaaattagtccataacgaagaaacacctgtgctccagttgttacccttgaaaagtgaagatctacacaaacttgg

SEQ ID NO: 51159 - DNA, 546 bp, Arabidopsis thaliana landsberg
tatttgtaggataaaacagtattttacccggctcagcacggcccaaaagggtttagagctctcccaaatatgtattctatgatttcttttttattgcagtgttagttgaacctaggtacggtacaagctaaacctagggagtactttgcgtttggtcgatctaagcagaggctagcagcgagctagggagcggtgcagtaactagcactgcgaaaggcaggagccagaagaggtccatcctccaattcatcagtgagccgtctgatccacgggcagcagtagcaggtagctgcaccagccaaccgtcgtgtgaataatactatacatactactagtaatagaaatatcggtcctgcgcgcgtagtacgggcgcgcggtcaaaaaaatgcgaggacatgcactgctctttcctctgctgcaccctagtcatagatctgaccactgatagctagctaacgactggcagaggcatcttttcacatgagagagtggcatagtaaaatctctgtccggcactttttttaggtctggaccagcctactctac

SEQ ID NO: 51160 - DNA, 878 bp, Arabidopsis thaliana landsberg
ggtgagctagtagaatccttttgggttttcaactagggttgctattctgatcatggtatgacatgttttcgtcattgtttcaggaattgagaagccttctgttgtgacaaaaatgaatgtaacgttatccgctgatcatcggatctttgatggacaagttggaggtaatggaacattcataaatcccttcgtttcgagttttatgttatgctgctgccatatttcactgtgtttctcctttgttactcattgctttttctatgaaaccggctttgtttcagcttcgtttatgtctgaattgcgttcaaactttgaggatgttcgaagacttcttctgtgagaaagatccaactgtttaccaaatgaatcttggattactacataataaacctcggaccaacccacgtgcacatccagaaccagaactgctggtctacattgttaactctgatcacatgtttcatttttttccatttggttcatatacttaccaaaatttgttttggtctttaacaattcgtcttatagattggtaacttcctgaggtattttttgtctggtctgtcctctgcaaaataaataatttcagctgtcaatccgcaactggtgaaataatttaaaaagtattttaccctcatcaaaatttttaaaatgagattattgccatctctgttctaccagatcttattgttgagctccaagaaacgatttatagacttatagtggttagtgttgaattcatccgttaagtctttaaccaagagattacaaaatttctatccaaaatttagggtttaagtaccattacaaaagaaggaaatatcagagatttgaaggtgatgtacgttaatcatctgaagtagtctaatgtcttgcaa

SEQ ID NO: 51161 - DNA, 544 bp, Arabidopsis thaliana landsberg
acatgctttttgttgatatgatccctcccactcaaaatcataccaatccttgaaggatcaaggattccttctgtgtttctcacccggtttaaattaaaatagaagattttggttcatcccgctggaaataaaccggccaaacaatggaacaacggttcacaccagaagatataaagaaaagatttaaaaaaaaaaatctttatcaacagctaaaacggttaaaaaaatatgcagaaaagcatcaaatctctcagtttctcaaaccatcaaaaagtggtctatgcaaaaattgaccttctttgatgtcttctcactcttcttttcttctttttctttctttctttgtttttcatcatctttatgatacaggagcagtaaccagattcaactcaagaggcttcaaagctgcctgaacaagctcttgaacagtacggttacgtcgacaaacatctgagagctcctcaacctgtcctatcagagaattcacatctgctccataagcaatatcggacaatgcttgtaagaacttggtagattcgggctc

SEQ ID NO: 51162 - DNA, 593 bp, Arabidopsis thaliana landsberg
acggcgcaccagcaaatcattttaagttcactccagaacttatttaggtttcacgtcagatttcgtggtctgaaagccgtcgcagctcttgaaaatatcctgtttatagctccatcatcctcactcgactgatcaggcagccacttcacagcattgacttctaaaaatgaaaaaagcactttacctcgtgaatgtgccttttccagatccttgtgcatcaatcgctccaccaatcgtgcactctccaatattgtctcaggagaaacagttgttttaaggcccaaaccttgaagcatgtccaagatagcagatccctggaatccgctagcagggaaacaatctgaatcttccaacaaagcatataactcttcattacgaggatcgtgtaaaacagatgggcgcttaagaggaccatttacagttggaacaaactctaggttctgcaattcttccctcaagagtctatcctccagacacagttgtggaagatcctgcagaatagaaatcatcacctgatcacgaatctcaagttgcaaaacttcaattttgttgaaaacattctgtctggagaagttacttttcctcattctctc

SEQ ID NO: 51163 - DNA, 624 bp, Arabidopsis thaliana landsberg
tagatcttgcatattaatttattgagaaggtatatggtatggttgtagctgcaaaccggatgctgagacgtacgatgctcttatcaatgcccatggtcgagctggtcaatggcgctgggctatgaatcttatggatgacatgttacgtgctgctgtgtgtaactttgctttactcatgtaaagtttacatttttgttttgggtttccatgatgcccaactaacaattaagaataatctatttcacttctgatatggttttgacttttgactcttctctggttttgcagattgctcctagtcgttcaacctacaataacctgatcaatgcttgtggttctagtggaaactggagagaggctctggaagtatgcaagaaaatgacagataacggagttggaccggatttggtcactcataacattgtgttgtcagcatacaagagtggtcgtcagtattcaaaggcgctatcttattttgagctcatgaagggagctaaagttcgtcccgatactacaactttcaatatcattatatattgtctgtcaaagctcggtccaagtagccaagcccttgatcttttaaattaaatgagggagaagagagctgagtgcagacctgatgtt

SEQ ID NO: 51164 - DNA, 644 bp, Arabidopsis thaliana landsberg
  unsure (1)..(644): unsure at all n locations
gtcgtcattattcttttctcccaaagctataataatttacgagtccaatgtatatagttttcaagcgatataatggttacattaaaatatgtataatctactttaacatactttcatatatattttggaggcatagatattagatacgttgacaagccacatgttcttttatcacaagccaaaagtaggaattgaaagaaaagaatgtatgaatttataaagtgattggttaagaagcaaaagaaaaaggagagttaggggtttgaacaagtcagtaatcatatagatagtgaaagtgacagttggaaaaggtgagagagagaggatcatcactatatttagacatcacttgaaatcatctcttcacaagtgtctgaatctctcccacatcatctttctgcctgattctcatcatttggtttgtgttcgttcataggtaaagtaagattcttccatacctattagacattaatgtgttgttcatcattatattgtttgttctattgatgtgatttcatctattgatgagtctaatgatcttgaaacataaattttggttcgatctttaatggatcttctttagatgtatgttctgttttcttgatccacttaataagaggattntatcatttgttaccagagac

SEQ ID NO: 51165 - DNA, 709 bp, Arabidopsis thaliana landsberg
gcagaagcgaattgcagtcaggataatgaagataaatttcattgatgcagcagtcgatcttcttggaagggtagggtatgatccaaactatggagctagacctgttaagcgtgtgatacagcaaaacattgagaatgagcttgctaagggtatcttgagaggagatttcaaggaggaagatggcattttgatcgataccgaggtcacagcgttctccaatggccagttacctcagcaaaagctcacattcaagaagattgagtcagaaacagcagatgctgaacaagaagaagcagctttctcaaaatagagtagttgaaaatgcaaccttttggagcccaagaagattcagacttttcagtacagaacttctagtgagttacttgtcacaaaagactgataatatttatctcaatgtgagagtttatataaatcataagcttatgagtcattgtactgatgtctcaaaggtccagaggttatgaaaattgttgatcataatttgactgtatatgaatgttgaagaatctctgcagatacaataaatttagcagtagtacacaaatttacagatgtttcactgattaggattggtcagtcgtttttgaggcggaggtccattttcacttccacccaacaaagaatttctccttttcaatacgttctctcataggaaagccattgtctgcaccaatgagacaaacacaaa

SEQ ID NO: 51166 - DNA, 1087 bp, Arabidopsis thaliana landsberg
ctcttctgtcgtttatagactcgatcttaggaggagcaagctcttcgcttttcctcctaatgattgattcatgactctttatcaacttcgaaacaggaaaattgcttgaatcttgttcttcttctctatcttcttttgcttctttatcatcaccaatttcattatctattgaagatgatgatgatattgttgctgctgttgctacacatgatctaggagatgatgacctatggacgatgatctgatcagactgagattctaaacactctaactctctacgaatcgaaccaacccgatctttaaaacccgattcataatcttttacaactatcattactttctccatcttctcctctaaaccattcatgaaaccttttatcagtaacgccattgaatctctctctatagaccatctccaactctgctcaataggacccaattccgacaagaatatcgcgtgatgcatcttgttgaaagcaagatccattgtccctttcaaaacatcaatatcaaccgctgaaggatcctctgtttctcctctcaattcatcgtactctgtctcaagcttttgtctaagattcatcacttgttgatcaacagagctcttcagctcagaaaactcatcttccttgataaaatccccaatcttactatgaaatctcttcctctcaagatcttgcaaatgaaccaactctgtttctttactctccaacacgtttctcagagactcttggttctcagacatctctaacaactgtctatctttctcaagaatcgctatttcagtctctaagagacggtggtgaagcctgtctttaatctctctcagatctcgaaccacttcctcgtggttactctctagtttatcagtctcttgtccgacaaaactaagacagctctctagctgtatcacagcgagctcgtagaaaatggatatggcattgagacggatgagaagaccgtgtttggttttgatcttttcatgggctttgtccattgctttgtgaacaagtaacatcattgtcgaaatccgcattgaaaacttcactttcccttccacttccttcattatatcttttcatttttc

SEQ ID NO: 51167 - DNA, 724 bp, Arabidopsis thaliana landsberg
ggtatgcttctttttgacctagagctttttgatctttttgcagagggtaaaatacaaaactattggactacttaaaaaaatctctagagatctcttttcttagtgcttgtagcgtccctgttgttctttacttatttgcttaacggtgttatggttttggtccaaccttctagggagaaaaccatcgagtgaggaaaaaggatctaatggtttggataggaaatatgctaaagaacaacatgctgcagttggataaaagcttctatgtacaaatagctggaatacctcagggacacagattatcatccttgttatgttgtttttactacgggcatctcgagaggactttgatctacccattcctcgaagaagcctctaaagatgtgtcttctaaagaatgcagtagagaggaagagcttataattcccacgagctataagttactgagatttattgatgactacctttttgtgtctacctcaagagatcaggcgagtagcttctatcacaggttgaagcatggatttaaagattacaactgcttcatgaacgaaacaaaattctgcataaattttgaagataaagaagaacatacgtgttcttctaatagaatgtttgtgggagataatggagttccttttgtcagatggacgggtttgcttattaattcccgcacatttgaagttcaagttgactacacaaggtctgcctcatctcctgtatg

SEQ ID NO: 51168 - DNA, 1005 bp, Arabidopsis thaliana landsberg
ttaagatttgtagaaatgattcatcataaacacaatacaagaaaaaaagaatgaaaagtttctgagaaaaattacgaggcaagggatggtagtacagatttaatccgtttctcggacttattttcttggtcagaatcaagatcttgaaataacctcttccctgccatggaattgttctggtgagttgtgagagaaagagagggagagttagagagagagcgcttagatcaaaactaggttttgtaatgttttgacataatcttatacgggatgatatttatatagttttagtctttagtctcacaaaaaccaaaaaaaaataaaaaaaaataaagaaagttcgaagaacgacaaaggaaacaacctggcaatatccaaagaagtccgaagtctgatccacgcgaataatctatttatggcgtcataaatagggagacttttgacgtcaactccaatttagaaagcttcctttgttgacaaatggacggttccgatcttcccacccgattgggttttagatctaactgctagtataaagcgtgatccatatgccacatgattacttcttgtagagagagcactacgagtatacgatcgatccggtccgttcttcgaagaatttttgttcctttctttatcttgtaagaatattaacactattgatatcatcatatcaacatacttaattatgaaaaattgattgtctatataattcggattcatgtttgttcctctctaacctaattagtaaaaattatgaaaatcagagaaaaagacaggttcagatttgttttctaaagtttatgtcaaaaaggcaaagtttgcaataacctgaactttttggtctcgtccgataaatacggtgtatgtctatttagcaatcccttttatatagatacaatcttattgaactatctttttttaagcaagacaacaaacaattgaactatattttttttaagcaaatatgaaagaggaatgaaagctttatataaccttttttcg

SEQ ID NO: 51169 - DNA, 670 bp, Arabidopsis thaliana landsberg
cctttttcttcttcattttttttatattgatcaaagccacctaaagtttgactcgttgattactttaagattttttgcttttatatgtattcatattccatatcagatccatatagttaaattgtaatgtttttagttcaaatggtatcaaatttttatttatttggtcaaatatgggtattatcatatcagtttctacattatatatactcttaaattgttctaataaatttcaagatcttacaaaattaaaaaacctaattaataaaaaaaaatgttatactaaattgtttatcttaagtaaaaaaattcataaattaaagaacgaagatgaaatcgttgaacggggtcattgagttggtttttttcttttaatgttaagcggccacttgctaatgttctgtgctgcccatatattgtaggagagacaagtgggcattataactaaaggcccatttgttttgagacatcatggaatgcatatcatcttttggtcctctaattcttgttcttgtggaaaatgaccactgagattctattgaacatttcaatgggttacataaaagaagaaatatgtttaattaaattgtttgttttactattatattcgctatgaagaaattcgattttttttataaaaaaacatggtttcaattcgaattcggatttg

SEQ ID NO: 51170 - DNA, 204 bp, Arabidopsis thaliana landsberg
ttaacttgtatatatattatagtaataagaataactattgaatatcttattacacatgaacaccgattcttttctgtaatagtattgctgctatatacattgctactaatccggtttatcacgaacgcacaaaacataacatatagagataaactgtcatacagtccgtgatcgattagatgatggtgtacacaagctcattat

SEQ ID NO: 51171 - DNA, 842 bp, Arabidopsis thaliana landsberg
tcttataatttggataatcttcatcatcagcttgagacagaagatcatgattttaaaggctttcaagacctactgcttaacccggtgctcaccgccggttgttccactgatttttccttgcaatcaactcatcaaaattatatatcggattgcaaccttggatattttttacagattgggtacgtaataatcgatatttttgcttctctactgatgaaatacaagtcatggttttatgaataaatttggccttattggatacatatataatatgaatatgatacatatgtaggtttcaacaacactatgagcaaggtgaaggatcttcggtgacaaagagtaatgcaagaagtgatgctgagaccaactttgtccaatgatgggtttcgttgtcttggtttggactcattgagtcacgacgaagcgtttaggtcatttactatcgggacatactctttttttttttttttctttttttttttcacaagacatactcttttctttaatttcaattatttgttagagttctcgttgatttattgtttggaggttatatatgggataagtatgtaccactaatttttttgcgattagtggatttttttgttaaccgtcctaaagaacaaatagaaaagaactcaaccgtttcatattggtaaaagtgtagtatgtgttgttgttaatgaacgatatcaatcgaatttactttctactagtagacttgaaactggtattaacatatcagagaagcacacacaaacataaaaagaagaataaaaaaagaatcgaagaattaaaaaggaattatggaaatttagacaacataaatcatcaatgaatgc

SEQ ID NO: 51172 - DNA, 1064 bp, Arabidopsis thaliana landsberg
attaaaccaaatgtatacaattttgggatttcggtttatattttagaactttccgaaacgaagtggggaagtggaatcagaaagcaaatgccagaaagtaaaaaataatcagagatgcagaggcaaaagactaccgacgatcgcaatcgactagaaaatttctgatttcgatgaactgtgaacacttgtaaatgaaaagaagagaggaatcaaactagtaaaggaatacctccaaaaatcaagtaaaatggagacaaaagccattactagaatcagtaacttcaggatataaagccaaacaaatggcagacgaagaaaaaaatacctcgaaaaccaaatcaccgacgcttttttctcaacagtcaaatcacaaaaccaaaagtcaccgacgccgattcctcttttttttttttttttgtaaatgaactaataacagagcatgatatatacagttctccgatttcgaagcataattccgaagaaatgtagaatcgaaaggaggagagtatatatggagagagaaaaaaactcaccggaaaaatccaaaatgcagcagtgaaacagaatcttcccgaaagcaagagagcttagtggaacagatttggaaacagagagaatcaaaaactctctgtttcaagatacagagaaagagagagaagaagaagaagaagaagaagagtggtgggttatggtgtgatagtggcggcgatggtgatgttgatggtgaaaataatctatctatctatctaatgccttctgtatcacttcaaagcctaaaacgtagcagaggctctcctttaaactaatcgctaccttcactttctcttctttttcttttttttattctccttctgcttatttaccctgcttaataaaataccaataattcagtttagttgaattctatatagtattatttagatattatgcctgttgattaatagtaataattctggttttaagtcggaaacaaataaaaatactaaatccgtatacacagtagccctatttttgttaaagggaatgaatagataggcttttttctaaatttcttatcacgatga

SEQ ID NO: 51173 - DNA, 649 bp, Arabidopsis thaliana landsberg
atctctgttttgatgaaaatgaactatgtggactagtcatgaaagagatctctttagaggaacaaagcattatttatattttctagtaagtgaactctcttcgatatttatttttttatagaaattcccggaaattcaggtaacgaaatgtgattttaatcttaggcattgcgtgttgttcacatcaagatggagtgtgatgtgatcggtaagaattttagttctctctcctcttggcttggtggggcatgtcctttgaaaaaatcgaaaccttgctatgtaaattgaatgttgggactagacggctttgtcaaatcatccaaaaaaaacataggaagacaaagataactcaaaggagatggagagagcaatcaagaattccaatagcaattaaaggatcaaaactccaacagagaaatttcattaaattttctcctttgctgaattttacgatataatatttgtttcttgtaaaagctataatattataaagccaactgacaatgattttcctttattgtaacttaattgatcttgtggctaaaaaattaaaggcactgcaaataaaagtcacatatgaaagagttacatctcccacctgaaactaaaaaaaaaaaaaaaaaaaaagccaacacgtcaaaaagtactt

SEQ ID NO: 51174 - DNA, 945 bp, Arabidopsis thaliana landsberg
ggcagatgatacagagaccttgcaacgttcatcgagagttttaagaagcgaaccatcaagagacgttttaagagcttcgacatgtttgtagctgaattaaacgaagtaacaattatagcctaggtcatctgagaaagttggaagaaaaaaggaactttagggttattactgtttgagtaagcttttaatcttctgcgatttggtttcgatccttgccattatttcctctgcattatcagcttcaacaaatgctgctgcaccagccattggatctctctctttctctacactctccagcaaaattatctaaaacctaatcaattaatttcatttcttcattcaaatcgacaacttgctgcataagaaacatatgatttgagtttactaaccaaaggaggcaatgcaaaacttgtcatccccataaaaagctaaaaagagaagtaacaatcacgacaaaatcaattctaatcatgtaaaacaatccattgccgatggtacgcagatttctcacatcatatcagatcagtaatcctgaactttctgatcaaatcatacaagattgaagaatcaagcaggattcgaagattacctgaaattagagagaataaagcaatcgagtggtaaaacggccgagagagaatttatcagaactgtgataccaattattaaaatcggatgcttcagtttttaatttttactttttcacattgacgtaacaagagaaatagaaaagttgttattgctggtatatatttgtaattaacaaaaatgtaacaataatcttacaaatgtagagagaataaaaacatgttgatcaaattaatatccaatttttaagatcagattaagatcggtttgttatacttggattcaacaccccacaaccccacaaaaactgctcattaagcaacaaatgaatcacacagctctagataggagaaatat

SEQ ID NO: 51175 - DNA, 794 bp, Arabidopsis thaliana landsberg
attgatgagacaagttggaaaagcttgtctggagttcgtgcaaataaatgcatacttcaattagtgccttccttagaggtaatagtgatacaacactaacttgactctttcctaacttctgcttattgaatatcttattcctgttttagctattccaatcattgctgcggtgtgtcaaattatgggccaagaggcgaggtgtatacggtaatgtaagtgctaaatgcatatcactgctcatcatcaggctatcaatgaatgcagaagcttaattgattttgattccacttgttttcagttgaatggatttctagggggagttcatatggctattcttgctgcatttgtctgtggataccaaccgaatgcaacattgagttcccttctggcaaatttcttctacacatttgcgcattggcaatggcctacaccagtggtgttgctagaggacacttatccatctactggggctcctccaggcttaatgccaatccaactgccatgcggttcacatcaatactgcaactccaacataacaagaagcacattttacaagatagtggcagagtttctacgagggcataatttgacaaaggtagagtcttactttttcagtatccacctaaccatcctgttaggctgtgtttttagctctttggatcttgcctgaggtttatgtgcattggctttcacccaaggaatgccgtgttccgagccatttaaccatgtttttggtctattacatttttcaggattacttgaagctcaacttcagttggaaggatgttgtttga

SEQ ID NO: 51176 - DNA, 702 bp, Arabidopsis thaliana landsberg
ttaaggccaactccaactgatggcttaactcattcaattcaaaataaacattttaatgtttcatacacacaaaagaaacgatgggttatggttgttcatttcaaaagaagagagtttaaagctatacaacaatactatcagacatcctattttattccaataacagacattagaaaggaaagcccctcactgacttttgcaatatcttgattctccaacgttgatgtcggcaattccacacccgtgaacatgtaaagcgccttcaattcttctgaataagtcgtgctcctcgtaacgttatatccaactaccttccttaatgcctcaatctttgtccatatctgctcctcgctatacaacacctttacccacaaacctcaatttaagtagccaaacaagaaaacaacctttgagaaggatttggaaacaaacaattcaatgcatgatctagttgataaagataaggtactatgtatttacacaagcttcttgaataagttctcatgtactatgttacactaatgctcacacggtacttatggttaatgcttgaacaaatttttttagctattcatttaaattagagagacaattcaaagtacaaaaacatttggatttatcactagaaacagataaatgagttcaagaagctaagctattacacggacgccaagtaatcttaataaaaacaattgtgctact

SEQ ID NO: 51177 - DNA, 886 bp, Arabidopsis thaliana landsberg
ctcaaatgttgaagtcaagcgtgtaagttctctcatgaaagagatggcttctattccagcatgtaaattgttttcatctcccatcacatcgacgccagtcaagacaacttcaagtctggctaaaccaacttcgtctcagattaacattgctccaactccaaccaaaccaacttcaactcctgctaaacagactttgtctgagattaatatattgccaactccagtcaaaccagtgtcaactctggctaagtttccttcaacaccggcgattattgactcaacaccagtcattactgcaactccacctgaatttgcttcaactcctgcccggctgatgagtacttctctggcagctcgtccgctgaaaagaagcagcggtcatacaaatccagatgatatttctgctgacccaccgactaagctcgtgaggcgttccttgtctctgaactttgattcttatcctgaggatgagagagctatggatttcacagatgatatacccattgatcaagtaccagaagaagatgtatccagcgatgatgaaatactcagcatacttcctgataaacttcgacatgcggtaatacatctctattagtgattccttttcttctcgcaattttgctttatacttttcagtttgagattaagaagtacaaactgagattggctttacttactgagattgtttttttgctcatttcagataaaagaacaagagaggaaagcgattgaggatcaaaatccagcaatctctctggcaaaaagaaggcgaaagatgatcgcttgtctacctaaacttttcaatgtcatccattaccttaattcaaatcgataaggcggttggggtatcaccaaaaagaaagaagctttggggccccaaaga

SEQ ID NO: 51178 - DNA, 666 bp, Arabidopsis thaliana landsberg
cgaatatgtcagtctatgaaaatatgcagaatcatgacaatattctgtcttaagggaaaaggttggcacgttctgaaggagggtcctgcaaaactaacaatacactagtgagataacgtctgagctaaccttttggcttcagctttttaagatgcatatcagttacgtcttaagctcttggcatatcaagatccaaaacctcattggtagcatacattccaacatgatacttaatcgagactgcatctgacagtggagttacgttctacaagcgtggtgcaaaaaaaaaagtcctacaagcgtaccattgaaggaggaatccatgcttctcatatcaagtatcaataatcttgatgtgcctaagcataataaaggaagatctttttctcagtctaataagctgagtcctcagtctaatatttctgaggacttggtttaaactgagtcaatgtaagagagctggttgtcttgttccataatctgaccacaaataatgatccttcgggagcatataatgtcgctgcaacagggacaaggcagagtagagttggttcacattccaaagatgtaaggaatatgaaacgagtaataaaagtcaagatatagttggtctacataaactataccacgtattcgtttatgtaaaaaaggaaggaaattagtttg

SEQ ID NO: 51179 - DNA, 909 bp, Arabidopsis thaliana landsberg
ccctaaacaattctttctcgaaaacctgttataaagattcacattcgtatgaatagtctattagtctacaaaaaatttgtcgatacatatgtatataaaatatacctcacggtgtaaccgttgttccgcagacttcttgtcggatgctcttacgaggaggtagagcctcttcacatttggttgcaatctcagaatccgctccacgagaactatgcttagaaattaaagttattaataaacaataatgacaaattaatggttaattagttacaacttacatgcatggattaaaaagttgatcctgtaatatgtactcaattgatatttcgtggtataggaatatgagactgaagaaatactcaacaaacaatacctttagcaaggaaaccggaagcgccagtgacgagaattgtcctgttctcaagaaactgaacacaatttggttccatagtttatacccaaaaggctatatgagaacaaagagtaagtgcaagtgtttgttactttgtttgttgagagtgtttgattattgcactataacacatgtattatttatagggggtgtgtgggagttagctagccggatgaagattcaaatgttattaaactatgtatacgatttatctagttcttaaaaacggaagcgtttacaggacattctaattggtatcagcggatggcctaatgataaaaaatttcaattataaaaaatgtattatttagagaaaaaaaactataattattataaaatatataactaagtaaaaaatacttgataaatagaattgaacctttgttttatgttacacacattctctagtttaattgtttttgttttacagcctctacttccattgattaatgtatcagaccatattagactttgatatcataaaagatgatatcatt

SEQ ID NO: 51180 - DNA, 294 bp, Arabidopsis thaliana landsberg
ttttttttgggaataatcctttcccttaaaaaatatcaatcctttctttaggttgattgagaacggtagtgcaactaatattacacaggtttgcatgacacatattttgatgaaataatggttgtcgctttgtttcagatgcttgaaaataaaaggtcagagtgcagagaagaggcgctatatagcgagcttgaaaaagtaaagaaaggaagagaagataggtatatatttatataagtctgatcttattgataacttgctttcactgatgtgtccttccttaaacagatgttt

SEQ ID NO: 51181 - DNA, 552 bp, Arabidopsis thaliana landsberg
gagttgttattggcgtggaatgcagagctaaacgaagtgattaaaaattttgaaagattaagatgggtctatttcataacaaagtatttccataatgtgatgcaatgatatcaaaattgaatgaaagaggaatggagagggctaagctagagatgagatggggctaaaaatagacagcggaaagagtaagtcagaggaatcatcaatggttaatctgaaattaaaagagaggctttgatggtgaaaggaggaagagaagctccttttacaaccatttcatcattttggaaacagtagcaactccaaaacttacccttcaaactctaatcaatatcttgtcatttttatgatctctttagtggtaaaaattcttagctttgattgagaagatccattgttgtctatgggatactcaaaaggatggctataaataatagttgatataataatagagttataacaacattataacaagttttgaacacttttttagaacgaagcgtggatggggtttcatttcggtgttgactatcacctccaattccattgatg

SEQ ID NO: 51182 - DNA, 619 bp, Arabidopsis thaliana landsberg
ttatattatcctaatttctggaaatagtgatgcatcatgacatatattaggaaaagtacgagataaagaattttcgtacgtactttttattcatcatgacatagatcgtgaaatgattttttttctagtatagatcaaaaggtttaagaattgttttctttttaggaatatgtcagaacaactagctacttaaattaagaagaaaatggagatgcagaaaaacactatataagaaactgactaatgaatttttcgaatttgaaaagtaaaaatgtggattcgaaaagttccaaagaaatcatgtaacacacaataccataatgggatacaattattggcttccattttaatttttgctcatgtaaaaaaaataagaatatgtcatagtcaaaagtacctaactgctcatcagattctctcccaagagacccaaacccaaataagactacgtacattaatgtgaacatgtcttgtggctgttctcttcttaggccatccaccaaaaactccctaaaatatttgtctcctctatgttgattgttgaaattgaaagctcttaatacatcattttccatatcacccctaccaaattaaaattgatattttgcattttactctc

SEQ ID NO: 51183 - DNA, 566 bp, Arabidopsis thaliana landsberg
ttttctttgtttgtaattagtactatgttttgtttttggaaactttttattcatctaatttaataccacgatttgactgacccatttgattagatttccaatacgaatatttaatgttgacaacgtctgtctaattcaaatctttaattctctttttttttttttttttggcaaatatcattttttttcttgaattttgccatcgccaataacattttatctatacacttttttcaacacagttgatctatattcttaagaaaatgcaaaaatcagtatgtacgtctcgattcataaataaatcgtagaaacgttttgtccaaaaaaaaaagaaaaataaataagattgataaaaaacgagttttaatattactgacaaaaaattgtagaatgacataatatttaatttagttgtgattaatattgcataattatagaattctgcgacaatctatgattgatagaaacatgcctgttggttttgtcaactctagtaagaacttatcatcacttcttgtaataataaaagtaaaagtcgataatctcttttttgggatcataatcat

SEQ ID NO: 51184 - DNA, 1948 bp, Arabidopsis thaliana landsberg
gcccttgctaatacacaaatgttttagtgaaaaaaaactcaactatatgcagttcttcagagcagaatatctacttaaaatggattgacgtagagtggactaggattttttaaagatctttcgtaaatttagtgtgttcctagttcttacgtatcattctatatgtacaaacaaacttaatttgatcactcatattatgaattacagtcgaatgtttcttaattatctgaggattggtttgtgaaaacctccttaccagaaacatttgtaaacctaagatcagtccgaagtttcgggaaacgatacgtgtacttcttttttttttgttaagaacgagacgtgtgctgctaattaatcactttcaatatctttttttttttttttgttgttgttgttgtttttgttgtgtaaaatgttattatatggttgggtttattggccagttggctactgaacactttcaagtataaagaagtaaagaactatattcctcggaacccatgtcacgttgcaggaggtttgtctcgttgctacaccaaagttttattttggtcaaggtggttacgtttacatcatttaaaagtattagtggaaaacatactttttaaaaatttataggtgattattttggtcatggagtcaaggttccggtatatatatatcagtcgtatataaaaatgaatttatgtaaacaccaaacaagttatttaaataagtttgcaagaatgtgaatggtaagcactataggaattggtgaaataaagatgaatggaatgataatcatataagaataacttttagttcataggaatgcatgattctgctatgtatttaagttatctgatactaatttagttgctaattatgggaaattttgccatgaaaaaaaagaaaattttggaaaaatcacgtaaattttttctaaggaatattccagatactaaaactctatacataattacatatagatggacatgtatgatgatgcacgcaactaaaaaacaacttccacttgtgtatcctacttattttcgaagagaaaaatattcagcattttgggtcaattcgaggagatatcagaacacagcttttaatgtaccatgatgcaatcggaacattgaaagaaactatttgacaagattttactattttaaagaaaaatcagaaatcatagtacacatgctaatatacttcccacacaccctgatcagaaagagcacatgcccatacaactaaaaaacaaacacaatggagcttccatggctctctctcaccaccttcactctttccctacttatctacttctcttcaactacacaagctttcaaacgatgccctaactgtggatctacccgagtcccgtacccgctaagcacgggactagattgtggcgatccaggttacaggatccggtgcaacaactacggttccctatggttcgacacgctcaatggctcaaccaatccaatcaaaacaattgacccatcgggccaacggttcgttctccgtccaccaggtttcgaacaaaacaaatgtgtctcggtcgatatcaagtaccacggtattcaactagacctaaaccttccttttaatgtgagttgtagtaacacggttataatcatgaactgtacaaaagatggtctagatgcgtacagctctcaagggtttaactgctcagacaatagcttgtgccacaagtttctaaatgcaaatctcgaggcacgaggcaattgccgaggcgtgacgtcttgctgctggtataaaaccggggcatcggttaatacttacaaagtttatcgagctaggccagatatgtgttcggcttatcagagttttatgaatttggatctgacgatcccggttagcaaatggggcgaaccagccgtggagatactatgggaactcctagagacctggtttgtaagagtcaaggagattcagagattta

SEQ ID NO: 51185 - DNA, 558 bp, Arabidopsis thaliana landsberg
agaatctctttaagtttcaccacgttgatttaacggtcaagagtatctgtttattaacagaacagtaaaaatgttagcgctcaaagcgtatatcttgagcgccaaatgaaatttcattggtacaatgcccagaactggcctcattgtaagagattttttaggagatttatgcagatctggaaaaacaagtttttctctctcggattatccacaaaatattcagttagacaatgccctgaatccaaggaattgtatcgaccgagattgaagagaccattcttgcattctttttgcagcatcgcgattgtatgaaacattgtacattgatggccagaactttcttctataagtcaatcaaccggccaccggaattaccctaaaaacatagaaaatatgttgaaatatattgagatattagtcatcgactatgactaagtgtcacaaacttttgtgtgataggattcaatcaatccaatggatcttagtaagaatattttacattctatacaagtctagttcacatattttctaccacaaaattgttaattcctcacacct

SEQ ID NO: 51186 - DNA, 551 bp, Arabidopsis thaliana landsberg
ctgtcgcctaggaggcactttttaggcattctctatttctctttccacatttaccacaatgtatccaaataggcaaatatataagcttagagagttggctgcacgtttttgctaaacttgataaatgagtcaatacaaccaatatagccaccatccatatctacaaatctacacttatcatctaaacttgaagaatatttgttattttatcactaaccacaaaagacaagactcgttacttaagttaaatgatagtgacatgattaagagaatattagctattaggtcggaaataagagaaataagactggtagtggtatggttatgtaaattatcagtacatgtatataacacttgtccaaataatggctttcacattacaagtcattctttccctgagactactgcaagaaacaaacacggaattctcgtgataaacggattagtacgaaggaaaaagtaaaatgcagtaaccaatttttatatttcgaaaaacaaggcattttggatgcaatgaaatatttagatatataaaattgactagtgacaac

SEQ ID NO: 51187 - DNA, 721 bp, Arabidopsis thaliana landsberg
aggacacaatatacacaaaaagatattccattttcgatattaaaaaaaaccatgcagaccaaccaaagtaactgcatagtcatacgtatctttttaagccattgaaaagtatgccatctttatattgtgtccgacaaatttttgtcgtcgactatccacaagtcaattattgtatgcgttctttttagaaagatgaataaaaatcgaagattctttaagctcatttcgctattttgggtcctaatgatcgatccctttctaccggcaacatgaagttgatgattatatgcttgtttgccatttacgatgaaaatcttttgaaaaggttaattcacagaagtggagcataacaatattgactcggacgtgtttcttgttgtgggaacacgaaaaaaacgttgttgaagttcaagtgctgtaatttaagtatagacattgttggagataatctgaagaagatcaaagctctcaagtatatctaaggaatctgaaaaatgtaaagtgattggcgtctgtgtaagatttggtggttaagtggtttatagtgtataacctgcaactagatatcaattgcgagttttgcaacctgcttttttgctatattaacgaatgaatctctgttagttacttgttctacagtcacaaacctactctgtggttttaaatttgaaaaactctattgtaccaaatggagtgaagtatcatatgaaatatcggaatc

SEQ ID NO: 51188 - DNA, 1639 bp, Arabidopsis thaliana landsberg
aatgctttgttcgggtgacttatgctttatagacagctgcttttgaacgcaagtcggaggcttcttttctagcagcacgtagttcctctagaagattctccactctgtttgtaacatcctctgctttcaccttcagattaaaaaccaaacaacaattgccaattggtcaccgcaaaagggtaagtagcactatgccttcaaacatggaaaggaaaagcagaataccttgagagtcgagcatagacgtgtcatttgagaatcccgtgagtttatgtattcaatgaatgcttcacctgcaaccgcttctatacgccggattccagatgcaatgccctgttctgagataatcttgaaggctcgtatttctgcagtattgccaacatgagtgccaccacaaagttccatggagacaccaggaacttctactacacgaacctgcgattaatgtaagggtcctcttagtcaagcgaaaccaaactgtaacactttatacaatctttaaattaatagtgacatatctcttacctcgttttcatcatatttttccccaaacattgcgatggctccagcacgttttgcatcagcaagaggaaggacttttgtttcaagacgtgtagcatccccaatccacctattgatcaggcattcgatttcctcaagctcattatcatgcagggaccgattaaaattgaaatcgaatctgaggcggtcaaaagctactaatgaaccagcctgtgatgtttcttgtcctactacttttttaagtgccgattggagcaaatgagtggccgtatggtgaacctggacagttgacaaaaaggatcaagaatttgataagggaagaagcagttgaaatattgggatgcaaaaggacattcaaacgtaccttcgctcgttgcctcaagtctgcatctactgctgcttccacctccttgccaacttctagagctccactttttacagtgcccttatgaacaaaaattttaagagacttctgcacatcacttacctcaacaacagctttctcttggttcccatcactgctaacataaagaaaaccatgatctgcaatttgacctcctgattcagcatagaacggagttctgtccagcagaacctctacttcactgccttcagaaacccttatcacaggcttcccattcaccaaaagacttttcacaacagcacgagcagagagactgtcatatccaaggaactcagtgtctgcaatatttttcgtcatgtcagcatcgtcttcaactgtcagttttacaacattgtgagcagcttgagattgacgtctttgattctccatttccacttcaaaaccattcatatctatactgactccacgttcttcagcaacttctgcagttatctccacaggaaagccaaatgtgtcataaagaagaaacgcatcttttccatccagataaggcgtatccttagttttatcagcaattgacaatgcatcgttaagcttttggtcaagtaacttttctcctctttccagagtttttttaaagtgaagttcttcttgcctaatctcctcaatgatgaaaaaggcctttagttttacatctgaatcaatatgagtgctcaactctatcaccttttcagcaaccgaaggtatggacgg

SEQ ID NO: 51189 - DNA, 818 bp, Arabidopsis thaliana landsberg
ccaggtaagtatacgctaaaaaaaagaaaaagaacaaaaaaaaactattttcagtatattaactaaaaccaaatcgaaaaaaactatgcactttttatagaattctgaactagaccatgattatgcaccaacaaataattacaaacaaaacaacacatagggaagaaaaaaaagatatacaacaatttattggctttacaaaaagaaaaaagaaaccagaattttattaataattatttatgttttttcacataagcattcacttggaaacttgttatttatatcgtagtctaatgaggaaataagaaggttatatcataaatcataataattaaattatatagtcaaattacatgcagtaacaaaatctcaagcatgagtgataatttcaactatagtttggctaaaaacataattacaaattcagtatcctataattccctatgtctcggattataaaattttctagataaaagcacacagtttaagaaaccataaatgttttatgtaatttttataatagaaaaaagattgtagaaatgattataacattctaataaacataaattatgtatgtatatttgcgaaaatctaactaaataagaaaaagtctaaaatatctaatataatgggacataattaggagtatcatttttgaaatctaatggtaatttctaaagtcaatataaaaaaaaaagagtaatattttattttttctacatacagtaaagtaacagctttcaattattgcatataaattatattcaaaatttacggccaaagtttgggaatatacttactttctttctaattttaag

SEQ ID NO: 51190 - DNA, 896 bp, Arabidopsis thaliana landsberg
tttttcaattctattcgaagaatcgatttttttatatgttttagattttcactaaactttccgttaaccatactgatcaaaaaggtcttatgtagttatatacatggaacaaatgcataacaagtttgaacgataaaaaacgaagtgctcctacgaggatgcaataaagttttcagaaaaagtgtttttataaacacgcttcgttatatataatactgatataagatttctaacatatcttaacaattatctatctattgttgaattgaagaaaaaaaaacaattatgtaaactgtttagaaacttttgggtaggtaaatgtcagcatcgcggggatggctttggtgcagctcacacgagagctgtcttgttacgtgcaatttcttaattggttggtagaaggataaaaatccttcatttgaaaacgatctacactttttggtttggagaaacatatacccttcttttatacacaaagattaatcacaaccattaatagaaaatcaattataaaaaaaaaaacaaaaaaaaaacttcacaaccatataacatccattgacgaatttcattaagtgaacggttgtacgttaagataagaagactgcagaagaaggtaatagatatgaggtgctctctcattggctattaccaaaaaggtctctgccacattttatgatttaccaaactctgccttttttccatgtcaacttctactgtaggtcccttactcacctgcatcttggtcagatcatagatttcacaaactgattgtgttgcagtaagatcgtagttaagaagcttcctaaatctaagaaggcttaacaaaacaaaatttgttgcatcttcaaaagacaatttgtgtatgtgtctatttgtatattgtgtaagaagacaat

SEQ ID NO: 51191 - DNA, 499 bp, Arabidopsis thaliana landsberg
ttcagcaagaaatatcatcggatgaccaatacgccgtcgtttcagaaacctccaacgtcgaagatcgttttcttcatgtgtttcctcaaaggaagaagaagtggaagatgacagcaaggagaaagtgatgcagcatcttttggaagcttccgatgacgaacttgggatccctaacacagattttggcgagagtaattatgaaaaggctaatgacggttacgtttatggagatagtttgttagatgggtttggtgatgcgttttgggagcttgaagacgaagctgctaattattacacgttgctgcagtctgagctgttcatgtagaaattatcctaataggttgggaaataacttttttaaaacgtaaatctggaagaataggccaataacaaaacaaaacatagaagattgtgtcctttttttttagtatggaagttcatttcatttttttaaggcacatttcttctgtttttggggagcttacaaaagacattttaa

SEQ ID NO: 51192 - DNA, 480 bp, Arabidopsis thaliana landsberg
attctgctatagctgaaggatcaaactcttcaaatagctttttacaaaaaagaaaccaaaacttctgatatcacaccaaaccaaaacacaaaataccaaattcaccgtcctaagtttacctaaagtcgtctcttctgcgtaggattgaaggccagctaaactcagccaaagcttgtgagaagacaagtagctcgaagagtttcttgtcatcacgaactggaacaccccattcctcgtcgtggaacaaaacatagatcgggtctgtttgatcaatcaccattattattattaactgaaaaacttacatatccaatgtcatcaatcatcttctacatttttttttgtccttatttatcaactacaatacctagtttttgctaggtgcaattaatgtgttgttgacatctatgaaaactgattgtaacctttattaactttaacgtattatcaaaacaaaattacatttcgaaaaccataaaa

SEQ ID NO: 51193 - DNA, 785 bp, Arabidopsis thaliana landsberg
agttacttgggaatccaatagagaaagatttatcatattgtaatataaaaagtcgtctttgatgacaactttttatataatagtgaattaacttgcctgctttaaccttttcaagagcttcagataaagctttcttgtgcttcttcttaaaccactacaataagtgaaaagaagaattagagattaattatggggttataccgaataaattttgattgcctagttaagaaaaagcgagatgatgcattaataaccttaaaatgcaaaagtaatagtactaaattaatgtgtactttcgtatcatttggagaaaagcaaaaagagagaaaggaagatttggaaatataaaaatgaaaaatatacgtacgtgaccaataaagtgcaagaagtattcgatcatgatggaaatgaaaaggagaacgaagcaaactacagcaacagcccatgttggtgtttcctctagtgatcgctcttttattgccattaatttcactgctcaaaactctttttaagttgtttttgttaaactttaaactcttaagtttcttagcttttagggtttcgcaagtttatctataaggggaaaagtagaaagaaagtgatatggactttgttcctgttatgtctctatatatacataattcaattaagaacgagatgcctatacatgagttgatgttatttctttgtaaagagaatgaaaagaaagtcaaacaagtgaaagcaaaaattatttattaaaaaataagggaagcgaagacatttggctaattcaaagataccga

SEQ ID NO: 51194 - DNA, 1456 bp, Arabidopsis thaliana landsberg
agggttctgtgttcttacttaatctggattcgattgaatacatcagaggaaggatcgattccctgagaagaatttgaaattcctcaatacaaaacctaacagaaagatcagatgaagatggcgtaaaggtacctgagagagaaacggaggattggattcgatttttttccggtgacagatgaagacgacacgagtggttgtagaagcactcgctacattgagagctaattggaagagcagagaggttttgcctctgtagagaggaacaatgagtgagacagagtaaagagagaatcaaatttaagagaaaagcgtctgaggaagaaagatacgaggaaattggaccggagagaagcgagagatttccccgacggtgattctcgtcgccggagctccgcttcgtcgggaagaatctctctaccattttgtatcaaaggccaaagggaaattgaagcatcaacaataaaaccaagctcctaaaccggaaaaaaaacttcggttcggttgaattcggagacggcaaatttcgatttggttcaggttaataattattggttccgaattggaaacctggttcggtctataacaaagccatcaaacaatttcggttcggtatacttgtgtggttgtttaatgtaaacatccatttctttaatccattatccattgattcaaacccatttatgtaacaaagcattcaatctatagacaataaattatcaaacacaaattaatatttaaggtaccaaagaaacgtcatcgtttaacttcacacaattatacctttctcaaataaagggcacaattttttcttttcttttcttttcttttaagctaccttaattatgttatgaattagatattcaaaaattacaatacaaagcagtgtctaaatttttaaaaataattagattattattatctcgattttgtttttggtgggctattatcttaaaggacaacatctagtttaagagtaatcaatagttttccttaccaaaaaaaacgtaatcaatagttttatatgttttgtataattataatttaaatattttttgtcatcaatatgggggcttaaatttggatgatgacgcatagacgtcgttaacacataaactacaaatgtttagagatttgagattttaattaaaaatgtttatgatcactaagctcctttttctcaagttatttattataaaactacgtaactttaccttttccgccatagttgaactttcaaaccctcattagaaaatgattataacagtgaattaatctagtacttatattattttaattgctgttgttgttatagtggcatccaatgtttgttggataattatttcatcaacaaggcaatattaatatacgtagactcttcgattacttgtcattgattattaattacacgaacaagctaaactactcaattttggagaaacaaatgaattcaatt

SEQ ID NO: 51195 - DNA, 668 bp, Arabidopsis thaliana landsberg
atattataaaaacatgagtacctctttcaacatgtctaagtaatgtttttattgatcacttctatgattaatgtacttttttaattgcctaccaatttgttagacgttgcctccattggtcaactcttcacgtatcacatcacatgtctacagaaattgggcggtaaaaattccgtgaatcgtatttggtcaacattattatatgatttaatcatataattatatttcttaaaactttcgaagtcagcatcggtgaaaatagttatgaccaactaagtttgatcctaattaagacgtacaacaaataatcaatgataacaatcttagtatatattttacttcaatttggaccatcttctctcaacattgtcctgaaattccgggaaatgatggggcaattttaggaaaatgggcttgttcagttgtccattaaatcattattaaagagcataatcaaattaaaataagcttgtcttccgaaccttccaatcatgtggttcaagtataaccacacatgaacgtataatttgtccgacggaaagtgcggctttgtgactatatttattagcatgctcaattacattttctttgtttagacgtattataatcaaattataataacattgattttagttaatcattggatatcaaaaataataaggatataa

SEQ ID NO: 51196 - DNA, 1248 bp, Arabidopsis thaliana landsberg
ggcctacctttcatcaagatcatgtccttcattttgttattatttaaatatatgttagtccaacataatttgtctaaaaagtactgcataagattaatcactattcggtaggtgtcacatataaggttaatggcaatatatgttcagaaagtaatgattttgaaacttcataatttctatgatgaaatatttttccccattctcggtcatgcctcttattcataaattttcattttcttatttttaaattgcatagagttatgattttccattattcaggtattaaactacaaattgaaaagtgtattaaaaaaactacagacgggaaaataaatatacttaccaaagacaagaacaagaagagaaaccaaaaacaaaagctgaaaggaaacgttcttcatcttccaaggaaaactgttacggtgtattttgcttttagtgatgaagcttaagtaatcttcgtcgtttttttataatgcaatgtacgtggtgggattttaaccaaaagaaggagtgtacgttttgggtttgaccagaaaatcttaagagttaatactaattgatttgagtttgactacactaactatatatggtacgcggtactatactactatatatttcaaaactgctgatggaataaaatcaaatgttaaggtaagttaacatgtattatctactacaaaatgataagattatatcttcaaatttgatacacgattttttcttattaaatgagttctctgaaggcctcacaaatataattagctaatgaaagcaagccacgtgtacatagagactgatggagggaaaaaacgttgaattgaggaaactcccaccactcctaatcttctgatcttaggtgaaacgatttttattctcctttttttttgaaaattgattatctattgaataggcacgagaacgaaaaataaatacacaagtttccaaacacacatgagtgaaccaaatcattataggaaaaaggagtaaatcacgacgaaaaaaagagaggattaaatcaaaccatttccaaaaggccaaaagttgcttgacatagggcctttgttttgatcaatagcaactgcaatttcaattatactacaagcaaccatgtatactgtaatctttcttaattatgcggacataaaagttgagtcgccttcttagaaaataccatactggcttgaagagaaagttagggtttgttccataaacgacatggcttcaaaatcaagcaacagtgatatg

SEQ ID NO: 51197 - DNA, 617 bp, Arabidopsis thaliana landsberg
caaataaaatggtatattcacttgaatccaagtaattaattcactaaaccaactgtgatgttaataaagtggggaaaagggatgaaggagagattaaaatccctgaatttactgcgtgttaaatgcgctgtctttattactattttcttaattaatcttttccttcccaaattttggctgctttgaatcgtctctagctccgagaacccaggttatacacacaaactaaactatacgaaaacaaaaacaaagaacaagtgtgaagccaaacgcagaattttgggaaaccatcgcacaagcttccatagatttctctcttgttccttcccgttttttcctctcccccatatttctgtccagctgcgcctcactgttccgcgatccaatttccttttccagcaggtttgattgattttgttcttcctttgtgagatcggattcatgtttgtggctatatatatatatatattttttgccttttagatctttgtttccattttgatcatttcagctgactatggcattatatcttctgctttggattgcttgttagatcaattgcaaaacgttgcgatagacgaaatctcgaatcacgcaatcaattttaaacatgttaa

SEQ ID NO: 51198 - DNA, 571 bp, Arabidopsis thaliana landsberg
  unsure (1)..(571): unsure at all n locations
ctagaggaacccctaaaaaactctaaaaaagaaaaaaaaaagaaacgagaaaaaaaaaaaaataaacaacaaaaaaaaaaaaaaaaaaaaaaaaaatctataacgaaaccannnnnnnnnnnnnnnnnnnnnnnnnnnnnnnnnnnnnnnnnnnnnnnnnnnnnnnnnnnnnnnnnnnnnnnnnnnnnnnnnnnnnnnnnnnnnnnnnnnnnnnnnnnnnnnnnnnnnnnnnnnnnnnnnnnnnnnnnnnnnnnnnnnnnnnnnnnnnnnnnnnnnnnnnnnnnnnnnnnnnnnnnnnnnnnnnnnnnnnnnnnnnnnnnnnnnnnnnnnnnnnnnnnnnnnnnnnnnnnnnnnnnnnnnnnnnnnnnnnnnnnnnnnnnnnnnnnnnnnnnnnnnnnnnnnnnnnnnnnnnnnnnnnnnnnnnnnnnnnnnnnnnnnnnnnnnnnnnnnnnnnnnnnnnnnnnnnnnnnnnnnnnnnnnnnnnnnnnnnnnnnnnnnnnnnnnnnnnnnnnnnnnnnnnnnnnnnnnnnnnnnnnnnnnnnnnnnnnnnnnnnnnnnnnngttttaggga

SEQ ID NO: 51199 - DNA, 909 bp, Arabidopsis thaliana landsberg
ttaccaaaacgtgtaacaacaattatgcaaatatgaaatatgaaatatttcataagactattctaaaagtttctaaacttagatttggtcccaaaacgaatataatcaatacaactctcgctcttgacaattggcatagaaacaaacaatttcgaggataactatttacccctttgacgctatcttgatgtagacaaagaaacacatgtgcttggaaactatagtagcatgtaatatcacatgcatgtgccgcaaactttttttttccaaataattgcatgcatccccttattattaggatgggccgagaaaagagaatcattgaatcaacgccatataacctaaattattggtgcacagaaccttaaataatgatgataaacctaaaacctacacaaactatggcccaagagtttcgtaggcagctccctatcgtaaatagacaaactttattgcgggaaattggttaagagaaaaaacgatagccaaaatggacccaaatctactgaattagaaaagaaactgacataaaaggaataacgttttatgtggatccaaatatcataccaccaggtcaattacattgctaatgaatttcaaaatttaaaagtaccataaatatttttgttgcttacagtatttgtttatgactgtaaaattaatgttgtaatcattaggtcttacaagaacattaattttacagtcaaattttttttttgcttacagccaaaatattagagaacaacagaaacaatttacagactattttctacagtaaataatttaatgttaaatgccaaccaatcatcctttacccgataaactttatatcatcctaaactcctatcaaatttacacatcactttagatatattggattgtaatgagtacgtaacagtgataatcatg

SEQ ID NO: 51200 - DNA, 992 bp, Arabidopsis thaliana landsberg
gctccgagcccatttatatatcctggttaaaccaatcacattttatttttttctctcggtaattaatcaacaaatagtttcaggaaaaacgaaaaaaataaatatatatattatcactctctttatcattggtaatgaatttacatatcaattgaagtaacattatgtatgtttggtatataagttaggcagatatatattgtatacgtattcaaagttgttagttttatttcaaacacactcgaacaaaccaccatttcgttacgagagtacccaatttggtttgatgtatctgtttttgattgtgatgtacgcatacatgttgtacatacatataaaataatgtgcatactgatatacatgtataccggtatacgttacgcataatctaatttctaggttcagtaacaagaaaagactaatttataaaattgagatagaaaaagtaaaaacatgatctaagctaaggttacagatatataaatgataaaatgtatgctttttcatggccatgtgtaacatatcttataacgtagttcaaactcataaatgttaaacaaaaattcaaactcatggtggtttgatttttttttttctagctgtttggtcctattgaatattgatcctattcttcatcgagaattcctaacaacgtaaaatctaattattcttataccttaaaacaaatttaggaaattatataacatttttggtgatgagataatacaataatagtatatagtacataggataccattttttatatttccacaatctcaatggacctaatcagaaaaaagaagaatgaatttggttttattttttgcttttctaatataagctaacaaaatatacagcttgcttagatatatccgcaatagaagcttcaggttgggactgtgtaacgacaacaagacatattcattaaggtgtttaatttgattttcgaaaacatattatgaaattcgcatgttccatgcccgaggatgaaa

SEQ ID NO: 51201 - DNA, 635 bp, Arabidopsis thaliana landsberg
gggattttatagtcagctccaaaggctatataaattttcctatagcccaactaaatatattattttattgggctcacttacttggagtcttggacggtttaacaagtttgtactattgtttattattcacagcctattaacataatttaatcctaatgctatattaattaaatagattatattcaattaattagttatacagcaaacacaggagctttctgtccacatgcacgaccaccatgcatagtcccttctttacggtctatattcatttgacctcttcatctatataatttcatttattcccctaagattattataccaaagtgaatagaaaaaaaaagaaaccgtctatgcgtttagtttttccccaaattgctataacttaaatcatatagatttgtagagaaaatatcagaagaatacgaaaattaaaagtatgagtatttttttattagctgaaaaacgagaatgcgagaatttttataaagacaactttttgtttcgaccttttttttcttcttcgcacgtgttccctaattcacctaactacaagtctacaaagtacaaaacccactcaccatccacacgttacgattttgtcgtaaagtatatacgattattcatttcttttc

SEQ ID NO: 51202 - DNA, 701 bp, Arabidopsis thaliana landsberg
ggaggagagatattttgaagtgtcgcttgcgggccaactttgaattgctacttctatgattaaatctatgtctctactccttgactattaagattgctctatttattagtactaaatattccttatatatgatcaacgtaagtcccgagtatttctttaaattacacatgaaagtataaatttacatgtgaaagtggaatagtgtggttccacatcaatgagattatcagattaccttccaagtttcaatcgaactatgttgtggttccttgtagtttggaaagtaatctcatttgatgttattggcatagtgtagtgagtggattggacggtgatggaaaagactcatcgagaggtcaaataaagtggccatcaacctcttcataaagaaagcttttacaacttttgtgtttcatgcgcatttttgaaacacatcatgacgaaaataagtttagtttcgcagaaatctatggagaaatctaatctctagatttcaaactagcatcatgttcaaaagtaaggttttagaccatctttataaaatttttataactaacaaaatgatttaaaaacttttatttaagaacattttgggctagtcctaaagacggggcctcttacacataaaaaaaaagtgtttgtaaaaaaactccatttaatcaaataaattatttttttaaaaatccatttcttttccctta

SEQ ID NO: 51203 - DNA, 1053 bp, Arabidopsis thaliana landsberg
tacggtttatctcttggattttaagatctattgatatctatactgtattgaatgagtttggtggatgatttagtttattagaggaatttaagttgcttagctaatgtgtcatttaatgagttactcttcattgttattaggttttctatgaagatggtgataaagagaccttggatctgaagaaggagagatgggagttgattgaagaagatgatgctgaatctgaatctgatgaggtagatattagacagtgtttgtttaatcatttattgtcgattttatcctgtgtatcactagcttttaatggttcagcattcttttttttccagatctccctacaggaggaatctgctggtgagagttctgaaggcactccagaaccgtaagtttgcccttatcttcctacctgttttagacatcgcaaccttgagtttctctttatacttaactagggttatgatttagatcgtgtgttgtatcgtatagtaccgattgttttaatatcactaacagtcgtgatttacgaacatgagtgtgtcagatacacatatattcatggctgtggattgtgtccctgaatctaaagatttaggagtaagtaattctgaatgatctttgttgtctaaactctctacaggcctaaagggaaagggaaggcatctttaaaaggaaggacggatgaagctatgcccaaaaagaaacagaagatagattcttcatcaaagaggttggttatgttatactatgcattcttaaataaacaaacgtatatatgcacacttccacgctcacgtgcgagttcaacacagttacgcattaaagtcagcttaccttgtctctgcttcacacgctatggagttgaattcatatcatagagggagctatagagattatagtattattgtgatgctttgattctgaaaatctaattacctcaattgtttttacagcaaggccaaagaggtggagaagaaggcctcaaagcccgaaactgagaaaaatggcaaaatgggtgatattggtgggaagattgtaacaacggcatcacgcatg

SEQ ID NO: 51204 - DNA, 526 bp, Arabidopsis thaliana landsberg
tcttataatctttgttctaaattgttgagacagtgatccagcaaaacgaccgtcgttcgaggaattaattagtcagatgatgagcctgttccgcaaaccagggtcaggtgcgcaagaagaagacgattgagaaggtaaacagtacatggttaaaggatagttcacaaagcaaaggacgtgaaaagaaaacgaaagcatcgtcctgatcacttactatacaaatgtttcattgtgttataccaaactactatatatgttttcattgaaagaaagaaagcaaaaatagctaaatcaaagtaatacacaatagaatcttaggttagtttagttaatctgtgcattatataaactgttgtcggtttatgagctaagttgtaaaatgggatctaaaaaggcagaggccagaggaggactcagatgtaatttaagaagtaaaagggtgaaaaagagatatacgagaaaaaccgtgagattgatggtgtcttgtagtgaattgtaatgtagctggttttggtttgatggggta

SEQ ID NO: 51205 - DNA, 892 bp, Arabidopsis thaliana landsberg
gagaggggcttgcttataattgatgctgatcattttatatgatgccagtggccgcggtaagaggagaagagtagaacaagagcaccactcagatctcaacaacgagactgcaggtatattgtactctcgatcggaggcttgcattgatacgacgaacaactagctagatacgtgtacacttacgcaattctcattgttttgtgttggtggtcagctcctacaggaggatcagctggtgaggaaattgttttgccttttaccaagactttagcttcgtggaaagagtttgagtctgatgaggtctacaaaagaacaccacaacgtcctcacttaccatcattggcttacacgcatccaagttttggtgaaccgactgcagcctatctgactgcagcttttatcgattgtgtaaagacagtagatggtatgtgtgaggacactccaaaaagtgaactagatgtctacagagagacatttaaaatgttcgaggagcatggtttcgacgttgcagaacctttatcacaggtcctcacgctgttagttctccgcaagatgagacgtgaatccctcagacaacaaaaagggatggagaaagagatggcagatgattatagcaagctgaaaaagagtctggtgaggtgcaaaagcagctttgaagacaaggagacggccaaataaaagatatggggtcatttcatgggtgtggttggatttatccttataacttctgtttttatttaatccttttttgtaacaactctgttgtacttgctactgcttgcctttggctgcttgcctttctatttatgtgatgccccaaggacctagagtttgcttatttgtgtggaatttgaaattcttatgagttatgagacaacttaagggtgatgga

SEQ ID NO: 51206 - DNA, 1947 bp, Arabidopsis thaliana landsberg
tcgagtactttgtcatagacactctcatgcaaaagcttaaaatacaagaacaacatttagagtattgaaccaaaggaatagtagtagcaacaaagctaaggggattagattttgttaccagcctacggcaagttgtgcaacgttgaccagcagttccaaccgcagcgaatagaacagatcgagccgctaactgtatatcagcatcgtccatgactatgattgcattgtttccactcaactcaagcaaagttttcccagatctcgcattcactgtttgttgtaccattgagcccacctatgcataatattcaaagagaagacaatgatggaccagtaggctcagtgtgtttggttgggaggtggaatatagttaaggaagtaccctggagcttccagtaaaggatactaagggaatgcgtgtgtctttggctattgcttcaccaatttcagcaccaccacacatggccgtaaaaatggcaccgggtaagttgtttttctctaaaacttcagctactagcttggtcattgcgatagttattaacggtgtagttggagcacctttcctgtggaatcacatgtatgatgtattaagtattagctacaccaatcaaaccaatacaaattttcattgtcaagattaatattgtgttactattatgaaacgcagtctctcagcaatatgtcagcactatgttatatgacattaaggagacgtttatgcaacatttgaggatcaatggaaatagacagcaattgtaataagtatatatcgataattccgcttcttatagtaattttaacctcttacaggaactactaggttctcaaagcttaaatcagtgtcaaagtcgttatttaccagactacacagtttccacagacaagagcaatacaagcattccaacctgcaataccacaaaaaatttccattaacgctgggaaaagaaagcagaaacacaaaaatttccacattgcattatcagttataaaacttctcaacatggcaaaaccagtgtggcaaatctagttgccacaatacgagttagttcatctaactctattgtgtccactttcatgtgggaattatagacactgaaattgcagagctacgaagaagcatgacagactttaatgagcaatctcacgagacatcagtgttatattgtttctatgttttgtgtgacgcactcataaagatttgaaattagacagaagacttaccaagaactgcacagggaaaattaaacgctgtgataacaccaacaatgccaagaggattccacatctgcgttacaatgttcaagccgaatgttaatcatgtcctaagaagtggatctacaaaactttgacaaaacaaacttgcaattcacctccaacatcatgtggttagggcctgcaaccgaaaaaaaatgatatgagttagagaaaatcctttacataaaaaaaaaaagcatttgcaactccaagtgccttcaaggagatatttgaggaagataaatctaatctaggaacaaaatgttaacagaagcaagaactcacgttctgaaggtataaccgatccattgagttgtcggctcaaaccaacagcaaaatcacacatgtcaattacttcctgcaaagtatgcactaaatgtattaagctatatggaaaaagtagcagctaagtttcatattagctatatcatagattcataggttctgtcctttgggtaaaatgtgtcacaaagaaaaaagtagctaaagtcaaaatgtatgaatgaaaaagaaactaagtattggagacggagtaaagatacctgaacttctccaataccttcagcaaggatctttcccatttcaagagaaagaagacgaccaagatagtcaagtttggatcttaaagcatccccaatctgtctgacgatatcacctctcttaggagccgtaacctgataaagataactccac

SEQ ID NO: 51207 - DNA, 307 bp, Arabidopsis thaliana landsberg
tatgagtcaggctaccttctataataaattctaaaaaaacattgatatctcaataaaaaaaatcatttatatgtaaatctcatagttaatgttatagtaggatatgcaaatcaatattgtaaatcttaatataattaataattatatataaacaaatatactgtatatatctctctatatattgtatatgtatgtatggcacatgttaatttaggaatttagtagagctgaaaggagaaaattaatatttgttagtttgatggcatgtatataatatagtatccaccatattaaatatttttagcga

SEQ ID NO: 51208 - DNA, 574 bp, Arabidopsis thaliana landsberg
  unsure (1)..(574): unsure at all n locations
acacattttataaacaataacatactgataaaacaaaccatttgataaagtatacgtagtattcaaatcaagacactaaattgacagcgattacattcaaattattcttgttttctgtctttcatcaaaagggcaatgataaagccacataatcagggctggatctgagtgactgcaaaatatccaattaggatttctacatcgcagagatcaaatcaacgcaattaaaaaactttacggtgaaatcccgattaaattaggtcaaatttcaacaatctaacggaaacaaattaggtttatcattctttgaaatttgagattgacacaaaccttttaaaaaatggacaaaattaacgattaccaacgaaagaacccgattgatgcgaaatcaaaatcgatctacgaggaaaaatctcagaagcttacctgagagaaattaatcgacgagataaggaattttgagagggagagataatcgcagcgtaggtcgatgacgaagaacaactaaatacaaatggcgatgaactagtcttcttagggtngggtgtatcgagtgttatcaattgggccgggc

SEQ ID NO: 51209 - DNA, 969 bp, Arabidopsis thaliana landsberg
ctctcagtctcgacagattccatctggcaaagaaataacaagtgcaaaaatagattatagctaagcagaccatggctttatcatccctaatacctacatgcagtgttggaaggaatccaattagtttacttgttttgtaatatggatttgcattgatgggagcaggtcaacgcaacaaaattcaactcacattcaggaatactataacaatgcattagttacggcccaagaatgtttcactgaaattacagttacttaactctggttataaaatacaatagcaagacataaaagtcatcctatacaaaaccaatctataatcttagaaatagagaaatccctagacagctcttttaccgtctcatacacacatattttattttctatataccaaagtttctagaccaacaaatccagaagactaaataaatcttgaaaaccagacaaacagatgacactcatacctcagcaatcgcagcttttgtttcattaagagcaaagtgagatgaagcaatcttgaatctcacctaaaaggaaagttagaaaaagaagatgcacatgaactccaatgaaattaaaccaaaccacatcactttctggaaactgcaacacagttatttacctcgttctcattaatagcagaaatgctggaggcattcacagatgatctggtagataaagataatgaactcctcgaaataccggagctttgcttcggaatccttgtgtaatgatgcaacgcttgcttgtacgtatgctgacaaaaagaaggaatacatattcagaatttcgagatgacttcaaagtaatccacagggaaagaataagcaatacaaatataaaacttatctctgctcactccataaattcatataatcaggaatctttacaattttaatcataattcaggccaaattcaaagttccggggaatggattatagaggtcaaatttgaggccagaactaaac

SEQ ID NO: 51210 - DNA, 518 bp, Arabidopsis thaliana landsberg
  unsure (1)..(518): unsure at all n locations
ggctgcggatcgaccagggtgctggtatagatctcatctattgttttttggcaggcttgtccgcagtggcgtggctagcaacaacgtcctggtaaatctgtggcagactgctggtaccagcgaaaacgcccgttccattaaacgccccccagatgaaatttttagtggccagcttatacagatcggtcaaatgttcaaatttaattccacaaggcacaccgttattagcggctttacagcccagttttgctgtcgccgcagtgacatagattgtggtcccaggacttgggaaataggtttgtccagaagatgtttgcgggtagtatttctttttcttattaaannnnnnnnnnnnnnnnnnnnnnnnnntaagaggaccgtatatgcagacaccttcattcaacatccaacctagaccaacccatgtggggcattacgaaaccttgatacctccggaatgatataataacgtcagtggaaggtctatagcgccggatttaacatgatacaagtccaac

SEQ ID NO: 51211 - DNA, 2418 bp, Arabidopsis thaliana landsberg
atgctttgctcatagttttacaacgcccctatcgttctcaccaccaaagcactcactcctctcctctctctgacgatgcatcgacgttcgagctccgcggagccgctactgtgttacggcgatcagaagatcagacttgggagctcgacgctctgagatcctctcattctgttttcttgggaagatatggacgcggcggcgtcccggttcctccttccgcttcttcgtcgagttcttcgcctattcaagccgtctccactgtaagattcgataccctctcttgatttattatagttacaaggagttttctgcttatggtcgtgaaaaattcatgagatgctttttgaatcgccttcacgaatattcttaaaaaatttatgttatctgagattctgattattatcttagtggaaatgattactggattatgataattgatgcagctgtatcgtgaaaatcattatttattcggtaattcatagcttttcatattggtgattaatattttatgaaattgagtttaggattaaataagatatagcagtgtgagagagagagagattcagtgatgcgttctcatgtttgattttgtttttttgtttctttttttagcctgcgaagcctgagactgcgaccaagcggagcaaagtcgaaattatcaaggagaagagtaatttcataaggtatcctttgaacgaggagcttttaacagaggctccaaatgtcaacgagtcagccgtgcagcttatcaagttccacggtagctaccaacagtacaacagagaagaacgtggtggaagatcttactccttcatgcttcgaactaagaatccatctgggaaggtccctaaccagctctatttgactatggatgacttagctgatgagtttggaattggtactcttcgtttgaccacaaggcagacgtttcagcttcatggtgttctgaagcagaatcttaagactgtgatgagctcgattattaaaaatatgggtagcacgcttggtgcatgtggtgatctgaacagaaatgttcttgctcctgctgcaccttatgtgaagaaagactatctctttgcacaagaaactgctgacaacattgcggctcttctttctcctcaatcagggttctattatgatatgtgggttgatggagagcagttcatgactgctgaacctccagaggtagtgaaggctcgaaatgataactcccatggaactaactttgtcgactctcctgagcccatctatggcacccagttcttgcctagaaagttcaaggtcgctgtaactgttcctacagataattccgtcgacctcctcaccaatgacattggcgttgttgttgtttcagatgaaaatggggaaccacagggtttcaatatttatgtaagttgacactcatttagcctaatgtgctattatatatatttagtgtcaggcttgtatgcccgccttttctttcagtattctttttctggatactttcttggttttaaactaatgatgataatgactcatcttgtaggttggtgggggtatgggaagaacacacagaatggagtctacttttgcccgcctggcagaaccaataggttatgttccaaaggaagatattttgtatgctgtgaaggccattgtagtcacacagcgagaacacgggagacgagatgatcgtaaatatagcagaatgaaatatttgatcagctcctggggaattgagaagttcagagatgttgttgagcaatattatggtaaaaagtttgagccttcccgtgaacttccagagtgggagttcaagagttacttgggatggcatgaacaggtattgttactaaaacccttttgaaaattgcgtcactttcagaactttatagcatggcttaatcaataaaatcttatcgtcgttgtgtactgatagggagatggtgcatggttttgtgggcttcacgtagacagtggtcgtgttggaggtataatgaagaagacgctgagagaagtaatagagaaatacaaaattgatgtccgcatcacaccaaaccaaaacattgtcttgtgtgatataaagactgaatggaagcgtcccatcaccacagtacttgctcaggccggcttactggtaagcagttttatttgacccataaggtatgaaaatctaatagctattgtgtcttaagctgagcaaaccattgcttatttgtgcagcaacctgagtttgtcgacccattaaaccaaactgcaatggcttgcccagcttttcctttgtgccctctggcaataactgaggcagagcgcgggatccccagcattctaaagagagttagggcaatgtttgaaaaggtaagatctctctgtgcacttatctaatcttgtgccattacaggcatttgatattgatgtgccaaacttcttccttga

SEQ ID NO: 51212 - DNA, 782 bp, Arabidopsis thaliana landsberg
tgtttattaaaaaatcgtaccgtcaattacaaaccgaacttgagcttaatatttaaaaactgacattagtttaaatatgcggacgtattacgtatatcatatgataaactataggtttatcttttaggttcaaagggactagcagtttatataatattgaagggcttaatttaacgtatcaattaagtcttgtcctaactaattcattaaataagtataacaatattagaacaagcaatctaaaaaacgcaaccaactaaattaaataaacataaccttttcatccaacatacatttttgaacccatcaatcaatcatttagaatttagaaaaatgaaaaagaagagttggagttatgataataaataattttgtattaaacgaagttggactattcctccacaaggcgtcacgtatgggggcacatagggcttgtcccaacaagatgatagtgacatatgagtttggtataacattgatattctagaacacctactatcttgttattgtgtgtgtatttatctgtttgtattcgagtttttatattttttgaggataaaaatcggtgacacgtggttgcaattgttagaaaataaaattcaacggtgcaatggttggtgttaatagattttgactagggtgtgaactttacgaaatttttgattatttaaattgggaatggaatatgagattttgccaattttctttaaaaaatgtagggataatacccaattacattaaattggaagcattttacccaaaaataaaataaattggaaggc

SEQ ID NO: 51213 - DNA, 463 bp, Arabidopsis thaliana landsberg
  unsure (1)..(463): unsure at all n locations
cccccccccccccncctccccccccccccccccnntcccccccccttccnntttctnncccccccccccccnnnncccccccccccccccccccccccccctcccccccccnncccccccccttntttcttcccccttagatcgcccccccccncncccccccccccccccgccccccaaaattacccccacccccccccgtctttcccccccccccccccctcccccccccccttttctcccccccccccccccccccccccccccctccttccccctccccccccccccttttctcccccccccccccccccccccccccttccccccccccttccctttttctcccccttcccccccccccccccccccttcncccccccccccttccccccccccccttccccccccccctctcccccccccccccccccccccccccccccctccccccccccccccc

SEQ ID NO: 51214 - DNA, 1430 bp, Arabidopsis thaliana landsberg
cttttgaaactattaagcatactttgaattttatattctggttataaattaaaagatttcccaatatctatttttatttttgggaccactccaccaaaaccaatctaatcaaaatataaaaccaaataaataataatttgcttagagatagaaaacatgttatgtccgaggaaattgtcctaaatgtcgcaacaaacgtcaattcattaatcgttttgtttaatacaaatttcgacaagattgtgatagatccagaaccagtttagctaaaccggttgaatcagaagaaacgccaaaaaccggtccaatagctcaacctaacgccgtcgttttcaaagttccttcactctacttccttctcgcttacgtcactttccacagatccaacaatgatatcagataaaattaaaatattcccaatatattttctaagaatatctccctatttgtttttatttatttaaactattttaatctcttccgtgtttcactcttctctctctctctctctcgcttctcttcattgtttctgtgtgattacagcgaagaagagagaatccttggagcattccatggattcgcttcgatttctccggattcttctactattatcttcgattttactcttatctctccgttctacagtcaccgccggtgatattgttcatcaagacaatttagctccgaagaaaccaggttgcgagaatgacttcgttttggtacttatctccacttaaatctctcgtttcttacttcgaattcagcttcctcttcactactctcgatactaatgttgttgttattcccctctttgtggcttcttcttacgaagctcaacaagtagttccaaaaaaacgaaatcggaggtttctaattatacatgctattgaaatttcgtgattggagtttaagcttactgattagcttgtgtagttgatctaagttatggataagcttaaactcttagtttaagtctaattatgagtcgttcatgtttaaatctgatatgagaagtgtttgataaattggattaagatctggtgaaagttttatgtgtgtgatttgttgtaacctggttctttccttaggtgaaagttcaaacgtggattgatggtgttgagaatgaggagtttgttggggttggcgctagatttgggaagcggatagtttccaaggagaagaatgcaaaccagactcaccttgtttttgcaaatcctcgtgattcttgtacaccgctcaagaacaaggtttttatgacctatgacattagaatcaatgcattttaaattagttgtgatgttgaaagtaaatgtgttaacttatgtgttcaatctttgttagctttctggagatgctgttattgtggaacggcgcaactgtctgttcacagtctaagcgaataatgcatatgctgctggtgcctctgctct

SEQ ID NO: 51215 - DNA, 162 bp, Arabidopsis thaliana landsberg
tatttattgttgtgtacgttagatgttcttttttttttttttttattttccagttagatactaaaaagaaggttaagaggcataaagtccttcaacaggcacagcatggcccaaaagagcatgcaggccctaaatgttactaaaaatggtatgaacatagtg

SEQ ID NO: 51216 - DNA, 1029 bp, Arabidopsis thaliana landsberg
gccccttttttacacgagagagatccacaaaaaggaagcatatacattcaacaaagacatgaagttgcttcacacattctaaaattaaaagctttttcaaatttctcttagtactgataaccctcaccatacatcgtttcatagctttcatattcatgcttattatatctttttgatttatcagcctgcaagatacaagaaaagataagtaaagaagaatcacatttttttgtcaatgagaagttaagagatcttatagaacaaaacacatgacatacccggcttaagatcttctcaaaagcatcaggtccattctctgcaatgtacttctcagcagctgttaacacatcgtctggttttctgaagatatccatcttctttggcacataccaaatgttaatgctccgagggttaacaaacaccggtctcacaaaatgttcatagacataagcagcgccactaaagtagggaataacaagccagcaagtcaagatcagcttcatgttttaccatatcggtaacctgatcacacaaaaacattgtcagtataagaaacttgtttttggctaatggggtttcactcatcttaccattcgatgagtttggcgaatgtgagctcgatgagtgtaagtaatgaataaaggacccaataagttagccattgtttgtcatcagcatgagattgagtttcaatcgcttgaactgaagcatatctagccattgaaacattcaaaagaagataaaaccattagaaccttacttagatgaagtaaaaagcttttgatctacagattaggagttcacttacagaggataaacgagactaaccacaggcctgcaaatattcaacaacagagattgtgattaatttacacataacattccaaaaagatgaataatttataggaatcaaatcaactttgagagaattctcgcaacttaaactagggttatgtccaaaaatagaaactagagcctaggctgtgatgaattgagtatataacatatgagaagctattagccaaaaag

SEQ ID NO: 51217 - DNA, 788 bp, Arabidopsis thaliana landsberg
aaaaaattctgacgtgtattgtcttttcatttgcagtgcaggtattaaaaaataacgacaaggtaacacttttccaccagatatacgggaaaacagaaaataaaaaaagttccgtatacagtatactaaaggaaaagaataataataataataatatcacaaaaaataatacgtcagcaaaaatccggttgactcattcttggtaaaacatgaaccgaaaccggttcaagtccatcaggaatctcaacattccaaattttcgccggctccgccgcaacatccaccacaacaatcttcccatcaccagtaacaacacaaagtttcccggaatccgccgttacttgcgtagctcctttaagcatctcttctccaccttcaaccacaaccacttctctccactctctcttctcatcatcgtactttctcactgtccctctcctctcatccaccgaataaagaatctcctcctccatcgccgcaaccgggcctctccatccaaccaacatctcctccggcataggttcccaatcatctttaacgacgtcgtatatagctccttctttaaccgcgtctcctttaacatttaccattaaaagctttcttctatatccaccagcgtctatagcttctcgactaaaccgtaaatctctcatatctctcaatttctcccaattaaaccggtggttattccggttttgttcggttagatctaatttctcgacagatttcgcgaccgttgatgagaactcgagactaattccgcttgcgatgtagatagctccgtcgca

SEQ ID NO: 51218 - DNA, 2036 bp, Arabidopsis thaliana landsberg
  unsure (1)..(2036): unsure at all n locations
ggcaatgtcaatcgtgaatagaaaaaaatagataattgcaacgtttatagtactatgattactagctagtttccatattgatgtttggttgcatgtcccttcctaaaaaaaaaaaagaaacggctctcttattcgaatcataatcatttattcatatgtggaagttgtcagtactctatgaatttttcctttggaaatgtaattgcgcttttactgttttaaatttggtaaaatgtgaaattaagtgatcatttttaagtttttaatgataccttaaccttaatcacgtaatcacttttatatgacaacaaatccaagcttttgaaaaaacacaaactctccaacgaccgttatgggttgctccccctccaagctcgacggtttaccggccgtatctctatgccgtgaccgctgcagctcactcgaagatacgctccggcgaagctacgccttagccgacgctcactcagcttatctcctttctctgaacaccgtcggtccagctctccatagattcttccaacatgccgtcgagtctccgccggatgttgaatccgaagctgacgaatcaccggagacgtattctccggaatcctgttcctcggctcactcggttaccagttctgattccgatttgcctcccaagttcgattcggattgtgaggaaggtgaaggtacgaattgcgatctcttaagcggttcaaaacctgaatctctaaatcttaatcatgactcgttctactcccggagatacgaatccggcaccataacgccgcctccgccaccgccggctccgagtaattacgcttgggattttatcaatttcttcgagagctatgagcttccgtacactacggatgtcaatgatttgaaggatagagagaccactccttctcatgaagaagataagttgaagaagaagaagattactgtgagccaaaacgatgagaagattaaagtagaagaagagaaaaaaactctgagaatctcagagaaaaataggaagcgtgctcctaaagaatcaaaggatcaaaaagtttcatcagatttatctgaagtaacaaagcaattgcaggaaatgttcaagaaagcttcagaatcagggaatgatgtttcgaagatgttcgacacttccagattcagatactaccagcaaagctctgtttatcaatgtaatgttcgagttcttcttccttcttcaaacattctctacacgaagaaggtgatgactccatttgatcccaaaccagtggaagaatctaatttcaataatctttcatctactctgaagaaacttttcatgtgggagaagaaactgtaccaagaagtaaaggtataatcaaaatgctctgaatggattgaagcaaaattatctaagtgttttatgttccttaagacttttgatttgttatttacaggctgaggagaaactccgaacatctcacatgaagaactacaaactattgaggagattggaagcaaaaagtgcagatctaagcaaaatcgaagctattcgttcttcgattcagtgtttgtctacaagaatgagagtttctatccataagataaacaacatttgtctgacgataaacaagttacgcgatgaagagctctggttccaaatgaaagagttgatccacaggtactacggacattaccataagaattttgtttgagaaatctcatgagttaactcagcttgttgtgtctcaatatttaggttgtctgagatgtggaactctatgctagaatgtcacagtagacaatctaaagtaatcgcagaggctaagaagcttgataagatgacaataaaggagaatctagacttatctcagcttgagcttgctatggaattgaaactggagttgaggaactggagtctaagcatgtcgaactggatagatgctcaggctcagtatgttaaagccttgaacaattggctaatgcgatgtttaaaacaggaacctcaagaaccaacaccagatctctcagaagagccaccgtagtttggtgctaaaaacacccggtccccnaac

SEQ ID NO: 51219 - DNA, 796 bp, Arabidopsis thaliana landsberg
  unsure (1)..(796): unsure at all n locations
ccactacctatccttttctttaatggcgatgtctctaacttctactatccccaacacacactgttactcttggtcttcttctctgtcactgtctattctctcttttggacctttcatggctatgtttctctgcaatggaagtccaagctcgtgatcaccaacaccgacacgctaatggctattggagatagagctatgtttactgttttgcttctattcattgcttcgatctctggattctctgttgttcgttgtgttactgatccatctgatggtaaagtattcagctttatgagttttcttcttctctgcttttaacctcattgttttgattgatcatctatgtgatttgagagtgaagggtttttaaaagttgattactttagatttagaagatgaaacccttttgcattaatgtagatttgatgatttttgacaccgtctgttttcctgagaacccgccggaaaataatatttctgctttacttacttttttagctcaaaaaggaaagttgtaaactttatgaaagatttttcttctttcttgatagatcctttgatgtgtttttctgacttgtgagctgttttcttctttctggtattattgcagttcaagcccttcaagttttgtatacttcactaaatagtccttcacagctaaccaattggaaaaatggtggtggtgatccatgtggagagtcatggaaagggattacttgtgagggctctgcagttgtcactatgtaaagaatcaagatntgagtattatttttgttctttccacttgcattgattt

SEQ ID NO: 51220 - DNA, 453 bp, Arabidopsis thaliana landsberg
aaccaagagcattattcttccttgagagggatacgacagttttatattttcatatcacccttccgtatttcgaagagtaggtgttcttcaccaaagaaatcaaagctgtccccaaatctgtctgtgaaccgactatttacctggatggatactatattgaaagcggttgccaccgtacaaaccctaaatctgaagaatggttgagagagttgtgttggacgcacagggatattggggagaatggtggaagctccactagatcggtacgagaaatattatggctcttggtcacctacacatgccatggacttaaataaaactgactcttggtgagagacatgtcctgtatccaagctgaatcatcccctgatatcgataaaggggtccatactataattctactcctatgaaagtgcgacacttggatagccacttaagttaactacattttac

SEQ ID NO: 51221 - DNA, 717 bp, Arabidopsis thaliana landsberg
ctctctgtattcagagcttaagaaagtcttcgctcaaaaggcattaggtgcgcctagctctatccattttcttgttctttttatctttacttgttttattttctgttaaagcgtacttctttgccgtggtactagactcttctttactctagtttatttttcacatgctgtgcagcaacaagttcaagagtttctcctatctttatgatgaagagcagtttatagcctttcttaaaaatgatgttatagttatgaagaccctccctgagagcttgaaagccgcaagaaaaaggaatgagttccctctttttaagcccaaaaactctgcgtcaccaaaattttacctcgaggatgtgttgccaaagttaaagaaagctaatgttattggattgatcgtctctgatgggggatgcttgcaggtactgagtgtttttttctccttagagtcttatatcttgtatgcagtaatttttatatctatagagatatttgagtatatatccttctgcctgctaactaccatcactcgtcataacatgttctagtcatttaatgtttaaatgtaagtagaagtcgtgggactagttaaacaaggtgttttatcctgaacgaagttgtcttgttttcagtcagctttgcccgcttcaatgcctgaacttcaaagattaaggtgtagagttgccttccatgccctccagcttcgtccaggaattcagg

SEQ ID NO: 51222 - DNA, 725 bp, Arabidopsis thaliana landsberg
aaaacccaacacttctattaaggatgacttctgttgtatatttgttaccttaaatttattcgtgtcattcgatcccaacaatcccgattctgtattctttaaatcagaaaggtatatcaaacttgaaatggtgtaccaaaagacaaaaataaaataaaatgacgctatagcatctcaagtatcgagaaatacaatgaaaatgtaaaagttttacgggtaatacctacctcaacgcttttgacctcttaacaaataaccgatgaaggagaatcggtaaggtctcaaactcttagaatagctgtgatccggtagaaagacaaattttatccataaattttaacaaggaagttccaaaagacaacacatgcttatgaaaccaaagggggtatcacattgtctacctcattaatttgcaaagttcctggccccaagacatagtgacaacaccttatctcaaactagtactggcaaatggtgcttctcaacaccctttcgtgaccagaccttccacgagggtctcaaactagtattggcgaatggggcttctcgacacccttctgtgaccagaccttccatgaggagatcgtgacctgcttcgatctcggtcctctctcccactcctcgatctcctgtcataaggccctctatcatctctaccacggtctctgtgtcaaaaaaccataaatgtttcggtctcgatcacgatatctttctctatcactaga

SEQ ID NO: 51223 - DNA, 748 bp, Arabidopsis thaliana landsberg
tggacatgttattgggcttattgaacttcaaatacaagtgatgaggccgcatattctattttcctttttggtgttatgatcgactaaacaaagaaacttcatacgctaaaactgtataacttccaccaacgcaaacaagagccaaaaaccaatatttctaaacaaaccaccaagctcaccctcactgcatatctccttctccgaaccacctttagccgaaccattgatatagtttctcaagcgatgacggatccgaattgacggcaagttatgtgtgagccgtgaggaatttgatgcattagtgaactacttgtcgcaacttataatcttgtgggttgcaaatagggttttaatgttaaacatctttctaatggttgtcttaatcggtaagaaaataaactgtaaaagtgctttacaaacacgtgactctttttcttttcaccacaaacagaataattctaacataagacagagagacacacgtcacaaagtgaaaacaaagtatccccatttaaattaaaacagtttaacaagataaaatacaagtccgattttttcatctcccaaagattctcacagttaaaaatagaaaatagaaaaagtatatattctcacaatgctataaacgcttgaggagcatctgatttatcaataaagagaactaaaactttacaaatccaaaaacaataaaattatataaattcaactactttaaacgattttccaactagaaaatttcgacttgatg

SEQ ID NO: 51224 - DNA, 841 bp, Arabidopsis thaliana landsberg
acttgttatcagtcttgagttgcttgttaattgtatactcaaatgtttactctcttttttctttttctctatattgcatatcatggttgaatctaagataacaaataaggagaaacattcactacctttatgctatagatctcaccttttattggctctaacaataacaaaactctagtcacaacagtacacagaacagaagatcaaatagtaaacaatacctataaatttaatggaatttctccgaagaaactgattaatttacaaatgcgatcaaatgtgtattcacaaaaacaaaaaactacataaagagtagccatatacaacaactaacgatgccaaatatttattacaaaaccaaaaagagagacaagaaaatatccttaagatcctgaacagaatcatctaaaaattctatatttgttcttgaatcttgaacaagatatttgtccgaatcgatatctaaatttcagatttctattcttctgatgaaggttagcttagtgtacctgactgcatcacagggaaaaaagaccaatcattgctgttcttcggcgaagctgatctatgttcatcaacggtcaaatgtttctcatccgtgccgaaattgaattccttattggacccgagagacgaatgattcattgattcttgatctgatgatgcttcagggaacgttgttcttagcttctgatccacgcatctaatgacatgatcagcatcaagatcgaatgaaaccggtttatgcggtcttacaatcttctgctctttacaaaaagttgtaacaccagcagtctttggactcaacagtttggaggatcagagacttgactgagagcac

SEQ ID NO: 51225 - DNA, 729 bp, Arabidopsis thaliana landsberg
atatcaatctcatttacgtatggtcgaagtttgtgccaatcaagggggatgcagagttgcagaagagaaaccactctactaaagtttcggcttattacttcttttagcttaatttcttatctagtagactagtagtgaccgtgaaattattttactactcgaccgtgaccgtgaaaatagcttttggactgaaaagtttgcaagaattgatgaagtgatacaaaatttgaatcaattcatgtcagaagtgttcggatacaaaaacttagatgaaaaatcaacgatcgctgcgtgccacaaattacgtggaaacgtcttcaaaaatacactttaacgagcggatgcttcatagaaatatataggaagggactttggtggcaaaaaagttgtgtccactaaaataagttaagtgaaatgaaaaattaaatgatataaaattattgaaccttagctccgaaggagaacattgttgactttaaaagcaaaacaccaaacaaagaagaagtgggtagcgatctttatttattaccggacaaatatcctttttatttaataaaacagcagaaattgatattattaaaactataagattttattagtttaaagtaaaacgtgttcgatcttgatcaaaaaaaaaaatgatttatttatttgtcaaaaattgtttagataaaagcaggataaaagtttgctataattcgatactcccttgataaccttaaatactag

SEQ ID NO: 51226 - DNA, 941 bp, Arabidopsis thaliana landsberg
gatattaagaaaaatacaaagcaggctacataattctagtggcattttatatcattgatattaatgaagagctaacgatggagcgaatacttgcatgataaaggatttcgagtactttcaaacaatatagatggatatataaatcttttcatattatagaatatatttttacttttagatgtaaagttatgatttaaaagagagatgtgacaaagagagtagtactaataaatgaaggatctatcaagagattgttagtatatagggtcaggttattgtatatttttaacaaaatcaactactattactaatagtgttgttatacagacccatatctattccaaagtttacttgtacattaattgaatgggaaccaatctaatacatagtgagagtgacactgacactaagtactaacaaagaaactatcactttctttttaagcaaacataaagcttccacataatcaattgtctctatttggtatagctaaatacagtattaatatccaacctaatttttctaatctggcttgcatcacatcgtcctgcgtactctacaaccctttgtataaatatgaaaaaaaaaaaaagactcttttaaacggctggtgatatttcaatcaaactacaataactaatgtcgcagtcaaatgcaagactgatttaattgaataaaacttttttaaaaacaaaaacactccataagtatataaactgataaaagtatttacacattctttcgatcgatgaaaatctctaggattcactaaaataaaaaaaggggtatgaaattacattagtttttaagaaaaccttaacatctccaatctaaacgtacttcaccagatcccacaaaatgctgactaggtttcttaaacgagaccatatggctcttaaccataaacgcagtgactcgtttcgaaactctaatcttctcca

SEQ ID NO: 51227 - DNA, 773 bp, Arabidopsis thaliana landsberg
gcactccctcaggaacattacttagaggtttctaagatgactcctcctccggatcgttcctcctcttctctctctctttctgtgttttctctctatgtctcgtcttaggtacaactgaaatttcagtactgttacttaaaccctagcttagctgctgcttcctccacttagggtttatggtgggatttacagatttttgattgattttgcagaaagtgagtcctccgtcaccatttgagattgtgaaaggatcgcttgaaggaagtactggtgctgttctgaagaaatctgttggaaatgaagagatcaatcttttcgttatgcgcttggctcacggaggtgatgaagaagacgatggtgggatcaaccagttgttccttcatgttgctgtatcaaagccaaatcagcctgattctttgcatttcctttgtggcctttaccctgatgcattgggtattcattctgtttccatgaggccaaaacttgaggctttggagatgtctgatgatcctactcaatacacaggcccttcttttgagtgagtttctctctttttaacttctttttagtgagtttagagacttactcaatatatgcttgcctttctagttattcagttgatggttgagaccttataggtgattcatttctgttttgagctgtctcgtcttgctacactcagagctctcaaactaagaataggccaactaagtatatcgtcattcttaaataatctctgactctctcaaggatgatttttaagaaacagctta

SEQ ID NO: 51228 - DNA, 1036 bp, Arabidopsis thaliana landsberg
actctggttttagtattgtgtgcaactgtctaaagttttggttttcagatttgtgccataatggatcacatgtgtgttatggctcttatacttaaatagataaaaacaccttatatttgtgtctgcattttacatgttcgacaatagttatcagcagtaaagaatgtttggttttacatttcctgcaacttgcaggattcagaggcatgtagagggtttcctaccagttgttctcatgaggtttgctttctccttaaccttcaactcttcttttattcgactctcatacgcatgtgctcttgcacttgcaacgataatctcaatacgttcattttcgtccctgaacctctgggtcgccttcaactttgttttctctacacttctctgcacattcaccacattgattggttgtatagttatttaaggattagtttttggaaccaaaggaaagtggaggaaaaagaaaagaagaggcacctctgttctatgaagttttctctttgcctttttcctcttcttatcttcccatgacacaatcttctcacttagcttctcgtacctgaaaaaatcttaaacccattagcctcttagcaacatttaaacaggacaaccaagaaagaaaacataacacacacttctttctcgatttgcttatctctgtttccttccattgatccacaacagctgccatatgttcaggtttcgctcgttgcactgtggattcgttcatgacgctacagattgttcagaatcgaatcttgaaattttggagagtaccatcaactaatatatagatagatattgcatttggagacaaggaaggtttagtttgtgaaaggctgcttaagcaatacctttcccttaagtcaagtcataagcttagggtctcacaaagggtttctagtttaagatctcttagtaagtcaaagagattaccccgtttagatagattccttggcttcctagagaagctttattagtttatgtgggatttgttaagccattcatgcatatagtttacaaaccaatacttttt

SEQ ID NO: 51229 - DNA, 578 bp, Arabidopsis thaliana landsberg
  unsure (1)..(578): unsure at all n locations
gtagttcgtccagacttgaatcaaatannnnnnnnnnnnnnnnnnnnnnnnnnnntttaagattggtccaaaaggtggacaggggccgcatggcctttttatctgtgtttttttcttttcagagtggcctagtggaaaataggatccaatttcgtatgtcagtcatcttagactagttgatgtcaatgactttttgtggaagagatgagtcatagaagacggctacaaagctatagattttgctgatcccgatcgttgttcatatggtagtattggtagtactaagggaggggcaacacattgtaaattgccatgcaatgctatggaaacgtgagtttgtgagaagtcatgagaacccaaaatcaactacttttcacgtggtagtttttttttatctaatacaatgttggtggtcttcacatccatggacattatccataagaccataactcatagaaaccatcacaaatgatcaattatcatcttccttaaattgcttttcactgtttacgacctctcgaacaatttgactttaccacaactcaatccatcacctagttataagctgttacaattgt

SEQ ID NO: 51230 - DNA, 491 bp, Arabidopsis thaliana landsberg
gtgtttagccgtaaaagagctgagtcatgggcttcagttcgtgatgaagtggacaaaatggtccggtcggtctcttgtaacgttggtaagctacttcacatattcaccactcttgctatatatatgtgcaattaaacaaatatgtaaaaagtgaaagtactcatttcttctttctttagtatgtactttaacatttaaccaaaacaattgtaggtaaggcctataacctcggggaagcaatttttgcccttgaccggaacattacttaacgggcaacgtttggggcagcctgccaaaaggggccaggcgagttcctaaggatcctaccagaggtccccaagccttttggagccctcaacgtagcgggtttcactacataattctcggtggatcgatccgcaagaggttaacaagcggctcctgtaagccgcaatgatctagacggatttattgacgatattatcgcatgacatatgtagaggagagagaga

SEQ ID NO: 51231 - DNA, 636 bp, Arabidopsis thaliana landsberg
cagtttcgtctttggtgctctactagttagggtttcgccattactatctccatcctctgttcccagagtttgaatttttcttctgaaaacgcgaattaagctcgacgttgaaatgttttgctcttcagattaagacgcgaatttgagagacagctttattttgtgtgaagatggcgaataatcctccgcagtcttctggtacccaggtttgctctctcttttagttcgtttcatgcttctatggaactcgaagtcactcaattgatttgttctaagtaatttgatcaatgtcaagcgtattagggttctttgatcttagtctctttcattgttgaatagcttggagcattcactcaattgatatgttgtcgcgcctaactgtcagaatcaaacattcaatagctgttatttcgtgaaaattttgttttagtgtatgattcatagtaatagttagtgtgtcaactattggatgtgcttatgagacctttttccagcagtttcggccgatggtacctggacagcagggtcagcattttgttcctgcaggttcacaaacctttcacccctatggacatgtaccttcaaatgttcaaagtcagcctccacagtattctcagccgatacagcagcagcagc

SEQ ID NO: 51232 - DNA, 1346 bp, Arabidopsis thaliana landsberg
gttatccactctttggtttacttggtttggaggcaaaggaacaatttcattcataatcagatcgatctctctccgacagctgttttcaaagagttagatcgtctcatcatcaacactatcactgccaggagacatctgaaaaacttcagacatttaatggcgttatggcttcactaagggattcgttgcttttccttcttctgagatctttttattgtgctctgttttttcctttctttttttggcaaagcataactatttattaggacttactcttgtaacacctagctttcattttaatgatatttacaagtttagcaaaaaaaaacatatgagtgcaaaaagataatttttgtatttagagttttttcttctaacatgtcattaaaactatatataaaaaaggctacaatgtcaatacacaagattcagaaaagaatgttaaatactacattatatatgccgttgcacacaaacaaaaaacaaacaaaaacctacattatgctttatctagtaatacctaatgtatttgttccccataattcaatcttaattcctaatgacggagttatggcacaaagaagaattgtcttgttctttccctttcgaaaacgacactagaggtttaaaagaatcttaggtcatgttcccccatttactcttttggttagatgataaatatattttttgtataataagttttcatgacataaagatataatcacttatttgtataatgattatgaaatttcacttgtattgtttaagcgaaaacaaaggatcaaaactgatattgtgcaatctttcaatgcaatagtcctaacaaataacaaaccgaaggggtacttttctagatgggtctgggccaaggcccatacatttcgggtgcagagatcaaacgttgccgtataccttccttttttagctaagaaaagaaggctacactttggtagactcgtcactcacatcatcacacacagagctagagctatgtcaacagagagtaaagaaacccgacccgaaactaaacccgaagacccggtaactcatactactgtggatgtacccggtgaagaacctctcggagagcttatcgctgacgacgtgaacgaagtcgtttctgatgcgtcggcgacggagacagacttctcactctcaccgagccaatcggagcaaaatattgaagaagacggccaaaactcactcgatgaccaatcgccattaacggagcttcagcctcttcctcttcctcctcctcttccagtcgaagcacgaatctcagaatcgctcggtgaagaagaatcttccgatctggtaacggagcaacaatcacaaaacctaatgcg

SEQ ID NO: 51233 - DNA, 223 bp, Arabidopsis thaliana landsberg
tatccctagtgcctgctcatgccccttcttcaagatcaacgggtcacgcctatgggccacactctctccccttgggtttgggtaccccttccccaaaaattcaagggtgtggaatgtggagaaccaagcacggaggactgcagcctgcccgcccttcaccagggtctgcgagctttaccgacgggaatcgctgcgtggacgcggccgaggcgtgtacaccaga

SEQ ID NO: 51234 - DNA, 597 bp, Arabidopsis thaliana landsberg
gagatattatgttgcaaatggggaagttgggggctgctgagttatttaaaacctgtctatctaggtatcgtggttcctcaatcacgtcgtgcttatctgacacaactgagttggtggatactacgccgaatcaacaagtctttgtatcctcgaggagaaaagtaaaaaagaaagcaaggaggtcgagtgtgacagctgagaatggtgatcagagttctctgccaatcggtttaagaactacatggaacaatattgatgtccctagagtgagaagaccaccaaaatatagaaagaaaagagagaggatctctagaaacgagactgagatgtcaacaggagtcaaggttcagtgtgaaatcttcctgtaactttttttcctttcctttgttcactttttgttaaccttacgacactctcatgtatcttttaaagatagtggcggacatggagagaatcagaacacaactggaggaagaaagtggtaaggtagcgagtttgagttgttgggctgcagcagctgggatgaacgagaaactcctgatgcgcaatctacattacggttggtactgtagagatgaactggtgaaaagcacccgg

SEQ ID NO: 51235 - DNA, 535 bp, Arabidopsis thaliana landsberg
aagaaaaccttgaaagacatcactggggatagaatcaaagttgttgttacttaacattaagacttgtaatgaagctaaaccacttaaaaaaggaacaggaccagagatgttgttccattgaagctcaagtctttcaagctctgataagttacgtagatcaggagaaagtgtaccttgaagacccgaatgcccgatttggatccgggtcacacgttttgttcctgtacaaacgatgtgagtccatttacatgggtcagggtcagaccaaccgaaagaactgggtgggtttaagcttttcttgagtgataacatcgctgagagatctccatcagaatcagctttagaaagagatagaagaagaagaaaggtaaatgaaaatagaagaaaggttcttcttttcttcatagcttgaagaaacagaggattgaagaagaaacagagagaggaatgtgaagaaagtttgaagcttttaggaaatgggaagatgggccattgagagagaaggaagaagattgaactatgaagcagaagccaa

SEQ ID NO: 51236 - DNA, 726 bp, Arabidopsis thaliana landsberg
taagggcaaaaaacggaaataaaaggaccaagaaatatctgaggagataagaatgtaaagtatttatgagatcaagtgccggccggcgacttgcatgcgaaagtacgtacggagccgtacgtcgatcgctattccatggtgctctaccacgtgactctctctctcctgaaagggcgccctcaggccctcgtcaaattcctgcctcaggcatctagcaactagccatttacgcgactggttgccagagacgtgaaccgacgcggtcccggaatttttgcctcaccttgcccgccgactggagccttttcttccaccatcactttctttatcaaccttctcccgtcaacccactttcagctccccgtttcatcgggataatcgttctgtgattcctgccgtggctgaaggcgcgcctcgcgatcaatcacaatggcggacatcaagatcgatagcaaggtcttccaggagcgcatctcccacttcatcaatgcctggaaggccgacaagcgctccggagacgcgctcttcggcggcgtatcgtccattgtcgtaaacatgggcaaggtcgaggaagtccccgaattccacaagaataatgccatgcatgtacgtggctttctcaaatcccccttccgattgcaatttgcgcaccctggctgacagcttgtagttttggttgctgggatacgagtttccgacgaccctgatgctattcaccctcgacac

SEQ ID NO: 51237 - DNA, 646 bp, Arabidopsis thaliana landsberg
gcaggtcgaggctccctcaactgtcaaccgaacatattacatatccaaggaagataattagtggccaggatatgcgcaaagaacgtggctacactaatcagcttattggtatcgaatcggtgtaccatagaatatttctgaacaaacagattctcaaaacattctctgtaaactctgcttttgagacagaacccagtgtgctaagtgaccatagaaggaacgataagttttctcctcagtgcaacattcaagcaccataacacaaagctccattccttgaccttgttctagtcttatcttgagcagcgtatgccgtgcttcctcgaaatcaagacttgacattatggtttgataaattgtcctcctgagattgacaagatcagtctctgtatcatcttgtatgatactcacatcatcatcaccatcatcatcattatcatcatcatcatcattaattcattataacgtaacatattatatgccatttctaatattagtttttttttgggtcaaattagtgcaaaatttattggttaacattataacgtgacatattatatgccatatataaacttaaaaggtttggatagtaaatgtggtgatttatgaataaaggtaaataaccagttaaatgtctagatgtttg

SEQ ID NO: 51238 - DNA, 761 bp, Arabidopsis thaliana landsberg
taattttctagtatggaataaaactatatttaacgctgaagtaataataaagttttctgtttgatgcttcctcaatcagttctgttgtttagcttttcatagtaaaacaggaattacataattttccttaataaagacattctttgaaggacacaaagaaactaaacagactcactgaaaataagggaaacatgtacatgtatgggttctttcctccttagctgcgtaatatggctgcagcaataccagcaacaacccctacagcagtaacagcaattccaacgccaatcacaccatctgatttcaaaaatcaaaagagagttaagaaaaagcagctgaagattctaatggacgatgtgtggacagttgacacaatagtacctttcacaatacggtcctctatagcctttttgagtgcctgagcctgtccggactccggttcaacctaaaaccacagaaagaaaaagaaggcattgtagaatacatcaacaataagatattcaggagttatccatggaacagatgatcaaacctccaaacaccgttctatacaatcccggcttcttgaaaagtcaccgcttcgatagtaaccaagagcaaggagatatagcttctccctaagtttcattgcacttgtatcattaaccaccaaagctgcgaaaacaaagcaaaacactttgctaagatcaaaccagtcatatggatcaaagcatccaccttttggaagaacaataggcagctgaagattccatagaaagtgt

SEQ ID NO: 51239 - DNA, 1136 bp, Arabidopsis thaliana landsberg
ttctcttgaagcattctttcaatcccgaggcactcagggtttctggaggtagcttgccttctggatcaggttgcctgtgaacatgaaacaatcaccctgttaaaagtatagaaacagtgaccagagatctatccaataggattaaaaaccgtttatgttgtgcttacgctgaatcaagtcttcccaaaactactggaattgttgggccgccacatattgaaactgcttcagacccagcgacagagatcatatccgcccaagacactgagatcacataaaatgtgaaattagcacaaaggcgcataacagaacacgtttctttggtgcacacagttcaaatagtaatttacctggttgtatctcgtcaaccttaacctttgctttcgctagaacctaacaaagaatccattttctacgaagattacttatttgaaaataagacaaatctgataaacaagtgcaaatagacacaaaaaagagcagttaaaatagatgcgaaaattacatccttattagctcacgccaacagataaaagagagggatttagtgcctttaaggatttcttcaaacctatgttctcaggtctctcaagttcataagcaatagatccgttgatgccacctgcaattgaattcattaccaagaagaactaagacatagttacagtatctttcaatgagaacaaaggaaaataccagcagaagtatactaaatcgcaaagacctgaacctaaaccaaccaagcttggttcatcaaagccaaaactgaggtatattaaattgtaaaatgataagaacatcctgagagagccactgaacaaaccagttctcacaatacttgatagtctattaaactaagccaataaacattcacaagctacccaaaacatccaaaaattcacagattccattctaaacataaatctaacaaacaatttttacatttgcaaacttgtctatcaccaaccagtgaacaaataaaggaactttcaaatctatatccatgttcacctatgttgagtttacaatgaaggaaacaatctaacttatacaaaatagcaacttgacatacgagtcagatatactatacttgagagtaaaattctgatgattacagaatactttagagtcatgga

SEQ ID NO: 51240 - DNA, 741 bp, Arabidopsis thaliana landsberg
acatacacaataataaaatacacaatgttgtctttatttaattaatacaaaaataataaaatagacaatgttgtctttattaatattacttctcagccccaaaattaatctttgatcggtcccttttgttttatcgttttagggtttgtagctcctttctctttttttcttttctcaatttcccccaaattaaaaaaaaactctctctttcagagatttacaaatttcatttctccaaatccgaaaccccaaagtgaatatttttccttctgggtttcttttgtttgcctggaaacatttgtctcagattttgattttgaccggagtactcatattctccggcgatttctccggcgacatcgtttgtgaaatggagggaattactcatccaatacctcgtactgttgaagaggtctttagcgacttcagaggtcgacgagctggtcttattaaagctctcactaatggtcagttttggactgattcttgtttctcacttgcgaatcagaacgataagcatctacagagttacgattttggggcatttgggtttttcatttgttaaaaaagaagaactttttttattttgggtttcttttgtgagattggacgattctgggctttgtggtttgtttatgcacatatggtgaacttttaccaaacgtgtgaccctggtgagcgatttcttcacaacttttaaaaaaactaatcttgcttaccttctatagtttttaatgaaat

SEQ ID NO: 51241 - DNA, 2005 bp, Arabidopsis thaliana landsberg
ttcattaacatttcaagccattgtatgcttctggatttgtttttttgcaatttaggactttttctgcaatctagcgattatgaagcataacaatctgtaatctttataccaattggttgaagttgaattttttggatgtgaatgagtctaatggatcttattggtccaacttgtttctggatatttggatgtatttatcttgtcttgttgcttaatgattgtgaagcaccagccttttagcatatgtgatgttcaattctgatctttataagcagttggaatgtgaaaagatatttactttaaggtgtttttgaagcagcaatcatgagattcaacaagggaactaaagtcgaagtgttgagcaaatcatcggttccatctggcgcctggcggtctgcagagatcatatcaggaaatgggcattactacactgtcatgtatgatcataatgatggtacagagagggtaccgaggaagagtatgaggcctgagcctcctcgtttacaagttcttgatgcttggtgtcctggtgacattcttgaggttttccaaagttgttcgtggaagatggcaatcgtttccaaggttttaggaaacggttgtttcttggttagattacttggttcctcactgaagttcaaggtgactaaatccgatattcgggttagacaatcttggcaagataacgagtggatcatgattggacaggtacttgtttctttcctctgtgactatatctttttaaagtctgtttttgagctgacattttgtttattttaccatttggctgaagggtacatcaagattaagcgcacagacttcaacaggagaactaaggagaaaggtgaatccgaaaggcgactacatttcatctgagagcaaagacaagcttgatgagtctgatgtacctttgtcagtaggtctaaagaaacggacttactctttggttgaacctcacaatcaaactagagctttagctgcttatcctccaaggtttcgtgaagaagtgaaagaagaagaagaagatagagagagtgttgcttcttctgttggtagttgttgcatggatactgatggtctcagtgctgtttcattcaatcccattgaaaccggtaactctagtgacacagagtcatcgtcttgtggctacgggaaggtcaagaagttggtggttccaagaaaaggctcagaggctgctgatgttcataggttagagctggatgcataccgaagcagtatcgagagattgcacgcatccggaccaatcataacatgggaacaagaaacgtggattacaaatctccgtctcaaattgaacatttcgaatgaggaacatctgatgcagataagaaaccttatctctgacgataacagtactatatacagatagcagcagcagcagcattgagaactacagtttgtgttacatagaataaaaactgagtgtagattgtacaaatgtcattttatttttcattcaggttttttgatttaattccaaacttgtgaaagaaaatttgatcatctttactcttttatctttgcgttggacttgaggaagactagcaatgtatatatgattcatgccatggcctaaaagctatacataaaaaaggagatgagaagatttgtgtacgtaattgaaacactagtgattaaactaacaatttcaagtagcacagctaaatattctccttttatgtttgattcatatgaccaagtagctacaatagttacaaaatctaaaatgttgcaactggcaaagtaaaagaaaagtgggtagaatcaaagttttccaataaccgcatattctttaaggcagaaaaaacttgactgcaaattctctttgggtgccaaaaaacagaacaatccaaataattcccccaattttggttctaaaatagaccgattgatttatatgtaacatcaactcaaaacacatcatagaggaaaaccacagcagacattattggaagattttactcatatgcgtcatcatcatcat

SEQ ID NO: 51242 - DNA, 421 bp, Arabidopsis thaliana landsberg
agatgtatggcccccgcccccctgctttaattatcctatactttgtgtattatttatgtgaaagaaactacactactgagagcttagggcactctctaatctaataaatgaaaactaatggcatgttctatggctgatgtggcggtacctattacgtttggtgaagcgagaggtgacgaaatcattgatactctcctttgagatacatcaatgaatggcatgtggtggactggtattctctgggtgctatatcctcagcttagagggctcatcgagggcgctcattggtggtgcattacctatgggaagctgcatcgaccgagatctggggagattgacctgattcatctgagcccccagttcgttgtctctaaggggacaggacgaaagacctggctgcgacagtgctgctggtcgtgcc

SEQ ID NO: 51243 - DNA, 437 bp, Arabidopsis thaliana landsberg
tatgttattaattacccattttcattagtttcaggattggacgccaaatactcagaagtgcaggggccctggcgcaaagtgtgaccagacacagagaacccaggccatggaatgcgggtttattaaccgatttaccaggggctcgtttacaaaatgtttatactgcaggagtatcagacgcagtgagccatccgatcatgatcggacagcccagattagatcgggctccacatgaaacggtgaacgctattgaccgtgggtctgacatcaagcactcagattgtccagttgaatcggacagctaggctctaatctcggccgcacatctaggatcctagagttcagattgcatcgagcttatcacttaattcgatccattcacctagtatcctacggccagacttctttctacccccgcgacgaccgaacacggcgcc

SEQ ID NO: 51244 - DNA, 792 bp, Arabidopsis thaliana landsberg
tgatctggaaacaaatactgaacagtgataaatatattttttcattatttctcttggtaaacaggaaaatggactatcaaagtattaatgatcgaattaaatagaaatgtaatgagcatatgcaggaacagatgattattgtttgttcacaccaacttgcatatatatattatatatatgaacatactattacagatgttacatgtatatatatacatattctgttgtgactgtgggactagtaccaactaagaggagaagggtaaaatctaagtgaaggaagtgagagtggtcttttaagttttcacaatttacacctcctaatataaacatacgctaacgtttgtatagaagagagaaatggaataaatttatatatgtcatttaaggaaagaaagagaaagaaagaatgaaaccgatggttaaaaaggaaaatatggtgttaaaagggagagggcatcgaatttcaacgttgtctaaaagaggaaacctcatgggatatggtttttgacttaatatatttcgaagcatcgaaaccagactgaaccaaaagtctaaccaaaaaaaaaaaaaacagagaattaaaaaaaactctcagactctgctctgcaactgcaagagaacttaactcgacaaaaaatgtaaagtgaatgtaaaaggagaataaaaagaatttatgtcatgtaacttgtaaccacctgctgtaacatcatttcctctttaggaaattcggcttctgaataattcaatgtgctcttatttcattctttatcattctcaatttcattcttt

SEQ ID NO: 51245 - DNA, 571 bp, Arabidopsis thaliana landsberg
  unsure (1)..(571): unsure at all n locations
tatttatccgcgttatatcattcgggnnnnnnnnnnnnnnnnnnnnnnnnnnnnnnnnnnnnnnnnnnnnnnnnnnnnnnnnnnnnnnntcggatattgcaaagtacacggcaatgcttgggctggctactaattcaaggatgatgagtaggatattcactccatgctcttagggagttctttatgctgtgcggttaccgccttgccactatagatctcgttcctgagatgaaattcactgttctcagtgtagactatgacactgccccataatgaccaagggatgaaaccggcttttacataactcagcagttcctttgtgtacttgcagacgctggtgacgatctgttgttagttctcatgagcacagaaactgataaagtaataatttaccgcggggttataaaatgggtgaagcctcaagcctgggattcagtggaagaagtgaaatcagttctcgctttgagacttccagattgcaccgcaagtaacgatggaatgcaagaaagaagactcaggaatgaaatcaatcaaacctcctactcatactacccctcttcccgataagcct

SEQ ID NO: 51246 - DNA, 595 bp, Arabidopsis thaliana landsberg
agttataatcacatcgctttcctcactaacaatgtagtcaatggcagcaaggcgtgaagaataggtaagcagaggcttgagctcatcgttggcaagcatttccttggtgtaaaagtttggaaacagctctctcagtggtttcagtgtcttttcaccaccatatatttctccagatgcgacatagatatatgtgtcgtttgtaaaaccaagagcgcgcagcattaagcccacttcatgaggtgtaagagggcatttcccacgctttctttcttcaagagggtccagatcctgcggtgattggctagtgagattttgtaactccaaacaacttctccacaagaaaataaaatttgggtgtaatggtcttattttatgatattatcaagaatgtaacaagatatataaacatatttcttaatataagaagcgcaaacacacatatcaagtttcagtttattgcataggtagagccgtagaggaataacgcagagaacttggaaaattaagaaagttatgtaaaagaacatattgaactcacagcaatgtgtcccatcgttttcttatttctgctagctcagctctctctttttcaccc

SEQ ID NO: 51247 - DNA, 248 bp, Arabidopsis thaliana landsberg
agcttattggcaaaattttaattccattatacacattacttggggggagttggattaaaaagaggagtgatatttaggccatatccaagagctacctaaatctgatatttgtccagcaacatagtctcatttcccgcagtggtaagaagaaagagtgccacccagtcttgttcatagtgatcccgaggtgagattaagagatgacttgaataagtgcctctaatgaatagtctgccaaaccaaaagcc

SEQ ID NO: 51248 - DNA, 1106 bp, Arabidopsis thaliana landsberg
gctctcagcctaatagattgatattttggaatttttgtttcataattgattaatgttttgtttcaactttattattactttcatatgttatcaatataaaaagagaaaaacataattaatattattaaattaacaaaaacttagcaaaaatgtaagatttacttatttataatctgtgcgaaaaaaattaaaaagatcgttctgttaggatttaggaacatatataggtagtagtttcttttatcgtatattatatatctttattctaatttagtaattatgcttatttcatccatccagagaaatgttggcaataccattgttgccctagcttataaaactattttggttcttgactgcaaatattgtagcttacgtgttttgttgcaaaaaaagaaaaaaagaagatatggtgaacatatggattatattactatactagaaaattgttgtcatttccaagcaaaacctacttttaaaattgttcgttattgaaatctcataaagtacttttacatgttatgtctatgttatgaaccatccataaaaattaatcgcatgaatcaaacattacccttttcttatgcattaaaaaactttaaaatattgctaggtgttgcccacgctacgcggggctgacttaaataattttgtatattcactttttgtttataattgtttatttattttaaagatatgtttgaaatttgtatttgaattaaaattgttttcttcataaaagtttatgtaaaaacagtgggtcaatgtatatataaaatgttggggaagttttttcattttttccagcttctttagcagttaaaaaacattagaaaggttactaccccctttatcttaaaacatgagtccaaggggcacagatgtatacccgatcagtttcaattagattgcattgatcacctgcatcgaggaagttagagacgtgataaagaagaaaagacaaaaaagagatgtgatgtataagaattgcgtaacgaataatcttttcaataacatgtttttgttgcatacattacaatatatgaggtgcatgaaaaaccaaaaatacagagacttgcgtaaattaacaaaacaacaaagacttt

SEQ ID NO: 51249 - DNA, 578 bp, Arabidopsis thaliana landsberg
agcggcgtttacgagaatctcatcaaagatcttatacaatctttgtacataggtaacaggacgttgaaccatctgatctttctcataaacccaaagtgtttgggtgtgtttctcgatagatccgatgtatgtatcaggacggagaagaatgtgttcaagctgtgatttcttctgatacatttcctcgatcgtcttcccgccggcggcagctcgagatttagccggagctttcgcaacattggcggcattgctgttttgaaggggaagtttggtagccatggttgggtgtttctgagagagaaactggagagtagatctgaaggatctacaaagtgagagaggcgattatagagaaacagatctagaaaattagggttttcgcgaaagtacagagaggagaagaagaagaagaagaagaagaagaagaagaagaagagcgtacaaaggagtgtatcgtttagctttttgaaaatagggatttaagtgagatttattgaaaagagagagagagagaattacaacggttggtggttgacccgatcaaaattcgaattttgaaatttgggtaggagcgggag

SEQ ID NO: 51250 - DNA, 1080 bp, Arabidopsis thaliana landsberg
tttcttttaattttgaagttatccatagttagatcattcaatcaaaagcaaatttcaagatcagtctcaggccaagatcacaacttcaaaaggccaatttttagactatacaaagtaattaactcgaacaactctaaccaaagaatgaaagattaaaaaaatttgctttttattttacccctatctggtggtgaaagtgtactctttgccgcaacgtcgaagctcctgacgtcgtgtgtcattgtcggcaaaaaaattgaagtctctttatatcggacatgtcatgccccaaacattattgaagggcagatttcaatattctttttaataaaaggataataacattataacaataacgaaacatctcatatctaaatcactgaagtatcacaaataatttgactaaaaacgtcggtacatgcactgtaattaaagaaaagaaaaatgcttaacaatcaataatgttttgggccttcaattagtaacagaacccattgattttttagaatgtgatttccacaaaagtagatagaaataggcaaaaaagaaaagagctagaaattttaaactctctgatgaactcagaagctcctgaagagtagcagcatggatgtaataaaattgtctcgtagtctgcaacaacaagttgtcaacaacaccacccatgccccccataatttatcattttcataaattgccccaaaaattatagttttatttctaaaccaacccctataataaataaaatagtcctagctcccccaccacctccaaagttctgctactaccgacacatattttccactacaatccatacacgtgtccatgcaaaaatacttatcatagtaaaaccaaaaaatactagtagttataattgtattacttgtttcccacctaattaattcttaaatctccttaagcaaaatttgattgactgtatattttgtttgtcggtttgagtgtaaaatacagtaaattacaacatcaacaaaaaatcaaacgcgaggatatattaattgtctatcagagctaaatatgacaaatatcgtgtaacgttttttgttaatactctactgatac

SEQ ID NO: 51251 - DNA, 831 bp, Arabidopsis thaliana landsberg
taaaaccatatcattctactgtgacaccataaatttttatacataatgtaaagatctcaagaagatactcacaagctctgaatagtttctcagatttggtatacactatgcttatcaaaattgagatttgaacagttaagtttaaggaactttcccagtttcaatatttagtattatatgcaactaactccctaaagctttcaccgcttctgattaagatgtaaaaaatctggatagaatattgatatgatgaaaattgacaccatagaagcataacaaagctgaatgtttgtaccttttccctgccacttgatgtaaacgcatgaacatcaccaactaatttcagagccttcgcggattgaggcattgcattcattgcttctctggcggtatacaatgcttctttggttttaccaaatgcaagataagaatggactaagcctgaaatgacctcaatagcgcaagttaattacacactccaaccttttcatgattgttaaaggtttataccaccaaaacagtacaacagtggaagtgtatatcagatctttttacctagcgaaccagaccttgatatgaacgaagatcggacctcaaattctgggcagtcctgaaggcgatcgctgcagctattggtcgtttcgcttgtaaaagtagatttccctgacgtctcaacaaattagtggatatatatatatatatgcaaacttactaaaaataaataaactccttgttgaactagcttaccttcattatgcagccgtggatgtgcctctcgataccctgatactcagattgcatagagtatgtcatgagctatcacacaaagat

SEQ ID NO: 51252 - DNA, 404 bp, Arabidopsis thaliana landsberg
agtacttgctcatcatgtggctatctaaatcatgttagatgattcatggggtcttagggtttttataatatatctgatttccaaggataagatattttatgtttgtagaataatgtcattatctttaatgatgccaataatgtcaaattttattggtcacttccatcatagtggagctttttcttttcccatcagatgcttttaatatattttgtgtgggatgattatatattaccctgttgcgtaagcaataatcttccaatcacagaacatgatccccattcattaatcgaccaatcaaacagcatcatttttatatgatgatgatgtatatgtgtatgtcatgtgtgtgttggcatgtcctctgtttctgtcgtgtatggttgtattcagttttagcgtca

SEQ ID NO: 51253 - DNA, 969 bp, Arabidopsis thaliana landsberg
cggccgagatgaaaatgttgacaaaactcgtaacatctcatgccaactcgcatgaacgtacataatagagtatccaagtgccacactgttgcgaattcatgaaaagaggattatataaatggtacgtacggggagtgtggacaaaagcccaattactcaataacatatataggtggtttcatatggcaaaagttaattagtattcatgctttacctgaaatccaaaatagttgagatcatatataattgtcatgcaaaattatttgacaaatgtccaaaatcttagtgatgttaggtgcagaatataagaagaggcctgttgattcagaggtaaggatattttgagaaagttatactttggtcccctacccaacttcaataagtcaattgattgttacattttggggaaagagtgatgaagtaaatactttatagtatacttgaagtgtttgtaatgtaaaagtgaaatttaaaaaggaatatttaacagtactgtgctaaaacattgaatttaatgcattgtgacgtcttcttcgtcttcttgtccctatcattgtattttcctcactttctttagcttatcaagttaagcacgttcaagctcaacaccattactttttcccattctgggatctagataacacctgcggttttttttgtctttctttggcttataatgaaggtccaattatttgatttgctagtgcactataatttttactatactccacttcgatcagattaagcatcatatttcatttaatcattagaatagtatagtacaaaaattattcaaagcgactaaagaatttgccgtaaacacttgggatatcatccattccggagattctaaacgtcgtgctaagctgcagatattcatttggtttccagtttacatatgtacacacgaattatgtaatgtaagttgtggccaaaattaagcaaacgttgatgtaataaactgagcca

SEQ ID NO: 51254 - DNA, 664 bp, Arabidopsis thaliana landsberg
cggtgtaggatagccttgagcttgctggatcaccagatgttgctgcgttataccataatgcgtcatgatagtcacgaagatcaactatctctctagattattgtgttttaaccaaagagaaagcaaaaataagcttttgggagtgttctgttttcagacaagagaagaagataaaactcaaacaacggtcggattttatctgagtttaacgatgaccattcattccctttttaataatttaattaataataacagctactgggggaagataaatttaaaaaggagtgccacgtaagcattgaaacggccgtgtgggactgtaacggctatatgccacgtcggacccacgctcttcatttatggagtaagttagtttggtggctctatgatcatctttcttgtgacaaaaaaactttgattgtattacctacggatcctttttgaatttttaaaatgtgaatcaaaaggtctagtgattacgaatttcttgggtatttttcttaacttttgttgttgttaatagagaatattaaaaacggaaagactttttttaatataaacttatgcttggaaaaagtttgggcccctaaaaatgtgtttaaaatttgttttgtgcctttttaaaatatattttgggttatttctattattctttggaaacatt

SEQ ID NO: 51255 - DNA, 788 bp, Arabidopsis thaliana landsberg
  unsure (1)..(788): unsure at all n locations
tgtgtctctcctatacatgggttttgattctttgaacagttaaaatcaaattgtgtggtgaggtaaatactattttaatctatctaaaatagtaaaatacagtctcactaagataaaatttcattaaaaaagatctaagagttgtaccatgaggaaacaaaaggagaagagagggcagagacatcatcaagattttaaagatgtgatgtgaataaaattggtaataatcattcaattttgttaggaaaggaattcagttgaatgacaaaaggaataatgagggatcacgaagggtcccggttaggtcaggtctccacattcgataacaccagacagctacctctaaaagtactcatggggcctatcacagagacaaagtggacccaaacgattggaccttttatgggcccaaaatatttgggttattgtaacatgtcccattttccacattattctcttgcttccataagctatgggctcatcaactctgtaaagaagccaacattctcataacattactcaccttatacttacctaatagttttgtttaacttagcaccaaaataaccgagttttgatgtaatgctcgattaaattccgagatatacagtaaatgcttcttggtatatagtttcagacacctactacggataaaacacccgatctaaaacccaaatgaacgatgcgcgcaaaccaacttacccaaaatgttatcttgtaatctcgtacaacagttttaacgcaaaccggtcgttcgaatgctggttagtgtcnacatctaaacgtcc

SEQ ID NO: 51256 - DNA, 753 bp, Arabidopsis thaliana landsberg
ctcatttgaaagttaggtgttacttgctgaaggagtaatcccttggcttgaagaaggaaacaacgaagaaggtactggaaaactctgcaatagtgatgatgaagacagttttggaaacaacgaagaatgtaccggaaaactctgcaacgatgatgatgacagttgtgacgcaaaaggtgtcccaaagttatgatctttctgcatttcaggtcctgttatctccactattgatgatctgttcttgttggtattagcttcgcttgtcttctttagtttcttactcagatttggagcttgaatggccaaaacaatacttttctgacccttcacggtctcgttcttcgaattatccatctcagtttgcgcaacaagcgcttcttgactctcttgttgttgctgaaagtagtttctgcctaaaccactttgaccgctatgaagaaacctatccaacggtccaccattacaatcaaaacttccaccgttttgtgcaatctctggacttttctctttaggtgtgttcatctcttgaccgctcgctattaacctatccaacggcccagcattacattcacgatctcgaccgttgtgagcaatctctgaacttttctcttcaggtatatacatctctagaccactctcacccggtttgctctgtttttcactctccttcgtctcctcttcttccttcttcttcatcttatccacctcttccttcttcttctttgtcatcctcttcttcacaggtctgtttgc

SEQ ID NO: 51257 - DNA, 1145 bp, Arabidopsis thaliana landsberg
tctcatggaattgtacttctattaagaagcatgtgctcccctttattcttgagctagtacatttcctaataaaataggaaaaccaatttatatcccaatctgctccaaatgacctcgtgttgatagtgcaacattgttgaactaagtggctagaaaatgttaagtgtgagagaccctctctcagaagttaacaagattgtctaatctatcgaagttaagacacaaaagtaaagtgaagacttcagctcattctgaatggtctcaagtactacaagacatctcatcgttcattctctgtggctttaaggctagagctcaaaatctgatcgtagtaaaaagaacatttggagtagttcgtacgagttggggatgtaaagggacttgaggagcaagtgcgtacgtctctcatttcatcatgcatgtataaaaacggtcgattaggttggttctccaatatatatatctagaactttgactctggctagctgatcaaaatgtgcaattaatattagaagagttatatgaataaggggacctctctggtggaaactcatgtggtaatgatgattaatattcaattggattctccaactgctcatagatgatcttcaacctttgtttggtccactattgtttatatcccaatcacattggtgttcattaagaaactttatcctacttaaatcctcaacaaggcatcagtcaaactagaataaaagctcatatcacagttcaatgagatagttgatcacactctaaataagtatagatcgtatcatagcaagcccttactagtgatcatatatcccctagtaaaaacaataacatcatttaaaagaagaagaaaaaaaacataagaataggaaacaaaaaacaaaacagcagaacgagtttttaaaagatgtcttagtatcttcacctcattttccactccttctagcttggaaatatctttatattggctagctagaaagtgtttcaagatgtacctctataagttctaagcgttctttagatcttaaaaagattttttcgaatagaaaagttaggttaagaatagtgtttttggcaaatctagtacgagtgactcggccaagctgactctcccaagtaaaaaatcaggttaagaaaatttgttttaaatg

SEQ ID NO: 51258 - DNA, 652 bp, Arabidopsis thaliana landsberg
  unsure (1)..(652): unsure at all n locations
tacacacaaattctcttgtttcatctctagtaggtagaacaaagccaacatatatcaaataattaccatatcacacaagtcttaaatcaagaattggtgaagtgatgtgacccaccacgatttattttcttttaaaccctaaattattaataataactaggttagttaatgcattattgttcagagaatccaacaaaaaggaagtagtttaaaaatatgggctcttgctataagagcaggagagttattgaagaaatgacaaggctttttcattaaatgttatatataaagagcaaaacctcctctgtaccactgtaactgtactataccataaataaagaacattcaaaatgcagagaaaatgaaaagaaaaaaactatatgaaacaaatatcgaaaccctaattatttatccggttgaaacttaaaatcgagttttttgccacgtaccttagggattgttttgagagtttatcgagcaagcgagaaggtcaaaggccgtatctttgtttttagtaccctcttttttattatcctcaattagcgagattaccaatgacattcttctaccgtntcgctcgctgaatcggctgcgctgcgtttgcgtctctagcgttggagcggtcgcntgagaagatgtgaggtatgatagt

SEQ ID NO: 51259 - DNA, 810 bp, Arabidopsis thaliana landsberg
aagcataaaccatataatttgtatttaaaccacatatacaacataattaatcatatatataaatccacacttgaataccaaattataactgaaatcataaatattatgtattattttttttcatccactcaatgtcatttaaacacacaattattataattttaatcttttatttttgaactacacaaatttttacaggaacaaaaacaaatataatacaattgaaattagtattttaacactaaccaaaaaggaaataaatttgactatgagataagaaggcgggcttagttatataatagcaagaaagaatctgtatatttgttgaatcaaaaataatcagtaacgctttgagtgaagatgatgaatgttgcagtgacagccactccctcgtctctcttgtactctcctctgcttcttccttctcaaggtctctcctttttctatcttactctctcgcttactatgaacacttggggggttttaaatgggtttagttggtgaattgcagggccaaaccggcgaatgcaatggaaaagaaacggcaaggtttgtttttgaaacttctctttttatctcctccaagttcgaattagctgatgaattctacaaggaactctttgtttaggtggtaacatgactaatgaaccatgcatggatagtgtttgatgaaatgcttcagtgaaacttgaacttctttgaattcaaaaacacattctttgttgtgtttttgcagagacgattagcgacaaaggtggctgtttccggtgctatcacagctggatttgagctgaagccaacctcatatcc

SEQ ID NO: 51260 - DNA, 644 bp, Arabidopsis thaliana landsberg
  unsure (1)..(644): unsure at all n locations
aatctctgcttcttctgcgtttaggtttgggagccggtggacattcaagcggctgcgaaatcctaaactcctctgctttaggcattgcgcactcttcttattcttattcctcctattctttctctggcttcttctcaaccatcgtcacctgacacttaaccggcgacagaatcttgatcagtttctctccattacagattgtcttcttctccgtctttactcattctatgttttcttctttacccttgttattactctgcacctcttttcccgcaaaattcataacttacacgaaatatagaaaacagaaattcaaagtatcaaaaagaatagacagggaataaatacatatatctttagatttatcacattaataaaattatattaaagaggattttttttcttcataatcaaaaacaaactaggacatggattattatttttttctttaatataattagcataattacaaatttcacattgccacactcaaaaaaggctatcaccgttgattaaaaaaaataatctatggcctaaacttcatttcattgagaaaagatcttaatcagtttccaattgaaaatagaaatagagacacaagagagagtttacacccaaaaaaaaagagacacanagagagagat

SEQ ID NO: 51261 - DNA, 950 bp, Arabidopsis thaliana landsberg
gtaccgagaggaagtggtgggtgagggaaaggatcgtagtgtcagaaaagaaacaaagaaggaagaaggaggagagtcacgggtttgccttgaaagccacttttttttttctttcactttctttttattttagtttagacactcagacacatattcccctccatcttctcattaatcgaggttgctaacttccaaattctaatttacattttcacattcacttttttcttttataatttttaattttactgactcttcttcaatttgatcaaaattttaactttttatgatctagtccatgaaaagtttaaattttatcaacacctttatttacatgagattctctttgttggatgatttttgagatatggttgttgttttgtgcgattattttacgtttactttgttgaattgtttatagtttctttcagaaaagaagataacattttaacgttttgatcgatattttacgtttgcttttgtttttttgttagtataatttttcttatttactgctaggaagacatttagatttagagatattagaagaataatttgcataataacatcattctaagaaaataaaattgtgctaacagcctaacacatataagttttcgaacaaaaaataacactatttgtttttttttcattcacattttctggaattttttgaattgttagctactaaatagtttatgaaaacatgttatgtaagtagaataaatttcaaaagtggctaatcaactcattgcatgttgcaactttattccctcacatgtatgtacgcaactttttcttctctcggaatatacacaaaatataggatttcatatttctttgtctcctttatatgatgatcttgacatgatataagaatctataaaactactttggaaccttttttttctttcgatagttctacaagaaggaaacttttccaactatag

SEQ ID NO: 51262 - DNA, 764 bp, Arabidopsis thaliana landsberg
actatctctcttctccttattggcgcttgttttctcatgtgagtcatcattttttcctgcttcttcccttttacctctctgcccatttctcgtaatcctcaatttggttttgaattttacttagttgggctagtggagctcttgatcctgacagcactacatctgatgatcttgtcacttctgtcaaaaggttctctttttccttctgcccacatcatgttttttttttcttttttcatttgattccatcaattaacactagtctactatgtttatgttccttttctaggggagtgtgggctatgatcgctgtctttcttgcttactctttgctccaggccccttcaacgtttgtttaccatctcagctgttttattaatttgctttctcttttataatgtagattgtggttgttggtgatacttgtgatgtgtctttaatcaagtaatttgctttatgcagggttctaatcaggccccatcctgcaatctggcgcttagttcatggaatggccgtcatttacttagttgcacttacttttttgctctttcaggttcacttttttttcctccctagatccttcttacttacctatgcctgtgatttatatatggattcttgttttaagtgagcaaactctaatagttacattattcatgctcccagagacgtgatgatgcacggcagttcatgaagtttctccaccctgaccttggaataggtaagagtttcagagaggaatgctgtttattcgagctagttgc

SEQ ID NO: 51263 - DNA, 593 bp, Arabidopsis thaliana landsberg
  unsure (1)..(593): unsure at all n locations
tttgaattctacggctccgattagaagctatcacaacagaaatggtgtgcaatataagtcgaacgatccaagatctatggattaggttttaaacacatgtgattgcgtctaattcgttcgatcagagatcgacgcctcacaacaaaaacatcgaagtgctatccacattctaatcttgacctctcatcctttgaccaatgtccaggaacccatcgcctttcttcggtcacacaccgcggtggggctggccctccacggtggtgccctcaccgatgcaaggtgaacctcctctatggtatgccgcttcctacccagnnnnnnnnnnnnnnnnnnnnnnnnnnnnnnnnnnnnnnnnnnnnnnnnnnnnnnntgtttcatgcagcagtcatcctttcccatggagacgggcggttccacgacacatcttcaactttggcgacaaattcacttctccctggctgcaaaccatgtgtggcgaggctgggaacaccatcagcgtgtggaggtaagtttcctggacatctactcgaccccgaccgtcgctaggcacgagatatggcagcggtggcctcctccatatctactgtggtggc

SEQ ID NO: 51264 - DNA, 1198 bp, Arabidopsis thaliana landsberg
gtaagcaatgtagttcaaaagacttttcttaagcgttatctgaagttaagtctttaatcattcgaatatttatttatatctcatgagaaataattaaatcactgttaaatgaagttagtaaagttttagacacttcacacatctttttttaactgttagatgagtgacgttagtaaagtttgacacttttacacaatttttatgatagaaacagtgatgcctgttgtacggcatcaatgatttcatggcatagtcaacgcagagatgattcattttacccaccaacatgtaatcattttactagacggtaaaaacttttagagcaataaaagatacatttgtatttgtagttcaaaataagatttcacagattcacgacgcatgcagtttgtactgaatagtacacttgacctaattatgatcaagtatgggtaaatataacagtgaaatgctagtctacacatatatatcaatttcaatactgaaaaaaaaatgtggatcaaaaacttacatataaatcactaattttaataatctagctgctagtaaaacaagaattttgagatagtaattgtccactacatcataataaatagctgttaaatgtcaataatataaagtggaaacaaacattatgtgtagaaggcatgtggaagatagactcaaacaacatgtgatgaaagatgtgttatatagttttgttttgcgatgagtgtttcgacttgttgtcttcatctccgttaacttcggtccagtccattcttccatgtgccctcctctttctgatcattcaaattgttacccaaaccaatcatctttgcttaataaaatcatcaataaaattaatggtcaaaacattaaacgtaatttttccaaatttgtggtaaaaaaacaaattgtcagaatgaccaagattcaaatcatcccagtgcgatttcagttaattgttattttaatttaagttttattatgaaaagaaaaaaacaatctagtaaagatttagaaccaacattcaagactgacactcaggatttcaaaattaaaagtagtgacaggagataatggtgatgtagtagctcaccagcttccaataatttctcttttgacaaaatataaaatgattagtttaatttatgccagctggatcacttcattttcctcttaatatctagcatcataagcagttgacaaaaaagac

SEQ ID NO: 51265 - DNA, 1778 bp, Arabidopsis thaliana landsberg
gagcagatttattacatttggaatatcttcagtgctttctgtctgcaatgaatgaccgaacaagcccatttatggatctagaatctccctgaaaagtaaacactttgatcagacaaccccaatccatgccatagaaacaaacatttccactatgcaggaatttttcacttacatcagaactcagaggttgatcagttgataacatatccgtcgactgagttctcgatatagaactaacaaatggctctgaactttttctcagaaatagttttctcgatccaaagttatgtttcatgttagatccatacctccatggaccattttcacctttcagtttccactcactataagacttaagggcaagaatgcagttcactatccttatagacttgcctccctgataaaaacatattcaacaaatcaatcaaataaaaaccaacacctctctatccttccttaaaaaccttaagttttttctaccttctccatatctgaagcttcaaatgatggcaaccccatttcctctatagctactaaaaaattccttatgttttcaaagtattgaaaagctgaaagtgcagctccatctgcaacatcgtccggcgcttcaacgacctgtaaaagagatgttaattctccacatggatcacataaggttgacatcaacagatattttacctttgagactgatccaggattaactttgttaagaacattacaaagaacgatcccacttcgcaatccaagcctaaactcttcttcagaaggctctcctggaaaatctttaccattggaaactccgatcatatctctaagccacccagcagcttcatatcttctcaaagctacataacaattatcaatcataaatccgtgaccagaacaattcctacatcgataatttcaatatcatcgtgaaccagaattcgaattttctcaagctatctttagatttcgtcaacaaaaatcacaaagttcgtccctaatttctttgaaacccagaattgaagaacggatctaagaaaatacaaaagcaacaagagactcacaagattcttcaacttttctggaaaccaaaccgacgtcgcttgatcggctactatgttgttgaagaacatcttcaacaatcgatacaacggaaaacgaaagatcattgttgatctccgatgtcgtcgccatctgagattctggtgaaattatgagatgcagagaaaattgccgtgtttataaagggagaagaagacgaagaagaagaagaagaagaagaaaaggtgttttgaaatgaaaattttccctcactttctcggctctcactttttttctctctctaaaagataaaatttaggggagaagaagaaagatggcgaaatacgctccgaacctgactccaaacgtcccaggttcgtttccttttctttgttaccgttcgtggcaatttatgtaatttgtccttataaacttaaaacaaaacaaaatttaaaagaaggaaaattttagtatagttttaatctcttaattactatttttttttgtatagttttatggatcagagaagagaaaattttgattaggttggataaaaatatatgtaagggtgcaaatgattatacaataagaggagtaaatgttagggaaataaaatattgagaagtattttataccatttatgctgaaaatctggacaaaaatggatacttattctattaacaacacagctgaggaattgtaaggaaaaaatattccataaactattttatatttatggagtggaaataaaa

SEQ ID NO: 51266 - DNA, 474 bp, Arabidopsis thaliana landsberg
tgcggattgcatatcagagcttggtctttcttttatatgaactggtcctattgcctcactcatcccacaactggataccttccattaaaaagaaaagcattactacaactacaacaagaggtaagatccatcttctcgcattaacttgtaagttcaccttaaggatctcagagactaagtccctcaaacctcattccagaaaactaaaagaaccaaaggctaactcttttgataaaccagaaaaaaagaagcaattaagcacatgtacatgaggttaccatgtattgtgcaagttcagtggcctgtgacagatcgctactcgctccagtggtaatatggtccaagccaaagatgagctcctctgcaactcttcctcccatacatacatcgagacgagctaataactgcctcttgctcactgatgtttcatcgtttgaaggtaactgtgtaaccattcccaatgcagatccacgt

SEQ ID NO: 51267 - DNA, 580 bp, Arabidopsis thaliana landsberg
tatatttaatgataaaataaaataagtatttacagaaaaattaaatattacggtcggtttaaagtgtgtaaaagtaaaaaaacatcatgtactttgggaccacattggtgagacaaaatggtagacaacacagggacactacccgcatcctcctgactccgtctgatgatacatgcgtacgtataggtacgtactcatgtggagtgaaggccagatcgccattcaattttccctgagccactgattcctgccgctcatcaactgcaaatattcctgctgtgcatgccccatccaatgcatcacccatcaatagtacactctgcatgcaatgcaatgcaagctagtggtacacacacaggcacagggatgtagggccgtgtagcgaattgatgaaaatgctcgataggagagttgtccatcgcatgcacggctcacagcaccactgcagttgaaccccagtcctgtacaaggtcaacgtcagagatttgggacacaagaatcaaccaaggatagcgagtatacatctggcttttgtctatacaccgagtcacaaatatatataaggccaacattgttggtg

SEQ ID NO: 51268 - DNA, 313 bp, Arabidopsis thaliana landsberg
aaaaaaaaaaaaaaaaaaaaaaaagaaaaaaaaaaaaaaaaaaaagaaaaaaaaaaaaaaaaaaaaaaaaaaaaaagaaaaaaaaaaaaaaaaaaaaaaaaaaaaaaaaaaaaaaaaaagaaaaaaaaaaaaaaaaaaaaaaaaagaaaaaaaaaaaaaaaaaaaaaaaaaaaaaaaaaaaaaaagaaaaaaaaaaaaaaagaagaaaaaaaaaaaaagaaaaaaaaaaaaagaaaaaaaaaaaaaaaagaaaaaaaaaaaaaaaaaaaagaaaaaaaataaagaaaaaaaagaataaaaaaaaaaaaaaaaa

SEQ ID NO: 51269 - DNA, 605 bp, Arabidopsis thaliana landsberg
  unsure (1)..(605): unsure at all n locations
ccgggatcggcnggtgagtagtccggaccccactcagaagggtctggtacccatcttggaggtccggtcgccacgtacgggggcccggcgctttccttgcagtaggtccagatccaccgcgtgtatcctagagcacgtccctttccctggccacgtggcgaccccggggcggtcgatgtggcgcggctgcgaactggtctccgtgcaaccagagacctcttcgccggcgtacgccttcatattgtggcatggggtacccctgtttcagggtacccctgtttcagggtaccgacacctgttctcaggtactcgacagcagccctcagcctttgtgtaactcattagagttgagctgaggctttccttgagcgattccctttttgggtgcatgcaagcgcatctgttagatgtagccccaagcccctaagtaatccatgtggattgctcgggggtttatgcagtgtaaggggtggacctttcctgtgatggttcgcacgcaatggacgtgagcatcggcctctcgggtagatgtagactcgagccctgcaaccatgtggatcgtcggaggttacacagtttatggtgtggaacctttctgcgatggt

SEQ ID NO: 51270 - DNA, 1207 bp, Arabidopsis thaliana landsberg
gaaaaccgttgaaggactttggacgaagtagtttgagtagtggtcctctcttctctccattaaataagctaattgccttaatatttttgttctgtttatttggttgtttttgtgagtgtgtgatgaaagaaactatatgatcgataagttcatatatagtaacgagagagatatcaatcttatgattggtgtctatctctgaaatgatttattgatgtggagtaaattaagcactactatatagctagcgttaaattaattatttcatggtggagaaaactataataacacaagtcatgatgtgggtttgttgttcttgtaatccaatttccttgacgcttaagtttaaataagtaataattaaccactgaaccaatcattcaaacctaggaagctctatatttatacaaacgatatttgatttcttaattttatcttactaactttcctattttatctttagttgggcttcaactttcatttttatatatgttcaataatttaaactatttttagaacctcgggaagtttcataagcaaaatattcctctttttgtggccattcataagtgctctgttaacatgagggaaaaaacatgttgcaccccgaaacaatcacaaccgaaatcaaaccggaataaaatttcttaaccgattcagaactgaaatttgattttagaccaattatctatacagaaacaaaaacctgttgcaccccgactgagccaactaatagtttatttttttatcaacttttgtcaaccaccgaatcgaatccgaacaaaccctaacctggacagaatgaaattttttccaacaaaccagagcgaagaaatccggtttcccattcaaatctcctttttcggaagaaaccaacaaatccaaacctagttgaaccaaaaaactgaaatatcaggcctaaagtttccttgcggcttggagtctccattggcccataaactcaattatatacgaaggcctcaaggtctatactagaactcccacattcatgctagacattttttccatcaatcatggcaaaccttaaatttaggtttttagccaaaacatcattttgttatatccgtttctttaagtatacgttttgagttttttcttacaattcttaaaattttctgtgtaaagtaattagaatactttttggatttgttcccttttttttatttacttattcatattgcatacc

SEQ ID NO: 51271 - DNA, 826 bp, Arabidopsis thaliana landsberg
cgaaaactaagatattaatatcctaatgtaaagcttctagtatccctttattttctgcaagcaagaagaaaagaaaggcgaattgttctgatctgttaagcaattacctgatttccataaactctggatatctgttctaaactactctttcctgtcttcacctacaaaaacgcggaaaatggggataaaatgatccttccgtttttagatactagcatgaaaaacaactcggataaattagacgggcaactacaaacttacccctgattttatgaacttctctgcagcagaaacagcgtcacttcctatggagatcttatcagcaccggatctgaaatactcagcagcaacttccaagctagaatagtacctgagccaaattaacttgatgttaaattgttgtagggaataaaaattgcaaagtccttgctgaaatataaaagaacataatgcctgcacagacatgttcacagaaacaggctgaaaagattaacatgtacctgccactagcatctgtaaagtctctaataccacctccaacagttagtggtacaaagacattctttgatgtctgcctcaacacctataaagtatgaaaagagatctaaatcggaaattacagggaaggtgtggaagtaatacttatattctactgagaatgaaaaatctaggtacctgaatcatcggcaaatcccctagaggaaaatcgcggaatccagttatgtttaaaaagctaatctgaaaacccacaaacagcacggtaaagcgccaaaccaaataaaaaaaaggtgtcttggagccattcacataatattgcaaggagatc

SEQ ID NO: 51272 - DNA, 505 bp, Arabidopsis thaliana landsberg
tgttgagaccgactcccgctgtggggcggggagtatgacgtgtcacgacttacttgtcagttgggcgctgcaagtgtgttgtctttgtgaaagtgccgatgcgatgtttgtatactcgacgcatgactaccgacctccataatctcaagccgggttactactggtacaccatggccaacgacccgctggccgtcatccatatccatgaagacgggggcgccacgctcatgggcacggactatcgcatcggcgccgaaggcgtcgctgatatggtccggcagggcgagcgctttttctggatcgaaccgccccaagtctgatatggcggatctgctcctcacgaacgtccgcacgccgcaaggcgagggcgtggacgttctggtacgaggcggccgcattctgcaaatcggcccccgccttgaggccgatcccgccgagaacgtcgaagagggcggcggcgccttgctgctgcccgccttcgtcgaggccacacccatctggacaa

SEQ ID NO: 51273 - DNA, 988 bp, Arabidopsis thaliana landsberg
cttttatcttatcaatacatttaacatttcatcaaagaaatgaaaggtaaaggtactagcgtagtggatgttggtgtgttggatttaaaagctccaaaaagaattaacataaaaacttacaattgtcaaatacatatcggacgtagcccggactaacacctagtagatatgtaaaagtaaatcaaaataattcaggaatgagtaaaaacaaaaattaacaggaacaatattactgtggagaaagatgatcatccccacacttattgcaccattgaaacgaccaaaagaaaagcaattaaccaagtagaatggctctgaccacaacaatgatctcagaaagcaaaagaggcaaaactacataaaacacgccctaatatgcaaatgcacgatcgagggaaacaaggtaaacgaagacaatggcagacacggtaaatccttacttatgttggcgataaaagaagggtaacaaggatgtatgggactgaatttgagtagtagataaattcgtgaatgtttgttactacatatgttaaaataattcacgattgagcacgacgcgtaaactatctttacacggtatagaggccatacagctattaactaaagtctgttgagaggaaccctgagactgtgttggtgaggagttctgtttgttgtcctgtccacatgagatataacttgcggcattgtcatccccaccgatactatgatctctgttgcatcgaaacaacaaacaacatttgaatctgatgtttctcataaaaagaagtagatgatgaaacgtaaacagctcaagactgacctattccttctcggatcgataaatttggccttatgatttcttcgctactcaccataaacacatctcctatgtacagatgattcgttggttcatacacactacataactcttcttctccatggtcagtctgctacaacaaaaataaagcttgagaccacgtcactaatttgcttacttgggttttac

SEQ ID NO: 51274 - DNA, 694 bp, Arabidopsis thaliana landsberg
atgttagagttctatcagctacatttctataaatttccaataattgcaaacgcatcaccaaccaggattccgagaatagaaacaatctcgaacaaacagaatcgagcaatgtcgagagaaaataatcaacgagctaaaataagattgatcgatttcgaccctaacgagttttacttacaaggtctcttgaagaatgccttggtatatgtaagctgcccagatcccagcgacacagaacgacaataacagaactcgccggagaccggaaccgtgagattccatcgccgcacgtcgcttattgttttatccgatggagctccggcgaaaatttgaatttcaattttacgctatttgatcagttttgcgatcaaattatgagatcggtctgaagtggaaacgaaagttattagagagagtgtaggaggcgcgagaaagacgtagattttccacgtgtaactgtgtcattggcttaataatctgacatggcacttctgattggctttaggacgtggatttatttctggaatccaagtcatatgcacattcatgtctgagataggaatgggaactatgtgccgttttattgtcatgaaaacgtcacgcagtttcctagaacttgtaaacggatgttctttttacagcttgggccttaatttgattaagcaaacttgcacacagctaatcatgtcagttg

SEQ ID NO: 51275 - DNA, 598 bp, Arabidopsis thaliana landsberg
tcacaatcgaataaagataagggtaaataattgatttcgatttcttgtatgtactaaatttatccgcaaaacataaacttcaacactcatgtgccgtgcgattctaggccttgctgaggcatgggtttatgggatagtacatccatggctaccgaattttgttagaatatttatgattactttcttaaatttaattaatgtgaaagtttattcgggacctccaattttagtagcagtaagataaaatgccccgtggcctctatgaatcctgtttctgtataaggatataaaattctttttaggtcgcttggtcgtcggtcgagcattatcttctgcagctttaatctggctgtggctataacttctactgtatttacagtagtccgagcaattacatcagtaaagaaactttccagtaaccagttctgaacttcggagcagctggtgaccgatctgatgagatgcgtaacacagatgccgcgctggattagtgaacgaaaagatagattgcggtaaaagatgccgagcctgactgccttgagtgctcaaagactgatgacacatgccggactcgggttgccagttagtagtagagtgc

SEQ ID NO: 51276 - DNA, 2727 bp, Arabidopsis thaliana landsberg
aactaatgtacgcaggagtgacatttagggtcttgatatttttgaagcaaaattaaatacgtctgcaagattttgcagagggaggcatgtactatatcatctgcaatagtagcaacatagataaaagtcataaacccctagatccggtccctttaatttaattcatatatatgatttgacataaaattacttttgttaaaaagtttgtttttacattaaattcttctatcttttttctaaatatcagtttaatatacatttgtaatttttcttgcaatccctagccagcttaatgatatcattttttttccttctttatatccagagaaattttatgcggaaacgtagattaatatcatcgaacttgttgatccaatttgttttatcttttaaaacatttacagtgattacaaaatagaatatatagcaagtaaatatccaacgaaaacacataatgtctttaacaaaaaaaaagaacgaaaaaaaaaagaaaacacataatgtcaccattagaaactcgtgtctacaccagaagtcattagtttaagatattcattttttttttttttgataagatgatattaaatgttgttaaaataaacaataaaaatgcaattatggactgcatatacacgtccaacacttggacaatctgtatcgctctctctctctctctctatatatatatatgtcatggtctcactatgattgttctataaatacaagcctcctaactcataaaataagcataaccctaactctacaaagttcttctgattctttctctctctctctttctttcaagagcggttttcaatccattcgctaaagaccatgaacctagaagagaaaccaaccatgacggcttcaagggcttcccctcaagccgaacatctctactacgtccggtgtagcatctgcaacaccatcctcgcggtaaattattacctacatataagaagatatataagcatatatatacttgcatgaccctatatatgttgataatatcacatacatgctaagctatacatattgttgtttatgttatatatatatatatttcttcaaattttcgagctaatttgtaaaccgaatctacacacatatataggttgggataccattgaagagaatgcttgacacggtaacggtgaaatgcggccattgtggtaacctctcgtttctcaccacaactcctcctcttcaaggccatgttagcctcacccttcaggtatataacacttgtgttatagttatacatacgagtataattctttttatacaaaaaactgatactaagccaatctttgttttaactaagcagatgcagagctttggtggaagtgactataagaagggaagctcttcttcttcctcttcctccacctccagcgaccagcccccatctccctcacctccctttgtcgtcaaacgtaattaagcttattaccatttctgactcctttttcttctataaacttaatcactatctacatatatatgattatctgttgaacatctttggtattgtagctcctgagaagaagcagaggctcccatctgcatacaaccgcttcatgaggtttaacctttgacatatactctttagttccaagttaattatgaaatttaatgcataaaaaataaatataatttagtacttttcttcatctttttttgaaacaaaatataaaaagggatgagatccaacgcatcaaaagtgccaatccggaaataccacaccgtgaagctttcagtgctgctggccaaaaatgtaagacaagtctctttttgttaccaaccattgttgtcacctttaatattattttttcacaatttcgtttgtgtaaatgaaaaatgtcacaaacagtgggctaagtacatacccaactctcctacttccattacttccggaggccacaacatgatccatgtaagctatacaaactaagtctgcataaggacatatttatatacattatataaagatttaaaatgttttgttcaattagggcttgggattcggtgagaagaagtgaacaaaactcaggggaaaagaagcctaaaaataacaaacgcatgcacgtgtgcgagtggctgcgtcgtttttctcatcttgtgttgttcttctgtgtaattttcttatgtatgtcatgttgcagaaaatgatgttgccttagtttttatgactttatatttctgtctgtctttagatttgaaagtaacgtcacttgctatgtccctttggacgtttatgtctggtctttatttgtcttaatcctatcaaaattttatatgcgtattccttaattccatctgggacactttttcttttccccaatgatttgcaactttcaacatcgtaacttcgaacacgagaatctcagatcagtcctcagatgacgtgagtgtacagaacaaaacaaaacaaaagtaaaaattcactttttcagcgaatattcattacatgtatatatacaaattgtctgtaacgctgtgaaaaggaagtaggcatagatatctgaagcaattttcttcagaacattattgactggtgaataataacacaacagttacaaattacaataatacgtgtaacatgatctgatcctcttaattcctctatctaatcacaaactaatcaagccatgcagacttgtcttgtccttctgcagaacaatctcaagaaactcgaaccggtttaaaggaataagaatgttgtac

SEQ ID NO: 51277 - DNA, 2476 bp, Arabidopsis thaliana landsberg
caaaatttcaaaaagaatggtccaatttacaatacataaggaacaaaagttaccatgagattcatctactttcttttatctgatactcattcagtagtaagccgccttcttttcccataatcagtatcccttgattttgagcgatggttatcctcgcgagacaaccgcgatttgttgtgtcctctggatgatcggcctctgttccattcctcatcatgttcaggttcgtccctgtgtctagtacgatgatcaccaccatatcgttctcgttcttctctatgacgatccctctccctttccctttctctgtcacgaacatgttctctggagcgttcacgatccttatgatgatgttccctctcacgctcacgaccggtgtctctatcatcacgatgccttctctctggcatatcataaccgtgaccaacatctttctccctcggtatgtccctttcataaccagcatctttatcctcacgattccttctatcagatgaaccagaccattccctttctgaagctctttctttttccttcacaggatttggacgagcccctctttcgtgattaacctctccatactgatgatcagatgcagcttcctccccataactcgattccgcagctcttccactacccagatcttcaccagcaccccaccctccactgttaggatcccacattcccatattatgccctccatcaacaccagcattaggcatcattcccattccattcatcggcatccctcgtccaaaaaatgctggattcacatgaggtgccactccaggtaaaccaactcctcctacaggagggaatgatgacaaaagcccaggaaactgtggacctggagccccagggaatcctccataccctcccattctcgccatcggtccaccaaaagcttgttcaaacccttgccccatcattggttgatgcatcatattcataggaggccctgtacccattccttgaccaaacccaccattacccatcaagcctcttccacccatcccattaggcctattcctcattggaccacctggtcctctaccacccattccttgagcattgcctctaccccaattacctctaccaaatcctctattttccccaccttggaaattcccgcgcaatggcgttgttgttgttattgttattgttgttgttggccacgactggtttacttggaggatcagcaggccctcctctcttagcttgtgcaattacagattgagcctgttgggtcctattcacctgtgcctctcccattctcttaaccgaatatggggacgcatactcaacaacacaaggcctaccgttgaatggatacccattcagcgcatctttgcaagccgaagctgccacaggatcatagaactctacttgacaataccctttcgacttcccactagctttctcatcaaagaacttaacctccttcactgcaccatacttgcacaactctgcctcaagctccgcatcagttgtccaccaatgcagatcccctacgaaaagaaaagctccaccgcctcctccaccaccagttcccccgccaacaacaccaggcatagcgatattagctccgttcccaaccatgttactaccaggtccaggaggaatcccgccattaacattacccatcacaggtctcatcaaattctcgttattccccaacacaggcggtggtggcaagagaccctgcgaaatattattccctctaggtgcctcgagatcattagcccgattagaagcttgccctagctcaactctcagcccacctccagtaccagtaccaattccaccaggaatctcctggctaacatcgcttaccttaacctcctgagctccatatccactagaagcgaccaccacatcagtaccacttcctcctcctcctgactctgcttttgcttctttctcaacgctctcaccaaccaaaccaggtatcgaaatcgaaacctcagcttcacctaaaactggttcaaccctatcttcctcctccatattaaccttctccttttcctcgtttctagatcccgcttcgtcgttctttttcatagactgaagaaacccttctccaacattaacgtcgttataaagatcctcataatcatcatcctcttcctccgccataaacccgtcgtcagcaacggcagatatcgcctcgttttgatgaaattgatccatctgatctctcccatctccctcatccatcttaaaagactcttccttgtgataaaaaaaaaagctcctttctcgaatcagatttatcacaagcttacgttatcactcgctcgaacatgaacaatctcaataaaagaagagattttgcagaaattttgtcaccggagacaggacctgttgctagaaaccctaatccgtagatttgtgaaaattcttggattttcttttttgatttctttacaattaacaatattttttttctcgatggaatccactaatttcactaaca

SEQ ID NO: 51278 - DNA, 563 bp, Arabidopsis thaliana landsberg
gaagttcaaagaagtaatttgccatcaatgatatatagtactaatgtgtgtattagtgtatatgcatatatatggatactatatagtaaaaaaaagtgcatgcaaatgaacaatgaatgggcaatgtaaaaggtattgggtgggggaatggtagagcagctgcagtagcagtagcatttatactgacaaatatctcaaactcatccatctgattttaataacagttttttcttctttttcttttgttgttttttaccacttttctttctttttctcattttctacttacttccagatttttcattttcctatttttggtcacacgctcttgtcagttgtagatatcttcatctacaggtgtttccttttattttcagatggaatctcaatctacaggtgtttctcacttcaataaattacggcccccaaaaaatttagtttttgtatttacaagaaacatagcataatatgatacatatggttttgaagtactgttttttacacaaaactttgattattaaacctcagccgttctttagtatttagaatttaaacgcatgcaa

SEQ ID NO: 51279 - DNA, 590 bp, Arabidopsis thaliana landsberg
  unsure (1)..(590): unsure at all n locations
gagtcccacagagttgggagggagcttccctcgccgtgatctcttagagccgttcaggctctctgaatcttgttgacaagcgcaatcaaactctccataacggaatcaaaactaaggagctccnnnnnnnnnnnnnnnnnnnnnatcttccggcgagatttggtctccgacgggtccgtatgagcaggagaagagaacgcaaacgttataaccgcgagaattgctatcattcgggcgaccgttgaatttttctcagaaaataaaaatatataagctaaagattcataatacccaaagtacccctattgaaaagtcaaaccttgtagcaagcccaaaggcccactttatttgagcccagttatcctcttttggacacatttttggtatattcgagtcacgatactcgaatggtatttccgctataattaacgaaaacaatgtctcttcttttctctacaaccacacgagttcgatgttaattaccgaaaaagtgtgtttaatttagctaaactaattggtttcgttgattaggcccagttgggttgaagaaaaactgcaatctttcttcgccaagtctcccacaacacttt

SEQ ID NO: 51280 - DNA, 533 bp, Arabidopsis thaliana landsberg
atttggactttctttgagtttggatttgtggttcttttttggtttttggttattattggtgtgatgggatctttaggattcaccgtgctggtccgagggagaagatatacttcaggccggaagaagtgaaagctgcgattatcacttgtggtggcctttgccctggtctcaatgatgtcatcagacatgtgagtttgtatctgaaactttggcattatagaaacagtgtgtgtgtgtgtgtgaagtcctactaaagacctttgattgttgtgttgtatggatacattgcagattgtcattactcttgagatttatggtgttaagaacattgtggggattcctttcggttatcgaggcttctctgataaagatctaactgaaatgccggtattgttcgattgtgctctttcgagaaaaaggaacccgaatctctgtttctgttttggcttatggtttgcttttttgtgctttcagttatcaaggaaagtggttcagaatattcatttatcggtaggaagttgattggagtttca

SEQ ID NO: 51281 - DNA, 596 bp, Arabidopsis thaliana landsberg
  unsure (1)..(596): unsure at all n locations
gtatgtcccttccactgatgattgggttgctgccgaagagacggagaccggagttccactgccagcaccgagcaaaacctggactgattgtaccgcaccatactctgcgttgcgcgattcgtgttgccaggtccacacaaccggcgggagannnnnnnnnnnnnnnnnnnnnnnnnnngatgacatcgcatcgaagatctgctctgcagctggacagctgcaccacggagaggagaatctgaaaataatggctagattctgtgctttccagatcgcgaagaccctggcagacaacagattttcctgggacagcgtaacggtacgtacgtttgtcccatagttactatacttctgaagctgcatttcatgggtactgnnnnnnnnnnnnnnnnnnnnnnnnnnnnnnatgttgaggctctactactcggtagatcagcgcgtgcggcagatgcagtgtccggagcattttccgaggccttggcgangcttgcccaagacaacccttccatgagaactgacgttcctttctacaacgttgtgcccgtagccggagctggccgctctgcgtgtgccaacgacataatggcgtgcgagtt

SEQ ID NO: 51282 - DNA, 543 bp, Arabidopsis thaliana landsberg
aaatcccagcatcggtaaaattaggagggctaaagaccgtagaaaaacacagttcttataccaagaccgaacagtccaatcaggatcaagatccaattaataacgaaagcgactagcataattattgattagccattatcaaaacgatcttatcccaagccttatgtattaaatgtcaattaaagttgtccaatcttagagaattatagtgtccaatcttggagaatatttacatgttgtgcatccgtgcatgcaggtcaattacatgagcatttgatatttatttagatagagatcagacaacattgcgtacttaaattttgttggcaacccagtgtacacatctccagatactattttgatccatttaatggagggtccaaaacaaaatcttatattaatgtataatttatatgtactatgtttatggcaattatggaatattacatccaaagtcaatagaaaaagcgtggtaaccaagaattcaagagacgtaatcaccttttccaatttttatttggttaactccggtgattttttttt

SEQ ID NO: 51283 - DNA, 1064 bp, Arabidopsis thaliana landsberg
  unsure (1)..(1064): unsure at all n locations
gaaagtgacaaatacagaaatacaataatgctactacatggttataatatatggtctcttttgttaagacaacgaccaacacaactacaccacaagataatcatcgattagtacattattaaatcttaactattattgctaaaatctagggatagttgaaatataaaactatacgatgcactattacatacattctccattaatcatttggtaatgatgaagtgctccaattatatactacctttctttattttgttatgttccttaacatctctattactaaagattttcggagattatgaaatattgtgaggcatatatgatatattcatacaaattactctacacgtttttgaaaattgataggtttaaacatgattgtaccagggaagacatggtcaaacagaaagctattagctttgatgagggacctcttaacaaaaaatttgttggtagagccaaaatgattgaactgacaaattttcatagagtttggtgaattgaataactccatatgaccaattctgttttgtaagacaacgaaaattatgtttttcgaatatctttgtgttatcgtacagaggagcgagtcaccagaaagcacaaacacaacgattttgtatcaattacatcgatacgcaatacaaatatttggaatatgtcatacatatgtattgggcctttatctcatgtctcatcaaacctcgtatctatcataaacttacgattcacagacccacttactacttattctggcccattaaagttcttcttttttgtcggttctagcccattaaagttcagcaacccttattattcattttttagtctttctttttctaattattcaattttatccaaataataaatgaataaatttaaacaccgacactgttttatatatatatatataacaatacaccgccacgtgagaactacgaatgggaatttcgcattacatgtttcgttaacaatataaactggaggaaaaaaacacctcgaaaggaaaaaaattcaatgtaagaaaaagtgaggggaaggcanatcaaagacgtgttctacac

SEQ ID NO: 51284 - DNA, 933 bp, Arabidopsis thaliana landsberg
gacataggaccgaaagagtatgtctcaataatattgattatgcacactctctcaccaacaaagacgtacctccatcctagcaaactaggtcaattaaccactgtaggtgagtgtcatcgccacaacatgtgggccacaatatgtaaggcagcaaagcatagccctcatgcttagaatagcccaacctagaggatactcacaaatacacaagaacattatacaaaacttgactcccataatacaccatttctcacactcagaaaaattgatagatgaaaggatccctctaaaattactcttctttccatttcctgaacaactggattcaattcctcatgatcaaaatcatctctaaaagagtttcaatctcacttagggaagtgatttttattctcttttacttttccactgaccgatatattaggctttcgatcacttcaactaaatgacctaacacaatcacattgatccattttgattaaaacatgcatgagggttttcagaagatttttttttacctcccgaaaatatcttgactgtgttatggtgttaggtcatttttctctcaaaacatggtcaaaggaacgaaaccttcaccagacaccgcagtgagcctagtggaagaaagaaccaccctagcatgttaccctgccactatttctgagcacccgacaatctttcgaaagaaaaaattgaaccaacaagagattctatatagctgacccaaactataatcgtaaaatgttttatcaaaaagtttttatacattttaattttattaattttaggtaaagatagacaatcaattaaattataatattcaaaatttcatatcaaatattatataatctaaaagaatacgtatatctacagaattgcttatagtgatatttaaaattcaattatagaggatatggcagatctactaatgat

SEQ ID NO: 51285 - DNA, 691 bp, Arabidopsis thaliana landsberg
acataattgtaaacatctaacatttatacaaactattgtttcatataaaatctgataatttttatacacaatattctgtttatttttacacaatgttctgaaatttgccgattttgattcagtttcaaatgaccaaagttaacatttgaccaatttcaagtatggatttatggaaatgtcataactggagcaagagaggcataaaagagaaatagtactaagaaaaatggaaaaagtacatcatcaacataagagcaaatgtctcaatgcattattctatatatttttttctatctatcggttctgttataataatcaagagaagtaaaaacattaggagtatgaagaatgcaacaacccacactaagatgtttataacatcatatgtacacgatgaatgccaaatgaactaatttgcggtctaagtcatcatcatctgttaccattgaatcacttcaactttgtgtcaagtccccaaatccggattgttccatcatcacttgctgaggccaccatatagaggttagtcgggttccaactgacacacttcactgatcctgagtatcctcgcaatacactacaagattacggcggggatattcgcatgacccatatgtatacctgacacatgaaagaaatcttactcggaagactctaagagagattgataagaacttgtttcccccatatc

SEQ ID NO: 51286 - DNA, 1951 bp, Arabidopsis thaliana landsberg
attaattaccacgtgttgtcaatattctttccagctctcctcattcactccaaagttgaagtattctgtcatctcaactcctggatatctccaggcctcttcttcaaaactatctatgtcgacctcaaatatagtcctaaaaagcacagagtatacagcaaataaaagaaacatagaacacatcactcaaaaagattgatatgcagacatgagcctaagctactagaacctctagttcctgaacagattgaaaattacttgtgagagggaagagtgaagtccagtccacgccctgctgtattactaccccaaggctggtggaaccctttctgtgcagcagaagcattcctcattcccagtggacgccaatctcctctgccacgaccagccataggaccaaggttggcgggtggacgaacttgacctgaggagggtccaccaacagatgcagcacctccaggaatgggagctgcccccggtcttacatactgcaagaaaaatatatgtaaatgtcaagtagaacaataccacccttattttgtttcggcataacgttggtatgataactccaaataacataaataaaatctttgaaggggtgttggctttataaagttagttagtgtctcaagaaactggttattgttcttcttacagtcctcttcttcaatagccaaggaattacgaaaaaaaactgttgaacatcgtaattgatggtggtgtaggattgcgatatacaagagagaaagtgaataggttattatctccctttcacattcttcattttatgaccaaacacccggtctttgggtaagcaagtaaagagatggtttgtcaaaatctagaagcagactccaatttctttgattaacacactctgcatttgcattcaggtttaggtacaagtacaaagtatatatgcactcagaatttaagaaaactaaaacagggtaacgacaagaaacccaggtactaagtaatctgaccagtgacaacagtgttgcatcgacactgaccttaaactgagaatgaaacggatgatacccatgactgctatacccggctttgggcggtccagtagcacctcctggtccacttcccttgccagcttctcctccgtctttgccatctccttcaatcccttgaagaccatcttctccccacatctgctcctccataggttgatttggatccgtgtcggccactataacaagtgggtcttcatcatcttcatcatcgtcatcttcattatctcccatccttgatcttctatcagctcctccgatcatgacgttacggctactatcattcaacactatctgcaaatcatcttcactgtcgctatcccaatcatctccttctccttgtcctccatagcctccatcgccaccaccacctacctgctgctcaattcttgtcgtaacttgcgaaacgcctcgatctgtagccaaaccaggtaacgctccagtaacgaaaagaccaggaatcgtaggtgtagaatcggcatcgggttcttcgatatcaaagctcatatccttatcgtcgccgccaccatcgacaattgcttgacgagtcgcgtcctgagtagataattttacggcatcgctgtccgaaaccctagagattggagctgaattaggttctgcgacgtcttgatcttgggatcggaggttgaggtcgattgaacggtgaggaagaggaggcggaggagggagaacaacgggaggttgaaacggctggagaacgtcggaatatagatctccgaactcatcgtcttcttccattggagtaaagagattggaggaagaagaagaagaacggccgattcgaattgaagctcacgagaaagagagagagacggtgaagctttaagggcttcttctcaacaagtctcgagaattctttttatcatcgctagggtcttatttatacacttatggaccccgttttt

SEQ ID NO: 51287 - DNA, 515 bp, Arabidopsis thaliana landsberg
gaaagacgccattgatgccattctctcctcatcacaacgagacaggaattcgaatctgatcaccaattaatgaagggttttatcattaataaatcagtttatcaaacattaattacgtacgttgtaataatatcggggaaaacaatgattctctcgattataaatcccacgtaaattttgaaatatgatccaaagagaagacaatcgagattatgtaacgttagattatgtgaaaatcgagaagttcttaatgcatctataacgaagagaagacaagagacattgaattcaccgatgatcagtctgatatgggtccacacggggatggaatctttaactagtaaataagtgttaaaaacataaatatgtttttcaatttctttttctgttttaattgtattttgtgtgttttagtctacggaatacagatcttgtatttaaactccaagaaatgagtaataaaattcttcactttcgttttttccttgaggtttcagttacagagaatctatctt

SEQ ID NO: 51288 - DNA, 934 bp, Arabidopsis thaliana landsberg
agtacctttcagagataactgctttcaatacctgtatcagatgtgttttaccactatttcttgctccgtgggcgatgacattcgcatctttaccctcaaagacagtagatataagaggctttatctccttagtgagaattgaaccagtagtttcattttcttcgtagcaatagtccaatctatatgaatctttcgatctaccacaacacagaacaacaaacaaacatactagttaatttcccttgaaacgtcgctaatccacaacagacggagaaagatttcaactcaaaaatataatgtcaaacctttctgaaaacagaagattaacacaagagtttatatataaaagaacataaatttcgatcaaattaacgaatcccatgacaaatccgataaacccactcaaaattcgaaatctccaaattaacaacagaatcagaaaggaatgaagagaaattacccagcgaattgagctccgaacgaaattgtaacagtctctgaatcatcacccatcggtttctgaaccgaaattgatttcgttgatgccagatccgtcgatggcttgaccctagccaccacccggactactttccggccatggctcgtcatctttgtctccataattctcaaaattcctagatttttttctccctagatcgaatagaaacacaaggaatctctcttggaaagggaaaaaaacgtttgaatttgaagattttgattcctttctcttaatgattgaatgtagtagtgtcagatttgggagataaagagagagagatgaaagtgagtgagccgctaagtcaaaaaattcataatctcgaagtctggctcctttcgatgatgactcaaaacgtgtcctacctcggcgtatctaagaagcctgcatacaaaacagtgtcgtttagtattaagttaaacgcaccgttttaca

SEQ ID NO: 51289 - DNA, 567 bp, Arabidopsis thaliana landsberg
ctatagttactgttgaatcgaaaaaaaaaggaatataatatattcatctactctcaattatcggcggaacagaggattttctcagctctttccctttgatactctctggctgctgaattattttccgtcactttctcgagaaaatagaggaggaacgagaggagatagagagagagctctataggaaacttcctcgaaggagctttgactcgtcagtcgtcactcgggggcttcctcgtgatactatttaaaatttaaaaactttttcaaaacaaataaaagatttagtacttaaaaaaatgacaaattactacatcaatcaaactaaatgcttactattaaataattttccagaactatgaaattatgaagtttattgtccgatttcggtttcagggttaaaagtagaaagaatataaaattaggtaagttaacatgtcttcaaacagtaatctctttacaaaaatttggttcaccagactcttgcaactcaaaattatgtgatgctacattaatatcggctaaattaaccactatcacatcttcaagtgacattgaggatagcta

SEQ ID NO: 51290 - DNA, 1010 bp, Arabidopsis thaliana landsberg
aaaaaaaaaaaaaaaaaaattatctttgattggttttgttctagatgccgctattcatgaatgatatcaatatcaaaatatatttactcaaattcatataaatgattttaagctcacctatttttattataaatatatctaaagttatacttttggatcattccaattttcatttatcaatactatctttgttctcacacggtagtcataataagatgacatttacccgtcactacacaaaaatgaaaaaaagaatgtgatatatggttggagatggttgttctggatcgtttgttttatttgatctgttcgttacccataaactatatttgttctgtttaatttatctaatcatccgctattacaatttgattgatcattatataaaataacaaatatgcatattaaaaatgaaagaataataatatagactagtcatcgccgttatcgtgacattaatattaagtgacaattacatactaaccatttcttttggactaatgctgtttattgtacctattattggcgatcctactattatggatccatataccaagtcattcttagtattctaatatcatttgctgtccaccacgtatacatagaagtataaaacgttatctgtttggtgattactattatttttttcgccttcctttaatttcatctcaaatatatttgataaaaaaaggaaacaaattagtattttacgtcagcaaaatatatttaatcaaatttaaatccaactcgtaataaaatatatagcagttttaatataaatttctagtactgttggaacataacaatctgaatgatagtaagtattttttttatcaccaataatcatatatagcatgatatatatgatattgtttcaatatgttctaaaatattaatgataaaagaaaaaaatgggaatattatttcttcgccaacaaatatacgttaaaatgaaaatttaaaattttgagtttggggataaaaaatgttaaaaaataataaaatttttc

SEQ ID NO: 51291 - DNA, 860 bp, Arabidopsis thaliana landsberg
attcactcattctgggctccccgattaatccagaaggagaaatgatgatccaatcttcaaataatcatgacaacaacatcggtaagattcaatcttatttatccttcgaactttgacagcaatttgttgattcgattttaatctgtaaagtgaaggaccacctgcaaatttttaagcaatgttagggattttcaacattggtatatatatatgaatgagtccaagagtacttgctttggtaacattgttttaagaacagctacatattgatattaaagcatctaaggtttaacaatttgggtgtgttttgatacagagtttcaaagaaggaagaaaatgaagaagaacaatcctgaaacagaaactgattcttcatcagatctctcttgttttgttgcccaaacaggtgcactggtgaggaaatggaagatgtatacacgtatgacacttttgttgattagtattggctgatttaatctgactcttcttttactttggtgttagcttcatcttccacaaggtttcactagctcaaatggtagtaatagggaatgtagaaagagtccgagaccgattatatcatcatattcgtcaagcgagaaacagtttgtaacgtttacacttgcacctgttgatggcagacattgtagactggtgggatcatcatagcacttgcacttgttagtttcctttattctacttttgttggatttgactcttgttcaattctctgcagcgtcttccgatgcaattcacgagggagaatgggattaacaagcctgggaagatatatttggtgggtaaagatggttctaagtggcttgcaaattttctttggaaaacaacagaagaagaatgac

SEQ ID NO: 51292 - DNA, 619 bp, Arabidopsis thaliana landsberg
ctattaaggaaatgaacacgacccacccaataatgcaagaatgatgaagcccaaagtatgagtcttcttgcttcttgggccgaaccgaactgaactgaactgaactgaactaaagctaaactaaaactaaagttggtacggttccttctcttctctctctctctttctccgtctgtcgctgtctctctcgtcctctcctctgtttcgtagcttctgcagcagatctctctttgtccttctctctccctcagatcactgtaagtacacgacacttcacttcatttcctaattcgatctgtttcttttactctttctcgatttgcttccaatcttgatctcttttctctttctatatcgagcttgatctgactcattctttattatatacttctcttctcgattccttttttgtgaaaaaaacatctttaaaatttcatttttgttagttgcttcgtgtcttgattagtgttgttcttgtaataaatgttgtgatcttatattcattctagggttttgtgtgtgtgtgtatgagcttaatttcatacagaacagtgaaatcttagactttcgattagatcgttgacttttatctgaatattggaatttggtattaacagtc

SEQ ID NO: 51293 - DNA, 926 bp, Arabidopsis thaliana landsberg
tatctagcttgtttgttataccggaggaactgtttgctatttcccattagcttagtttttatgtcagaggactgtttggaacatcttttatacagtggtcaaagtcatggcctgagatgaattcatctctgttttatgacaatctgcatgtgttcttatatgtcaaaactcaatgatgaatataaacgtaactaaacttactaaagtttgaattgtttcctgtcaaaaactaactgttggacactggcaatcgaatatttgaggcgatgtttacttttatgatatgttgtctttaggtatgggatcttggtgggcaagataggctaagaacttcatgggcaacatactatcgtggaacacatgctgtgattgtggttatagatagcacagacagagccagaatctctttcatgaaagatgagctagccaggttacttggtcatgaggatcttcaaaactcggtcatactagtttttgcaaacaaacaggatctgaaagacgcaatgactcctgctgagatcacggatgcacttaaccttcacagtatcaagaaccatgattggcatattcaagcaagttgtgcggttactggagaaggattgtatgatgggctcggttggattgcccaaaaagttaccggtaaagccacgagttaaggggaaaccagaactgaatcagagagagtacgtactattcttctttgtttcttttgtctccttcatctgttctttaacattgtatcctcttgacttttatgtaacaagcttcaactatcttggttgctctcattgaaactgtgtccagaattttcatatatgaaagaaaaaaatcttgttttgtttcagatttaaaactaccaccaaactcaaaatccaaacgaactaaaaacaaaaacagagcaaccattaaaacaagacacgacacca

SEQ ID NO: 51294 - DNA, 1034 bp, Arabidopsis thaliana landsberg
tctcagttatgtcgcttctacttcacttccccaaattcgttgaagctgacaacaaaatcatcaagttggttgagtttgcggatatcggatgcgggtttggaggcttactaatctcccttgcgacgcttttccccgatacgctaatgatcggtatggagctgagagataaagtgacggaatacgttaaggaacggatcttagctttgaggagaacgagctcggagggacagtatgagaacatctctgttgttaggactaactcgatgaagtacattccgaattacttcgagaaaggacagctttcgaagatgtttttcctcttccctgatccacattttaaggagaagaatcataggaggagagtgattagcactcatttgttagatgagtatgcttatgttcttagagctggtgggattatttacacaatcactgatgtggaagagcttggcgagtggatgaagtcttgcttagagaagcatccgatgtttgaatctcttacacaagaagaacttgtttctgatcctgttgttgagcttctatgcagtgctactgaggaaggacagaaagttgctagaaatggtggacagactttcagagcagtttttagacgcattgcatatgtttcttgaattcagtctttctctgtgtagtaatcttatttgttgtaacaaaagcttctttcttaattttgaaattttgaaattattgttctttgaagacagcataatggagactcatgttagcatcttgtagtaacgatcccatcttcatgttgttaaaacacactaccaatataaagttacaaacttataatgcaataagcaagatgatagttgaatcaagaatcatgcttaaaagggacattcacatatttcttgtaaattgtaatgaaaggcttttcatctttcagacaaaaaagtatattgggagttttcgaagaaacagccctgtgctcgcagagcgaaaatcaaaccatccatcaatacctgaatgtaactacaatttgtgaagagatggaagacagcatatcc

SEQ ID NO: 51295 - DNA, 1121 bp, Arabidopsis thaliana landsberg
taatttgcagtatagaacaacgaagtggaatgctcaatcctagattaaaccgatccctgacaaatgttttttcatccactaccgcttaaaagttgaaaattattccatcccaataaactgatattatgaaccaaacgtccaaactcaaataatcgatctgaaaatgaatcataatttttaaaaatttaaatgaaattcattttttctatccaaattatttaattcgaatccaaactaaacaaacagttcggaaaacctgattttaaatccattatgttttcaaattaaaatacacatttgactaataattgaattctaaccaatacgaaaccgtaccaaaccatctatggtacaaatactaacatttcataaaccaaaataccaaaaaaccctaacagaaattttttataaagtgggcctaagcctaagcccatataaatatcccaatggattccttttgatctgatggtccaaaactccaatccgacaattgcctaacacacaaaagcctctatctattagttagtgagtgacatgtctcttctctaattttatccttaagacactttccattttgtttagccaaccaatcatcttcattacactaaccagtagacagtagtcaatagtcatttcaacaataaatctttttaacttttaccacagtcacgtcaaacaaaagttgttttcttttacctcttggtcatttaattttcttttaacggaacttttagccagtaaattacactaaattttaacgtacgttttaatttaaaagtaaaaaacctttcgcgtctttttgtttaagttcaatattagccacacgatcagaaaattcgacacgtgtcactctggattaagcggcatcagcatccatctttattttctctccaaatatttatttaattttgggctttacttaaaccagactcatttcatttgccgaggaaagcgaatataatttatcgggcatttctctcccaatctgcttcactcgccaaacctcgtttctttgccggaaccctaggtcacctccgtcagtttgaatttttcggtgagtttaacttcttcactagcgtttcaatttatcattttaagaaagttcactcttttaggttttc

SEQ ID NO: 51296 - DNA, 575 bp, Arabidopsis thaliana landsberg
gtctcttaccctatctatctatctatctatctatctatctctctcttcctcttcctcctcctccttctcctcctctgtctctgtctctgtctctgtctctgtctctgtctctgcctctcttttttttagaaggcaaaagctttgggaggaaaagctacatggtctgtgtacttcatgaggctaagaaggtattgtgaaaatggatgactaggccatagaggtgttttggtaactacatcagcaaattctgcttttcccatatctctgccagggtggctacagctagggctcccttgggcacagaaggacagtgcagatctgaggaggtgtgtgaagcttgtgtgttttgaccgaagtgagctctgagagcttcatgccgatgtgcgctctctgtctctatagacaagcttcagtggaggccgtgtggaacgctgacctgtctacgtcaagctacccaataatagagaaggcaccgatgagtgcgctctgggcccagctgggtgggtacccagatattcccaagctgctgcagttagacattcagtcgaccttcagaaaatttcttgcttccatcc

SEQ ID NO: 51297 - DNA, 1142 bp, Arabidopsis thaliana landsberg
tttgaatctatctgtaaggactaagaagttagcctttaatcatttgtgtgaagattatatatggtcttaacttttaagtatttaatgttttcggtgtttgtttcatgttgtaatatctgggatttagtttgtcctcaaagtcatgcctaaggtatagacatctttatatatatatataattgttgattttgtaactttacttttgttgttctggcacattttggagtatagttcgtaggatttatttttagtctaagaaagtgacgaagaacaccacatcattgtttaaaatttttctttcaaatatttatttaacgtactaacttaatattttgcatgtacgaatataatctttagaaattaatactcgataacttaatacctcgataaaccaacatttatttggttcaaattagttctttaggttaattagtatatagataaatgaagggaatcatttttataaattaataaatatcataatcacgtcattattaatttagagatgatttatttataaaaatatttaagcattaccactacacattgttttttcttttctttgtgaacaagccattgacacattgttaaaagtagatatgcttcaaaaggaaagcaatattaataaaatgatataaattagaaaaaataaaatatggtttggtaaatataataataaaaaggaaagcattaatgtttccttcatttgttgactgaaagagaagaataaacttaaattgttcaaacgaaaattaagaaggaaattttatgaattagagttttaatttcaacaacaaccacacattttttgtgtgtctcctagtcacttatcaacagaaaacatataagcgatccattctcttacatgtagagaatctgaaatcagaaaaactgttattatattcatttttgtttttatgcgagtctctgttcttcactaaagaatatataagatcttaagtccacgaaagaaactgcaatgatttgtgttctattctatcaaaaacgatggaatgatttgaaaagagaaatcccatctctcatcgcatgaatcacaaagcccacaaggtcagttttgtttatctcaacaattttcccttagtgctttttagataaattacacgactagatcttttaacacg

SEQ ID NO: 51298 - DNA, 784 bp, Arabidopsis thaliana landsberg
aacatacattttttcgtcaccgttgtcactctcgaactcggatctcatttttctatatttgatacgtcagcagtacaaaatttattacggcgtttaaatttaatgttatatctatctgtaattggttgttgaagcgagaaagagacatgacaaaggaaattacttaaggtaaaagacgcagtttcatcaaagattggtcaaatgttatatcgttatcaaaggtcgtagaagcatatccacctggtttacgtgctgttcccatttattccagccgtaatttgccactattttaatttacaaaagaaataaaaacattttcactgattgttatacatttttttatatgatttagagattatttctattatttaaacagaacaaatagaaagaagaagatgaattaacaatggaaacatgtgagtgaggctaatcacgagaaatgaaatgaaagagtgcagagctaaattcgtgaaggcccattagtattaagttgggccgtattttgttaaaagcctaaagctcgcgtaagcatctgttgttgtttgatgggtctatctctatccagtctatgactttatcgaaaagataataacggactggaccgtccggtggctattccgaccattagtgttgttcgacgtgtcatttgtttttgactacaatgatttgaattcaaacaagacgtagttgccttttattagcgttgatattttgcgaaatcaaatcttaaaaaatgattatacattttccacatgtaacgtacgtaagttggcgtttttgaaca

SEQ ID NO: 51299 - DNA, 431 bp, Arabidopsis thaliana landsberg
aacacgcgggcggggaagtgctgctcctgcaactgcaggcgcagcagctgtttttttcgcgcgatcgcgtcggtgcggggaggatccggggcagccgcggcgaccgcgtccatgcgggcacgcgcctcggccatgcgtgcgcgggtttccaggttggcgcggtgctccttcaggccgaccgcgaggctggtaagcaacaccagcgcgaaacccaggccgcgcaacaggggtggcaggtgatcgtgcgtgcgcggacggtccatcgagactccttcggcaggcatgtgccggctcaaggcgtcggcgcctttgcccctaattcgatcagcattctcgcagccaggtacagccgcggtgcgatggaatcgatctcgatgtactcgtctttcgcgtggtagccccagccggccagccccaggccctcgagcacg

SEQ ID NO: 51300 - DNA, 620 bp, Arabidopsis thaliana landsberg
tttttcttttctgtgtttggcatttcatatccttccatcgtgcaaaaaaacaacgatgatcaaataattttgtcgtaaacgttttgatagtcaaatttatataatctgattttgtaagaaaaccttttcctagttttgaatttcatctttttgttgcaagatacagttttagtattttttaaaatgaaattgcaacaaaaagatgaaaaagctaatatctgactaaaactgtaagaagattgttcatcttgtgtcatgttgaattcaggaaacttcttcgtttattttagttctaataaccataagccatgcactacttgggagattataatcatatattcatattagaccaatcccgtaatttggtaaagaaaccacaaagggaaacactgttataaactataaattatactatatgtcagtcgtaaaacgtatggaaaaaaatacgtatatctatattatatgtatatatatgtcagacgtatgcacttaagttgcgaatttgtagactggtgactaacactacagttaaataaaatgtgccaaattaactcctacaatgtttaaaagaagaaacacttttttaagagggggtgttaattaattagtgggttcaagct

SEQ ID NO: 51301 - DNA, 547 bp, Arabidopsis thaliana landsberg
tgagggtttccaatcagtatttactatttagtaagaaaaaaatgcttatgtagaaatacaaaataagttgaagccataccagattaggagcagcccatccaagagtagcagagaggatagtcataacctaagaattaaacaaagacataagcttcaaaatctatggagagaggtcactgaaaccaataggtcaaagcattcagaaaaacttacaatcagagccgataaacaaccagccaacacaagtctcctaggataacgcatagccaaaatctgatatgacaaaaaaaaaaaagagtttaagcttgcaaaatcaagataacaacagaagtatcttacacaccttcaaagagcctgtggcagattctaaactaccaaaacactatgaaactgaatggcaatataaaagctacagacaaaggatccaaagatgccatctagattcttaatcaggaaaaggcaatccaataagtaagactttagacttcgattcatgtaaaagccattgacttcatcgaccttaaaccctcaatagattacatgaagc

SEQ ID NO: 51302 - DNA, 608 bp, Arabidopsis thaliana landsberg
tgatttatatttaagattgttttgcaaatgcagaagaagaacctccatgttcaatgatagaaagccaaatcgtaaaaccggattgtctatcttctcttctcgagaagaagcaaagaagagaataacaaaaacgttacatcaaataatatctcaaaggtagaagtcaaccacacatccaaatcaaacacaaaacataaaacaacgaccagtttactgactaaagcaacaaacaaacaacaaaaatagatcatttttaattcttcttcatttccttacattcgtagtcttacttacttcttttaaaaatctcagaaactagagatattgatgttttgaaatttaaaaacaccaccaaaagagatcgcacatattttgtataattagaaagctttgtcatgttccatcttttaagctctcatcttcgatttctccattgctctcggagctgcagctgcaatatcaccagttcaccacattgaatcattaagacattttgaatcagagaagacgagtgatcaaacatgaattgaaatcagtttaatttcgattttatttacatgttaagttgttgatttactcccacaagaagacgagtgatcaaacatgaa

SEQ ID NO: 51303 - DNA, 862 bp, Arabidopsis thaliana landsberg
ggtgggaggattgtctatggaactatatcttcccaatgttggatggcgcctctcacaaggtgaggaaattggttcaatagattcatcttagaagacccttgtgacaagtgaatcttttttgtaggctgcaacatcatcgaaggacgaatggcaagggaaagaaatcggtactcgaggagggaaagctgtgcacatgcttatacatcataggtgacaaaaaaaatttcgtcgtgtggatatcttctgcattgtcaatctctttgtgatagtctttgatgcctgaataactcgtttacatcaaaagatttttactagttttcctaccattgaacttgccatccattttctgatatgcagtcgcaattcagcccagaagcagtgggatgaaacatttgtacttgtccttggaggaatagcccgcctcttccggtcctactttcctcttcttgaaagcttacctaacttctggtcaggtgagtgaattgtaataatccttgactgccctgcagtgcttattgtttaggagaaactgaaatatcgtgaaactttctgcttctgtaggatgggagtctttgcttgcttttgttaagaatagcattttcaatgggagtaaagaggtatcacttgcagcgataaattgtctgcagacagctgttgtgtcccactgtgtcaaggtaacaacgcagctatttgaacaatctatgagctacaatgtacactgtcatatccatatttcactctcttaacttttttttttttttatgaactagggaaacttgcaacttcgatatcttaattcggtactggacgtgtatgagcatgttttccagaagtcatcgagttacacaggtgacacagcgct

SEQ ID NO: 51304 - DNA, 721 bp, Arabidopsis thaliana landsberg
attttatgatttttctatatagttgtggtgttaactgagagttttgtctctgttctagagtttgagaacttggagtcttgcgaacaagcgtactttaaggtaaatggcaaatggctgacaagtatgtatagtagagaagttgtgaaacgaattgtttagggggatttaaccaacttgttgatttgcagatggacaatgctctgatcgatgatagacggatacatgtggatttcagtcagagtgtgtccaaactttggtcacagttcaggcaaaaagactcccaaaagggcaaaggtaaatcttttttttttctcctccctatggaataagtgacctgctatagacgaaacaagtaatgaaatccttggcaaacatgaaacagggaatgggtgtttcaaatgcggctcgacggatcatattgccaaggactgtgtgggtggtccgtcttcaaagtttattgtaaaagatcaaaacagacagcacggaggaggtgaaggctatgagatggtgtttgagggtgatgtgcatgaaacccccaagcataatagtcatgagagggagaggagtgagaagattcagaggagaagtcctcatggtaatggggaaggcaaaagacagcacagagatgaacgtgatgatggtagaagacagcatgactcggaaagacgcacgagaactggagaggaaacacagagagagaaaagaaagagagagtagggaa

SEQ ID NO: 51305 - DNA, 321 bp, Arabidopsis thaliana landsberg
ttttgaatgtttggggaagagcttagatagaggagagttgcttgttctgtggagaaagaggttagactggtttcttccatgtcgaaacgttattctgaatgtccatagaccagattgaaattttattatagatcatccttaggctgattagtgacttcggatgtggactctcttagataaagcctgatgtcctagacatttggtagcgacaagaagcagaagtaagttactgtttgagctagttattaggatatatttgaggtgctcctgtgattgatcccgtgttacatgaccgacttactgcatattcgagagagagag

SEQ ID NO: 51306 - DNA, 1060 bp, Arabidopsis thaliana landsberg
  unsure (1)..(1060): unsure at all n locations
cattagggtttcctctttctttgagagggctaaaaccctaatatatccctctcattgactaaagagttaagcctactctatctactttggaagcgaaattcaaagggtaaggtaaaagcccttgaaagaggaagaaagatacaagatcctcaaagaacctaaagatctaaaggcaggtatatgtatatactttgatgtatgtatcttaataaatccctggatttatgcatagctcccgattatcaaaacaagtcttctaatctatgtttaattttattttctatgctccatgttctatgttncccatgttgctcatacacatattcactttgatccttctgtcactttccttttgaatttctactataataaagacttaacaaggttatctaattaattatagcaaatgagacaaggatataagtaaacacgtgtaattaaaccttcgtgatctctttgagttgacataattaaggtcagatctaaagtttacaaacaaatccaaattggtatagacttgaggtcagtagaattgcttcatctcggagaaaaagagagagtttatcttacttagtaaagacaatttttgaaatttctttgaccaagtttagttttgaggcatacaaatagaaattataaaatcctcactgagtttcccttttaagttatagtttcttttaacaaagctagggttgaagagagagtgagaggaagatgaagaagatggtaaaacacatcaggacacaattgaattacaaagaaaaactgtttgatatattttggtaaaatatgaagtagatatgcattgaacaaaaatatgtagtatttatatgtaagattgatatagatacagagggatacacaaactcatctgacattttaaaaataagattgctttttttttttggttttgttttgttcagggaataactgatcgacatgtatgacatcatatattagctagaattaaaggcgagtgtgggtatgtgtatactctgttaaggaagattcggagaagttagttaatatattcgtagagataaattaagaagtaataggg

SEQ ID NO: 51307 - DNA, 419 bp, Arabidopsis thaliana landsberg
gcggctttgtcgtcctcttgttatagccgataaaggaatatcaagagttaaacaacaccacatgaaggaattacaggtacctgtattatatttcctagagtcatgcatacttgtcttagtggtatgagttaaatacattggctgactgatttctatttttttgaaggatggggttcgcacttttgatgactttattcgtgacggtttgatagagtaccttgatgtcaatgaggaaaacaatgcattggtttgactcaatctccatattttctagatgaacaatatcatattgcaccgtaggcagcctaaaatgataaactgcttctttccttgcttgaagatcgctttatatgaaagtgattggcgctccgaactggataaacgagcataggcatctactgcgaacacatccctcattg

SEQ ID NO: 51308 - DNA, 508 bp, Arabidopsis thaliana landsberg
tttctcctacattgaaatcctcaatggctaaccttttagcctttaccctagtgtaaaagtaaagacggtgttgggattgtatatcatgaatcttgcaatgcgttaattaatctctctttatgctgtcttcttaaccccttaaagttagctaccatgctcaaattaaatactagaaatcttaaaatagtatcaaagcaaagtaaactataaaaatgggtttcgatccctaatttttacatgtagtccaaacagttggaagttaggtaagaattaaaattgaaaagtttaagtcaagatcatagtttctacttactacaatgggaaataaatatgattgtggaggacaagagaagatgaatgaaattatgttgttttggcccagttgatcaaagtgagtccttttcttggtgtgtgccctttaccacatgccacttcttctcttactggaccacacttacacattatattttggcttatttttaagatgcattgtccttttatttcatca

SEQ ID NO: 51309 - DNA, 938 bp, Arabidopsis thaliana landsberg
  unsure (1)..(938): unsure at all n locations
atttcttgttgccattttgtatgtttccatacaggtggctagacgaacaaaaaatcttggaaatcatatgactgataaatcattatgtatctgttgtagctaaattagttaacaaatttaactatttaagtatatcatgagaaatctcaatctagtcaacacttttaaatgtagttgactatgaatatatagaaaagtatagaccaattttgtaagttgaaatatattggttgtattttctttaagacaacttaaaatatatgaaatccattagtaatagaaataaatcaattgtcgagtattctcaatatagtcaaaaaatttaaaaatagagttgactttgcaatgtatagaaagatatctacagatttgtttagttaaattgactgtattaaaaggttcaaggtgatatttttctatatatatatatacaactttaaaatgttttagatttccaagaagtataaaacatataataattataatgtgtatatagatatatatatggacgtctaccttttataaactatcttaaatatattaataaacattgtataaaagtaattaatttattagctgaataaaaatggaaatatacaaaaatactgatggttacggtatttcgcgggaaattaacggtaattcaaagaaatatagagtaatgaaaacttttagagaatctgaacacaaaagcctaaaactacatgatgattgttggtagttgtaggataagattttctactttatttttttttacagacaaattcaatataaacacattaagaagtttcactagaaactatcacctatctctccttctctctcttctctctccctctggctctctctctatagagcgttcacctagtactgagagtnttagaaaatatatttctgngggntatgtctctagaaggatctagaacgaaagtgacggg

SEQ ID NO: 51310 - DNA, 418 bp, Arabidopsis thaliana landsberg
  unsure (1)..(418): unsure at all n locations
gatgctgcaactcttgaggatgaaatatcgactttttctgcagatgtagccatcactgagagttgggaattggagtccacaacatttaccccaccgattatctcttgcaggtgtcagccagtgctcatgaatgggtagtcgcaccatctcatgttccatgatgtaagagatctagtgagaattactcgctgaactttatggtctctgatttctcttagctcatgtgacggagataagtgaagaaaacaatactagttattgtatttagtactcattgaatgggtaattatatgagtatgccattatatcagtaaaagaaagcttagatctgacatggtaatcactaaactatacatcatttgattttgataacgnnnnnnnnnnnnnnnnnnnnnnnnnnnnnnnnnnnnnnntttct

SEQ ID NO: 51311 - DNA, 1135 bp, Arabidopsis thaliana landsberg
tgacttagacacttaggtcagatttatttaaacatagatgctttatacacagctttacactttctcttaatcttcaagattttcaatgtactacaacttccctaatggtcgtaatgaaacatgatataagtacataacataatattcaataatatatgagatttgagtaatcatatgtgatatgatgatactctttccttaatagctaggcgctgataactacataggaggaggaaacacaacaacttgttggggatacagaaatggattgaaaagcatcaaagcaaaagagtagtagacatgtaagccaagacaatattcaattttggggttaactgaagtgggaaagctgcaaaacgtgaagtggtcctcttgctttattctacgtatgtagattccttttgtatgaattttctcaattgtttttcacttctatggcattctcatcaacccaaccatgcatatatttcctaaatgaaacgggtaaggggctatcaaaatccatatttttttggctcctttatattcaatctccaaaataagaagaaacttctactatataatatactacagaatttggacaccttttgacatttatgagtttgaccatttatctaaaatttggtatgttcttatgattagtgtttgaaaataagaaaatatatatccatgtgatgtggtcattcatgtataccttccatagtgaaatcatgatgtttgttgacagtaacatattgttagtggtctatgagctagtgcaacctgccatgactcactttcccttgcaaaatctgacattcttccacaaaacataaaagtccattaaaattctacttttggatgaatctgaccttaaggaattttcagtttcagtttcttcttttttttttcatagaaaaccaaaagtgctgtagagtcgcagagatagtgacatccacttgaatattcttctgttttttcttacattcattaattaaattcaatactcaaattatatatatatagtcctttttagatataaaacatcattattaacatctaattaagattgacaaaaatgaagttagttatatcaaatcgattgcccattcctccacttgcttttcttcatttaaattcagagatactagtaaga

SEQ ID NO: 51312 - DNA, 812 bp, Arabidopsis thaliana landsberg
tctctctttatttctctctctaatgaagggaactctaagatttttatcaggaatcgctgggccaaatgggtttgggggaggatccacagctgaacaagttacacaacatagattttttccttgttcacatctcactgccataatcactggtttgtctcccctcatcccttaaactaccatttacttttcagtctttatagtgtttttgttgagtagatattcgtgtttctttccaaatttcttggatgttccgggagggacattctgcattcgtgtgtcctaaggaaggtttcaacttacaaatattgtaaaaaccaaatagttgtgaacttacatgatcgaagcacatcgtcgataattcccaaaagctttatatttacacaaggaagaacaattacgataattttaaagtcctcaattaatctaatgttttgaagatttatttttatcaaaagcttctgatactcacatagtagacacttatatctaatatttcacttattgtcttgaaatttcattgcaaaaaaacttattcttgaaatttttattgttataattcataaaaaaagaaagtagctaggctaagagtcagacagttatatgataatttataagatgtatcttttattccaatacatgggaaagaaacttttcaggcaaaaaaacgatctgtgttttgtatatgccggcgacaatatatgaattttgtctccattgaaatttgaaacattaggtatggttggttacagcatatgtctatatacaattgatttgccctttttgactttaacctttgatacatgtctcatcgt

SEQ ID NO: 51313 - DNA, 350 bp, Arabidopsis thaliana landsberg
  unsure (1)..(350): unsure at all n locations
gtgcattaaaggcatcaaaactagtgtaacaacaatcgtaatatacggagaagggtttgtgcagaccaggtaagatcaagacatgcgttgtagtaaacttctgtttcagagctttaaaggaaccttgacatttctgggttaacttgaactgaactttgttgnctagtaaacctatgataaatttggtaatgttagaacacgatttaatgaattgtcgataatataaggcaatttcaacgcagctgctgcttgctggcgtatgtgtcggtcctttggagttgcgaatgtatgcgagtttgcttggatccataacgaatccttttttgttgactatgctgacgaagaatagg

SEQ ID NO: 51314 - DNA, 512 bp, Arabidopsis thaliana landsberg
  unsure (1)..(512): unsure at all n locations
agatgtgctgttgtaggtcaactgcggaggtgataatgtcctctgagcggatcgatctgtggaagtgagcgttgggactaaaaataggggttgtaggagggttggattgacggactaagtaaaataatgtcaaaagtactggtctttgatttgagttgaagcttgaactctatgcataggtctgaagtgatttcacaacgttggcgtacactgaaggttaagagggcgttgtttggccggtgcttntgagaagttagctgggtctggctgtgctttagctggatagtagccacggaccgcgggaatgtcgttaacggattgatgtgtgtgagtaattagatgatgacgtacctgggtaggtcaacgcagagtgatacgtctactcgtcgcgtcttacagggcttggttgaatttgttcagtttcacatttagagtactggggagaaatcatactgggttagctttcgcagggagtacttgtaatgctttgtgtcaattaaagagttggatct

SEQ ID NO: 51315 - DNA, 569 bp, Arabidopsis thaliana landsberg
aaaaaaacaaaaaaaaaaaaaaaaaaaaaaaaaaaaaaaaaaaaaaaaacaaaaaaaaaaaaaaaccgaaaacaattcaaaaaaacacaagagacggacgactaaaaacctaaacgcatgaggtgaaaaatgcgtgagataaataaaattaattgagttgagataaatgaaagatttaaagtagggaaaaatgtagtgaaagatgaattaatgaataggaaaaagagaggaggagaaagaggtttgagtattgagagaaagggtgatttttattttaaaaagtgagagggaaaaagatgattgaattaaaagaatggaaatgagagagttgaagaaagaggtaaaagatggtataaaaaagaaggagaaaataatgtttgatggtggttaagaaatagagaaaaatgaattataaatagaaagaatagaaagaagataaggatgagtgttgttaaagtttgagaaaagagtaaaatattaacgaaagtggaatagaaagtaaaagggagaaaaaaagtatataagggagatggaaaataagtgaaaaactaaaaaaataagttttttgg

SEQ ID NO: 51316 - DNA, 522 bp, Arabidopsis thaliana landsberg
aaagcagtgtatcgaataattgaaaaatatccttgaattggcagacaaaacagaaactcaaaacgtcatctaacatatatagaaatatcccctcggggtagttacttcagacttcagtcaattattacctatgcctatggaaaactttatagctgtattattgatctgccgtcggaaaatcggcaatatcatatcaaagtcgaaaggtgaatatgataataaaaaaatcgcggccagggcgaataaatattttcgcaaagcttccgaacataatcgcaaggcagctaaaataattgaccgttatgaaaccttagtacggagagcagatatacagaacgcccaattgaaagcgtcaaaatcagaaaatagtctaaatgaaataagtaatcctttttaaactctaatatttcatgaaaagtattaaaacagttccggttatagcgttattaatggtaagcgctgtcatgatgactgcatcatgttcatcttcaaaaaaaataaatgacaatcaaagcgagatga

SEQ ID NO: 51317 - DNA, 814 bp, Arabidopsis thaliana landsberg
gaactgccctttgtatatgtcagtggcactttgtaaacgcaaaaaattctagtaatctagttcatccttcttcttactctagtcactaaataaatgatagttaatttttaatcttttactcggcatacatgtagtagtttctatgttgatcaaatgcgtgttgtgtaagttttggggttttagttcagtcttgaatttttatttgttttatgctcatgcagatttctatttcagattacttacattatttggatgtaatgttgctgaaacagatcactgttttgacgaaaagcgtaccacttggggtattccaattccagaaaggattcccatatgcaaacttcagactgaactttatcagtctgaacatgtggtgaaaggagacttcaagattattgcagaggttgatgtttttgaagctgttgggacattgactgaatcagatatttcgggaaaagcatctgaacttctgaccaaaaaaatacggaatgatggcaatgagtctggtgatttgctcaagaaaacttcaccagaaaaagaaagcaaccatgtcaatgaatctaaaccggtaagaaagttaagaaactttgtggtactttacaagagacatgctgctatgtgttctgtattacaagagcctatttgtttgctaggaatctttcattacaccaacggagaagcaagttgggcagaagttcgtgtgggtgatcaaaaatttcttcttttcaaattccgagaaatgttattctgatccatttgtgatccgtggcttcaaatggtaaatatgaaactcttttttttttttttctttttt

SEQ ID NO: 51318 - DNA, 1150 bp, Arabidopsis thaliana landsberg
cgcattattcatcgtttggctctctgaatgatgcagtatttcttgtgagcatagattcagatacacaactttgctacttgatttgacagcaatcgccttctggatatttatagcatcagcaacggctagttctgtcgctgcacttcttcgaatagtcagaaggttttctttctttaataaatgttctgtcaggcgatataattgtgtctgcagaaacagcaatttgcttaggaacaaaaacaagtaaaggtattgcacaagttgtgatgttaataatgtttttgcaggaaaatcaataacagattagcctcaattttctgtattatcagtttaacgtatgtaaatgtaataaaagcacggcttggggatttctacctaaaggagttaattctacgtaatagtctttctcttgattatcagctatccacgtacctgcctaactgccacaggaactttattatggcgactagttgcaaggcttggtctcatatcagctggaagttgagcctgatagaaatggtagaaacaaacgaatgacaatctcaaaaaaccagaatttttaaaagaaacaaagtaagtgatgagaattacacaccaacaatggataattccctttaagctcgggagagccttcttgggttgagttgttgccagctaaagctttctttcttgcaagaacctgcaatgcccatttccttttgtctttcttgagatcgtcaggattttcaaccatttccttagagctacttgatgtaagattgggttgcccatccgactgtttgtttcctgagttcagttttgatccagcagcttttacactgctccccttggcagcactaatatatggtaaggtcttgctggcttctgtgggtttaccattgttttgtgagtttcccatttctttcggtgccaaaagaggcttgagattatcatttcttgggaacccgtaggtatctgccaaatacaatctggagaggataggatttgaggcctgtggggtttcagatgaaaagtttgttttgggtgtcaagctggtttaatttcttcaaagaggggtttaggcatcagaactttcaagaagttttcaaatttttttttaagaggcttttcttaccctttggtattggcaccccgaatgccttttccaaaa

SEQ ID NO: 51319 - DNA, 786 bp, Arabidopsis thaliana landsberg
aaatcatttgaaatatgtttatgacgactttactattgatttttacaattaaaaaaatgaagccaattttcgaacgggtaatgggtgaattatttttgcaatctacttttaatatttgagttagtttatcaatgtccctatattttatagatatgaagctacaaaatcatgtttctcgaaacgaaatttcgtattcaaagttaagtctgtcaagaacgaatcagtctctttctaactcaccaatattccattcatccattgtgtagttttagacaatgacatttcaagctgacaacctgtagggtaagggtatattaaatagaaatgaataatatcataatgcacatgcactcatatacaaaatatacaacgtttctttttattttgttaattgctttttttttttgaaaaagaaaatacaacaataataattaggcattcaatcatatatcgaattcttccattttttttaaattgctttttattttataattttatagattttctgaaaaagaaaatacaatctatatgactttttttaaaagtttttttttgaaaacgatataacgttgctataagtaatcaaacattcaatcatatatcttccatttcttattatgatgcattgattcttattcgtgtgggaacagtttgcaattgagtaacccaacatctttaatacatgttggttcttgacaatgacatcgacttagcgacgaataacggtattatgatctcgtctctaaggagcgttgattaccaaaatttcttcaacttttcacttct

SEQ ID NO: 51320 - DNA, 902 bp, Arabidopsis thaliana landsberg
  unsure (1)..(902): unsure at all n locations
aaaacaactaaagccatgtttgtggaatctctaaacttcttacaatcttaacttgttattgctttccaaaaacttgaaaaatataaaacattaagaaacaatcaattttagaattgattttcaagtcttcttgacctcacttgataataaaaagacttcggcaattaagacttatgcttcccaaaattgcatgacggagcctcaattgaggtgaattgaaacagtctaaaagagcaaggaccggtttaatttttaaagaaacctagctgtcttaatttaatttatttttgtagcattttctcgcctgtctaatccacttttttattcgacatatttgttatatataccgtacatctggactatacgtatatctatcacacacccatattattatagtttgtaaatttaataataatatctgacgattattctaataattgagatattccgtcacaaatcttaatttattttgttacactttacaggtgttcatacttagtggtgtcgaaaagctttacagggactcatctacgcgtaatttaaaaaaggagaccccattatgatcttttctatataattacaacaacctctttaagtaaagtaaattttatttttagttgaattatattctttgtgaatcgtttattcgctttgcatacgtggaaatgaacatgatattgagtaggaatcgcttcttattaacgtctcccaaatacaaacaattttttcatcattcaacacgacgttttttgaacgttccgtttcactttccatgtttccgcgtttttttgaaacgcactttaccttttatcgattcggcaatttttagtggatagagttataaaacaattaatcagaatggtgactataaacgaattattcgnaatgtttgttggatacta

SEQ ID NO: 51321 - DNA, 1104 bp, Arabidopsis thaliana landsberg
acttgcactgtatgatatagtgtataaaatagcaatcaaagtggggtataatttgcatggccaaatcttttgcagttctgtaaaatgtgaatatttttcctactaataaatatggaacaatgggataaatacacaaatgtttaaataaataaaaataagacatgtgtttttgtaggtttgttgaatatttttttgggtagtaataatttgaaaaaaaaaatgggagataaaagtagaaggtggtggggtccagatgtacagataagccatgtgagggttaatgatagaaatgaggtgtatggttttctcgtcagcctgtcatcccaaactctcttcaacggttatctcaatatctttgtctttttttccaaatcttttttggtaacattttttcaaattaggtcaaatgtttgtaacatatgataatctgctaaaggcaactgtacatgaaaaagattaataatctacgaagaaggtatattcgcggcaatttttaaaaagagttcatataccagcaaaagataagagtctattaattatggttggtgccgtttttttgacgaaacttgtatagacaaacattcaccccgcatataaactatatagtagtctatgctaatttatactcacattaatgtgtttgtcgttgaaatttgaagactatttatggattataatcaattttaaaatttggttaaatgatgtatgggagtatatactaatactagtgcatcttattctttttgatcaaaaaatttatctactcatttgctattccttttatttttttcctttgagagagccatattaatttgaatggttatgtttgtatatagcaatacggacgtggcatattagaaagttgatacaaatgtacattaaaacttaatggtcatttttttctaaagtttaatggtcatttagattgagaattgcataaagaaaaatccatagtgcaagctcacaaggaaaagaaaaactagcataaatagtggactgacggataatccgaagtgctggcaatttaggaatcccgtaatgagtgttaatatctaaagcttagtttactcttttcctttcacattttttatacgttaatacgac

SEQ ID NO: 51322 - DNA, 847 bp, Arabidopsis thaliana landsberg
tttttttaccaaaagtataaaaaaatatttttgaaattattcccattagtctataatttgtataatagtgttttatttgatttatgaaacacattggattaaaggtaaagaaaaaaagagagaggtattatcattacaagagaaattatgagttggaaaaggacaatcaaatatgaacctttttggcccacaacattcgacaactcatagaaatcaaaggcttttcgtttttcccaatttatcaagaagaaaaaacaacccaactaataatttttcactttctttttcttatttttaaaatcggaaaagatttattattttacataaaaagcctctattttggacccaacatgcttctgtatctcattctattcacatttatgaaagtctctttagttcctttcttactcagatactctaactaataagtgtccatgtatatctttgttatgtacacatccgtataaatggttgtgccattgtattaaacatgtgatatattaatagagtgtatcatatggtacggtcaggattaaaacaaatatgttacacaatgatatttcatatgaattttatttatttataattatatggtaatgtaaatattgtaagacaactttgtatgagattaggtgaactaatgacagatggaagagatgaaaaagagacataagaagaggaggaagctaaacatctactttgagatttgttgttagaatttaaaattttataagaatgaggaatcccaataaaggagggagctgtttttttttagcatgttactaaagcaagacaaaaaagcactcaaaacaggacaaatttctaggatttgctttattactaattt

SEQ ID NO: 51323 - DNA, 527 bp, Arabidopsis thaliana landsberg
aaattatagtttatgacggtaaataaaaagcaatccgaactgtaaacggatttgttcattttaattatcgtaatttttcgaacctttaatcatttagttgttttaaaaaatccttgacataaatattaatatttaaactagaatgaagtgatactaatattagattagattggtgacacagccttaaaaatgagcagaaagaaataacgataagagttttagtgattgataattattaaaatggtgaattttctattattgtattattcgaagttaaaactagggagacaagtttttgaagtggtatggtgaataaagtttttttttgaagttacagaaaaaaaaaaacagaagatattttgaagatttcaagaaaagtattttgtacgtatttatctcccgatagaaaggaaactcttcaagtgcatgatgaagaaagagaaaaaaagaaagaaagaacctgtttttgggatgaatgatgtatttataatcattatgaccatcggtttcaattctccgatgctctg

SEQ ID NO: 51324 - DNA, 442 bp, Arabidopsis thaliana landsberg
ggttaagtttgggatgcatttctggactgctgttgcgttggcttatctgttaaccgtccttgaaagcatacggggtgcacttgcgggtatgtacgcagacatcccgtttgtctgtgatgctgcctatatccagattccgtacgactaagaagaaacaacattggatcgttatgactcctctttttttttttttttgttaattaggtccttgttttgtggatacaatgactcttcttgaatgacaattatgaatgtactcaacgttacatgaacgcagccgtaaaagttacaaccttttgaacatggattggctatgaaaccaatactataaacgaacatactcgggggtggataccgggcacaattcataatcatatggcctaagctgtgatactatcctgtcttctttaaacattggtgtatgcacgcgtgtaggtgcaca

SEQ ID NO: 51325 - DNA, 849 bp, Arabidopsis thaliana landsberg
acccttgaagggaaaaaaagaaagaaaaggagatggtaaaatactaaattagttaaatgtgaaagtgtcacttcattgggaaacatacttgtctccttcagttttgatgtatgtcctgatttggtaccaatataggttaagccccaacctaattgtagttgatgtttgtatctcttgcattatgtgcatctcactttcttccatcttttccccaacaatttgttaaccggtctttttcagtttctgtaccaacaaccgacttccacatccatatctttgagtttttttttgttctcaagatattaatgaatatgtacaagagacgaccatggaagaacaagtacattttaggagatatataacaaaatacttagcagtggtttataacttggcttggttttactttactcatttgcgcaactcggactagagaagtcgatatataaatcaaaccgaaccaaaattttcaaatataaaccgagtcaaaatttgagaccaagtgtctcccactcaactcttaatgatagatcatgagaatgattgatcgaccacagggcctaagtgatgacgtgtgttcgttataaatgatctgtcttcgttcattttctggtcttttctgacttaaccggtaactcactaaacaaggatacaaagagtataacacaataaaccaaagttggttcgtatatcccagattgtttgcacaattagagtaacatgtccaagggaactcatatttcacattttagacatcaagttacgtcataaattgatcccaagctctgacttttaaagctgtcccacattgggatatcaatgaaatgaaaccccggaatatgaaaatctgac

SEQ ID NO: 51326 - DNA, 1303 bp, Arabidopsis thaliana landsberg
cttatcgcagagagaagctaaatcaccggatcgcataggccagccttttttccactcgcccgacgtagaggccgctccgcacagtgcgttcatgcaaaccttattgactccataattgaccaattgagcggctcgattcaactgtcaataacttcaaatgaagcaagagccttatcgtattctccgcacgatggtgctttaatccaccgcaactttcctctttaataaaggcacaagcattaaaaatatgcaatgattaagaaaactaattggtatcagaaaagttaaacacttaccagaaaaggcagaagaagatgtcaaatatattgtcgagaaactcaatacgctccttctgtgaaagactatatacaaataaaaacatataagatgacgatatatgaagaagataccaactgttataaagtaatcaaaatccgtaaatgaatgaatagttaaggacatttgatattgaaatctaaagataagatatcattgcatcctaaggaaaaaaaaaaacgaaattaaagttcacaagagacaaagaaaatcaacagacctttcgaagaaacttgtccaaaaaagagaaaccacgagtcacttccatctcctcagttttcaaccaaaccaattctaagcttagacatgtccacacgaaacttctcagtggtgcagtggagatggagcctcttaaataattgtgccactgtgataaaaacgcaccatcgaaaagttgactgatgaatgtatggaagtccaagaagtctacaatagtgataatgagaataatatcttgactgtgaaaaaggatgaattgattctgtagacaaaactaagtgcaaaccttaaatagtcaaattattcaattgaacggaaatgatccatcacctatctgagctacagtaggctaacaacgattccactacctaggcacaatttcaaggaagatataattcttattaaaccgctaaataatccaaaaacttgcgagtcagcaagatctaatctgaggatacacataacttttaatgctattgaaagaagaatatagacttgaagaaaaaaatgtaataagcagctacattaagtaaacaagtaaactaaatgtaataccttaacagagatgacagaaatgtatgcaggtttgtctccagtaacaggagaagatatttggctgcaatttggaaatacaaaaattaggtgaataacatgacatatttggctgcaattggaaattcataaagaaccaaggacgacacttttttaaagaagcaataaaatgatatataaatcgaactaatttcat

SEQ ID NO: 51327 - DNA, 1134 bp, Arabidopsis thaliana landsberg
  unsure (1)..(1134): unsure at all n locations
attctccctttcaagtcgccgcaaaaacagtgatgctgaccgttttcgtgcacttctcagttaagtggtttctttttgaaaaaagaaggaacgtctatatgaaaaattgcaaactatatctaatttcaatgactacataatcatatgcttagagtccgtcatatatttaacccacacacaaacaaaaaagatcttctattatttacccttcctgttcgatgataattttatgtgtttttgaaagattattttgagtatatatcattgtctgaattttttatattaaatgaaaaacacaatattataaaataaaaataaatagataatagatagttctaagtgagaatgtgttatgcattaagatatatacaaaacatgataaaatgttattttctctacgccaatgaaccatgtaattatgtttagcatacatatagaaatattataattattttgaaatattctatttacttatacaacatgatacttttatagtaatacacatggaactgaacactagtttgctttatattactcatagaataacgcattatcacgagaatcatatatcccatttcttggccattattttatggtctttcttagtagtacgttaacataaaaccaacttttatggagagttttaaaacaacacagacacacacacccacaaaataacgcgttgatggtgaattttcctggtaacgaggaaagtaaatactatacggtaaataaatggacggcgcatgatgcgtgttctcattgggcattcagattttgcaagcaactgaatcttttaagcttttttgccaagtacagagatccagtcaacttcttcgaacggtcggtgcttacgtggcaccatcattggggcattcccatttctcatatttggacggagatagggacatttttgtctttttttttctgtccaagttaagacaatttacgcctttaggagttttagtagcacatgctcgtgcgacaaaattttatgatttatgaccacattttcataattaccggcaatttttttaaaaaacactatacagtatataaacaatttgagattagacgagcttcaatacatttttcattnttgccctttagagctgncttctactttactttctt

SEQ ID NO: 51328 - DNA, 601 bp, Arabidopsis thaliana landsberg
attcaattatccatgtaacccgatcccatccgaaccaaaaatcgaactgttatctaggggctactacgctcccatttccagctgtgtaaacttggtttaatttctacatcacttggcccattaggcccattatagcttaataaaaataaaatatttggaatggacccagcagacttgttttgactgtccgatgatcgaaccaatagtcaatagagaaacatgtcaacgatccgacccgagaaaagcgggtcggattgaaaatacccgcaccgtcgggtttacgataggagagaccaagtggctctcatggcacaagcttctatgaggatttttcagtaaatggatagcctgacacgagaaagctgacctcactcgctacttgggttgattgtgtatatatatgtaagtatcgccgttgagaaattgggactctgatctgttgcagaaagccgaaagctttggtctttggagctctaacctctgcctctggtaaattttctattttttctttatgatcgatttggttattgttgaaatccagatcaatttttgttgagatgggtttagttgttgtgatgattgctaactggaaaagttttcc

SEQ ID NO: 51329 - DNA, 642 bp, Arabidopsis thaliana landsberg
ctacatcacgcttactaaaaattctacagtccaattaaagtcataacaaaattaatactatatatttataaaaaaaacatgattatttactttccttacaaaaaaaaacaaaagtgtaaatatttcctggtctaacgctttccctctgcgtgccccgttccttccctcgcggttactcttccgttttatgtttttttttctgagatggtcaattttcccgtcgtctctgaattttccctttttctcttcttcactccaccgccttccccgaatcacttcctctgcctgatctaattcaatctccttcctagctcaaagaagtcaatttacacgagcagatctctgcactcaaaactcctggatcttcatttctgggcttcaatttagagtttttttatattaaatgggttggagatacaaagctggtctgttcttgattggcactgttgttatcatatgggtcacctccgctgaagttactcaggtattcattcattgtctcttcaattttgtttaaagctttcatcttttgaggttatggatgtttcatttgggatcttatttcattaaggcttgttttcaatcatgttctttcgagctctgaaattagcgggtttgaagtttgatgaaatcaaaatggca

SEQ ID NO: 51330 - DNA, 1000 bp, Arabidopsis thaliana landsberg
acatagaagatatgatgtatgtatagtgttaacttgtgggtatgtgttgtttcttccaataacgtcatgttctgttttttgtgtgattgaaagatgtaggggcctcgcctacatagtcgggaaaaatggaagcaaaggctgaagaagatggtaatgtggagtgacagtttgaacaaaggaggcattacgaataaatataaatgaaaaggtattgatattgcttattggaataggagagtgttgaaattgtagactgatatgtttcattctttcttctacttttactttcttttttagtaacattaagtggctaccatccaacaagtagagtcttaggatataatgactcaaaggagtctatgagagcaaaaagtttacagtaaccaattatgtcaatagatttgcagtgaataactacccttcgtcgtgtatctgtcttatgtgacttttgtgtgcaatgaaaaccagtggcctaaacattattactcctttttcatgactaaagaagcaacctttaattgttcattgttacattctattttctgtttgctttattgttttttttatattttcatgattacattgtcccaattattgggggcattggctaattcacctttgttattgtaatcgtagctcacaataccttggtcgctctagtggacaaatacacaggagaaacatttttcttctcatgtaagtaagatatactttcttctatattagacacattgataacagagcattttagtctagttttcgtattaaaaattcagagtatatcggttaatatgaatgatgtatctcctatttcttgttctagagaatcaatgcatcatcaaagaacaccatgaatttcatgtagaccccaagtgaatccctttccgtacagcaacattattgacactctatagatttagtggcacaaagttgttggttttttactttgtaaaggtttattgttctgtgtgtggattctttttagttgtttatttcaaac

SEQ ID NO: 51331 - DNA, 474 bp, Arabidopsis thaliana landsberg
ccatcccttgcctggccagaggatcccagttgcatttttggcatttgtctatcgtggtctgtgtggccggcaaacgtctgcatgtgccagagggcacggcaggctatggctctgtctttcctcttagtgatcccctttcttccccagcagtctttgctttttccctgtgactgccatcctcctgggtccgttgtccctgcttcagctagcctgtccttgctcaagctcagctttgtccctgtctctgcctgggactgaagggagaggtcctgtgtctcataggttacggcagtcatggcttcaaatactgcctttacttctgtcccacatgtgttgagaccttatgaagactgcttcgtcctgagggcagctggctgagcctctctgcagacactgccttttctggatgagcacaaagaagcttcagagggggctttggtctgagagaacttggctttcagagtctttggggag

SEQ ID NO: 51332 - DNA, 694 bp, Arabidopsis thaliana landsberg
ctgttttacccttttacttaatgggttttgtcctctctgtgtgtgtgtgagcaggatgaacaggttgagttgggttcacgcctcatgtcattgaggttaaaacaggagaggtaatgtgttgatgtagcaaatctttaatcttcaatttgtttctatggttaaagttatgatctttcattgtattcaggacatagctacgaagatattggcgtttacgaaccaagggccacgcgcaatctgtattctctcagctacaggagctgtaactaatgtgatgcttcgtcaagctaacaatagcaatcctactggaactgttaagtatgaggtataaaattactcatgtgctttgtgcattgcttgcttcttggcctcattttgagctctgttgttatcgaatggagctggaatttaaatcttgtattgagctgtattggatgtgttgctgtttcagggccgatttgaaatcatttctctgtcaggttctttcttgaattctgagagtaatggtactgtgaccaaaactggtaacttgagtgtgtcgctggctggacacgaaggccggattgtgggtggatgtgttgatggaatgctagtagctggatcacaagtccaaggttgtcaaattcttaacctttacacttgagttaagatcagaaagtattcaagatactgactttgattgggggttttatat

SEQ ID NO: 51333 - DNA, 545 bp, Arabidopsis thaliana landsberg
agttctggaatggactctgtttctccaggaatttgaagaggataattgtaagaaaaccgtggaaaatgcagggtgtaaacagagagagagaaaaacagaaaaatagagagagggacaaagagacatacagagacacagagacagacggagagggacagacagggacagagagggacacagagggacggagacaggcgactctgtgctggtctgttgcttttcctctctcatgttttccctttcacccttcctggctcttcatgtccttctagtttttttcttcccttgagtttgatccctgatccagccccacgaaaacaccgagccacactgcattttccgtaaccatagtcttgattctgtccccggtgtgggccagttgccctggcagagcacgtgttcctcacctggtcacctgatccttcagagaaggggcgtttttaaccaacaatggtttgtcggcgattgccctggatgggacttttgtagggtgctgagtggtactaattcagtgggctccgtgccaagactaacatggaatgctg

SEQ ID NO: 51334 - DNA, 1398 bp, Arabidopsis thaliana landsberg
aaaaagttatgagccaccaacgcttcattttcatattctcttcatatagcgtaaagtctgagtctttcttccttatgttatgacttaatcgggtaatttccactttccttattcctttttcctgctgatgaatcttctctttcgcgtaaacgggattctgatttgtcaaactgagactaaattcgtttaatttctcagtgtttatgaagctgtagttatggagctgaagtgggtttcttgccggaaacaatctctgatcttgatctcttgtctggctctgctttgtctcgcgtccttggatactgtaagtgtaaaagattcaagaattagggtttctgaacttcttctttataattgttggaagcttcttctctttgaattctctgctaaaaatttgaatcttttaactgattttgtagtggtactaaatgttctttagtcaatctattaaggtgaaatgattttttcagatatcatgtgaatcaactcagaatgctactgacttcaagaaacgatctcagacaggtaaaaagttgtcacctttactagaaaaagagtgaaaatgttgtgatagtcacttcgttattgattctctatgtacagtttcttgccctcctgattggatcattggaccgaaccaaaccaagtgctatgcttactttaaaaactcttcttcatgggagaagtcagaaatgttctgtagaacttatggtggtcacttagcatcgcttgcatcgagcaaagaactcagctttgttcaaaaactatgcaatggaaatgttagcagttgttggattggaggacgaagtatgaattcttctacctcaggtttccgttggagctggtctgatcctaagactcctcaatggaaccaatccatgtttcctaaagttccaattcgcacccgctgtggcaatggcaacggcagttcatcgtgtcgtgctaatatatgtatagccgtgacaaatggttcatcatcaatattcggtgaaagatgtaatgcgtctcatgcttttgtttgcgctgttgattctggtaatggcctctctattactacctctctctctttcttctgtattttgtcattgtactacttagtcccttataattgctatcttctttgcagatatcaaatgtcgcaattgtcacaaatatctagttatcctcgctgttgtcagcggtttgattctcttcacgacattcaccattatattatggctccttgtctataagcgaagcaagaaacgccgaaaatcacgaaaagtatctaatccagcttcatcatcatcagtagttccttcttcatggaagatcttcactagtgaaagactgagatcaatgacgaagaacttcagtgaagcaaaccgtctagctggggacgcgaaaaccggtggaacc

SEQ ID NO: 51335 - DNA, 589 bp, Arabidopsis thaliana landsberg
  unsure (1)..(589): unsure at all n locations
tgaatttctataaagttccaagctttggttctgttttcgtttaccaaatctctcccttgattcgtcgaatctcggggttcttcgagtttctctcatcagggtcgaggtcgaatccgcggaatttcctgtcaaaaccctaactttgattcgactccggattgtggggtcatctcgagctcctattggttagttttcgatttgaaaccctaacttttacttattttatcgtacggattaatatttgtttgcgtagttcgatttggtatatttgatgatcatggtgattgttttctagctcagaaaaggatttagttttagcagatttttgtttgcttctatctggatttgttcttctctggtatgtatgtagctagaggcagtgtgttttcaactgggaataaatacttccttcttcgataaagcatctaactttaattcagattctgttttgtgtatagaaatattgttcatgatgattattngtatgtactagaattggacttccacgctttcatgttttctagtttgggtgctcaagatccttatcatgcanagctcagaatttcacttttagtgatgtatgttatag

SEQ ID NO: 51336 - DNA, 1255 bp, Arabidopsis thaliana landsberg
gttcgaaaggccagtgatgaagaagccaagccctgttttgaagaagccattggtggaggctgttgctgctccaaaggtgcagagattgcctaatgttatattgagaaagccgagttcgttttatactagtaatggtgatgatgaggagtctaagttgcggttgaaaccgaatctgacattgaaaatgagaaatgagagggaaaatgagaggtttagtgatatgacattgttgagaaaaccggaaccagtgagcgtagttgcagaagaggaagacaagcctctttctgatgatttaactatggaggaaggagaacaggaaggtggaacatattcacagtatactcttttggagaagccagaagcgaggctccagcctgtcaatgtagaagaggaagttggcgatagcggaggagtggaatcatctgagatagtaaacaactcaattcagaagccagaagcaaggccagagcttgagaacatagaaaaggaagttgcagatagcggagttttggaatcatcggagatagaaaataattcaattccaactggtatagagacaaactaagaatatttttaaatagtctaactttgtgctgattcatatgtttgttgttttatcaagaaatgcagctcaatagcgagatgtcctctgaggagaaaactattaacagtgatccactcgagagaattccttcgaaaccaatttctcaaaccatcgtcgaagcttctttacaagggaaaccacaaaggtgaattctggtttagtatcttgactttgaggaattttgctttcttgactcctattttctgttttgcctgactggttacttttattatagattagacccgtcttccgctgagccatcagttccgtacataggaaaaccgtcagtcgtgaaccatgaaggccgtcaggtctctgttgagctcaagggccctcctacagatcgtccttggaggttgagaactaacactctcttactatttgttccttaataagataagaggcgtatgataaactcgttttgtgtgatttttataggaaaatgattggaataagacagagtctctagttaaaacagaattacgagcagatgttgagctaataagttcaagcactagaggatttgctgtaagttagatctgtactcacttctggtttcatctcattttgttttaataattatttttttataccatttataatctttgttcaggtttcctatggatctttgattggatttttaccctaccg

SEQ ID NO: 51337 - DNA, 616 bp, Arabidopsis thaliana landsberg
ttaagaggatttttgaagaaagttaccaattttaaaatttaaaagtatgtgagatttgcttttttgaaataaaataatttattaaatctttttatacatagaatatatattctttttaatgaaattctacctaagttttattcacaaacattcactaatatcatttatacaaccgttttggtcatataaatagttgttgagttttgataaattgataaaattattttacctaataaaattatacaaaaatattaatttgtttttttgctaactatattatttgaaagaaaattagctacatgattttctcctaaaacattcattttgcgaattatatctaaaaaatttaatcgtctctcaaacttgtcaatacattgatttcaaatcccgaccaacaataaactctccaaactcaaaccagatcgatctatctaacatttaaaaaaattccaacctagatcattcacgttcttaaacaacaacaaatcacaactagctatatatcggcttggctcagacaaaaataaaacagtgcagttccaagaatatgttcacattgcaatatacatttttcataattaaaacatgtttctttacccaaaaaaaaaaaaaaaac

SEQ ID NO: 51338 - DNA, 1133 bp, Arabidopsis thaliana landsberg
ttaccaggagacgatcttgatgcccttatatcggtttgctcagatgaggatcttcttcatatgattgttttgtatcaagaagctgaaacaaaggctggatcccagaggattagggtctttcttgtaccttccacagaatcatcagagagtcctaaaattttccatgaaaggaatatgaacataaaccgaaacacgaaccagcagacggatatagatcattatcagtatgtttcagctcttaatggtattgtagatgtgagtcctcaaaagagttccagcggccaaagtggaacaagtcagaccacacaatttgggaatgcttcagaatttagccctacatttcatcttcgagactcgcctacttctgttcatacatgggaacacaaagacagcaacagtccaaccttcatgaaaccatatgggaacacgaatgctgttcattttatgccgaaaatgcagattcccaggaactcgtttggtcaacaatctcctccaacatctcctttttcagtccacaagagagcaaacaccgacgttccttattttgccgatcaaaatggtttctttgacccttacttggctgctccaaacttcccacagcaaaataggttcttttttgagactactacacaaaagcagaagcatccagaagtgaatcttcatgaccggaggccaagcgatgatatttacccccatggccaagcttatatcggagccgagaaaatgacgcttaagaaaaacgctctttctgatccgcagctgcatgatgagagccaaatcaacaatgggttagaagcatttaccaaacaaccatggaaaatattgagaaagaatctacgtgttgtggctacatcaaagtgggaagatagtgatgatatctatttcaataatccagaaggcaagagatgcaaggagcttgaactcaccaaggaagttcctaatagttggatcaatcgcgataataatcccgattcttttgatcaggcaacaaagaaacaggatggtagtaacagtaatagctccttcagtccgaattatttcagtccgaatcatcaaccagctgctcagattacttcaagtgattcacaagattcaggaagctagtgtcttcttatcagttaacaccaacgaaa

SEQ ID NO: 51339 - DNA, 626 bp, Arabidopsis thaliana landsberg
tcataaataaaaactatctcaagcccattaacttttttgagtgaaggaattctggtaagaaaattcccacaaaatacaaatcataggagatatcggttcaagaactcaaatcacaaaattagtatccacatgcattataatcacaattatctatattattataatcatggtaaaagttaaaaagattatttgatgtttgttagatcattactaaatagaccattacaaaggttaatcattagagtggacaattataatttggtatggattccatacttttatcatatgggtgtttgacatttcctaaagtaaaatatattatgtaatcgaaatttccgttgctactttcaagttgttgatctttatatagtaataagtaatactttggtactttgaaataaatttttgcattagaactaaactaatatatactgaaacctggagaatatgaacatttcttatttatctaaactctcactaaaacctaagtttcgttcaattgtacaatctcgtgatgtgtaaaattagcaaggatcatgaaaattatccccaaagagtgttacgttgtggagtgtaaaaaagttaatggctcgtcgcgtgactcgggacacattagttacaaccgt

SEQ ID NO: 51340 - DNA, 453 bp, Arabidopsis thaliana landsberg
agaaaaaatcttggtcaagacataaaagtcgagaatgtagacacgtgtcgaacatcgaggaagaaaacaggtcagagaggggtcaacgttgttaaatgttagtaatagagaagtggtccccagtttccaccaaacccatctacgtacttgtatctcattggacgtcattcctgattgatttagaattgaaaacgttatattttgtttatttctaatagttgattgaatatcttataatttttgcccacaaaagaaaattataagtgtataatatttagttcactcgaatttaacatgtccattgtccaatgtataaagtatgatcatttctgtttttcagttgcttttattttaaattcccaaaaacccaatattgtgtcaaacattggagaatgatcgtcacttttattgtatttacaaaaagcttctttataactaagaaaatttgttatg

SEQ ID NO: 51341 - DNA, 576 bp, Arabidopsis thaliana landsberg
atcaaatctcataacaaaaataaagacattttgctaacgagtgcattacacaattatgaaggaaacaaaacaatcaaggggtacaggatactcgaaatattatcctaaacattcgaaaaaaacaaaaataaagaaaaacgtatataaaaccaaaaaagtctaaggaaactttgtacctaacaataccaaccatgtcaagtcctcgatagggttcggtttcaggtgagtcccacttggtgtaaggtgtggtgggttctttttcacctatcttatatcaattaatgctatttgctatgtgtattaaaagatctcaatgttacgtagagtacgaggcaaccatagatctcaaaatagagttcccaaaagccaaaatcaaatggaacctaccacactaaaccgaaccgaaataattaactaaaccacttgagataagttctaagccaaacctaatcgaggcagtaataaaccaaactataccgaaaccaaagtagaagacataggggcatacaattcaaataaaccaaattaccaatctcaaaaccagaaaagtatttacttgttgaaatgaatattact

SEQ ID NO: 51342 - DNA, 2023 bp, Arabidopsis thaliana landsberg
gacgatatcataaggaataaaagttagtatttcacttgaagtttgacaggactgcgatatttacctataacccctctcccgattcctatagataccacttccttgcactgatacacgcatctggcgaggatcaaacacattactgcaaaacaagcaagcccacattaccaattatcgtcatatgaccctcttgtgagagataccagtcactgtaaattatcagtaaccattttgactgacccaaaaaagtaaagaaaatccattagaagccccccaaggttctgcaaaatacttcttttcaattagtaattgaatgaatataaaaaggaaacctaaacaagatagctcctgtgacaaagaataagcaaacaagaaaattacgtacttggttgatagagcgccccaaatgatgctcatgctgaagaaaacgtgtaatcagtaagacctgcaataattatactctaagatttacaaacaaatattggaacatgtttcagtggattagattaaaaagtgtggatagatatttctgtccaagaacgtcgcagtgttaaataagacaagtaccaattaccaggatatgcattaaacatacagagacaggccgcctaaaatccaaaagaaaagaacatattacttaagtaaaagaatacacctcaccaggcagtaagagcttaatccgccagagtatgattgatccagggtacgatcagccaaaaactgctttaacaccagagcaagtggtgtggcagctggaaattgctcagtcagatctttgacctgcagaaaagaacactttaggaaacaagagccaaaagaaggaaaaaggttacagagatacatacacacgaagagagtataatgtaaggaaaaaagaaatctggatttggaaaacagaataaaataaataccagctgcgtggtttgaagacccgtatgggatggagttttgaaactgatgtcaagacggacagattttgcaattgccaagtttccagtgtttgttggcaaagagtttgctgctgcagagtcttcaaatccaaccatttcagtgttaccattgctatcctggtcaacggtgatacagtctggaccatcttttggtgactgtatactgcatatcagatcacaagggacttccacaacaagcatgataattggtatctacacaagcataaagggatcatatcaacaaaagcatgataagtactagcaatcgtggataaagaaaaacatcaataagtgacgcattacagctgtgttttcaactgtcttcagggagtcagtttttacccactcttgattcgcgagatacctggctgcatgctgaatagcaaaaacatgtagcaaagtggattcagttataaaatgcagcacgtgaactgtcagatataggactcttatttacttaacaggataaaaacagttctaagaaagaaaaagaagtagagttgaatgtcggctcaagcattattcaaattagtatattacaatgcttacacaatactaaagcaattctcgttacctcatatataacatgacctgagcaaccacatattaagaaaaatagaaccatatatggaataattagactagcgcctaatacaaaaatatacaagcacgtattcatcatcaaaataaagtaaatgtaaaacttaagaacagaatcttgattgtatactactacccatttcaagagtaacgaaatatagattttaagaacaagatctgccaagcccaaagacattcaacagttgcaacatgacttgcgccactaaccatacctgaaggcaagtctcctttataccattgcgaccctccaaaattcctgcctctttgataggttcctgaggcgggtattatatatcagatcttccagttcaacgagtaatgcacacgaggaatgattttgggtttgcttactaaatttctcagtggaggaagacaaaccacaagatccacatcactagaagggagagacgaaccagttgcagatgacaccaaatatgttcgtcctagacctg

SEQ ID NO: 51343 - DNA, 1061 bp, Arabidopsis thaliana landsberg
aaaaccacatcgattactcatggaaatgcatacaactataaacttcaacaaaatgcaaattatgaaaatgattgctctctcttatttctgaaagcaagcaatttggcgcctcaaggcgtatcaaagacgaagagtcttgccaaggaagggaacttgttgggttaaggcaagagaacctctatatatatggtcgatgaaagactacaaatttcgaccacattttaagcgagacgagtgttagggtctgcgaaactaccagccatacttcttgaagaagtccctggttctctttctagctcgagtgaaaactataactatgcatgcgagcacccatggaggaaaggtcccaatggagatgttgttcttgatccaagctggagggtctttcaatagaaatgttattaagagcgtaacaatcacaactccgagaatgattctggtgatgggtttgagcagggaatcctgaaaacaaaaggtgttcaaattaatagtgttatcagatgaatcacccaattaaagctgcatgttataatgctttttttttctgttcttgcaacaatattatccaaagactttttacgccccaacgaagtcagaataccatgacatccattctagtttctacatgcgtattctaaatctatgagccataggagtgattccaaagaaattgtttactttaagtaagaatacaagctttgacctaaacgtaaggttccatgagacaccgaatccacgttaattgatattccagggcaattgaagagtaaagaagcctagaaagtctagagacatgtatgaggtttatgagcacaatcaaaagaaaaccatcaacttatctaaatgcagaacgccaatgtagagtaattctacaatccaagggtatgaagaacatgtaaaggagacaagaagcagattgggtcctatcctattcctcaatcatgcgttcagagaaggtccaacagatgcaatgcaacaatattcaccgtgagtttattcattcaagcatcagtagggaactataactaagctaaggagatcgttctctgtccttttgtcct

SEQ ID NO: 51344 - DNA, 677 bp, Arabidopsis thaliana landsberg
ccctttttattcttacccatcagaaccaaacacttatttttttttataagaaaaactaatttaattgtaaatctaatttttaatctctaagcattcttttatccaaacaaaacaataatttaatcacatttaattgtcaaaaatttaaatcctaaacaatttttaatgacttcaaactgacatataatctcgtttaactacaaaatctaaactatattcatcttttataaaaccaaatcgatatttaacctcgttttattattaaattcaaacccctaaccgttttttataaactgaatccgacattttatctcattaaattataaaatctaaactcgttcgtaaacttaaattaatatttaaccttgtttaattataaaacataaactctaactctctgttataaactctaaccctcctttattatccaaaaccaatatattacttcgctttttctgttaacaaggatattataactttgttttggtgggagaaaatattttacaattaaatatatatatttgtagtagattttgattgcgtagaaaaagaaagtgtgaataaaagtgaatccaaaaaaattcaaaataaaatctcaatcaaaagacacgattgattttgtgattataaccaaattcccaattgatatggcttgcccttcttgcagtcaaaatagc

SEQ ID NO: 51345 - DNA, 791 bp, Arabidopsis thaliana landsberg
aaaaatctgacgtgtggctacaaaaattattaataagagactacaatgtattttttagtgtgactagaaagaagagtcgacgatatagaaagaatcttgataagcgtgattagatttttttattacaaagcttgaaaaatgtattaatcatttttttaaataatatttctcaatatgggattccaaaaattttttgtgaaagaatatgtcactaatttagtatacatcattttcaatcatatcttatcttttaatctaatatatattgtaaaaattttgcacaagatcatgattcatgacggtcacaaatttatttcttcacacatgttttttatgttagtctctttattcgtctactttgagtagatgaataatgtatattccttccgttgcatttataaatttttacagtgttttcataaaaaagatgatttaaaatttattttatattctttcttaatacattatataatttcatctctcttcttaatagataaaatatgaaacaaaattttgtctaaaatttcgcattgaacatttaaaatgacactttttggaaaaaagtaaataatctcaaaaagataacttattttaatgaattctctatctcttggataagagacaagagacaaattaagattcaaggaaccaacttagaagtaaactaatagtgagagttaggtacatctaaaagaactcgattctgaattgagaagagctatatcaaaaaatttacataaatttcggtttttaactagggtcatgttccgtttactttagttgccaacgat

SEQ ID NO: 51346 - DNA, 768 bp, Arabidopsis thaliana landsberg
aaatcacaaccaatccaacaactaaatgaatcactaatttctttgaatttatattagtgcaaaccaaaactaaattaattgttattaacaaaagagaaaactagaaacactcaaaaccaaagtcggattcactattcgcctagagtcgagatcaagcagtttatagaatattcaaaattcaaatcctcgacaatatttattaagaatcgtttctttgttctgattaattaattaagacgtgaagaaagtgtaagcaaacaatgccgatggaatataatcaaagtggcaaaaggaaaacaacttgttacttttttcagttttgaaatttgaaaagctttatagaagtaagtcatacatgattatacgtgtaaatcaaatactatatgatttcgaattcatatttggcggcagagattaaatatttaattagtttgcttcatccttaaagttccatggcgcaagcaaatatcatgtctgataaatgataactaattcaatcttcaaatttagtctaccttaaagcaaaatgacttttccttttcacatccatgcgatattgctaaaatctattaaactgtagattcgaaatatcttattgtacaaatgggccacgtaatgttctcgtaatctcagcacagttatatgattataattgtttgttcctgtccgaatttatgtattaagttaatattcacagatggtatgctctaaaaagcaattattcacactaatgttacatacttttctcataatagaaccaattatgtt

SEQ ID NO: 51347 - DNA, 809 bp, Arabidopsis thaliana landsberg
catttgtcaggctagatactttgtcgatgaagtgagggataagagtgaagtagaccttgatgtaagtcgatggagacaagaatttgtccaggaccttccaatgcagagaaatgggtactgtcttcctaataaagatgtcagctactactagttcatacattcataataactttgtctccgatttttgtagattcgattgtggaatgtttatggtgaaatacatcgacttctatagcagaggtctggatctttgtttcactcaggtaaaatagcagaaagatactaaacctgccattgtctttagtaggtgagtgtcattttgaaagacgtaagactgcttataattgaaactgtttgtatgatttccacaggaacaaatgccatatttccgggctaggacagcaaaggagattctgcaactgaaagccgagtgatgccagcataataaggaaactcttaaagaatagttttgaagttcttcttcttcttcatgtagatagtatttagcaagttagatgcacactttacgtgtttgataatttgatgtacatagaaaagggtaacaatgtggttctctgatgatcaggcttgatagtgaaattcgaattgttgtttaaagattctagtttcatatcagatactctgattttgaattctggtattattattgtactttataaatttaaaattaaagaaatttgtgttagagaattttccctgcaagtgatcgaaagacccctggatcttcagtaactacaaagctacagagttatatatgtgaacgaatcttgtcgctttcagatttaaag

SEQ ID NO: 51348 - DNA, 1055 bp, Arabidopsis thaliana landsberg
atctatggatcttggtgacttttaaagtttaggcacgagtctctttggcccttcggctcctgcaaattacaaagtatttgcatcaacatcacttccaagtccgcttttgattccattcatcagttacaaaaccaactcatttcgcaactttttttacaaaaccaactcatttcgcaacttatgatctgattcgagtagacaaacacttattaagtttcatgtccatacaaaatctgaatttgttaccaatcaaacaaatataatatcatggatcggtccggtttcattatactgttagaggattaattatttatacatatacctccacatcgaacgtagcatttgtgttggcgtcggatcagcttttattctgaaaaagagataatatttaagcggatatataaatcgaaactttaggatcggataaaaaagataagaagagagtactcactgtcggaattaacacagccggtggagcaagcgtcgtagcatgtttctgcgcctaactttctatatggtccgggtccttatttagcctccgccaccatatcaaggttggaaaaaaacataaagccaccacaatcagaagagtagccaatatcgtcacttgctccttcattgttctccctcgctacgattttctttcctttttcatagttaggtcttctttgtttttgttttttccttctccctctcttaaaagaagatctatagttgtgggttacatttactaaaagacctaaggaaaatttttggggaatgttgccatgtttgaccgtttgtctatatgtacacgcgtcatgattcatctccctacgttttctatccttttcaatatccaaactatgtgaaaacctacaaacaatagatcacacacagttttaaattcgggaatgttgccatgtttaagtaatacacacagattaaataacttaggttttcagagatcatatgtctaacgtgaacaaaaaaaagtttccagagatttgagctaaagtgagactatatctgcgtttggccttttcttatatgatttgcgtaataaattaattttt

SEQ ID NO: 51349 - DNA, 402 bp, Arabidopsis thaliana landsberg
accctaattattcaacatccttttaccctattttatttcattatatcatcttctctttcttccatatcagggcttatgttctacttaatttttcaacactcccacatccatttttaataaaatataatattttatcttacattattatcgtcctatcacatattttcttaaaaatatttaaattattgagattccatattaataatattttatgataaattacgtttctatatcaactaaattaaattaaattaacaaaaaattgacatacttattataagataataaaaaaattattattgaaatttcgtttttatattattcagaatcaaataaaccattttttcttttatagagctaaaacgatttgacatttcatataaatgattctttacataataa

SEQ ID NO: 51350 - DNA, 1076 bp, Arabidopsis thaliana landsberg
ctttactcttgacttgagtgacatacgttaccatatccatattgggcctgaagcaatttctgccttattgcctcgaattggtttaaaatcgagtgccgtatccggtaaatcttttgtaacggtgaacaatatgctcgacaagataaaaacgtaatctctttttgttttgttaaaaggctttaaaaacgtaatatctttcgctctaacgttacagttttaaatcaatagaaccagatgacgcaatcaaatcattttatgttttacaaacattacatgactcactcatacgggtttttttttcagttttaaattttaaccaaaggaacatttattagtttgaattttacatttcacaatcccatctattaaaaaaaaaaggaaaaaaaaaactgatcattttgtttgtcggaaaaaaactctaataaattatatagccagctaagcaaactcttttaataatgaaaagtttaaaaatgtccatctttccagcaaaacaaaaccaaagacaatgtcgtctttgctgcgaatacaataatgtttgctaatttgaacagacaatgctgttgttttgttcttaaattatattaagaaggaatttctgaaacattagtattattttaattagtggattagggttcactccacctatacagatagagtcgtgtcgtgcttctctggcatttccaccaaaccatattttgtacggaaacatttctttcttctttcttcttcttctcacgatcggtcaataacttgctcataacaatttcgaaatcctctgcttcatcatttgaacttcgatttaagggttcttgaattttcgaataaaaatctcacctttaaatgggaaagccaacgcggaagaagaaaaatccggagacgccaaaagatgcttccggcggtggcggcggcggtggaggcaagtcagggaaaactgtaccatcgttctacttcgagggtatttgacgaagatatggagattttcattagcagagcacttgagctctaagaagaaggtaacaagttgttccagatacgcgaccacgaaggtgcgatgttgagtttcgcaaagcttg

SEQ ID NO: 51351 - DNA, 959 bp, Arabidopsis thaliana landsberg
tcactatcaataatcgacattatccatcttttttattgtcttgaactttgcaatttaattgcatactattttcttgttttacataaaagaagtttggtggtagcaaatatatatgtctaaaattgattatttaaaaacaaaaaagataaatcggttcaccaaccccctccctaatataaatcaaagtctccaccacatatatctagaagaattctacaagtgaattcgatttacactttttttgtccttttttattaataaatcactgacccgaaaataaaaatagaagcaaaacttcatgtcgtggtttctaatagcggtggcgacaatcgccgccgtcgtatcctacaagctaatccaacggctaagatacaagttcccaccaggcccaagccccaagccgatcgtcggtaacctctacgacataaaaccggtccggttcagatgttactacgagtgggctcaatcttatggaccaatcatatcggtctggatcggttcaattctaaacgtggtcgtatctagcgccgagctagcaaaagaagttctgaaagaacacgaccagaaactcgccgaccggcaccggaacagatcgacggaagcatttagccgcaacggtcaggatcttatatgggccgattatgggcctcattacgtgaaggtgagaaaagtttgcacgcttgagctcttcacaccgaaacgactcgagtctctcagacctatccgtgaagatgaagtcaccgccatggttgaatccgtcttcagagactgtaaccttcctggtacgtcttcgttgtttaggtcaaactttttcgatgaaagagaggaacattatctgccattaaagaagttttaagtttatccatataaaatacgactttgtagtaaaatgctctgattaaggaaagttcgatttatacaaaatcggaaagatttttcttttttactcaaaatcgtat

SEQ ID NO: 51352 - DNA, 796 bp, Arabidopsis thaliana landsberg
tcgatcactataccatagagagatattggaaacttgtgatttcgattatttgttttatcaacaaaataatttctgtgaatgaaaagggccatgtggtgttggccgtggctcatacaaagtttaatgacaggtcactcccacctcactgttttgcctaataatttactacttaattatagtatagaatctttccgaatttttgtttgatttggagtttacatattcatcgtagttttaagatttctaaggtataaatattggtaggtgcatgcaatcagttgaactttcacatcatttcttgatcgtttgttgatttagaattaaacaggtgatcgtgagaaacgctcctaagcaaatatatagtaaatggaaatcgattaattcaaaaaaattgaagtattattattctattaccatgtttattatactatgtacttatttgattttaattttatcattaaaaacaagaaaggagaagcgacctcaatgattaacattcgtcggccgaatcaatatagagactttaaaaattaaaaaaaatggtggtggggtttgcagtctaagcttttaggttaagcctttaacatgtgattaactttccacaccaatggctctccaaaatcccggaaaagaagaaaattatttcgaaactcacttgggattctaaaaatgtgaaaactaagaataactcgctagtcacttccatgaaaaaagtagtggtaacacttaatttgaaattgaggaataacaaataatttttgagaaagaatttgattgttagagtatgttattatta

SEQ ID NO: 51353 - DNA, 812 bp, Arabidopsis thaliana landsberg
aaatgatgatttatgtggaaacacataatataattgatttgcttatttatatcactaaaatgtacttattttcctgtaacgtatccgatcgaaaaatctacagttgaacacgttttagctgaaacgaagtatgaccaaccaaaatagccaagagagagcagtcattcatcgcgacctctaaaccctctttatacatgttgaagcgatggaatccatacgtactgatcttccagaaagtcgaatagtttcataggtcttctcaaaagagatgattttaacaaaataattgtaatagttgtgtgaaaatgacttctaacaatcattattcaaatgacattaggaattagttgtgttaaccatagaaattctacaagttttttaggcccaaagactaatcatacgaagctttgtatttgtgtatacactcgaaaatattctaaatttaaagtgcggctaagtggataagaagacgactcgaatccaagactctgtactgaagaattaccacaggaccaaggtaattaacttgattaatcgatttacactaatccatcaaccttttaacatctttttggttgtacatatacatatacatagatatgtatatagttatacttatttatatcttttttaatagaattgatcatatccggagtataaattagctaagaatacatttattcagacagccaacacagctgattatattcaatagcatgagctggaatggatgtttctcaacttatttctccaagttgcctatttcacatcaagacatggtgcccactttcctccaactctagatttattgt

SEQ ID NO: 51354 - DNA, 852 bp, Arabidopsis thaliana landsberg
gcattgcaaaaagctgccaaaaccgtgtgaactctcaaccaaaccaaatatgatatgaagaaattggttcttgtccattcggtggttagtgtgcatgcatgtcggtgaattttatatgttttccatttacgaccttttctctttatatcatatagatttttaggggaaaaaaaaaatcatatagatttttaaaaaatcatgttcccaattaagacataatgtttagtagccaaattgagaaccaaccttttttctgtttattaaatcatttaagtggatggattttacacatatattttaatgtcttacataaataaaatatcatgttattttttttgataatatcatgttttattgataaaatgcatacatacttgatacttgcaaaaaatatcatgcacaaatttatctctataaatggttatctaccttttttttttttttttttttgaacacaatttacctaataatcttaataaatataagagaaatgtaacgcatacttttgttggacattgtttttggtcgagtctgattgggtttttgttcagatctatcggatttatgtatttaagatctaataaacaaattataaaaaatttgattcgatttggttatcgattttattaataatgttaatataatccgacttactttggttagaaaaattaattcaaaagttacaaccaaaaaaaaatggaatgccaaaaccatttaaaattctgcttaataaatcacatcaattaccgaatccgaaccttaattaccaacccttttgtgaaaaaatctaagccttgccctttatttcaatagattttttttttttttttttttggaaaatcaaaaaatttt

SEQ ID NO: 51355 - DNA, 1027 bp, Arabidopsis thaliana landsberg
agactaaaaataaacgctattagtaagagaaaatcaataaggtgacatatatatccagagatgagataacaataaatagggcttttttccttcttaagaaaacaatcaataaggctaaaagcctggtaacagatccggcccactaccagaagttagtgaggttagggtcaaaaaatgggcctgaaaaacattagttggttctgatctactcaaactccgagttggtctacgcccaaaatactgaaattccaataaacatgaaccaccacattccgtttaattgatctttaatttttatatatcaagttttttcagtaatttttgtacatgaatgacatcatataaatcacattatcaataatgtagtgaagatgcgattttttcttgagaagagaaaaaatctataagaaattattgtatttatcgaaaaaaaattaatcagtttaaaaactgtacaactactaaaagaaaagatgttaaccaaagaaaagaaaagaaaaaagagaaagaagaaaagcaaaactgaacaaacatgaactggattaggataatctaatcaaaaacaaagacattaattaacgtgagaagcaaaaaaagaaaaagctgtagttgtccgaagcagaaacacgtgcaagagcatagaaccagccgttaactttcttttgccataatggctaagctaactaacggcgtcgtcgactaaaacaacagaaaataccctttaacatctctcctcgtcatcgagtatataaaaaaagagtaaagaataaacattcatcagctttattcttcaattttttatatgtgtaaatcccaccactggttcattcgtgcatctttttttaatcgatccctcaaaaataaaaacaatgcaattcataggctaccaattcatctaaaatgtggccgcaatgctaagattgagataatactcagttgcgttttgcttttttttttttttttgatcctgcctgaaaaatttcttcattctttttggctgatttggttgaaatcatcggtatctaaa

SEQ ID NO: 51356 - DNA, 846 bp, Arabidopsis thaliana landsberg
aaagtttgtataaccaaacaaaacactaagctttagtatttcaaacctttttatgccactttgttaatgaatattactttctcagaattgagaaacacctccaatgtaattatctgttatagtttacaaagaaaagttattatagagtcctcttgcatacatgtctacgaaaggtaaaattctttttctatatatacttcagtactcaataattttcaaaatgactatggtttcattaatcataaccttgaagaagtcttttagtccacattttctccagaagaaagggacttgtagatgtctattttaacaatttcttattgtgtgtacacataaatcatatatttaaaaccaaatatatatatatatggatttgactccaatatgatttcaatgaaaccaatcgggcaaatagacggtagaagacgaaatccagacgaccaatgaaaacgttaagctttctgtttgtttgtgtatatattaactatttggtaaaaaagaaaaacataaacaaaccacaaatgtggtcaccaacaaatatgtgtgtatgaattcaaaacatcgtaattataatggtacaagtcaacatgtggagaggcgcttatttcttacactagtgcaacatttcgtactcattcaactccttacctagtaagttgtattataattctctcatatgagttgggacataattatttctaccttttgcttctcccttctgatgttcggcattggttatgctttttttttttggtgggaggcatttgttatgatttggttgttaggaatgtacattaaaaaaaaaatctattggatttaatatcttaagcacatgaataatttatt

SEQ ID NO: 51357 - DNA, 690 bp, Arabidopsis thaliana landsberg
tcttttagcctagggtttctttcagtaatcatgtaaataatgacataaaaactctaaatcacctttatgtgttcatcaaactccacaaagatcaaatgataaaatcagaacatttctattcctgagatacatcacgtactacggagggtttcacctttccgcacctccccaaaaacaagcttttgtcttggcaccagtccaaatcgagttagtctggcctttcgaatagagactcgataaatgatacacaacgattttaagtcattttgaaaaaacaaaaaataaagtactcatggtcgtgtgctcaatttgaaaaacatcattatagccaaattcagcacattgataagataactcccaataaaagacgagagatacgaactattggtaactatgcatgaggaacatatgaggttcacatgaatatatgtttgttgtaccaatttagtttgttttgcattgtatataagtggaaattgtagaaatttctcattacgatgagtgacataaatctttaagtctactagctaataaaatatgaacactctatcttggtgcaagctcaatcaaaaccaccccgattatatcatcttattttaccaaggcaccaaaagagtccaacaaaatcctacactttcaacttgacgcgctcaaacataatcgctcagccacaattgtcgaccttgtgta

SEQ ID NO: 51358 - DNA, 504 bp, Arabidopsis thaliana landsberg
ccagtctttacggtctgttttgaagatgttttccagccatgcttaagagtattaggggtacccgaattatagtacccgacatatatattttgtcctctcgtcgagcctgatccagatcttgtgtcattttcacgagatcgccaaaccgtctctcctcgtaaacatcgtgatgctcgtgtctaacccgtctatccctcggcgcaggcacaatcacctcgtttcacctcactttgtcacataacttccatccgtcgtgcactcaacagcctcgctttggcgagacccggcaaggtccctggccggcgagctcggccgtgtggccattcagccatctgccaaaccgccagaccgcccccacacaatttcccttttttctgtctttttctctcagcttttaagcgtacgtgcagttgcattagaaaatgaaaccgcctaggtgagaccacgtgccatcttcatctgcaccgaactacatctcccgcccaggccagctacgacacgatg

SEQ ID NO: 51359 - DNA, 780 bp, Arabidopsis thaliana landsberg
tttgagaaaggcatgctcggaacctatgaccaagcatccgtgcttggatcataaaccttaaatgactgaagaggagataaacctccccgtccccgatcaacccctccaacaacatatagtttcttattcaatacacctgttttggaataagcccgactcgccaacatagaactaacttcactccaagagttcaaaatcggatcaaaccgccaaacacagctcactgttttagacctagaaagtccaccaataacataaagacccccatcaacagcaccaatagcgcacccacaaaacggcatttgctcagaggagtccctcctacctagaaagctcctcacaatcgcaccaacattgaagctcggtgtaatcatattccacaaaccagataaactctttctagactcttcttcataaacaacaaccggcattggaggcaatctctgccatttagtagacacaggatctaaagcataccacaaaagcttatcctcatgacctttagtcaacacatagagccactcctcagtcctcccaagttctttcctcaaactatacacctcagaagtcgaaacagccgatctccacctccgagaaaccaaccgaacactcgagtaacaaattctaggaagcctagcaagaatctgtatagataactcatcaggaagacttggaatcaatctacaacactcttcttcatcgttctctgaagatatctttcgtcttttacgagattcgcttgacactcaacgtcctgacttcgtgctttcctcttggaac

SEQ ID NO: 51360 - DNA, 503 bp, Arabidopsis thaliana landsberg
gaaataataagttcgagctacaatcaaaatgtatttcgatacgatttgaatatttttagttcgattatatacaaagtttacttaaaataatgaatttaagttaatcattttaataaatctttaatgtgttaagttaaaaaaaaatcattaacttatgaacacacgaaatcgaattcagttgagttttggtttattcagtagtaccaaactatttacgtttggaatagtgtaacattcaagaacatgggacaacgggtagactgcgtcttacactttagaagtctgggaaaaactagcacaacatctccttatgatcaactattcgccaaattgagaccaactcatagctctactacacaacacaaccattccacggctcaacctatttttgtttcgatatatcttccaaatcacggtatatcacatttggcgtgacgaaacgcacggaggcatggggaactccagctccaacaactcggctcatcaaaataatcgacaagata

SEQ ID NO: 51361 - DNA, 282 bp, Arabidopsis thaliana landsberg
  unsure (1)..(282): unsure at all n locations
gttatattcatttgtaatatataaacattaaattactttcaaaaatataaacaaataaatgtaatcattttctatatgggatattgataagaaatgtcattacatacatatgtgccatctaggtcgtacaaactaacagtatttagtcagctgcacttaataaagtaagaantattaagaggacgcgatagaacgtttacacaacagtatcgtgctacgaaaatggagctttattaatctgatagtgccttaggacataaggttcttgtttgctcactgcaa

SEQ ID NO: 51362 - DNA, 680 bp, Arabidopsis thaliana landsberg
tttttctaaagaaagtaaataagacataaataagggaataatcaataattttatgcaactgcaacttcaccatcttgagattcaattggctgagctatattgggtccccattggtcctcggcctgttaatggaacatttgctctctctcccccctcgatttatatgcgtgatgcggtctatatcaagtacaaattcttttactctttgtgcatgtagaggataaatccactgcactgcatgatcaagactgttattgacatgatactactcttctagctagtatttagattattgatatattcttggttattaaccagttaaactaatcagaattagtcaatactaatattctaatgcacaaatgtaatagaatatgcaaacggataaaaaaaatcaacctgattatgagatgtttttggtatatatgagaatagattggtgtgattatgagatgtttttgatatatatgagaaggttttagggtcaaagcaaatgagttcttttccaaatgcaaaagtaatttaagtctacggcattggttttacttttagaaaaagcaaaaataatcttaaaaactatagaaatactccaaaaccatatcaatgctatcaaatttgttcttgtataactttgatcaaaatatttgttagaagatagatgcagtaacaaatgtcatttt

SEQ ID NO: 51363 - DNA, 581 bp, Arabidopsis thaliana landsberg
atttaactaacaaaacgggtgagataggtgagaggctactactatatacgtagtgtctagtttagttataaggccagcacagcacaacacacttataccgacaaaacatgtgtgtcatttaactcgatgacaaagcacagaaacaagttggtcgtttattttaagcaaagtcataggtacactgtctaattaataaactaatctttgagatttcaagcacaaaacaaatattcaatatcaacaagtcatgacagaatcctctgcctcggattccattgtagatagaaacggagacaaaaaacaaacgaatgaatattgagatctagttaataaccttttgccccaaggaaaaaaagatctaaaataaaaacatagataggtaaaagagggagtgagagatgcatgaaagtgagtaaatggtggggaatcgaagaggggcttgtacatcggggcagctttagatgcggcagcaggtaaggtcccatgtgagctgctcaaaccgtgaaagtgcagagagtggaattgggacccatgcacgtgatctttgctctttttcagtggtagttggcttttatatatgc

SEQ ID NO: 51364 - DNA, 1264 bp, Arabidopsis thaliana landsberg
gaggtggcacgtctactacagaaggaaatgattccaccacaatggcttctgcttcagttcagagcagatactctgaatctgaataacggattcttgattacacaattgattataccaaaaccatataaaggattactacagattcaacgaaaattcacaaccttccttaaatcattctgctgccatttgatgatgaacatattcaaattcccagaaatatccatccttactatctccaacagatgcagaaaaaagaatcagaattttaaaaccctaattttaccaattacgtagctcacaagatccaaaataacctttcgccgacaacaacaacaaaaccaccgtatctaacgctgctcaaactctcgctgatggcgagagagacagagagaaagtgaaagctgagcgtattcgcactgtttacgcttaaggcttgttccgccgctagagcaaagagacctcaccgcctctgattcctccggacaagcctccgccaccacgcactccgcaaacgccttgttcaaatgtctgcaaccggatctccttgccggtccttccggcatccgacggtggcactgcaacaacgcttcctccaaccgatcgcaagatttcatcggaatctctctgatttttccggtgtgaatccgtctcatctcacgatgtaactcactagttgggtttgggcttttgttttgtaagcccatatttatctctttgttaatagagtcaaacccacttttttaacacacattatatcattatataaaaacaaaataattaaacaaattcaaaatatcaaattaaatttattaaaaaattaatgctaaatttaaaattgaatatgttataaatactggaaattttgaacaaaaaattcaactagcaaaatatacataaatgagcaaaacataagaaataatgacaaccggtagaaaatgtagtttaaaatttgagacattaaaattaaaagagatgattcttaatttccaattaaaaaaaacaaaaataaataataaaagaaacttcaaaaatatatatcaaatattaattgaacatgttgtcataagtgatttgcttagacaatgatgttatttgatctgatattgtctgcgtttcatccaacgatgaaaatcataagaagaatgttttctttacaataacaaattcagagtgacgcttacaatacaacttgatactacaatctttagtgctttggttttatacaaactagtagcagtattacagaggtctcatttgtcatgtc

SEQ ID NO: 51365 - DNA, 467 bp, Arabidopsis thaliana landsberg
  unsure (1)..(467): unsure at all n locations
tacgcgcctttgcaattgtcgcaccactctcctccccggccggactgttttgccgtcgggggggtgaggtctctaatgcggtggcggatcgtcatacacgagggcacatggtaagcacaaagcctctacgtattacatgttaaaaaagcttggtcagatggtcttaggcattcgancaatttgaactnacagcgacacgtaccgtagcntacgctcgcgtgcgaccaaactccgcctctcagctggctcacgggtgcagctgcataaccataccacagtggatacactatgaagtctctggtcaacgantactnnatctaaaagctccctcagggcgcacncggatcagcacaataactgcacactccgacgtctttggtaaacagantactcnacgtaaaagttgcctacgggcgcacgcgcgataagcataataagtgcacaatccgaactgtcttgctaaaaga

SEQ ID NO: 51366 - DNA, 324 bp, Arabidopsis thaliana landsberg
tctcgagtatcgcccggcagtgtgatctataagttgcaggagctgaggaggaataacaaaaacttgttgaagtaggagatgatcatagaagatccaaaacgatccacaccacgtggaccccgatttccagtaggagtcctctagaagagatcaccgggtacaaggaatactcgaccagcagtggcaatcgctgagaaaacacgattgccacccatgagtagctgacgatcagacgttatcgacaagcttgtcggaggattagccaaccatgtgcggacgccgtcgaagagagtccaaaacaatcatcaccaggtgccaacgata

SEQ ID NO: 51367 - DNA, 611 bp, Arabidopsis thaliana landsberg
  unsure (1)..(611): unsure at all n locations
attcgatttgtatgttgagggagaacagtgaacttttaagtttgttggttagaacagatttgttgtactcttaaatgaaataaaggtattgatacacttgtcgaataatcgaattttcattacaaaagaatgtacctaagatgtagatgtgaagagggtttgaatgatggtcttatgccatggattagagagatgctcgacaaggttatcaatnnnnnnnnnnnnnnnnnnnnnnnnnnnnnnnnnnnnnnnnnnnnnnnnnnnnnnnnnnngacgacctgttaaaaaccaatcaatcaatgtcccacaaagagagtttatgaggaaggaaccaaaccaaagtaagtctagtaccgttcttgatctccttaagcttccagtcatgagcatttttaacatccttagcaaggcctaatgggttcaaaagcggtcctccgggatatccaggctcgagccctcgagtgctgcttcaattccaaagaaaaacgatccttctttggcttgtgatccggagagcaaaaccatatccttttagttcagcaaccttgtgaagaaacaaaacagaccattctaagttttgttggttacgaataagatagataatgagtttg

SEQ ID NO: 51368 - DNA, 800 bp, Arabidopsis thaliana landsberg
taaaacttcttattcttggctttagacaaattcaacactaatcacgtcttgattttattaccaactttaagcatttgaaaaaaaacccagtggatttcgtgtgggccctgcataagcagcgcgtgcaatcaatttgttttttttctctacgcgttttcgccaccttatttattttcatgcgttcatatatttttctcattaattcacatttaaacacttctctgcatatatttgcttctccgtttctcatttctcaactctcaaactcaaatcacttcctttgtctcagtgactctagtctatctccaatggctgaacgagtctatcccgccgattcaccaccacaaagcggacaattctccggcaacttcagctccggcgaattccccaaaaaaccagcaccaccaccatcaacatacgtaatccaagtcccaaaagatcaaatctaccgtatcccaccgccggaaaacgcacaccgctttgaacaactctctcgtaaaaaaaccaaccgcagtaactgtagatgctgcttctgctcattcctcgccacgattttcatcttaatcgtcctcgccggaatatccttcgcggttctctacctaatctaccgtcccgaagctcctaaatactccatcgaaggattctctgtttccggtatcaatctgaattcaacatctccgatttcgccgagttttaacgttaccgttagatcacgtaacggtcacggtaaaatcggggtttactacgagaaagaaagctctgttgatgagtattacaaccaccgttgatataagtaaccg

SEQ ID NO: 51369 - DNA, 737 bp, Arabidopsis thaliana landsberg
tgaattctgtagaacatgattcctttgttgttgatgtggcccctttttcctcgtctaaatataaattctgattcaggatggatcacactatatggtctacacaccttcagatccacttctctttgttgctgctaaggtaagcttgttatctttagttgtttattgtgaaagttttgccgagctgtagcagttttcagatgttacttttatagaagaaatatggaaccttaggactactgtagaataaaaacagagtgatgaatggcaattttatctatgcaggatcaaaatgggctgctgcaaatcgctgatgatgtaagtcgaacctcaattatgtactttttctcctctgcaatttggttgggttataaaaaggttttgagcaaaagttacaccaccagacttggaaaatctgtgaattcatccaaagaagagacttttggaatttgatccaagtagatttgtgataggtcttggcggacaaactaatgatgtttagtagacaatatagagttaagggaaacacaacttggtgattattggttctctgttttttagaagagaggagtgcttataatcctaaataagatttgtgtgtgatggtcaatatgaatgaagtaagctcaccactcgaatgttaatgggtggttgcaggaactcttagacgatccagctgtgatcagcgccatagacgaggaaaccgaattcaatgccttggtggtacgtagagaattcac

SEQ ID NO: 51370 - DNA, 1140 bp, Arabidopsis thaliana landsberg
tacaacacttctctttctctctatccttaggttttgtttgattttcacgcaaaggaagcgaagcgatggatagatattgggaacaagacccgatgaggccgatggtgtaccgtgactttctgggtgagatggagtatccaggatactcgatgcctatgcagatggagatcgatgaagacgacttcgggcccatggatatgcagtttgaagttggaggaatttcaccctttcaaatgaagcccgaagccagcgatttcttcaacaagttcgaggatgattttgatgattccgatatcaattagtttcgatcattctcttagggtttatttcttttcgatttacatatcttttatctctagacattattgtttaggggttcattgttactcaagcaattgataaacccttatgtattgtattgatttctactaaattcactgctctcgtagtgattgttcttatatgtcttgtggtgttttcatgaagatatagggtttgatttattatatgatcttgaatctggaatctgatcattgcatgagttatattttttcttgatttcaatttattataagtaggagattcccaagacgttgccctaaatctcaagatttcctcatatacatgaacattctcgatgaaaacgaagtgtataagtttcgtgtgtggtggcactctttgttttggtagagaataggacccggatgattcttgttttcttccaagagcgttataatttgttctatccataaagctatgattcttgagtttgcttttttacttaagattatcatattttcaatagattcttgggattgatctccctttatcacttaaggttttatggacagaagcttagtgaattttactcaaatttcgtccatatattgtgtatgtatgtatggaattatgagtttcttaattaatttcaatctcgaaagccaatggatttggtacctatacacatacaccgaaaacaatcagtttgttgttaaatataactatgaaaaattaataattgtttagtctcgtttttctcttcttttttctcttcagaaagctcaaaacattgtatctaaagtggtacattggtttattctcttgcccgagctcaaccactctctccaatctccatagaat

SEQ ID NO: 51371 - DNA, 356 bp, Arabidopsis thaliana landsberg
  unsure (1)..(356): unsure at all n locations
tcttgtttaccttattagtgataattggattcttatccctgagtgagcaactacgttaatggatactacctgggccttaagtgcttaatagtaggattgacgtatatatcgtcgttcggctatgctgacgaaaggataggcgctcccaaggttactggtanacgcantntacgcggttgcggtcacttggcattgccacttcccagtttactgatttcgcattattgcccggtgatttcattctgaacctacttgctttacagagttcccctagttttccatgggctgtttggtccgtattattatggaattacatgcccccttcattgatttgattgggctgaaaagggatgtct

SEQ ID NO: 51372 - DNA, 203 bp, Arabidopsis thaliana landsberg
cactctgatgctctcagttataaacgatcagcggcatctgtaagaagtacctggcctttcccttgacacgataggcttagcaaccaggacgttcgatgacatctgtttttgacactgatcgctatctctgccgactactcggaactatcacttgagttgttacttgctgcctactaatacttcgtgatcttgatggactcttt

SEQ ID NO: 51373 - DNA, 421 bp, Arabidopsis thaliana landsberg
  unsure (1)..(421): unsure at all n locations
tcttcttattaatttggaggtattgtatttggctttgttaggtcactgatttaatagaactanctattacttatagtttttttccatcaattagctctgattatcccttaggatggatagcccgctaccatcggtttaatttttattatatttacggttcaggtttcgtagctttgctatgttaattttgcgtatttctagatacaaaatgctagggatagcaacgggatatgagagtgtcacttctgcatttgacgacatcagtaagtagtgaaaagaccattatttcgtggtttgttgaggtatgtgttgttagaatatgtggtgagagtgtagaaagtattttagtttggatcacgagcagaacgaagcagcatattgagactgcaagacatggtgcatagtggcgaatttggatgat

SEQ ID NO: 51374 - DNA, 484 bp, Arabidopsis thaliana landsberg
taaatctcttatataactggatataatcttctgattctactttacaaacactatattttttctcagggaagggaactatatttgtctaggtattacaatctaacaattcattgttcaattaatgtataattccgtaatttcgtcatctcattatgcgtacaatttttttctttctatcttaaatctgacggttaaatttcctttagcatcctttcagattcgagcagttataagcacacttttttgtgattaaacattgtcatccttcacgctagcttaccttttaaacgacaaatcagcaataaataaaaaacatggacaatgactctaatggtggagctacatatatcgtgacgaatcacacatgtaagagaatcatgtgaacaatagtggtaggcgaatctctatctcttaatttgattcttcaaaaaaataattaatgattcgatattaagccactttatcaacatttacttccctaaca

SEQ ID NO: 51375 - DNA, 872 bp, Arabidopsis thaliana landsberg
gcaatttgtatatcacacattcatctctagctggggtagtactctcagagcaaccacctgtgggtcagaatgttagcagagattctgtgcctccaccaccaccaacattctctttctctctcactttctcgggaagctatttttccctcctcattgagagtgtttggttgttgtaggttcctccatcgctgttccttttttaccaccaatataattcaaatcacgacattacagaaacgcttcataattgagtgactgagccataaattcgagacgctcggattttaccgacggatcggcttgttgagtagagagccatgggttgtctcttcggttgcttccgtgctaaagacgacgaatctactactgattccgtttctcaagccaaacataacgtaattctaatcgtttccttctgtttttccagatctttgatttgcaattcagtgttcaattcagctgtttcagtgttaacatctttggtttgatgattttcagagaggtcatgagtcgaagaatcgtttgtcagctttgtttctatctgaaggtgataaatctcttctttgatgttatatcacttaatagttttaaacggtggtcttacttgtttattgtttttttgacgcagcttcgtcgccttgccatgatgacagagagggatctagtttgaattctatgcatattgataaagatctcaaggatgacgtatgttcatatcgaaattatacttaacaactcacgcttaagattttggctccattgaaattaattagcattttcgatttgactggaattctagagttaagcatctgtcattcatttatacttgggagacaatattatgtttgcttgagacatgttcttcttttgct

SEQ ID NO: 51376 - DNA, 637 bp, Arabidopsis thaliana landsberg
gagaaaaaaaaagagtagaattgaaatgacaagatggttcactatcttcttggtttcactaagttctaaatttaaaaattgaaaatgaagaagaatccaaatcttcctctttgcccttttagtagccccttcttcttcactcacatcccaacttctcttatgtacacacagagtaatctccaactagtaacatctctcagtacctaacaacaagtgaagctaaaggaagaaggagccaatgcaatctcaatctgtagagaaaaatgaatggagggaagaagacaatagaacagaaaatacagagacagagatcacagggcaatgaagaggtgaatgaatgaacaaatcataaagacctgattgatactctacactaatgggttcccttgtaatgaagcatcttatgaagtaaaagtgggattattaagcttaagggtatggggaggttgcagaagagtgaagaagaagttattaaccgctatagtgtctcaccgagtactccaacacttctttgcttggacagacaatctccttaacccgactaccgttcttgtatataatcactgtcggtacaaccctcacattctctgcattacctattgaaggcacatttatcgatatccacctgagcagaaag

SEQ ID NO: 51377 - DNA, 564 bp, Arabidopsis thaliana landsberg
cgggtcgccccccgcggtcttcgtgttgagacccgcgacggtgccgagggccacgctcgcggccagcccgtcgcccgcgacccaggtggtggaccgcaaggtgcggagctttatccactccgccgccgcggcttgcctgaacccgtatccatcacgagccatggtgactgccttccgtcaggccgaagaacgcgtcctccaaagacccgcccccctgcgacgtgagctggtcaagggatgtgtccgccaggagcctgccgtgaccgatgacgatcacccggtcggcggtctgcgccatctcgccgatgaggtgactggagaccaggacggtgcggcccgcggcggcctgggaccggatgagcccccggagccagcggacgccctcgggatcgaggccgccctgcggctcgtcgagcagcagaacgcctgggtcgccgagcaacgccgccgcgatgccgaagcgctgtgccatgcccagggagaacgtgcccgcccggcggtttgtcgccgttccagcccgacatgccgagcacctctttacccgccgccgggggatgcgccccg

SEQ ID NO: 51378 - DNA, 560 bp, Arabidopsis thaliana landsberg
tccttaacagttatcttcaaaaatgcccctccaaaaatgtatatatatgttaacggaaacaagattaatgtatcgtcattgagttccttgttgatttaattaaacagatgaacaaatgatatgtaataataaggtctcggtttacagtgaaagtgatttaatttagtatctttgttacttcgattattgaattgagcgtgtgtacttatgaagattaaatcgatgatgcatgggctcatgaagattaaaaaactcaatagacacttaaccagaattaatgatattggcccgatgagtattggcccattaaggcccattaagagagcgaaaaccctaaacgagaaacaagggatatactcagagcatcttccttggttactatataataagctttaggctgctagacgcctgcctccttgcacctcttttctttctctcgttctcatctttctctttaaggttagtcccttgtgtagatcctctcttcatcgattcaatttcatcttccttggtttgatttaggaattttgtcacgatttgtgtttagatgatggagtctt

SEQ ID NO: 51379 - DNA, 374 bp, Arabidopsis thaliana landsberg
acaaaaataaaagccaaatctatattcttataatcaacaggggtaatctcataataataatccccttaaaaagagagcatatgggtcaacctatttaatgaattgttgtcatattcattacttttcttcatttcttataagaaatatatatgaactctttaaaatgtgcatacaaaattccttacttttatgtgaaagttattaatcatcaatcaattaagttctaacatcacattgaattcaacattacaagcctacaaaacaatactataagggttctctcctactctttcctataattcacagaagtttctatagtttcctatctattcataaatgcataaaaatactattaattttttaatgttaaacaa

SEQ ID NO: 51380 - DNA, 812 bp, Arabidopsis thaliana landsberg
aataaagaaaacatcggagccggtagacagttctggtcaaaatgtcaaacttcactaatgagagcgtcacacaagcatgcgtttttaatatacttttaacaaattaaagacaaataaataaaaatagaatctaaaaaaaatttaggatctactagaaaaaaaataatagagtaataaagtaaaccctagatacccatgtgaatgtaggcttgttagcctgtagtaagtaatataaggaatggtaataacaaagatatatatgtatatttgtttggtacgttataagtaaatattttcatggctccaatcaatattataggaaaatatatattctttgttattcgttttttttgtgtcaaacttattctttttaattctatgtattttttagtatacaattatataggtgcaattaattagattttttaccaaacaaaaacaataattatgtgaaattatcaactaaagaatgatatcttatgttagaggaaaaaagaaaaaaacacaccaaaaaaagagaaaacaagagaatgatatctgatgttaaaaactaaaaagagaaaacaaaatcattagtaatgttgaccaatagaataaagagaaagatagttacttataaaaattagaaatgcgtgaaaattaagctgtccacaaatatcactattacgacgccgagaaaaagcaactttccagtttgatatactattttgttttaaagcaaaaatttgcaatatgacgaaaacgtcatcgaatcatgttgcgttcaaactcacccacactttgttcggtctcatacttctataaaatcccca

SEQ ID NO: 51381 - DNA, 552 bp, Arabidopsis thaliana landsberg
agagattcgagattttttttggcctacaaaaagctagagagatttaaccgaatgtttttcaaatatatatatatatatatatataatgtaatttcacaagaagaaaaactttaaccacaaatatatcacaagcctttaattcacgtgaaacaaaaaggactctttaacaaagaaaataaaaaggaaacaaaaaaagtatatatatcattgtgatgaaagatattcttatgtgtatacgtgtgtgtgtgtgtgtgcaactctttatagttcatctttttattcattgcgatcgaaaccaacatttttcgaaagagaaattgtacatagaataatgaaaccgctcagcattagattcaaatgatatacaccaaattttaatcttaagttcgagttagaatcagcgaaacaaaaaaaaggcagcacttaattacatttcatgactaaatgaactatgtttttcgaccaaccgggacgaaaatactgactaccattactcaacaagtggatactccgacaacaaaagttcacctagaaacacagtttcatggcccg

SEQ ID NO: 51382 - DNA, 857 bp, Arabidopsis thaliana landsberg
aaattctttttagaagaagggaagagaaacatagttccttgaaccaaaatttacaaactaagatatataacataacacatggagttcaagtaatacaattaccatcatttgtaacaactatcaatcccgttgtggcaacatcaagacgaccaacagtaaaaaggcgaggtttgggagtccccggattccttttatcctacattgcaaagacaagattcttaaaccaagttttctaatctaacatactttaaaagacaacgttttatgtacaggaaaacaaaatgtcttacccaagaggacaagtactcgtcaaacaaactaatagcagatttgatctctttctctccggaagaacaaatatatctgccatcaggatgatgcaagaaatatcaaacaaaggttacaagtctgtgatagtaatcctgaagctaggtatgagaaaaagctatgaagaaggctaaccctttaggcttgttcagagcaaaataaacctttggaggaagtttcttaggaatacgatttccattaacataaataatgtctcttgatggatcaactcgagtctgcattaacaaaattgctaagctttatcatcaaaacatcaaaatttgattcccacaatgagaattgttttacctgtggagtgttgcagagaataccattaacagtaaccttgccatcaaaaataagttcttcagaggttcttcttgatgccactccagcagcagcgagaactttgcttaaacgttgaggttgttctttaaaattctcattgtaaaacctacgcgccgctttggatagtttggctttacctctgagtgtgaagctggagatgaagcggtggtggtggcggaaga

SEQ ID NO: 51383 - DNA, 490 bp, Arabidopsis thaliana landsberg
cttgtttataccgtacaacaattcctcaatgaagcttatgtcttttcataatgtagagtatcatttctggggtggggcttactaacaagaactcttgttaacttgctatctagtatggttttgaagaaagatgatagctttgatctggttttggttcatacaagaggtgaaagtttagaggatctttaacttctctataggatgttcttgatttatatctactaaaatgaatcattgaaactcttgggagtgaatgaaaattgagtgcctttattgtgaatgatttgttattagtttagaggtacatgttttgagttttctcttttttacacattgatgattctgtatttatccctcgaggtaaaccttttcatgctaaccattataaagcatttggttctatacttgctttgtaccacttaatcctggttttttgggattttgcttgcttagggtcttaactgaaactctttgtatagatcatggactc

SEQ ID NO: 51384 - DNA, 767 bp, Arabidopsis thaliana landsberg
caatggcagtatcttccgaaatactcccggagtcgtggcaagtgttcatcaatttccgaggagcagatttgcgcaacggtttcatcagccatctggcgggagctttgacctcagctggaatcacatactacatcgacacggaagaagtcccgagcgaagatctcactgtccttttcaagaggatagaggaatcggaaatcgcactgtccatcttctcgagcaattatgctgagtcaaaatggtgtttggacgagctcgtgaagatcatggaacaagtaaagaaaggaaagctcagaatcatgcccgtcttcttcaacgtgaagccagaggaggtgagagagcagaacggagagttcggacttaagctttacggagaaggtaaaagcaaacgacccaacatacctaattgggagaacgctttgcggtctgtcccaagcaagataggcttgaatttggcgaattttacgtagataaattgtgcttattttgacccgtttcttatcgtagtgaatgtcattgatttctttttttactcattttggtgtctgcagaaacgagaaggagctccttgacaagagcattgactccatcaaaaaagtacttgcccgaattacacgagcatgcatagtaacagaatctctaaacgggatctcaaaagactcagaggcaaagaatgtagacgcattttcgtcgaactccagtgattttacatctactttcattgacgacgacctcagtatcaactcgcctcagtaccaagccacaat

SEQ ID NO: 51385 - DNA, 574 bp, Arabidopsis thaliana landsberg
tgacctcgttaacataggttcgagtttctttatttttattcatgtaatacatttgatcccattagaaacttattctaaatctaccactggatcaaatggagtgatttagttaatttcacgtttgagaagaattgatctttgaccttggcctacatgacaactcattctctaatagaaacaattagaccactatcatttggttcttttgcttcaaccttcagccctacatgacaactcactctctagtagatattaccccactatcatttggttcattcgcttcaaccttcaattttcaacacataagttttcatttttaattatatatgtgctttttcatttaacaagttttccaacatgaaaaaaagatatgttggtaaatggtaatctacaaacccaaataaaaaagaatataaaaaaaaaatagttaaagacaaatataaattctttatcaatactatttccacaccaacttgtaaatcttcaaaatattttaattagtatctatctacaccaagtaccggaacaagtttttgtgcaatacggaatctttacctcaaccaagcctaacatc

SEQ ID NO: 51386 - DNA, 1578 bp, Arabidopsis thaliana landsberg
cttttccgctgatcaaattcatgcttatcttctaagaaactcactggttctttccatgtttcttccatcagtgtttgctcattactcaaaaactcaggaccaaattcacctccatttcgatccaaagcacacttgtgtctcaaggaactcgctggacctttgaatgtcacaggagtagtaatctcttcttctagcagtctttgctcattactcaaaagtccggattcaaattcaccatcttttctccgtttctgctgatccaatctgttatcgtctctcaagaagctagctggttctttcgatgctccataactactaaacccttcttccataagtctttgctcataacttaaaaccccagattccaattcaccaccttttctcggtttcttgttgagcaaacaacccaaatcatagctactttcaggtctttcaggagtaacacgtactgcctcagtaagaattttcagtccgcctacaaccttgggagcactctcagacaatagaatcaaacaatccgccacttctaattcttcatcagtcgcatcaaaaatagaactcggttcaagaaacgtagtaaatgaagtcttcccagacctagcaagtctcgatcttttcttcttcttcacaaactcaaggctacgagacagagtcatcaaggattcttcacaaaccttctcgttcggcgataaatgcatcatcgagcgatgattcttaaaatatttctcgtaccgaaacccttttccacattcttcgcatcgaaacaaaatcttcttcattggctccggagattcctgggtttttttcttcgagttttcccttagaccgtagtaacaagtaacatcttgctgttggttcgtagacttttctgtttctttctgtgactgagtaatcttgaggtttcgcaaagctccattaatgggtttatggagatcttgatgttcgtcttccatttaggcgcgaaatacacggggtttgttgataaagaagaagtcgatgaaggtaaagatgaggtagatgatgtagagacagataaggaagcaacaaacacaagccggactcattatcaaagaaactatcagatgagtttaagaaaagagaaagtttatgctctgtttctcgtcacttacccgggaaaaactgagagagaaagcgtcggagaaacagagaagcgtgagaaggaaaaaggtagaaacttgagactatcgaatcaaacgaaagaatacaaactttggagtttatttgatttttcgggagaacaagtgagcgagagaaatggaggaaacagagagaagcggagaatatatacgcactcatcgaagtaacggcatgtaagggggattttagtaaatcgttaacagaacatcgactaattgggaaaataatttaacagaacatcttttactctttttactttttagtaactgaagtagagatcaactagggagaacttttatattatgacagtcatattcgaaaagcttacaatatttgatacccaaggtacataattacaacacagaccaaacctagaatctctgtaggaatcataataggaagaacaaagcaacaattatt

SEQ ID NO: 51387 - DNA, 217 bp, Arabidopsis thaliana landsberg
  unsure (1)..(217): unsure at all n locations
ccctctctccccccccccccaccccccccccccccaccccttccttacccccccccccccccccccttcacccccacacccccccccccccctccccccccccccatcttcccttcttcccccccctttgttttccccccccntccaccccccactcttcccccccccccctcctctcccccctccccttctctccccccccccccccccccccccc

SEQ ID NO: 51388 - DNA, 127 bp, Arabidopsis thaliana landsberg
tataactttatataaaaaatgaccatcgtgtgtttttatgtttttatccatttagaatagatatagcttctccttggggagggtgttcatttaatagagctgtgtttgctcacgtcaccttttaggt

SEQ ID NO: 51389 - DNA, 647 bp, Arabidopsis thaliana landsberg
  unsure (1)..(647): unsure at all n locations
cccccccccccccccccccccccccccccncaccccccccccccccccccccctcccttccccacagcccccccccccccccccctcaccaccccccccccccccccccccccccccccccccccccccccccctttccnccccccctgtttcccccccccacccacccccaccccncncccccccccccccnccccccccccccctcnctcccccctccccccccccctccccctccccctcccccccccccccccccccccccccccccccccccccccccccccccccccccccccccctttccctccccccccccccccttttttccccccccccgttgtttgcccccccccctcccccccccccctcccccccacccccacccaccctcccnccccccccccccccccccccccccccccttcccccccccccccccccccccccccccccctcccccccccccccccttcccccccccccccctccccccccccccccccctccctccctccccccccccctcctcncccccccccccccccccccttccccccncccccttcccccccccctctccccccccccccccctcccccccccttccccccccccccctccccccccccccccctccccccccc

SEQ ID NO: 51390 - DNA, 606 bp, Arabidopsis thaliana landsberg
ctaagactcaggtgaatttatatttaataactataccgttgacactgatctacatagtccatattctcctatgagttccccacacacgtcacattgtcaattacatatttgcttctctaatagacaccgacataccaaatcaacaaatcttatcatcatctccactttcactcagagaaagaaagagagcgaccatatttttttatttgaatagaagaatataaacgaatgtattgggtttttctttttctatgactttctcttttctatgcatactctgcccaacaaaactacgaagagccagccatgcatttaaaatgagataatcctttatgaataatttctaatgtcatgcaagatctagaatgagcattgggtctcaactatggcttgtacatgggccgaatgagtgagcccaaaagagagtgatgtgtaaagtgaaatccaagtcttgtacaatgcagcaatacaagagagagttcttcttgtggcatgtcaagtgtgtgtgattttttctgtaatcttgtaacacatttgttttttctttcttactgagatagaaagagcttttttttatacatgtttcctttgcagcttagccttgag

SEQ ID NO: 51391 - DNA, 326 bp, Arabidopsis thaliana landsberg
gaggtcttttagggttagtgatttgggcgtggagaagaaatgttcccctgagattacagatttggatgttgggatacctgttccgagattttctaagttaaaggatgtgtctgaacagaagaacacatgtctgatgcagaagagttctcctgagattgctgatttggatcttgtaatatcaattccgagctcttctgtgttaaaagatgtgtcagaagaaatcagatttttgaaggacaagtgttcccctgagattagaggtttggttttggaaaaatcagtccctggcgaaatagagattctttcagattccgagtctgaaactg

SEQ ID NO: 51392 - DNA, 989 bp, Arabidopsis thaliana landsberg
  unsure (1)..(989): unsure at all n locations
atatctatatatatatatatatatatacacacataaaagataagaagaatttaaaaagcccaatatactgattttagaaaatcagattaggtggcaacccaccattttgtaaaataatataaacacacttcattttcttaccatattattattattgtgaacacattataactcttatctaactatgtatatataccattaagccattataagttcataaaccataactaacggatataagatgcatgttcttttaatctgatgcagagtcaataatatgaatcaataacattttaaatgaaagccaaaacttttttttttatgcaagaaagttgattttgtatttgacgtatatcaactattactagctataagtatgtaaaatatataattacctacaaaaaaataaagaaaatagagtgctcagtattagttggacgtcattttcataaaccacgattgatctctcatttatacgtaaatggagataatcaaattctaagtaagatttctttgtaaaatcatgttttagaaagacgtgttccattgtggatgttactcatcatgttattcaaaattagatatttcctagtagaggtattctttaatttagaatgtttaattcgtgggctatatagttgtatgcatctttaaaattaaaagatataggttgagcttaattaaatatatatattgttatataaagaaaacaatttgcatttcttttagcttttcgaaatcgatctgtttccgttgcaccgtggatatgtcgggaatcgtgttcttcgagggagcattaactctagatgttgattgatgtaactgaaacctaaaatcaaagcatgaatctgccctaacccatattccaaaaacatacacaactaanaaagtagaagacgaacaaatgcttttggccaagttttcaactcatttaacacccacatgccgttagtagaagcnttttactcattgttttaacaacccaactc

SEQ ID NO: 51393 - DNA, 780 bp, Arabidopsis thaliana landsberg
tttcttatcagtatatgaagattagactctgtttccttttgcattgtgttggcggattagacaaagcaaagcttttcttagcactgaataacaaacattttgttcatttaaacagtctgtttgatactttgatttggcataatgatgcacatttgttgcttttgattcgtatagaatatggtttatacgacaactttggttttgtttcattgtactgcctttgagttgtctttggttatcatgaaaagaatgttaggttccgtgaaatcgataacgagagaataagtcgtaaaatgatacacaatgatggcgaagaagaatgaatcttcttctctcagggtcttgtttggatttgtaattttggttgtaacttggcacaggtacttgaagaggcaaaagagtgtaatttcactgcgcatgcgtgaatcagtactttgaagggatgtgagatcgaaattgtgggattacctcagcaaaaacttgcttattgtgttgccttttttagaagttttagtttcacaatgtgtggatttattagttgtagagcttttcgtatgcttggcacaatggttttttctcagagaacctttttttgttttggagaaatgcatagcagcattaataagtgtattgcatcagaactgaaacaatgttgttactgattcattctctgctttcttctcgtaccataatcttgctgcaaaatacactagagatcaattctaacaatgttcacgcacattgttttgtaaaataggataatgttttgcaaatctaaac

SEQ ID NO: 51394 - DNA, 857 bp, Arabidopsis thaliana landsberg
gaaagatatatattcttcaaaaatcatccgtacacggtttagactgtttttctctggttgttttgctagtttcttagcaaacaattctaaaagcctccacttgaggtaaagcatcaaaacgctgtcgcctttgtctagtggatcaaaagagaataaaagagtgggctttgatccacactaaagaagctctcgagactctgtttccactggagggtttgaggattgtttgctaagtgatggagatttcttatgagttttcaaagaatgggctttgatccatatgttatcattcatcgttgtagtcaaaggaaaacaaagcatttgccgacaaagaaaagaaaatgccgcatgtatcatgcattcatgcagaattttcaacataaatcgattagtcattaaataattgacaaaaaatcaactaaatctttaaagagtttggtaaaattaatcaattagaatcattaaagagtttggcaagaaaaatttaattagaatcactggtttcgttttgttaatcatcaaatctttttctttttttgattttttctaatgacttattttggtttaaacaatgttgaaaaaatgaatttacaaaaaaaaacatttgtgtacgtatgatcaattattagtacgttgataaatcatccacagttacagctaaacaaaaatatggttcacatcttaagaggttagtggtatgcacatcttcagcatattccacaatatatatattatgacaaccaaacggtccaaactttcacgtaagaatgacctaacaatattgagaaaatgtacaatattgtattgcttaacaagttttctttaaagccaatataacatgaagaaacctaaaatat

SEQ ID NO: 51395 - DNA, 539 bp, Arabidopsis thaliana landsberg
  unsure (1)..(539): unsure at all n locations
aaacaaatatagttagcaacaaaaacaattgactaagagctagaataatacctttatcacttcatttcataatggtttgcaatatgctcaaactaagtccaaatgccacttcacttgcacaaagaagttagtagccaaacaaaggcgcaagaaacatggacttcacatcttcaattgcttgatctaactcatgctcatatgaagaatgttagtccatagtggcgtgttggttagctaatcaccaaaacaacttagannnnnnnnnnnnnnnnnnnnnnnnnnnnnnnnnnnnnnnnnnnnnnnnnnnnnngtgcccacagttaggagtcgcaggccggaggtcgtaggccaccgagagtcacaccgtaggccttgcgggaggggagcagggatggttgggtgggagtcctaataacgacaagtgcggctgatgggaggttgtgagctgtatgggaatctcgagtcccgatgagtgcgagtgtgcggatgggtgagatgctgggagctgggtgagagggagtgacccctatttttatata

SEQ ID NO: 51396 - DNA, 576 bp, Arabidopsis thaliana landsberg
ggacctattggacggaaatgtagtttattggcttcaagcatcctaggaacctcttttccagtctctgaagctttaacaaagagcaactctatctctttcatacttgacaagaagtccctgggaggaagcttgttctcggtgtgatctcccttgtttggtgttttgttcactggagtagctactaaaggcgtcactggtggtgataactcaggagttttacttttctcagcgtctgaggagtcgctttccactccctctctttgaggcaaagtactgtgatcacggcgcactctattgaagttttcaaagcttctaacaagagtatcacttgtgggttcatcaaactcatcatcatccgaatctctggactcttccctttcttgaaaagaaaagtcctcaccatcatcttcctcctctggagttccatcttcctccttaacagatctcgacacatgaccattcccaacatgagaagaagaaaactggttgtcaattggatgagaaagaccaaaataatcccaaggtgctttaggtggcatggaaaaagattcctcaaatggggttgattccatcttt

SEQ ID NO: 51397 - DNA, 534 bp, Arabidopsis thaliana landsberg
  unsure (1)..(534): unsure at all n locations
nnnnnnnnnnnnnnnnnnnnnnnnnnnnnnnnnnnnnnnnnnnnnnnnnnnnnnnnnnnnnnnnnnnnnnnnnnnnnnnnnnnnnnnnnnnnnnnnnnnnnnnnnnnnnnnnnnnnnnnnnnnnnnnnnnnnnnnnnnnnnnnnnnnnnnnnnnnnnnnnnnnnnnnnnnnnnnnnnnnnnnnnnnnnnnnnnnnnnnnnnnnnnnnnnnnnnnnnnnnnnnnnnnnnnnnnnnnnnnnnnnnnnnnnnnnnnnnnnnnnnnnnnnnnnnnnnnnnnnnnnnnnnnnnnnnnnnnnnnnnnnnnnnnnnnnnnnnnnnnnnnnnnnnnnnnnnnnnnnnnnnnnnnnnnnnnnnnnnnnnnnnnnnnnnnnnnnnnnnttttttttccccccataaaaaaaaaaggcccccccccttaataaaaatcccccggaaaaaaaaaaaaaaacactcctttcttttttttttttataaaaaatattttttccccccccccccccccccgcggggggagaaaaaaaacttttttttttt

SEQ ID NO: 51398 - DNA, 816 bp, Arabidopsis thaliana landsberg
ggaacggtatcattatattgcagaatcaatgcaaacaaaagccacaatccatagtaaccagtcatcagatctatgctcccttttgcaaagtttctctctgattcaacactttatgttgcttttttattttttagaaaatgagagaccagtgaaattctagcagtggttgatactctttaaattacgaaaaagacaaaagtgcttgataccgaatttgaactagaaattctgattgatctatcaatctatgctagcgtaccaacctgattatactcaggtaaatcccctgcctccaaagctaatctagcatgtgtttcataaacctgaaatagagattgcacatggaaccattataaacatgctaattgggtgtaaataggataaaccttccaacaggaaatgaatcctacatgcaataacactcgacattattggaagtcagttatgtaccttagctgttaaatgattgtgtatccgttgtactgtgaggtcttggcgaatagactttagttgatcacatttaaaaagataattcttttgagaatcctgaaccattatcagagctttttccaaaacatcctctggtcttacctgaaaataagtcaatcaaaaatatcagtcatggtgtcaaaaagaatactaggtataagaatataagatagtaatatttacggtggcaggatctggcgcagaagtcagacggagataacgtttctcaatttcctggcaagtgcctttaacagttagtgcatcccagtcaatgtcttccacagctctgctgccactttcatcaaaaactttgctagcctcaaggca

SEQ ID NO: 51399 - DNA, 505 bp, Arabidopsis thaliana landsberg
  unsure (1)..(505): unsure at all n locations
gcgtgccatgcgcagcaccagattcgttgcttttgagaattacacgggccaaacagacaacacnnnnnnnnnnnnnnnnnnnnnnnnnnnnnnnnnnnnnnnnnnnnnnnnnnnnnnnnnnnnnnnnnnnnnnnngcaaataatcatgccgaccacagatacgacaggcgtatccgcttgatagcaagcgcactcgacaataatgatttgccacttgcggatcaacatctcgaatggcttggcaaaacccatcccgacgacgcggaatacttgcgcctgcaggccatggcacacgctgcccgcggattgaccctgaaagcagtgacaaccatgcggcgcgcacttgcactgcggccggatgatgccgttttctgcaacacgatggcttgcctgttcgaccgcgcctatgagctggatgcggctgttgccgtcgcccatcacgcagtcgaaatggatccacgcttctttaccgcatggttcaacctcaggggcatactcacacaca

SEQ ID NO: 51400 - DNA, 937 bp, Arabidopsis thaliana landsberg
caacttcgtgtaccgcttctttcgtttgctgtaaccgatcccgtaatgtcgccgttacagtttccgtatttcattaggactactcatagtgatttatatcaaatggatgctattgcatccattgtagatttttatggttggaaagaagttattgctgtgtttgttgatgatgatttcggtaggaacggtgttgctgcgttgaacgataagcttgcgagtaggagattgagaattacttataaggcgggtttacatcctgacacggctgttaataagaatgagatcatgaacatgctgataaagatcatgttgcttcaaccgaggattgttgtgatacatgtttattcggagttggggttcgcggtttttaaggaggctaagtatcttggaatgatgggaaatggatatgtttggatcgctacggattggctctctacgaatcttgactcttcttcgccgttacccgctgagaggttggaaactattcaaggtgttcttgttctgcgtccacacacgccggattcggattttaaacgggagtttttcaagaggtggcgtaagatgtctggtgcttctttggctcttaatacatatggactctatgcttatgattctgttatgttgttagcccggggtttagataagttctttaaagacggtgggaatatatcgttttcgaatcactcaatgcttaatacgttgggaaaaagcggaaatctcaacttagaggctatgactgtctttgatggtggagaagcactgcttaaagatatcctcggaacgcgtatggttggtttaacgggacagcttcagttcactccagataggtctcggacccgtccagcttacgatattatcaatgtggcgggaaccggtgttcgtcaaataggctactggtcaaatcattctggtttatcaactgtattacctgagttac

SEQ ID NO: 51401 - DNA, 705 bp, Arabidopsis thaliana landsberg
aaactaaccaatgggagcagttgaattgaagggatgtcctagtccacgttctggtcatcgtatggtaagtctttgatgtaccctgagttcctgaccaatgtgccttagaactaaaaaatgtatgtcactaacatgctactggattaagtagatagagtctgactttccatatactattcttcctctagctgatacacaagtggtgactttggcagtttattaatcaatgaccaagcacagagactaatagcagatatttaagatgatagagattatatcttcacatgttttcttgtatttcgtacatcaaggtgtgaatctggaaggctctcctttatgtgctgcttaattttcaatctatcttctgtgatgaatatatgattctgcattctgctatactgagctgtcttcgtaggggagttgtactactttcattatcaatctgatcctgccttcccttttgtaaccaactcatcaagttctcatcctgctctgctataaactactttttcaggtattatacaagcacaagatcataattgttggtggcttctatgatactctacgtgaagtaaggaatgaatgtactcatttcgttagaagtatatcaggaccttaatgttaccttttcggcggacgagaattctaccttttatcatgccctagatgtaaaatcatcaccgatgtctcgtatattctttcata

SEQ ID NO: 51402 - DNA, 615 bp, Arabidopsis thaliana landsberg
atcgtatttaaatacatatagatttgtttttgtttaaattttgagagaaaatgtgacacaatttagttgaatgggtgcaaatttctcctctacttaataggaaagtcagttttaagaaagtaaatgaaaacactttcattattagtttttttttttaaaggtggattttgtggaatttctttatatcctattcctataaaacatattctaggataatgaaattgaaaacttctttacctcaaatgaatctttttcacatactttattgaattgccaaaaaagaataacgttattgatttttgaaaagagagcaaaaaaaaagacagatggtagacgttggcaggctcttgagggcttcgagaaacttcgattaggtgtaaaagtgtgtctccacctggctatgtttgtgttcccattgtcatttagtttattggtctttcacattcaaagcaccaaaatcttggtcggtaagcaagttctttccttttttggcttccaggtcggtaaacaatgtaccaatgctagtttatgtaatatagtctatgttaagaaaagtttgttcgtctttctaacttgttagaataaaagaaaacgagttagcaacaaggacaaaag

SEQ ID NO: 51403 - DNA, 1116 bp, Arabidopsis thaliana landsberg
  unsure (1)..(1116): unsure at all n locations
aagttttatctgcaagtctttttcaatactcaaatcagtttttcaatcatgatacagcagtctttcaagagctatatatatggatcaataatcctaggtcgctagactaatctcttttctcatgattcgaagaacttgaaggcatgccgatatttacctttgttgtttgatgagactgttgtctatagatagctgctgccattttattgtagagatccatattcattgtctgcatcagcatggccaatggaagtgagctcaagatttgtatatgtttgaacacttttctcgaaaacagttaaaagcggtcttacctgtgcgaaaaaggcgctgtatggatcagataatgtggctgaagaaccgttggtgcagtctctgttacccataggagggaccatcattggtggaggaggaggaggaggaactaaacctccataaccatttccaccacctcccattcccattcttgccattgttgcaagcaacgacatctgaaactgttgctgctgttgttgctgctgctgctgctgttgttgttgttgttgttggtgttggatgctgagaactgactgtggtggaggtagttgcggaatcatcatttgttgtggcaagttggctcttaggctcatgaactgtacttgtgcttgtagctgtttcaagtgttcgataacatcatccaagattgagactttatccgcctgcaatatccgaataacgcgtttaaactgaccgatatcaatataaacaaagttcttaaacttaaaagtgggttcttctaggatagacatttaccttacttgcagtaggaagcagcttctgaagtgttctcatcctctggtttatcctatcacgccgtctctgcatcaaaactcagagtcagtagtttggtaatcacggaaagagaaaagatggattagtttttaccctttcngactcgttgtgaatcgctgctgctcgtccccgtcgtccattagatctacctgcttctcctcttgtctcttgttcatctccttcagtatcttgagtttccctattaaaagtcctcttttggttatttctccagtcatctttcaagaaaaaaaggaaagagtaattttgttaagtggtacccgatcc

SEQ ID NO: 51404 - DNA, 677 bp, Arabidopsis thaliana landsberg
  unsure (1)..(677): unsure at all n locations
gttttannnnnnnnnnnnnnnnnnnnnnnnnnntccgggtggtactgtcgtcgatcccgcccggggtcttcacgaatcgccacggcacgccaagataaatcaccccggccacgcgctcaacacgaacgacgacacgcccacctattggaacatggcagccaccatcaatccgcccagcgcgccaatagtgattcggagggggcagcgaaacactaacgcagatgagggtagcggccagattgatggaggaacgccgtgggaccacaagtttatacccggaggtccgagtccgctgtgggccatcagccatcctccacctcccagagatcacggcgagctacaagcgggttgttacgactaggtaggggacgactctggcagaatggggtccacacgtcagagggtaatggtgctgccgcgcgcgagtgaagacggccaatggggccacatggaagtggcatagcgatcgtgggtgcgtgaaaggtatatgggccgcgcagaggggttccctggctgctgggccgaaagtggggcagtcggcccaggtaagctttttattctttttcttgttattttccaccttcttttcttcatcttcagattctctttaaattcaaatttaattcaaacctttttgtggttcttcattgcgaagtagatttgtgaaattagggtat

SEQ ID NO: 51405 - DNA, 457 bp, Arabidopsis thaliana landsberg
gtatttatttgtttattaattggaaccaactactgttacagatgaagataaggtgtacttttaataactgtttcaagcatgttaccgagacttaaacttagaaattcatataccctagggcaagctgatatgttcactcattgttttttttttgcaacgcgttatttttttcattgagactaatattttattgctttggtgcatatatatatatactttaagtgtgtgcatatatatatacattgttgttatgtactccatccgtttctttttatttgtcgtcgagtagtttaaatttgtactaacggacgacatatattaaggaacggagggagtattgaccaaaggctcgcgcttgcggattcagttactagttccaattataaccacgctacgaacagaacacattcgcatctgcggcacggcggcagagatactgcttgtcccaagaaaataa

SEQ ID NO: 51406 - DNA, 539 bp, Arabidopsis thaliana landsberg
atcttgaaaatattaaaaaaaatgctaaaatattttttttttctaactaaatgtttctcttcataaacttatggcataattttaaaaatgtattaaattagtaattgaatttgtatttactaaattaattttataattattaaattaacttatggtaactaatataacgatattgaatagttggatatttagaaaaagaagatgaggggaaaataattcttatactattttctcataacattgtttaagtaatattaaggaagactatctttatagtacatatgttattggtttcgaaacattggactgataaaatcattattttttttctttagccatatatatttgattaattgatctatttttagtaggagatccaattatctgaaaatactattgcaacatgtttcttctttattattggtgaatcattgacattctttttgttttcaaactaactttgcactaattcttgtaacactctctatgtttgatcaattattatctcggcgatccctgaaaaaaatatctatattatt

SEQ ID NO: 51407 - DNA, 560 bp, Arabidopsis thaliana landsberg
gcatttaccttatttcgtacgtaaattggttgttttataattaaaagaaatccaatggttagctaataactttagagcatctttattgggagatactcttgttggtatctcaatttgtttttgttatttttagttatataatttatatttaatcgatttttaataatcaaatcaatgcaagtggaggtgtgatttgagaaacgtttctcataatctctcattctagatacgcatctatccttcaatcatactttccgatttttaattatgattcaaatattaacaacactaaattttagagttgacgctgtatttattaaccaaaatatgtgatactctatgtaataaagatgaaaaaaggagaagaaaaaatcatatacaatgatccgttaattaacatttcaagtattacaaataagaagaacaaaaaaatcagatttaaatgaaatagcttcgacccttgaacagtacttaacgtatcaatgtaacataacaaaatcggtcacgtgaggcagtcccttagtacacgtcactgcagttacgaggcgagctttgagtgg

SEQ ID NO: 51408 - DNA, 1019 bp, Arabidopsis thaliana landsberg
caaacaacgcactatatatgtacctcgtacactctaattagctcatccaccacggtaaaatttatttattattttgcattttttatttggttaagctgaaacatatcattatcaccaagcaattatatatgtaccgataacccatgctgaggaaattttctaaccaaacctttgggatcagaatatatattagtaaataatcatactttaacttagattacactaaaaactagttatcattttagtgttttttttgtctgacgagatctcggatgcttcgattacacctgacttgttagatgggtgatgcatgaccacattttggctaacatggcgtgcaaacgatgacgtggaggcaactgattggctccactgattcccacaaatttgttgcaaaatacaaaagtagggccaaaccaattacatatttttttttgtggatgtctttaataaagaaatttgaatcaatacgtaatttatcgattctgtgtctaatcgatgtcaactaaatttaacaaatatctggaagtcactcaacattttccttgataatgctagtttcttcggatcttaaatgaggcaaagcattgtccattgaaattataagcatatagtgcatatatgtatttatttttctagcaaattcaaaacggcctgggatcgtttggtttgtaatcaatatatgttttttttttggtcaacaatcaataattagtatttttgagaattcatgaaatactggatgagtaaatgagataatttttatggatgatcaatagcacatggttgctaaccagtgaagcacctaaaaaatcactgtaaaaaagtttgtaatcaatttcgttgcagctaagcaacatttatgactaatttgagtaaatattaattgacgatcccatgaatttcacctaattgacgagtccctagatttgtattagagtaaatattacaacttcatctactttacattataatgaacaaactaaaaaacttcgtaaccaaataagaccttgtctaat

SEQ ID NO: 51409 - DNA, 548 bp, Arabidopsis thaliana landsberg
ccgcacgttgccggcgagctccggccgcgcctggcgcatttagctgtcgatccagtcccgtgccggctcgcggatggggacgatgcgctcctttccgcctttgcccacgagctgtaccaggccgcgctcgagctgcacctggtgatgccgcaggttcaccagctcgctcacgcgaaggccgctggcgtacatcagctcgagcatcgcgcggtcgcgcaggccgagcgtggtcccggcgtcgggcgccccgagcaggcgctcgacctgcgcaccgtcgaggtacttgggcagcgcgcgcggcagcttgggcgaacgcagccgcgcggtgggatcgttggcgcgcacgccgtcgcggaccaggaaccggtagtagcggcgcagggcggagagcagccgcgcctgcgacccggccgagaagcgccggtcgacgccgttctttttcccgtcgctggccgcgtgcgcctggccgcgggcggtcaggtagtcacgcagatcggtctcgcccgcgcgcgccagctcgataccgcgcggcgacagtcattgtgcca

SEQ ID NO: 51410 - DNA, 558 bp, Arabidopsis thaliana landsberg
  unsure (1)..(558): unsure at all n locations
ttccgctgtgaactcgacccgatatatatatatatatatatatatatatttttcctactttgtagagatatatccatatacttaatcattttgtacatcctatatagcaatttttttcaacaatttgtttttctgccaattagtagtttttgtgatggttaccaacttcttgtgatggcttttaagatattgcgaacgaatttgttgtaacataaattttatgtctacttatcaaattgtcatatttcacattattttactgacttttagcaactactttgnnnnnnnnnnnnnnnnnnnnnnnnnnnnnnnnnnnnnnnnnnaataatgcgatagagtatggaagtactggcaatagtcgtagctcagttgcaaacaatttgcgatgaattttttgcaacaatattttcgccagatactaatgaaacattatatttagttgtgaatttgtgactagctaaaaaatgagatgaaaccattgctaattcatgatatactggtatntctcgtcccaatatatgcgacgacttcttntacagtcttttccatcacatagat

SEQ ID NO: 51411 - DNA, 190 bp, Arabidopsis thaliana landsberg
ttttcctagtgatgatgatgaaggaacggaagatgatgatgaagaagttaaggtggtgaggggtatgcggtttgcccattcataggcctggatgggggatcctgctgtcctggaatacatatactcccaccctgtaggcgatgttggcaccaggacggcaaaggctcgcccggtcttccccctgattgac

SEQ ID NO: 51412 - DNA, 391 bp, Arabidopsis thaliana landsberg
  unsure (1)..(391): unsure at all n locations
aagccaaacaaccgtgaaagcgggcctatcatccttttacttctaatttgaactgagggcgggagggtccactggatactggctgtgcaccaacgttatnnnnnnnnnnnnnnnnnnnnnnnnnnnnnnnnnnnnnnnnnnnnnnnnnnnnnnnnnnnnnnnnnnnnnnnnnnnnnnnnnnnnnnnnnnnnnnnnnnnnnnnnnnnnnnnnnnnnnnnnnnnnnnnnnnnnnnnnnnnnnnnnnnnnnnnnnnnnnnnnnnnnnnnnnnnnnnnnnnnnnnnnnnnnnnnnnnnnnnnnnnnnnnnnnnnnnnnnnnnnnnnnnnnnnnnnnnnnnnnnnnnnnnnnnnnnnnnnnnnnnnnnnnnnnnnnnnnnnnnnnnnnnnnnnnnn

SEQ ID NO: 51413 - DNA, 437 bp, Arabidopsis thaliana landsberg
  unsure (1)..(437): unsure at all n locations
ctgccgntctagagcatgcccatgcacggctttgtttgaagaaatggcatgccgttgggcgagattgcctataaaccttggggatggcgcgtgtttcggaggggtcgttggccggagtggtcgtaccgtgcgcattgatgtagccgatatccgtggcgttgagcccggcatcaagaagtgcggactgcatggtttgtgcgggccccgtattggccggggccaccatgtttccggtgtttgccgacatgacggggccggtcagttcgggaagtaccgtcgcgccgcgcgcctgagcatgttcgagggtttccaggaccaaacatgaccgaacctttcgtccagaaccagaacttgttgttgattgcaaaacggccggcaggtgccattggccaagattcgcatggttttccactcgcccacgatgacgttagtgatac

SEQ ID NO: 51414 - DNA, 550 bp, Arabidopsis thaliana landsberg
  unsure (1)..(550): unsure at all n locations
caccgtatatcccaggtcggtcagcaggttgttgaacatgtattcacggaaataggagctccaccagttttgtacattctgcaggtatcccgcgccatgtacaaagaaaacagcagcgccattctttttacccgcggctggctcataaatacgtgcgtacaccggctggccatcccgtgcagggaagctgatcacttnnnnnnnnnnnnnnnnnnnnnnnctgaactcttcgctcatgcccaggctggttacctgtaccggttttttgcccggcacattttcctgtatgtataattcccagggtttgttgatataggaataccggtaagcgatccatttttcatccggcgacatgctcacttcataaccaccgggcatggatgtgatcttttcttttttgctgccatctgttttcatccggtaccagttttgtttgccgggatgttcttcattggtaagcaggtaaaaggtttgcttattacggctcagtttcaggtcctgtacctcgtattttacctctgtaagcgctttcctggtacgcgtattcata

SEQ ID NO: 51415 - DNA, 265 bp, Arabidopsis thaliana landsberg
cacaacaggggccaggacggagcgggtgtagccaatattaaattcgatatgccacccggcagccgttatatcagccggaaacgggcaactggtgcaacagccatcacagaaatcttcgaagatatttttaccaagtttggcaatctggaaaagaagaaccccgatatcctgaaagatccgaaggctttaaaaagcagcgcgggttttacaggcgagctttttctcgggcaccttcgctatggaacttttggcgggaacagcatcg

SEQ ID NO: 51416 - DNA, 649 bp, Arabidopsis thaliana landsberg
  unsure (1)..(649): unsure at all n locations
tattaattggttctaaaattgcccaaccaaaatcccaaccgtgtatagtgtcaaacncctccttgtctataagaggttgcaaatggctgtccttgtcaaatacgttgtatagctccattgaagtatttgcttttttgtttgattgtttttctgtctgtccgcagctaatggcaaaaaatagaaatacaaaaattagtggtcgtctcattttaatggttgtccgtcggcatagcacacaacgttttggggctttgtgttcgggcgggcaatcgaagcacaaaaactgggtaaaagtacaaaagtttaatagtagcacaaatgttgaggattgcacatcagcccgcctgacgcaaaacccttgttagcggtggttttttctctttcagttgtcataattttgaaaacatatttgctgtcccttttttatttgaacgcccaagtcgtaaatattttttgtcaaacttgaaaggaacaaatttctcaatgctgtcaacataactccaaaagtcgttgtctggctgtgtaaacggaaaacacatacttgggcttacacagttgcttcttgtcaaccaaataaagcaacttgaagaatactgttgatttgcaatgctctcttagaatatngtcacgagttgagtcataggaaata

SEQ ID NO: 51417 - DNA, 208 bp, Arabidopsis thaliana landsberg
aatcctgcttcatctggtagcactcagaatttccgcagttcgtcaaatgtaaaacaaactagtaataacacagggttgacaagagctatcagtgcaaagtctagtctagggaatggaaagtccgcgtcacggcgttatgatcatagtattgtcaacagagaatcacatcctttgtcccagaatatggaggaaattaaagaccttcatg

SEQ ID NO: 51418 - DNA, 808 bp, Arabidopsis thaliana landsberg
tcaaacattaaagacaaaaattgttgcggtgtcgatatatagatagacccagtgccctccttagaaaaactttaactcgttgatttctgtaaataaccgagagaaggggttgttgttagttcgttgattcacttgaatggccgtaaaagatagacttgagaatcattgattaaatgaataaccgataaacaagagaaatgctccaaatttaaatcaataatcggatgcctccttacaagcataagagacagtgtcggtggggagagttgtgtctagatgcgctgcataaggtctttctggattggagaagatttgtctctgaatctggaatgtcattatcgccacgaaagttggagagaaaattgacattaaacacatttgatgtcttgaggtgaggtgcaagttgaaggcggtacatgttagcattgacacactcgatgacttcaatggggccaatctttctagaaagaagtttcttgtattcatgtgatggcataagatccatcgtcaacactacccacaccatgtcgcctggttcaaaaattacctcacgtcgtttcaaatcagcttgttttgtagcgaactgcaaaaagctcccattgatcacgagtttgttgatgtcttttctctaatgcttcaacaaactccattgtgtggccatgaatatgccgtggatcaggagaacttgttaaatcaagaggactgctataaacaacttcaaacgggctgaatccggaattcctattagttgcatggttatgagcgaattcagcttgatacaagccagcttcccaagctcgaatgttat

SEQ ID NO: 51419 - DNA, 541 bp, Arabidopsis thaliana landsberg
aaatccgcaattgcgtccctctgcgacgccgttggtcgtgttgttttatgtaatcattagtttctttaattatatcaaaggaatgattcatcgttcatgcaataatctgaatattttaaaagtcaagtgcacaacaactggcgatcaaaatatgtcaatagaccggatggtccggattcataatctaactctgttattttcacgttacaatcttctaatcttccagagaattttgcattttaggattggaaaacgattgaataagatggatttcctgataattcatttgtaatcatgcgtcccgaactcctattttgcaattgaaaaagaatataaaagacacagagacatcaaacatgtgtataataatattttgaaaacgaccaccttaattaaattggttttttaaagttgtttttggtatatccaaataatgtatggaaaaatgaaaaatccatcaacttcaaaaatatgtaaattttattttgtcaaggacgcttttgatttgtttttggacttggcaaacacacacaaaaaaaat

SEQ ID NO: 51420 - DNA, 498 bp, Arabidopsis thaliana landsberg
  unsure (1)..(498): unsure at all n locations
agacttccttgttgagcaatttgtgaaaatgagaagtttggggtaagtggttgaggatactgaactcctggtgacagcaatgggtaaggcgatctcggagagaacatattcgggtaaccggtaggagatggttgaagaaattgggatgtaggtgactgcagtggtccaaaaccgttatatcgaggagaaggaaatccaccatacatctgactgaacatgggagagggctgagtaggcgtcacaggtacaggagcattgaaccgaggagaaggaagattatgaggcactgggctaggaactaattcgggtggtggtagatactggttaggttgaagagggccctgcatgttcattcgaggttgcggtccaggcatcatatgttgctgaggttgaggttgaggttgaggttgagactgannnnnnnnnnnnnnnnnnnnnnnnnnnnnnnnnnnnnnnnnnnnnnnnnnnnnnnnnnnnnnnnnnnnnnnnnnntatggc

SEQ ID NO: 51421 - DNA, 663 bp, Arabidopsis thaliana landsberg
ggttccactcgagtcctcgtcgctcgtagacggtgccaagcctcagtccttagaccctgcggcggaataaagccctttctttccttccgcagcttacctacctccactgtgtcgtttcggccttcgttgagagcaaaatccgatggattggctcgggcctatgttaccggagcgccgcctatcgtggaagaaccagacccaaagattgaagaatccaaatctgaggctgaatcgaaggatttaatcagttgggggcttgtgtggagcttgatgagcaagcacaagctcaggctcagtgtttgcttattgactctctttggctgcagtacttgcactctctctatgcctgttttttctggtaatcgattcttctattcactctctcaccttttaacaattgtaattgttgtctctttttggtttgatttagtttaagtttgggtataatgatttagcttatactacctgtgtatctttttatctttgagaaactgttataatggtaagtgttatggttttgagtaaaggtagattctttgaagtactgattggggtgagaccggagcctttgtggcggctgctgagcaaaattgctgttttgtactcgttggaacccatctttactattgcttttgtgaccaacatgactgctatctgggaaaa

SEQ ID NO: 51422 - DNA, 992 bp, Arabidopsis thaliana landsberg
tctctcaataccgaaattatcattttgagtttgcgtgacgactttcattgaacatcgtacaccctttttatatgatactactaattacctttttcatatgatcatgctggataatatcaatcatcttttttaaaaaagaaatataaaccaaaatgactgaaaatatacaaaactacgaaaagaaatgagatatccatatttttgcttttataactttaaaaatgatttattatgtaattttttatatgtcctttgaatatatcttcatacttatccacaatgtttctttcgttatctatatcatgaatgatatatgaatcgttaaactctcttatatatattaatttaatgaaataaaacttattatatgctttcctgtttcagttttctaatgattactgtagaaaaacatcaatgaaataatatcgaaaataaatagaaagttccaattgaataacacaaacattattacagtcaagacaaagaaacttcgaaaatctcttcgtctattaaaaaaataatcagaaatttaagagaaaagcggtgtaatttggagcgcatgatgatgagttgttatcgttacgaggcaaggaagagtcagctcggccgctagtaggagctcggacacttcgacggcgacttgtaggtggtggggggaggagtgtggcggtgatgcgtgtgagcgccgccgtgtattcttcaagcaactcggctgcgatggctactgttatcatgacgatttgaagattgctttgatgatgatttgcattgacgtttgttagaaaagctctaaacctttttatgatcttaatttgcttgctagacaggaccatgtaacttacctattatgagacggcatcgtatttatagagcatgagcttttgaagctagtggccacaaattttggcaggttctggttataaatcattatagccgtcagatctaccgaccttatcatattcaattttacatctacttttcatgccgcttta

SEQ ID NO: 51423 - DNA, 110 bp, Arabidopsis thaliana landsberg
gtttaaatgatgagagctgatcgtattcggatcatgagtgctggaatcatggcatacattattatattcaatgctatcgggtacagtcactgttgaagacttgatgaacc

SEQ ID NO: 51424 - DNA, 582 bp, Arabidopsis thaliana landsberg
acgggtaccgaattcaagaccaaacatttttacagtttctattgcagtagttgctgcttctgcggttaaatgtatccgtagagggaaagagattcatgggcatatcgttcgagctggtttggattcagatgaagtgctttggagttcattgatggatatgtatggaaaatgtggctgtatcgatgaagcaagaaacatatttgataagattgttgagaaagatgttgtctcgtggacatcaatgatagatagatatttcaagtctagtagatggcgggaagggttttctttgttttccgagttggtaggttcttgtgaacggcccaatgaatacacttttgctggagtcttgaatgcttgtgctgatctcacaacagaagagctagggaagcaagttcatggatatatgacaagagttgggtttgatccttactcttttgcatcaagctctcttgtagatatgtacaccaaatgtggaaatattgaaagtgcaaaacacgttgtcgatggatgtcctaaacccgatttagtttcttggacttctttgatcggagggtgtgctcagaatgtgcaacctgatga

SEQ ID NO: 51425 - DNA, 1062 bp, Arabidopsis thaliana landsberg
taaagagacactacaatgggggaccatactttagaataaagtactctctcaatgttcagtcactattataaagttccaaaatcaaaagaaaaaagattctaaatttagacaatcctctgaaccagaaaatgcagagactttctagttctctctctctaaatgaagaactcttaacttgatgaagtaaaagcaatgcaaaatccagtggatcagttgaattgttaagactctaaaagattattgatctgctcgaaaacaatctaatttagattgaatcttgagttatataatgattttaataaaaaataatgacgtttttcttcatcagcacaagaccatttctcgtatctctctagaaacgagcacaaatcagaaaaaaagattcaaactttaatcgatttcataagaatgagcaatactaaaagattgaaattgattcgatctagctcatagtcagagaatacctttcaaattttagaaactcaaaaaaaaggagaaacctcgccaatcagaaacccactttattggagaaacttcagattcatacaaaattgaattcgccgatgagatcgatctcaatcatacacacaaaagaatggcaatctctgaataaattcggtgatcctgaatgtaaaaactcaggaaacaaacaatgaaaagaatatagattaattaaaacatgttttggaagaagaaaaagagatataacagttggggtttaacagtaacaaatggcgactgataaaattggagagaaagatcagaaaaatggagagaaaaatcggaaaaaagaaaaagaagaagaagaagatgcaactttttctctgctgagtaaaactgttttctttctttcgtctaattgtatatttgtgtgtaattaattagagagaatgatccgacaattttgaatgtcttttttggccaccaacagtggaattttcagcacatcacatggtcaaatttccgattttaccctttatatttttcttaaccgatgctttctggttttcaaattagactttaatgacgattattttcctcaattaatgggttttattaggt

SEQ ID NO: 51426 - DNA, 622 bp, Arabidopsis thaliana landsberg
tgtgatcaacatttgaatccaacaaaaatatggcaataacattcataatcattttagttcaaatataagtaagacgaaaacatgacatagccatagcatatatataggcaaaacaaagaaagttgacttaatcaaagctattttagatattatagggtttttaatgacatcatatctaaagatttgtttcttctaaagatactgaaaactctttattttgtaatgattaaaattattcaaattgaactaaaccttttcaggcaaatacatcaacggaaatgaacttaaaggcaaaacctttaactgtagtacaataataaaaaaaaacatcacataaattttattttctgaaatggaaaaatcaaaagatgcagatgatcaaccacttcactcgaaatacatcccttcgactagagatcattgatgatgttaggagcacaaacatcagtgggggcagtggtgacggtagcgagacaatcgatttcggggtggtagttgttgttgtccatgcaaggaaatgccctcgtcctctccatcattaagatccaaattcatactctgatttggatctatattcattttcatgttaaaaacatgaagtttctttggaatctgatcataa

SEQ ID NO: 51427 - DNA, 567 bp, Arabidopsis thaliana landsberg
aggttgtcctaggaccggacgctcacttgttacaaaggtacttggggaactatgtgaggggattgaataaggaagctcttaagatcagtgtttggcaaggttagattgtttctattttctcgctgattttgtgtaatgtccggatttgagtttaaagttcaaatgtgctattgagtagcgattttgagttgtgaacgaatgtgagaactggttaggttttgtgtgctgtgattgactgcgatttatggaattgggttctcttcgagttatattcgggtagctagctattaaacggagaagtcaatagtcacacttctggatttttgagtttagtgtttcttttttcaggcatgtgttgggtgttttagttgatcggaactgttcaatttcccgtgtggcatattacatgattaaaatgatgtaggattgctgcttgctttcaggctttatagcttcttcgctcatggtttatcttggtttgtgctggttgttcacttataattgcttagttacttctcacagttgttactaagaacagatgatgtaataaaaagaagagttttagca

SEQ ID NO: 51428 - DNA, 1002 bp, Arabidopsis thaliana landsberg
aaacaagaataagggcaaaagtcaagtcttttttcatatcaaagtcatcaagattattgacttgggtagaaattgagccaacagaagaaacaaagaagaaatttttgtctgatttactgaccttccaaatccaaccaagggcttggattctgacattgaaatccaaatctccgtttctcagtctcttgaggtaatcatctctcggtgagtgttgtctctctttctcaatcatctctctaacgatctcttcgctctccagaggaaaacccatctgaaaaatcgatcttgtgtcgacagaattgctcttctcatcatcaaaattggatacaagatttggttccataaattcagccattatagagcgtcaaaaattgtagctttctttcgatctatacaaattttactgttacaggatttggaggaaaaaatatggtttttatagtataagagattcaactgaagaaaagatttggtctctgtttttatgtcttttctaattttatttttgctctattgtagaatttgctttgggtcaaaaccaaaaagaaagaagagagagatgggagcttttaatattgtaatttgtaagagacgaaaatgttattttcggttagagatacaatgtgaaggatagaggatcccactcgatccaaaagatatgcaggttagcatttttataatggaaataaatatttttattcaaaatatgggaaactatataataaggaaaatttatgtgaaaagggtcaatggtagctctttattggatacattttaagatatatggtataacaacttagatttttgttatttttagattgaacaatatggcgagtcattcacttcctaagtttacatgtgcgaaaaagaccttacacttatactctaacaaaattgatggatatgtatatgccagagattttatgtataatcttggttcattagtttaccaatttatctcaaattatttttatttttataaataaaaaaattaattattta

SEQ ID NO: 51429 - DNA, 792 bp, Arabidopsis thaliana landsberg
cccacaaagccctttttcttgccttacttccttcttccctctccgacgagatctcgagtttgggcaacgccgatcagcttgaaaagccctcggaatctcatcttcccaacatcaattgatggctcctttcaatttccaactacagttttaagacctaaccactaagaaggatctcttcaaaaccacgagaatcatcaatgtcgtcgtcttccacttctataatggacaacttgttccaacgaagtctcgaggatctaatcaaaggctttcgtctccagcttctcggagaatccaatttcatttctagagccgttgaagaaatccgccgcgagatcaaagccacagatctctcaactaaatccaccgctcttcacaagctctcttacctcgccgcacttcacggcgtcgacatgtcttgggccgcgtttcacgccgtagaagtcgtgtcttcttcacgattccaacacaagaggatcggttaccaagcaattactcaatcattcaacgatcagacctcggttatgcttctgatcactaaccaggtgagaaaggatttgaatagtgctaatgaatacgaggttagtctagctttggaatgtttgtctaggatcggaactcatgacctagctagagatttgactcctgaagtgtttactctcctgggtagtagtaaatctttcgtgaagaagaaagcaattggtgtggttttgagggtttttgagaagtatcatgatgctgttaaggtgtgttttaaacgtctagttgagaatcttgaaacctctgatccgcaga

SEQ ID NO: 51430 - DNA, 499 bp, Arabidopsis thaliana landsberg
  unsure (1)..(499): unsure at all n locations
cctacttctctcgtctagccacttccatccgtctctagattctagtcgcccttcaacactagctagcctgaaatcaagtgcaggctcgccagctgtggccactgagaagtgacggaaggaagacaagcagctcgccggccggccgggcgccccgtngtgcccccgttctacgagggttgaagtgaagcttcgtagtacgtagtactccatatagcagctgagctcccacttcggagctccatccatcgttagctcccgctgctgctagctggttcgaggcctcctcaagcagcttcttcgtttctgctgtctgcaatggaggagcagctcagcccgctggccgtgacgcacctgctccagcacacgctgcgcacgctctgcggccacgacgacgcgcagtgggtgtacgcgtcttctggcggatcctcccagaaactacccgcccccaaagtgagtcgccgttcgttcgacatgcatgcgcgcgaccttcgttcggtgt

SEQ ID NO: 51431 - DNA, 516 bp, Arabidopsis thaliana landsberg
  unsure (1)..(516): unsure at all n locations
agagagcaaagaggatattacatatgccatcgttactatcattggctcctttaaaccgtttagcctaaggtgatgatgaaacggtacagtcttgaatatccgacgcccttttccttttaaacgcttagttgtcgagtaatacacgacctgcatgccagaatacacatccatcatcaggggttgggattggggttgtgttgcgattgtgagttaagaaagatgttctatttttttacctgtataatgacagaagaagcttccaaaactgcgacaccagacgatatgaacaacgggaagaacattcctgagcaagcagccattgcagccaaagctccacctagagccaaggatcctgtatctcccatggaaactgatgctctgtatcgattgtgaagcagaaacccaaaacaagctccagccatcgaagctccaaatacagagagatctgatcgcgaatagacaatacatttnganagtagtgagccacacacactatcttcacttggaatgcaatgc

SEQ ID NO: 51432 - DNA, 715 bp, Arabidopsis thaliana landsberg
  unsure (1)..(715): unsure at all n locations
ctcgcggtggacttaacgatcttcgaaatgattacaaatgcatgggtaaaagtgttttattctatcaacttaaacactaacaaatgttgacaaaaaaaaaaaaaaaaaaacactaacaaactatatataattgtacctaatgaaatttttggtagccagtctatttatatgaactttgttcctttactttttctctctttacttcactttgccatcaaagttgagagaaaaacaagaaaagtgatctagatccattggaaatttttataaaagagtannnnnnnnnnnnnnnnnnnnnnnnnnnnaaattacggttaaatcacatcaataaaatttgctcgatcatttccagctcaagtttttaaaatatttgtttctttagactatagtaaaaagaaaacataacatcaagactgtttctttttttcttttatgtgtgctaaaacttaaaagcatcaagttggtaagagtagaataacacaatagcaaatctctagcatttctattattctagattgccaattaaaatcgtaaaaaaggttgaagattagagaaaataaaatggttatagcctataataaaatcttattgatgtgatttaaccgtaaaatttgtgtagcctactcttttataaaagtagtcgctataataaacattactctatttaaaagaattcaagaaaacaaaaattgggtagaggggaagcaaaaaagaa

SEQ ID NO: 51433 - DNA, 630 bp, Arabidopsis thaliana landsberg
agtcggattcagcagttcagtgttggtccaaaaatatctgaagtaaaaatcctcatccactatggactccaggtgcttctaggtccagtgaggataagtgaaggctggtatagggcagggtagtgtgactgggttcactgtccatagtttgtgtcgagcctgtttgatggtttctcacagccgacgcccaccctgcctgcctgccctttatttgcacgccaatgggtgtccgagctcatgcaattgctggcggttgggggcttgccgtcgtgataagagcaagcgcggcatgatcgtttaaccccctgctgttaccgtggtccgtggtcaccagcgcagtgtccttccccaccctctcgtgctcctaaggaccttagccaacgttggcaagtgtttcactgtccataagctcgtgcccatatggtctgtttggttgttggatggtgctagcctggtctgtacgtggggaccagactctttgggcctgattggttacctgatgagacagaactcggctccggagtacaacatctttatacattcgtgtgtttggttctccagcctggctctgcgatacaagttatgcttgtttggatgacgtgcattatagctcgacctggcttagatgat

SEQ ID NO: 51434 - DNA, 882 bp, Arabidopsis thaliana landsberg
  unsure (1)..(882): unsure at all n locations
gcttgatatcagtggtagagatctcggcggcgaaatctcaccgtcgatcgctaatttaaccggttttacggttcttgatctttcgagaaacttcttcgttggaaaaatcccacctgagataggttcattgcatgaaacattgaagcagctaagtctctctgagaatcttttacatggaaacattccacaagagcttggtttgcttaaccgtcttgtttatctcgatcttggaagcaaccggttaaacggttcaatcccggttcagctcttttgcaacggctcttcttcatctctacaatacatagacctttccaacaactctttaaccggagagatccctttaaattaccattgtcacctcaaagaacttcggtttcttcttctctggtccaacaagctcaccggtactgtcccgtcttctctctcannnnnnnnnnnnnnnnnnnnnnnnnnnttggagtcaaatatgttaagtggagagttaccttctcaagtcataagcaagatgccacaacttcagtttctttacctttcttataaccatttcgttagccacaacaataacacaaacctcgaaccttttttcgcctctctcgccaattcctctgacctacaagagcttgagttagccggaaacagcctcggaggagagattannnnnnnnnnnnnnnnnnnnnnnnnaaatcttgtgcagattcatcttgatcaaaaccgtatccatggctctatacctccagagatatcaaaccttttgaacctaactcttctaaacttgtcgagtaacctcttgtccggtcctatcccgcgtgagctctgtaagctaagcaagctcgaaagggtttatctttcgaatatcacctaaccggcgaaatccctatggaa

SEQ ID NO: 51435 - DNA, 1025 bp, Arabidopsis thaliana landsberg
aagaaactcccctaataaattagttggatataaaaattgctagtggattcgtctccttattataacaagcatttcatcgagacatcgactacatatagaatatagttatgtacgctatatttgaaaaggctttaaatctgaacttataatgattttcctcgtgatatcaagttttcttagttaaatatcccatgattataatttggtttttatttacctttatgggagcacaaataatgttcccatgcaacaacccgaactcctctcatcataatgtcaattttttttttcttcacgctttgcctaattatagttttaccaatttacccccaatcccaacattactataacttggacgaacccatgatatcatatcccaaatcctatcggacctatcctatccaaaaaatacacaaatatgtaaagtcaaactttctaccaaatcgagctttaaactaagaatattattgtaacgttttgaccgtctcccaagtctcaacccactccaactataaaatatggattattgagattaaacataatagtttagagtagacggttactatcattcaaaatgtgactataaagaatttctacacaatattatttgaaaagtaatctaacgactgtaatttgtgaaagaataatctggtaggtttttacctttttaagcttctgaagagtggttggattttgttaaaaaaaattgttaaatagttgacaatttctaacttactttcgaagacttgaagtgaatgatcatattgagtacaacgttatatatgtttttgttgggtacataatgatgatccaacgtcatgctacaattgatgatacgatcaaacggttcagaagtcagaaccttttgtcttagtttaactacggtgacattaacatactcgtttccgtttgattattatggaacattattatcaattggagaaacatcactgtcgtaattaaaagaatgttgtaaagctatagtaaatagaaaataatattttttttttttttttttgtaaaat

SEQ ID NO: 51436 - DNA, 511 bp, Arabidopsis thaliana landsberg
cttcttgtcaccctcctagaaaaaaaaagccttttcccttccaaatgattggaaagtgtacattcctgtatatttaggtgatatataaccccatatacaaatgagttaatttgtatatttgaaataaaaatcttgaaagaaaaaaaagaattatgagtatacgacatcccaagaaaagcactgttgcacaatgcttgaggacctctaaattcattcgaacatcatcgagactcctgcaattatatgacatatgtgcgttatttcaccttaaggaaaacgtaacagttatagatacaaacatatatgattaggtacctgtgcttttgaactccaagaccaaaataggcagccaaacttgccatctacaaaatagggcacaatgaccttcaatatataaattcctaagatttctaatgcttacaaagaatcttggataatggtaccttcatgttaccagctcttttgccaaacttgtcacttaataaccccaaagaatcaatgatccctgagg

SEQ ID NO: 51437 - DNA, 624 bp, Arabidopsis thaliana landsberg
catgctgactataagtctaaaacagagttgctttcgagtttttctggttagagttaccattttgcatatgtagtttttgtaaaatgaccaacaaatgcgtaaactcaaatttcaatcgcttcctttgtattgaactaatacaaatagatcacaaataatatttgtccaaatgttggaaccgagttgcatttctctcagtgacctttacagtgaggctctttaaattctctttatcggaccatcttttgaagctatagcagaaacattattacaaaagaactgaaaaagaatatatctatcatcttctgatctccggagtttaaataaacagaaaattcaaaccaaaagaaagctctgttcactatcgagaatcaatccctagggggcagaaggctcacgttcctccttagccatgaaccataataatcttagatcccagttgtaaccattatcttgagctgattcacggatcgatcgggtgatcaagattctatagttacttgcgggtatcaaccacttgacgaatatcacaacttttgatatattataatacctcggcttaagcacaatctgcaaccttcttcgtgaactcttcaaatatgttagggcaatcatcccaacttt

SEQ ID NO: 51438 - DNA, 773 bp, Arabidopsis thaliana landsberg
caagggtgcttttgaggttaacaaggtctctcaaggattgaagctcttgctcgtgctcaaagttttctgaagagtaaagttactcttgggaaacttgcattgttaactcaggtaacaggttctactgtcttgcattagtatatataaagcttctctgagtttacttttagccctgttactggcttgaattattaaaagtgcatgatcatgccttactgtaaatcgcatcatgtttaggagcttcacatataagtacgtattgtccaaaagcataatttaccagcatattgggttttaaggggttaaaattgatatttatagattgaggagtcactagaggagcttgcaccaccttgcacattggatctactgggcctgccacgcacgccagaaaatgcagagaggaggctaggtgcaattgccgcgctacgcgaactgctcagacagggccttagtgttgaagcttcatgtcaaattcaagactggccatgctttttgagccaggcaattatcaggttattggccacagagattgtcgatcttcttccatgggatgatttagccattacacggaaaaataaaaaattactggaatcccacaatcaaagagttgctattgattttaattgtttctacatggagttacttggttacatcgcttgtggattttcaggcaatcaaaatgaaacgggatatctcgctttctttccttttgtaaaattaaactgaatggccatttttttactacatctattgctattaagcaataacat

SEQ ID NO: 51439 - DNA, 1039 bp, Arabidopsis thaliana landsberg
tccctctcgaatgaaatgttttcaccggagatgaacagtgagtgaaagatgaacagatttcgactcagcgacctcagttctcgagatcgattagcttcaacactgcccacttctcaccaaggtcacagcttttctctctcacgcttttttcttacacaaccgtttctgattggttgaagagaaaccgccgatttgatgcgttttcgtttgttctaacatagaactcgaatttgtcaatttagagcaaattgtgtattttttgttggtcaatcaattttataaatattttagttaaaaggttctgagattttctgagcaaaccaaaacaaaagcaattactgatgtctttttgtttccttgttcgggttgttcgagagtctctcgtagtgagggaggtcatcaataccacaattggttacttcttaaactatagagaaatgtatttttataaaatcttgagctacaaaacaaagaaatgtttatttgtttcttgtggaaaaaaaactatagttttaaagcagtgggtagagagaagaagaagattacagattgctactctcttttttttttcttttcttataataataaagtaaagaaaagcttttttagaaaaaattatcagggcagtgtttgttggggtagtagtactgtcatgatttggtttgtttgttaaaaatttcttttttttcaacagatttaatgatttagatttacatgtaatgagtgtttttgcttaacctcaatgctttattgtgttttttatcttcttcttcctccacttattgtgctacaatttactctttttgtctcccaagtttccattttttttattaaagtttcttccgttgtcgtaaagttgattgctttattatcaattgagaatcctaaaaagtcattcattttttcaggaaagaaacagaagagtcagaaactcaaatctccaaggtcttcttctcctgaatttaactcttgtcattgtgaagctttgagtgaaaacaaggtatgtattatttactctttaagatatctgactggaaat

SEQ ID NO: 51440 - DNA, 589 bp, Arabidopsis thaliana landsberg
tgcaggtcgactctagaggatccccagagattctctgatgattttggcagctctccgatggccgagataggcggaaaggttgctttggtattccttgaagtactcgacctctttccataacggaatcacgccctaaaaatgtcaaacaagaaaattatctcgatgtttcttgttacgcaagaaacagccgtaattaggttgtttgaggtgaatggtggacttacaagcacatcggctgtggaattatcataaccggtgccggcggaggcaaaacaaactccggtagcaaaatcagatatattataggacggatctaggtaggctggcacggtcggtttaaggccataagcctcggaagtgaaatcggaggagagacggccgttacaaaagcgtccggtggcgcgaccaccagggaagtcacgaccgtaaggctcaaaattggctctggccattgttgatatgaagttattattgccggaatctacggaagagtcaccgaagactataatcgccgggatttttgctcggcgatggagacaagagtggtcaaataatgcataatattgatggtgacaaataatgtgttgcc

SEQ ID NO: 51441 - DNA, 447 bp, Arabidopsis thaliana landsberg
  unsure (1)..(447): unsure at all n locations
tcacgccgatcgagcgccagcttggctggcacccttcggccgttgacgacagccttgcgaggccggggggtgtgggtcaagcatggctacgggcagagcgccgaggctatcgactacatcaagaaattgggtgtggagcgcgtgctggtatgtgggctgcagaccgaaacctgtgtgctggccgccggtttcgccctgttcgatgcggggctgatgcccaccttggacaccgacatgacggttggctcttcgctcgacaggtcgggcaagctgggcatcgacctgtggaagcatcactttcgccaggtcaccacctcggccgaggtgctcgccgaagtggctacaccaggctagcgccgcagcccaaaaggcctaattnnnnnnnnnnnnnnnnnnnnnnnnnnnnnnnnnnnnnnnnnnnnnnnnnnnnnnnnnnnnnnnnnnnnn

SEQ ID NO: 51442 - DNA, 932 bp, Arabidopsis thaliana landsberg
ttatcttttggattagacatcctaagaaaatctacttgtgttttaggaccagattaactcatatatagtgtttcaataatcagtacatacactaacgagaaagaaaagaaaaaagaagtattgatagagagaccgtcgatacgccatgggtgtaactcttgttgagaagaaaacacacagtttatgcgccaaggtgccaataaagccagtaaaagcaagaacacaagccccaaactcaaaggacccttttttgccatctttttctttttttttctctcttttgttagtttcctaaaccgctttattcaactaatgaacaaaaaattcaaacatgaataaaaggaaaccaacagtttttcttggccacacatttagtcaacaaagaccaagaagtatgctcaaggagatggtcctggtcctcctccttacacaagattcttatcggatgttcgctcctttaaaaatgtcaattatggcaatgtcttcttgaacctttgcaataagttcatatcaaacgtttggataccctttaatgtctagtcctatcaccgtaacttcattttccttcttggaagtttacatttctaacaaaacaaattcctatttttttttttgcgagtatagcgatgtctttggacgcaaacgcaatcaacaaaaacaacacgtcacacaaatcaatgaaacatatcccataaacctctatcttgtgttgtatattttcacgtttaaaagatatggaaatattaccaactttaagaaacactcttttgttttgttgaaaatgtcttcggtgaatgttaatttttgttccgactatacgtcctcaacgggcgaactttgagcttttatgtttacattaccttattcgcactcaaacgtaattagaagacaaattaatgctgaaactttacaaaatgattcgtaaaatatat

SEQ ID NO: 51443 - DNA, 1146 bp, Arabidopsis thaliana landsberg
aatttatagtagttaaatagtctatgtccattatgaaatttattgtataatttttagacttaaatttgaccaaactaaaaattgatatataaaatttaagagctacagttctaatgaaaaaaaaaaattagacaaaagtgatcatttatactttaaaacctagcgtatcgaggataaatttctagctgttaaaaaagcaatactttgtgactatgtcctacacctatatatatatgatcatctctatcaacttatatcttgtcacaaagtggaagggttaattatgaagaagcagtggttattatttcggcggctatatatggtaaagacgctttggttcaaaagtaaaaaaagaaacaaagagatatgatcacatttgtataattgtgcggtcaaagggtgggcaaagcctgacttttgattattgacttccattttaatgcaatccgatcggtattacgaggcctacccgcattggggtaatgtatgaaagttaaagaaaaagaaactgcctaggctatttgaaagtgactgtgaaataatgattctttggagatgtcgaaaatgaagaacaacagtgttaggaacaaaaaaagttgagcgcatggataattggatatccaaccctattctgaaaacccaacaagaaaaaaacatagccgttctataccaaagtcataagtaaatgtcttttttttttttttttttcaaaatagtccttgagatgacgacactaaaactatttctcaaaatacttcggtaaattaagtttggcacttactaggacactatggaggtcgagctatatcgcaccgaattactcggtgcaagtttcctggaatatatagtttttgttgttgttgttgttgtgtataattttttgtattcgaatcgactctttggtaccggttacatcaaaaagctcctatatatgagaagtcggtttatagttatatatatgatattgatttattatgtataagctaataaaactaatgtttttttattcttgtcccatactctcatgcactttcaaatattgtagttgaagatatgcttgcgaccatacgaaacccccccgtttaaatatatatatatatataaaaaaaaatagggacaacagtgaattttaagaaacagaaattt

SEQ ID NO: 51444 - DNA, 808 bp, Arabidopsis thaliana landsberg
ctccgagatttgcgccgacaggtctgaaagaaagctttgaacaattttctaatctcctgtttaagatttataaaactcttgatccggctgttgtattggacaaggagcaggttatagcaacagtgcagtcagagccaaagactgatttgaaatcagcttttctatacttctggagttcctctgtcatctgtgctgttcttttgtctgtatatgttgtagttcatatgctgcactgtgagcccagcaaaatccaagggtttgaattctatgggcttgatttgcctgatagttttggagagctattcagtagtggaatacttgttcttcttctggagcgtgtttacataatgactgtgcacttcgtacaagctagattacatcgaggcgagtttctatttaaataacaccttcggccttgtattgcttgtgcagtccaattgacgtctttttatttttaatttttttcaggaagagatcagggagtcaaagcaaatggtaaggggtggattctgacaatagctttaattaagggaacaaatttggcttcagtggaagcaacagagctctttgatccctatgttgttttcacttgcaatgggaaaacaagaacaagttctgtcaaacttcaagcccaggatcctcagtggaatggtaatcaaactttttctttaatttatctcttcacttcgtgattatcctgtgtctctgccacagtgccactaaaatacatggtgtggttctaacagaggtaatcgagtttgatgcaatggaggaaccaccatcggtattagatgtgagaaaatgattt

SEQ ID NO: 51445 - DNA, 847 bp, Arabidopsis thaliana landsberg
ggatcccccgaacggacttagacacgacaaaagaatcgaaataacgaacaaaacaaaagattaaaaacgctaaaaatgtcaaacaaaagtgcccaaagatcttcactacatttctcattatcttaattcagaatcaaaatggttaacaaaaatcagtttcacaatgtccaaaaagcaaccttgttccacatttacaaagaatcataatcagatttccaattttcgaagttaatccaatgaagagaccgagaaactcgaaaatggagaaaatttctaatctcagtttcagactatatacctcgaaggaagagtttggagcattagatgcattgaaaagagcttcaagcacagtcacggagacctaatttcgcgggaggggattagattaagcttaaaccctaaacccatgaagatgttaaaaagtcttttaacctgaggagagcctaagaagatgagaggcttcttcttcggtgatggagctatagatgaaacagttgaagaagcgttgtagcagatgaaacgacgtagtatcattgctgctgcttcaatggtttcgaagcttcctttggattttggaacagagacgacgagacggagatgataatgttgctgatttaaaccggtcagaaccgaattgaaccggaaaaacagacataaccaaatcgaagtgaatttttaattcggtttagcaattcttcataacttatttggactaatcactgtggctttcacttttcacttttcagatgttggaatttgtgatcttttttcacctcggaattgaatttttctcagcaataaattagcatcttatgaaccaaaacagaggtcaaaggttcaagtaaaa

SEQ ID NO: 51446 - DNA, 1145 bp, Arabidopsis thaliana landsberg
agagttgcagatgttacatgaagagggagagattagaagtcgtagcttactagccgtgacagtcttggagtagtagtgtggtccatctctcacctgatcccttctctctttcctactcataacttatgcaaatcattaacctccccaaaagaaaataaactatgtttttggtgcctcatcattaacattttaattaaaatcagtccaatttgtaccctatattcatgtatttttttatatcgatgatgcatgtgttcttggatattgaaacaagtaattgttcatcttaccaaaaagatagaagttattgatcatgtcaaaattatttatatacgaatatcaacttatatatgtctattttatacacaaatatttcgcttacaatttacattaatagtttaatactaactcattaacatcttaccaaaaaagaaaaattaattaaagaatttgttttattgatttctcttattatttttatttttggtaaaatgatttcgcttatacttacttacaagtattttctgaaatatggaaaaattattgttgagaatttttattccaaattatgaaaaagcatacaaaaatgataagagaactataaacgatggtgtgcaatttaattggcgagattgtaaaatattggtcttagtgtatttacaattatccacatgcaaaattcttattatggatacatatcttatgattattacaaaattaagaatatctaagtctaactaatgaccaaaaaacacgacaaagaaaagatgttcctagctagtgtcgactatgattgggctttggctttgcatttgtgttgatttgatgaactcgaaattatcaatctccgtctcgtcaccattcatactctgcttatcatataaacatgacgccgtgaaataacggtgttgggcttgactttttaaacaaatactattcctttttatcttgtaggtcggcacgagcatacttttttttttctttgagttttgaagttttgaccttgaagccacttgacacgtgattcgcacgcttccgtgagagtgaattgtgaaatgtaaataatctcacagtatctacttaagagacactaatctatctcattcttttatggatgaggatagtgttatagatcttacgttagt

SEQ ID NO: 51447 - DNA, 490 bp, Arabidopsis thaliana landsberg
  unsure (1)..(490): unsure at all n locations
atcatcataggactttcttttccttttcagtgtctttatatgttgtatgtacgtattagcttttatgcaatacctggcaaaaagatatacaatattatatatatcaagaagtgtgtttaacaacaaaagtaacatgatnnnnnnnnnnnnnnnnnnnnnnnnnnnnnnnnnnnnnnnnnnnnnnnnnacgtacatttctttaaaacctctccatagcaaattcaaagcaatacctcacagtgaaataaccatggaggaacacaaaccagatatcctctcgtgcctaccgctagagcttctactctacatcatcagctgcctccctttcgaatgcgcaagactaacccctttggtctccacacggtttacgtccgattggaaccaagccatactcgttgatgacagncacaacggctccatcgaagacatatctgatgctgtctctcgcttgatcaacaacttcgatgagcatgatccttctaaaaacact

SEQ ID NO: 51448 - DNA, 338 bp, Arabidopsis thaliana landsberg
  unsure (1)..(338): unsure at all n locations
nnnnnnnnnnnnnnnnnnnnnnnnnnnnnnnnnnnnnnnnnnnnnnnnnnnnnnnnnnnnnnnnnnnnnnnnnnnnnnnnnnnnnnnnnnnnnnnnnnnnnnnnnnnnnnnnnnnnnnnnnnnnnnnnnnnnnnnnnnnnnnnnnnnnnnnnnnnnnnnnnnnnnnnnnnnnnnnnnnnnnnnnnnnnnnnnnnnnnnnnnnnnnnnnnnntcttttcacgcttgcgtgagcgtactactttgctatcggttagtacccgtattcagtgctgcaaggtggctctcgctgacttccacgggatttcacgtgcgccatgccactcgggctcagagtataa

SEQ ID NO: 51449 - DNA, 689 bp, Arabidopsis thaliana landsberg
ggttcgacagatcaggtttgagcctcccatcagaaaccctaacagtagatacagtttagtaaaagtgaatccataatcagaaaatctcatcaatggtttttgttgttgttgtttcctctgaaaagggatatgacaaaccaacattgatgaggttcctggtggcaagatcaatggacccagtcaaggcagcaaagatgtttgtagattggcaaaaatggagagcctccatggttcctccaactggattcatccctgagtcagaagtgcaggatgaattggaattcagaaaggtctgtcttcagggtccgaccaaatccggacacccattggtgcttgtcataacctctaagcattttgcttctaaggatccagctaacttcaagagtaatcacctctcacttgcttctgacctttactttcgttggaaataatctgtcccttgactttcagtgacttttgtattcatagaactgatcagcttctttcctggttctctaattattgagtagtttcatttgacttcaaatgaatgaagttttttgagtccatctatgtgttttccttgagttgattcttgcgataattatctatgaactaatcttttatctgtttgatgttgcagagtttgttgtttatgcgctagacaaaacaatcgcaaggtgtttacacattattgaaaccaaaacact

SEQ ID NO: 51450 - DNA, 948 bp, Arabidopsis thaliana landsberg
atccgtacggacgcgatttcttctgttttcttttgtgttgaaacacgatttcttctcttctttctccttatcttttaaggaatggcgtaacgttttgtgtctttttccatcttaatctgctttctcgacaaagaaaagcagagaaagagagacttgttatactaaactcaatctctggcttttagttttgttgtctctctccttcagtttccaggaaaaaatctctttctcattaagctgttatatagatctgtgttcatactcttcttccacaatctaacccaaaaaaaaataactctttatttctctctacaaatttcatttgttccattttctcaattttagaacttaagaaacccaaaaagcaaatttttagtacatttttaggtttaattaaagtaattaatttttgtgtgtttccatcaaaattccacttgttttctacagaaattttcaatctttttattattgtatctctctttaagacatgaactgtctgttcttgttcaaatcaaagaaacccagaaagcaacagaaagacaacaacaagaacaaaagaaaaggtaaagagttgttacaaaactcagctccagaactgacgaatcggagtgaaacgtcttcgtttaatctccagacaccaagatcgttgccttctccaagaagtatcaaagatttgtatacagagagagaacaaaatcttagggttttttcttacgaagaactcagtaaagccacttatgtgtttagcagaaagcttgtgatcggtgaaggtggatttggtattgtttataaaggaaagattctcagcaatggagattcttctgatcctccacttgtcgttgccatcaagaaactcaatcgacaaggtttacaggtaaaaaattaatcttctctctgctttggtgctaatataatcattagaagataaattaaccaattaatggaagc

SEQ ID NO: 51451 - DNA, 426 bp, Arabidopsis thaliana landsberg
  unsure (1)..(426): unsure at all n locations
aaagaccataagtaatacaggataatggcttggatcatgcatttatggttttccccggttcaagagaaggatccggcggagggaaattttattctagtttggggacgcccccctctttaannnnnnnnnnnnnnnnnnnnnnnnnnnnnnnnnnnnnnnnnnnnnnnnnnnnnnnnnnnnnnnnnnnnnnnnnnnnnnnnnnnnnnnnnnnnnnnnnnnnnnnnnnnnnnnnnnnnnnnnnnnnnnnnnnnnnnnnnnnnnnnnnnnnnnnnnnnnnnnnnnnnnnnnnnnnnnnnnnnnnnnnnnnnnnnnnnnnnnnnnnnnnnnnnnnnnnnnnnnnnnnnnnnnnnnnnnnnnnnnnnnnnnnnnnnnnnnnnnnnnnnnnnnnnnnnnnnnnnnnnnnnnnnnnnnnnnnnnnnnnnnnnn

SEQ ID NO: 51452 - DNA, 784 bp, Arabidopsis thaliana landsberg
caaataaatgatatttctttgtactccaaattagtactatatatggagtcatgcatggacaatacttaatgactggtctactgaccatagaaacatcttgatatcaaaatctgatactccaaatcatatcaaatgacctatatattatttctctaaattgctttgaatgtataaacaactccatggccttatatccaataatatgagttcatacacaagtcaaagttacaatctcaattccaaatctagctcgtttgcttcactggtttcgaagttctgaatacccgatcccaacgatatatttctctgatcctataagattggaaaacaaaatcattcagagagatccgcatgtaaagaaacgattttgaaagaattaacacaaattatcatgtcaaatcttagtacattctaaccactatatctcttaagacatggattaattatctgtatgtatactatatttatgtatatataaagtaataacctcatgtaagaagtgtctggttgtgtttggttccacaaaatgctggctctccaagatgccgtagctcgggttccaactgttgtaagaaaattattagctttatttttaactatatcacaaacatttaagtgcatatatataaacaacataaaatttaagttaaatattgtttattcaaataatatttaacaataagaatgtgtacggactgaccttggtgctctgtgaggctgagaatctccgtatcttatggttgctctctcgtattgatcattatttgcattcatctgtgagatc

SEQ ID NO: 51453 - DNA, 1009 bp, Arabidopsis thaliana landsberg
gatattcagaaaaatatacagcgaaagtgaacttttctctgttcactctaatgtttcgtcctttggagaagtggtaggccaaactgtgaaaaatagctcaaatcaatttattcattaagttcaacaactcttcctcatatcagtcttttaaccaacaaaccaacagatccttcttttaattaacatcaagatcacagcttttgtgcttaacactcaaaaatcactaaagcttcggattttattattgcagattccttgagctcatggtaggcttgagaatcagtccattaaaggatttaacttaacgaccatgaactatccaatcaccaaccgacaagcagtagctttagaagagccattctaatgaacaaaccgttctttgcttgtctgaagtaggcagctcttggatcagcatcaacatctgcggtgatctacacaataagaaatacaaagagtgaggattgtgtcacggtacatatatgaaaaatagaggttttcttaacttacttcatccaatctcggtaaaggatgcatgataatagcttttttctgcatcactcctaacagatctttgtctacgataaacttcccacgagctgcttcgtaaaggtccagcctttctccaaacctctctctttggattcgtgtttgataaactacatcacacttggatgctacttccattaaatctgaactttcttcccattcaaccccgcttgatgtcaaatagtcttttatatcatcctaccattaaaagaacacactgaaaatggtaaggaacatacacaatgatgttctcgagtaaaccaaaccatcttcttcaggttctctcatggagggtggcaagtttagtgctactaaccttcattttcacaatttcaggggaaacaaagtagatcttcacgtctttgaacttggcaagcaagtatgcaagagaccgcacagtccttccgttggcaaggtctccaactaaggctacactgatgccatctaattttccaatttcact

SEQ ID NO: 51454 - DNA, 941 bp, Arabidopsis thaliana landsberg
agatgataatgacaagttggcattaggtgaaaaagtgtactgttgcatgaaggatgtgaatgacgactatgagactgaagcagacgagtgggtggagcttccagcttctttcaatgaaagagagaaggaccctcgagctaatctcatagcagcaaagcttaggcttaaagaggacgcagaagctgttaacaagttgaattctttacatgtctctgaggtacttttactctcttccactttgtaaaatttgtgatagcatgttgattatcattagagaagtgtttttttataccaaatgtgtttgctaagagaagattgtcttgttgcaggaacttcaggataatctgtccatgtcgacggaaaacgagaaaccttttgtggtgtctgaagataacttgctggggactttcaaggagtcacatgttggctcttcagatgagaatgggctgaaaccgatattgaagaggagagaaaaccaggctgatgattctaagtcgccaaagcgtgttaggtttagttctgatgtcaaagataggaccttgactgaaggtgacaacgattctgtgatggaggcaagttcccctaacgaagataaagtagaggcagtctatccgactgggatttcagattatatgcggaacccatcaaaatacactcgatatacattcgagtcaggtgaggttgatgaagaatccaacaggaaagcatacatggactttctcaacatgattaggagcaaagacgagtcccttgtagaccctctgatggagcttccaagatcagtggctttcgtaccaaagagaaaaccaatggctgagagtaaagtagaaaatatagacaaggattgtgagggaagaagagttgcaatagctgttgatactatagaagactgcaccatttctgctatggaagaagatgaaccagaaacagctcaacatgtc

SEQ ID NO: 51455 - DNA, 478 bp, Arabidopsis thaliana landsberg
ctcaaacgagaaaactttgacagctcttgtgaagatttatggaaaagcgaggtgggcgagagatgctcttcagttgtggtaggaaatgaaggcaaataagtggccgatggatttcattttgtacaatacgtggctgaatatgtgtgctgatattggattggaggaagaagcacataggctgtttaatgatatgaaggagtctgtgcattgtagacctgataatttgagttacacagcaatgctcaatatatatgggagtgggggaaaagccgaaaaggtgatggagttgtttgaagagatgttgaaagctggggttcaggttaatgtaatgggatgcacttggttagtacaatgcttacggaaagctaaaaggattgatgatgtggattatgtgtttgatctatcgattaaaaggggagtcaatcctgacaataggctatgagggtgagtgcatttcagttattgccttgtgtgagag

SEQ ID NO: 51456 - DNA, 463 bp, Arabidopsis thaliana landsberg
acaacgtagcttgtttcagatgaccagcttcagtttaagcctccatctcaatctgaagcttgagtggggggatggcatgatcaacagcagctaatcctgctctttcaccagcagtagcactaaactcccaatcacactcctgagatacactttgaaaaacaagagaaccggctttatcggtttcttcttgcaaggctgaagtttccacaaactgattctggctctcctcaagcttagaagaaacttcttggagctgtttcctggactcctctgcttcttggtctgcttgcttctttgatgtttcagacactgagatttgatctttcggcttttttagctcctcctgaagctgcgagactagcaactctagctccgttattctactcggcctcttcttctgttagccatcaaacatatcaatgttacatcaaacctgcagaagaagaaaaaacagaccactgag

SEQ ID NO: 51457 - DNA, 508 bp, Arabidopsis thaliana landsberg
ttttaatcagcaacgtcaaatcgttatatagaaacagtgttggatcacaatttggatgccctaaccacgccactggtgcatggctccaactcgtcagctgtcaaatgtcatcgtcccactcccagtgagaagacgactgtgacaaccatacaagaacaggcggaacagggcggaaaacaaaacgatgctgaccagacgcagcgccagcagcggcgaagttgacaatgccgaatgagagaacgtgtggaggcgagacggtgctgcccgccggcacgaagccgcgagcgccgtccggcatgtgatgtgatctggagcaggaggacaaacgcgcggcacacttgttgcatctgggaaggagggcgacatgacggggtagagccaggagcaccttttctcccatgtctttccagaatcttctgtgatccgcccagcgaatcggaagccaccgaatggaaggaaggatgacgcaaccgagttggaacggcacatcgcatggaagccatggacg

SEQ ID NO: 51458 - DNA, 1524 bp, Arabidopsis thaliana landsberg
tctaacgaagagatgaatgagcaacacatgaatcatccccaacagatagaaagcacttgctccatgggcgttttgttcgtgctggggatagaatgatctggcgcactggagcaacatgatgatgcatgatcatgataacatttccgctttcgagatcccaaatgcggatggtacagtccatacttccggagatcaaaacatgagaagaattacatccatttgcatccccaaacattcgatgcgctgctaagcatagaacagatcctgtatgtcccaatagacgctgtttatagacgagtggatcagtatctgatctcgggcttgaagcaggagaatcaattccatgaagaaaatcaaactttgcaatctctatctcaccactaaagaaaccatagacaacagcatatgggacatacatattctcagaaataaccatggacgatgacacacactgtccattgtcactaacaaagctttgtagatcatttttggcactgcactgacttcctgactgcgaagtaccagtttctgcactaacggagcccttgggatctaaacaggagcttgaaatccaatcagcaaaataggagctttctccaagcactttgcgctgaagttctttttctttaccatttcctaggcacaatgaccagatcgttatatggggcctccactgagaaggttgttcaacatcacaacaactagactcaacgcgaagaagattctgcctcaactgaacaaaacaaaatgttgatttcacggaacgcttatcatcaggggcagtaacaatctcaccgaagtttttttatgtaaattcaccatctatatatgacatagtaaacagcacagcagaaccactaccatcccacagcacaaaagtttcagaaatactatcatctttatcaccttcaatagttgatgtactagagtaaagtatcattgcttctttgaacagaaaatttgaagaatgcgaatcatcaacaaaagatatctctcctattgcctcctcgcgattcaacaaccaaaagacacacctactcttcgagaaaaacgcaacaagatcccctcgagttattactgatacagcaatttccccttcactcaaccagtttctagacactagagagcctttgctcggttcagatttctctgacactgaaaccaactgcaacctaccaaacgaatcagccataagcaatgattcctgctcatctaactgaaccacgcccataaaattcaaacaaccaatagataaattcccatggaaaactgtatgaacaatagtaagagtgtaagtatcaacaacaaccaccgtgcatctcgacttctgaaaatcagtatctgctaaagtctcagccccatcaacatcgatataagaacaaccaacacatacatatctaggctctgatggcaaagtagacaaaatcgatggacttccaacccaaggaggtaatcttcttcgtttcctacactgaccactacttttactccatacacacaagacaccatcagtacaagcactga

SEQ ID NO: 51459 - DNA, 514 bp, Arabidopsis thaliana landsberg
aaacgcatcataatatttttctgcatattccggctgtatattccgctttttcttgcctatccgcagaacgaggggtgggggataatgcagctcattcgtaaactcgggataataaaaaggggaactggcctgcagcaatgcagttttgggcttcataaagatgaccggttcttccggcaccgcattacccaactctttcgcatgatccgcataattacgccctacgcagaagattttcatagtcttgattttaatgcaatccgcaatcaaatatccaaaaaatcatatcaaaatcagtgaaatccctgatcgaagcgtaatgagttgaccatgttcatggtacgggcaatgcctatgctcgcgaaggattcgatcacttcggtgcatttttcgattttctgctgtacaacgggcagttcgtcaggcatccacctgcccaggacaaaatccacctgcctgcccttggaaactggttttcgatgccgaacgcagcttgggtactggtcggtgccga

SEQ ID NO: 51460 - DNA, 517 bp, Arabidopsis thaliana landsberg
gggttggataagataaagtttattataggaaaataataataaattagttagaatcataaatatttgtgtcgacaatatgttttggtagttcaattttaaacctttttaaaaaaatcctatcatattaaatatatgtatcagaattatttatattttaccaaaaattcgtatttttgtattcgattaaaatatgtacatattttataaagacaactcatgtgggctatataataaattatgcaaaaggtattagtatatatatgataaggtttttggtccacttaaaaatatctaaccaagtaaccatcacccccttgctattacatagtaggccatgctctcgatttcatttggtccattcctatttattaccttcaatacaacaagagctatacaaatcgagggagggttgtttacgtttttacccctattcttgacttcttggttaaagtttcaaatgtataacagggtaatagcaatcaggaaccaaaagttattaagtactatattctttgaa

SEQ ID NO: 51461 - DNA, 659 bp, Arabidopsis thaliana landsberg
cagctggggcttctttggaagtcggatcaatacgtcattcagcgaatggtcgatatcacaggagagctgatggagcatgtgccgaaaacctccgacacgcggtccgatctcgatcaatttccattcatcatcgatcttcatgagttcgacgtgcgcggtcgtactccgaagaccgagtgcatgaatgcctgcggcagcggcctcgtgtgcgcgctcgatggtctccttcttcagaccagtcggagaaagatggagatagttatagaaatcatcgtggccgatgttcttgccggtcaccaccttcaccatcggacagaagtagaggcttccaatactgttcacgtatgcatcgacggaatacatatcgccttccatgtattcctcgaccatgagcttcggtgcttcagcacggctattctccttgtatatcttcctgatctgccgatacgcggatgaaagcgagcgttcgagatcctcctcgtgatagcaaatggtcacgaggaggctctgcgcgaggttcgcaggcttcacgatcatagggaatttgatcttctcgatgagacgtttgcgttccgttttggtgttttcctgcaccactgcatatttcggcgaatatttgggtgcaagcagcttgaactcgcggcgcatctcgagtttgt

SEQ ID NO: 51462 - DNA, 778 bp, Arabidopsis thaliana landsberg
tctctctcattaataaacatgttgcttgttgcgtttgtgactcttttggtagcagtagctttgcagccactaccgtcagtgttgtctttggacgttcaccttcttcggcagctagccgcaaagcacaatgtgacatcgatacttgtgtttggagattctagtgtcgatccagggaacaataatttcattaaaaccgaaatgaaagggaattttccaccttatggtgaaaatttcatcaaccataaacccaccggtagattatgcgatggattactcgctcccgattatattggtaagttttacactatagtatttatataagtcagaaattttcaatatgttaattgaagaatttattttacattttttttttacagcggaggccatgggttaccctcccataccggcttttcttgatccatccctaacccaagctgatctaactcgcggtgcaagttttgcctctgctggttctggctatgacgatctcacagctaatatatcagtaagtcttaacattttccttttaccttctaataaaaacattcagttgaaatactcttttcacacaaaaccaaattaaacttaaaactattttgttggttgaacagaacgtatggagtttcactacacaagccaattactttctacattacaagattcatctgactaaattggtcggtccattagagagcgctaaaatgataaataatgctatatttcttatgagtatgggatcaaatgactttcttcaaaattacttagtcgattttactcg

SEQ ID NO: 51463 - DNA, 1007 bp, Arabidopsis thaliana landsberg
tttgtttctcactgtactgcatttacgatttttggttttggatttacttgcagaaacaatcagtctcataaagtggcaaagatggttgcagaacgatacacagtcgatttgaataagccacttgtgtttcaggtgatgcgctcagtcacgtcttttccgcatagcctttttttaacaaattagatcgacaagacaaagtatcaaatggagaattctctgtcaatctttaaagctgtttcgtagattctttgatatatacaatgcataacaaattactaatacaaagaaacttatatccttgtcaggttggtcatcttggcgaagaatatcaggaatggattcatcaacctattgtatgcgtagagggtcctcgttttttcgaaagtgatttttgggaggtaacaactctgcctttctaagatttatcttcctatatgtaaaagcctctatgttttgcttaaatctattcttttgggaaatttgagcagttcttgactcgcacggtttggtgggcaatcccaacaatctggcttccagttgtttgctacgttctttcaatctccgcgagtaagggacttacatttccccagatcggtttaatagttgcttttggtgtactcacgtggacactcctcgagtacacgcttcatcgtttccttttccacatccaaaccaagagttactggttagttctgtatctatgattatgcaacatagaaaaaaaactgagtttcatcacgaagctgattctgtttcatttcaaacccttttttcttcagggcaaacactgcacactatcttcttcatggatgccatcacaagcacccacaagacggccttcgccttgtttttcctcctactgcaacagctattctcttggttccagtaagtatccatgcttgatccagatatggaatctctttcattcattctttacttcaatacgaaaacattaattgatgctcactttttccgttgtaagctatggaagcttctccatctcctag

SEQ ID NO: 51464 - DNA, 709 bp, Arabidopsis thaliana landsberg
  unsure (1)..(709): unsure at all n locations
ccattgttagaaatgagaaacgaagtagcaagatttgtcttttgcagccaattttaaaaaatgagtagcaaaagattagagaggttgttaatgacattatttgcagccatttttttgtagtagtagaaaaagtggagaggttgtttgaaaagaccccttgtttgaaagcttaataattcttcgaaatggtattagagacattttatatttatagaaaacagaggtcggctagggttaacttttttagattaataatacttgatttaagaattaatcaatatatagttattgttatatttgcatcttttggtaattgttacgaatcatagtgaaatcaatctttaaatttggatttttaatatttagttattgttacatttacaatatattctaatttactattcggatttcgtaattaaagggatatgtttgttttggtaatatcttttaattttgttaagattaccaaatctcaaccgtatcgatatacaaaattgctaaattctgtttcgtctgggtctagcccatgatccgcgcgtcaatccaccaaagaagtccaggatccgcgtcttaattcgatccagttgcccatgactcgtgattttttttaatttgtaattatatttttacttttgaacgattttttttctttactctttaaatgtanacatttccaatngacattctttgtaaatatctttacaactaa

SEQ ID NO: 51465 - DNA, 647 bp, Arabidopsis thaliana landsberg
  unsure (1)..(647): unsure at all n locations
catccattaaatcgcatttttcttttctctatgacgttctcagtnnctcaataagagagtgctggggtcttactcgttcatactgttatcgaatatgaatataccccacaccacattcgttattgtatttagatgatgagaagcattccatntgatacacgagcccacattccacatagaccttcattggagcggtcctgcattgtgcgtgccatctccagtaggacnnnnnnnnnnnnnnnnnnnnnnnnnnnnnnnnnnnnnnnnnnnnnnnnnnnnnnnnnnnnnnnnnnnnnnnnnnnnnnnnnnnnnnnnnnnnnnnnnnnnnnnnnnnnnnnnnnnnnnnnnnnnnnnnnnnnnnnnnnnnnnnnnnnnnnnnnnnnnnnnnnnnnnnnnnnnnnnnnnnnnnnnnnnnnnnnnnnnnnnnnnnnnnnnnnnnnnnnnnnnnnnnnnnnnnnnnnnnnnnnnnnnnnnnnnnnnnnnnnnnnnnnnnnnnnnnnnnnnnnnnnnnnnnnnnnnnnnnnnnnnnnnnnnnnnnnnnnnnnnnnnnnnnnnnnnnnnnnnnnnnnnnnnnnnnnnnnnnnnnnnnnnnnnnnnnnnnnnnnnnnnnnnnnnnnnnnnnnnnnnnnnnnnnnnnnnnnnnnnnn

SEQ ID NO: 51466 - DNA, 396 bp, Arabidopsis thaliana landsberg
atttcattagcttatccaacgttgaaagcaaaagacacgtcagtaccagctcactcccttacctttgatccagatattccactgtatccctactactaattaagaatgcagtgtgggcgcctggcgaccatgctcctgcctccgcctcccgcacgtgatggcccaatggcccaaaccgacgtagagaaagcacgcggccgtggcgaagaggccaacgccgaggcacacggcccacctccatcgcccaccacactgtctccatctcgacctcctactcctcctcctccgcgtccccgaccacttcccacctgtcgtcgtcgcactcacagcggaaccagccgcagaggcccgtggtggcgtcctcctccggtatcccctccagcggggtggctcggc

SEQ ID NO: 51467 - DNA, 620 bp, Arabidopsis thaliana landsberg
aaattcatcgaagtgtattcagttttaactgtattttattagctaaaaagtatttatgatttttatggatatataatattttgggaagcatagatacaaaaaaaaataaatcttgttgacaaacgtaacttttttctatttttaatgctattgatgctgggttctgttttttttttaaaaaaaaaaattcaacattctaagaggaattatgtgacctaaatgacttattaatccttctaatttgaaccgacatgaaatgaatcattattagtgaaacaactagaatatgaaaactaagtttatgttgacaaaaacaaaagtttcgaaaagtggagacatatgagatcacctccatccttattttttaaaccgacatgaaatgtatcattcatagatctcttgttattagatgacacaatcacaattcttcaagagatgacacaatcggcatgaaactatatatatatatatatatatatatatatatatatatatatatttatagacactaagttattgaagggcatgttgacaaaatgaatatttagtttaatcaatttgagaatcttgtacctgtatcttattaagaatataaaaacaaattccttataaaattacat

SEQ ID NO: 51468 - DNA, 618 bp, Arabidopsis thaliana landsberg
gcaaaatggagaaaccagtgagcctgcagatttttaacttttaattctcagacagtatcatataacttacaggtcatttccacggctatatctgtgttgaaatcctggagattaggtttcagagaggaagagttgtctttgacataaagcgccatgtaatttatcactccaacgaaatcaaatgcgcctttaacttgttctgactcctcctctgtaaaagctggcaatctagacccaacattggtcttcatcgtctcaggataatcaccaaacaccaacggatgtaaaatccttacaaaaaccgaatcaagaaactcagcgcgaatcaagtcatagtcaatgtgatgcttcaacattaggttcttaatgacttaccaaccaatatagaagtcattcactctagctgttgcctgcttatccttcacagagttagttaaagggacagctccatatgtgtatacgctaatgcctactgatccatgttgcttgtactgtgtaatgaagaggacataacaaagtgcaatgcatatggaagatgggagagaggcagagagaagaaccttgtactgttgcttgtataagattgttgcagaagcgtgtgcgagcaacatgttgtgt

SEQ ID NO: 51469 - DNA, 567 bp, Arabidopsis thaliana landsberg
tcatatatctacgtggttcttctagtgcttgtttatgttttggtaaatttggagatggtctggttggctatgttgattcagattatggtggtgatttagacaggagaagatcacttttaggttatgtctttaccgttggagattatgttgtgagttggaaagctcgtttacaggatactgttgctttctctaccacaaaagctgagtatatggcaattgcagaagttactaaggaagccttatggttgaaaggtatatattcagagctatgtggaattaagtattgcattaccgttcattgtgatagtcagagtgctatttatctcaccaaatagcagatgattactgagaaatccaagcatattgatattcgttatcatttcgtttgtgatatcattgagaaagatttggtgaaggtatgcaagatcaatactaatgataatcctgctaatatgatgacgaagcatgttcctgttgctaagtttgagctatgctcaagcttaattggtattacaaattagcccctagtggctgttggcgccgacatgatgatgatgcgatgttgat

SEQ ID NO: 51470 - DNA, 430 bp, Arabidopsis thaliana landsberg
gctaaattacatataactacgactctctctattacacagacacgaacagcgcgagtgacatctgaccggcccaccccgctgggtcaattctagtactgatgaccaacttgggaccatcggacagaacccacttctacatgaatttgtaggtcacatacaggtttaaccaagaaatttacggctttatcaagggcatcgaacctagccaggtctgggggcgaagagttcaccggccaattttcgagccactctctgagcttagccttgagttcgtcttccgtcacaaactgctcatcttgtcctgcctctaacagtacgtatgtatccgagttcgaatgcacccttcttctccttggtgcacaaacctaaattatataatcacattaattacacatttgttaaaagattaagttaacctttaacattcgag

SEQ ID NO: 51471 - DNA, 1013 bp, Arabidopsis thaliana landsberg
acaatatcactatatactgttttacacacacacacacacagaaataaaatcatgaaacttcacttattattttctctaatttccaatacagacaagctcttggattagaggcctaatttgtgttgtaattggtatttatcaaatcattcttaaactctgccctatggttcacaaatcattcaggtttctatgttttaataatctaataaataaaattagcatttacgtcaatattttttttttgatatatactctctcggctcattttaaataatatataaagtctttgtacatagattaagaaattatatctctcttatactaaaattttatttttacatatctaaaaaagttcaaccagtgaaaaagttaatagaagaatagaaagaattaaaaacaataaaaaaagacagtaaaatttacattgaaaaattaaaacatcatacaaaatgaaacaacaaaaaaaaaaaaaaaaccaaacatcaagtaatatgaaacggatgatacatttttaacaatagcatttttatgcggaaatacatgatggtagttgacatgatggtaacatatatacaatgttattatcatgaaaatcaatcagatgagagattgtgattctagcgttcgactttgatgaaatttgcgaatccacggcactctgtattttgtttaattagttcggttatgtgacgatcaaatacaaatttctatgtctttttgttgataaggtaaagaaataagtcccatgatttcagggtacggtttggaaagtagcctcaaaatacataacaaaaaggaaaaaaagaaaatttacacgcatatttatttacactaataagtttacgtagagagaagaatgttcacatcacatcacatacttttaactttggctctatataaagagagatagccaagacaatcataacaactcatatcaattttttaaaaaaaactctccatatatctattacttctacgctaactagagagggagattattgctcttaagtgat

SEQ ID NO: 51472 - DNA, 548 bp, Arabidopsis thaliana landsberg
tgagcaatatgtgtaaacttaagtctaaaaactgcttttcgcattttgtttgtgctcttttgacttgatatctttaatttgctttctttacacttgtatttgttctcttatcaaaatagtttgtttaaaatagtatggtagacattgaatcaccaaaacaaatcgaaatgtcataaaaacacatttacctttcgaagcagctgactgcagctgtctgagcggaaggagacatcatgatactaacaaccgaacgaacaccagcagggaacccagccagatcacggttgataacaccacgggaacaaagccacacacaagcacctgacataactatagcatggtgccggtgaaaacagcagcacatcaccacggtaccaccaccagatgggcacatcgcacgaggcacgaccatatgtcacgcgcgcgaagacgctgcccatcaatcagcccgtgatagggcgcccacacctctcaatcgccgccacagctgacgtccgacgacggctcactcgacaacagacgcaagtgaccgtgcacaccgccacaag

SEQ ID NO: 51473 - DNA, 618 bp, Arabidopsis thaliana landsberg
  unsure (1)..(618): unsure at all n locations
tgcttgtaatataagataagaaaataatgaaaaaccaccgaaacgcatatcaatcgcctcacaagaacatggaaattgcacaatgcgacttacccatgtagtcaggctcatcgttgtgctgttgtacatcataatcactcatgcaaggcaaactgcattcaagattacggttatcattatgttctgtcggtacctcaactttcataaccacaacaatataggaccacttgttttcagttgaaaaccaaatgattttgcacctaagtaacctaaataataggctgtttatttgtagtacatgcacacatggatgcatggacagatgtatgtcatatgaaacaaaaaaagtcacccaaagtaaattttaactgcagcctgttctcatatactatctccattgctgcttcaacagagatgacactcttgaaaagctgggagcagacaaccagtatatagttgagcttttcaactaccattgcttctgtcacacaagtacacaacacacttgaaagttgaaataacgatatgctaacagtcaccanatttaaaacganattcaactttgtttctatgaaattttcagttccatggagaagagtgaatcaaaagtagctagat

SEQ ID NO: 51474 - DNA, 474 bp, Arabidopsis thaliana landsberg
tcacttaaaaggaaggctgaaagaactccattgatccagcctgttattgttaagctttctcaacaaatatacttaagctgcaaagataaagctacctgctttgtgactctttctgttggtaacaacatcttttccttagtagtggagttatttagatggtgcttcacttcagtatctcttctattttgatactggcggtgattggttttaatgaagttagtctgctttacgttttctcgtttctcggcattcatgtttagggcttacatttttcattctaccgaaacaattttaagagcatgagactgtactattcctttgtgataacctgtggttttatgtgaaaatattcattgtaacaacctgtggtttacatcttctttgtttgtgatatatatttttttttatggatgtgaaacagatcgaaacctggtgtagctgctgttgttgcttgcatgatgcctgttatgcttg

SEQ ID NO: 51475 - DNA, 769 bp, Arabidopsis thaliana landsberg
  unsure (1)..(769): unsure at all n locations
ctttctctgcataaaatttagtcttaaccatacttattatctattttttttccttgatacatgagttatgaagagacggagaggtattggttgtgtattggccagcattcgggcttagagagagagagttgagtgtactcttcgaaacaaaggattttggttgtatttctgtcgttcttatacttttaccttatcacattgatgggacctttagcagtctctaagtagatgtttgtgaattggttaaactcaggttatgtatgcattctgaatcaggtgttttttttcttctcatcagtatccagaaaaaccaacaaggcagcaaaaaaaggatgttaaagagctggtacaactcttcttcccctagtctattatcttatatcatttatagacgttagtttgttagatgaagatagaattgatgatgaactcggaagctaagattttcagctagaaacttcaaatttttatcaaggcttaacgcttgcaatcagttagaacttgctgtcacaagtaggtgttcttcctgtgaaagctaaaacagagcattttttctctgtagatgacgatactttcccgaatgtatccttgtagagaatgtgcggatcacttcaaagaaatcctaaggtaataatgctatcttgtagctcattgcaacttatcgttaagatgtttgtttaccagtgattttgatcactcggttctgttcatattagatcgaatcccgcacaagctggatctcangaggaattctcacagtggcttttgc

SEQ ID NO: 51476 - DNA, 309 bp, Arabidopsis thaliana landsberg
gacctttatagtcctccgtccaaacaccactcttcttttttccagggaagcatctaaggaagatcgggctgggggaacgaacgtgcacattcacgctgtagtccaatttcaaactttagcggcactcacaaacaagtatacggatatctacagttgctctactgtgtgcatcaattagtccaatctgatcgtggcacagtatacgagctctgttatgcgacaagacctgagaacttcacattgagatgaggagagcgcccaaagctataacagcacatcgctagcaaaaacgttcccatgatatatcaa

SEQ ID NO: 51477 - DNA, 370 bp, Arabidopsis thaliana landsberg
ttctatattcgtttataaaattaaaaatataacatacaaaattactagtgaatttctgtacgaaacaatgaaataatgactagaccgagtcagcatgagtagtttattatagaagtaaacaatagataattaaaatttgcaaagaagttaagaaataccacacttcatcatataactggaccctctaattattttatttattctttattgctagttttatttcttcacgttagagctataatatagtacacaatacaaaaagaaaaaattaaggtgttaacatcataggctcacttggattaagatcatagacttttttttttttttctttttaaaggcattaatctaccggtcctacttcctcgtctta

SEQ ID NO: 51478 - DNA, 673 bp, Arabidopsis thaliana landsberg
  unsure (1)..(673): unsure at all n locations
cctgcaggtcgactctagaggatcccccccttctctaccttcccatccacctagcaccggaaccccgatgaccttcttccccatcacgcccacgccctgtgcccgcgtccgccgccccgccgcgtgttcgagcttcgagctctggtcgtcaagcctggtgattgagtcctgggtgctcagcccgatcgctggaatcttgtggttccggcaatcttcctcgagcgtccccggagtggcggcaattgctcaccggagctatactgcgccgcggatcagccattgcagtgaccacctgtgcttgccaccctaactttggtgagtgcttacccatgtagttcgccgtcttgtctacttcgcgtagacntagtctcccgtgggaacggaccttcgtagcgccggttggacgatctcccgtgggaacaccgccgttgggtcgggcgtcgcgcccaagtccgacgagtgagagggggcgcgacgggagacgtgtgccgtcggattttgtggcacgctccggattagatcatggccatatcgtttaccacagtggatcaataacaaacggtcttgatttaatcggtgatcgatcggtttccgggtgatccgttctacttatgatccatgcgattgatttttaacctgtggccgagctaatgtagcatctgcgtgatgatag

SEQ ID NO: 51479 - DNA, 587 bp, Arabidopsis thaliana landsberg
  unsure (1)..(587): unsure at all n locations
caataaaatgcgcatattaacagaatttaagattgtttcgattttacgttttcatcctcatttgccgggctggatctgctgctctttcggggtgaggcatcataccgaagacatttcttgccgggttacacattcccgcaatgtggtgtaatgaaccattcgggttacttgtctcggtaatttgtgcttcctcattcacatagtgaaacaatacctggtcattatctaaaatcgatttcattgtatcttccggggcgtaaaatcgtccttccccatgtgcaatcggaattttatatgctttggnnnnnnnnnnnnnnnnnnnnnnnnnnnnnnnnnnngtagccggtttcaggtacacattcttacagataaacttttggttgttgttatgcaataaagcgccttgtaacaacccgctttctgtcaaaatctggaatccgttgcaaattcccattacataacctcctttgtccgcatgattcatcatttcacccataatcggagaaagttttgcaatcgcaccggcacgcanatgatccccataagagaattcacccggaagactacaanatctaccccttttagct

SEQ ID NO: 51480 - DNA, 725 bp, Arabidopsis thaliana landsberg
  unsure (1)..(725): unsure at all n locations
ggacggttcttgaggagctcgtgctagacagcaaccgcctctacggctccattccggcgagcttcaacggcctttccagcctgaaacgactggaaatccagctaaacaacatctccggcgaattccctgatctgagctcactcaaaaacctgtattaccctcgacgcgagcgataaccgcatctccggtcggatcccatcatttttacccgaatctatagtccaaatctcaatgcgaaacaacctcttccaaggaacgatccctgaaagcttcaaacttctaaattctctcgaagtaatcgatcttagccacaacaaactcagtggctcaatcccatcgtttatcttcactcatcagtctctacagcagctaacactctccttcaatggcttcacctctttagagtcaccctactattctcccttgggtctccccagcgagctcatatccgtagatctcagcaacaatcagatcctcggtgcgttacctctgttcatgggtctatcaccaaagctctcagcattgtcgttagagaacaacaagttctttggtatgattccgacccagtacgtctggaaaaccgtatcgcccggatccgaattcgccgggtttcagagactattactaggcggaaatttcttattcggagttgtaccgggtcctttgaaggctttatngcctggatcagcgaacgtgcagctcgccggaaactgcttctcatggtg

SEQ ID NO: 51481 - DNA, 605 bp, Arabidopsis thaliana landsberg
cgtttgcccttagtagttggggagccgtcttgataactgctcggggcagacatatacgaaatagcatcgtcaagtatgcagcaggcgaccattgtagaagtacttggcgaactggttgagaaaaaacgttataagtattggaaaacgaacgatgaactataagttctggtccttgtctttgggtgaagtacacgaacaagcctcccagtaaatatgacgttcaagacaacatccaccatattctataccgagcaaagtgtaacattgaaaagagaccaaggtgaatggtcatggcgtttattcgtgactgtagagcttccactggaagcgtataatgcaatgctggggttccccatgccgactccagcggcgtgtataatcatcacctgcaacgccgtgcaaactacctaataatccagccaagaaacttcgcaagtgaaaggttcctcctctcgcgacaatccggaaagtagtagcatcaaagtcctacatgtccagcaactcttccgcgaaatcgtccaagaagaccgtcttgaaattatcgcccactgttcctgaactcgctccgcagtacattttgctgatgttacgctcagctgacgagc

SEQ ID NO: 51482 - DNA, 252 bp, Arabidopsis thaliana landsberg
gagtcctatcaccgtcccagattttaggatcacgaccatcactaatcttcttttctgagctacttccacagagtcttgtgtttggcattattcaaggactggagagtttctctcaaagtcgatttcttacaatttcaagttttgtttctacaagtggtttaaggtgttttttgttttgctttgtttatgtatcgaagtttgttgttgttatatagggcgggcccaatagatagaattgtgtgtgtgggtgtc

SEQ ID NO: 51483 - DNA, 728 bp, Arabidopsis thaliana landsberg
actagtttcatctcgatgggtttaagactttgagtaactcactgatctcatatgaaaaacaaaactaatttatagaagctatattttttttgtaaattttagagtacataacaaaccgtatacatggaaattaatatttagctttaactaacataattatgataaatgagtttactatcccgaattagctacaataatataccggtacaaaactacaatttaattctttgaattgatgtttttaatatatataaatcaaaggaataaactataatttaatttcttaatgataccaacatcttaaagatatcattaaacacaatgtgaacaaatccaaatgaaaattgacttacagacctcaagctcttggatcggattatgtcaccatggtcctatatagtatgaataaaatgaccaataattagcgatttcacagcaaaaaaatggcatttaatacataaatcactatatgaaaagtaatagtaacaacacagcccatgcatttgcaaaaattccaaaacttaatattgaaagatcgagatcttgttgttgtaattaatctttttttctttttcccgtcgacacgtttcaacggacacgatggaagagagcgtaagtatagaatcgtccaagtgatcacatagcgacacgtgataatttaaatggggaccatgtacgagctatacgataaaatattgctttttggagtgggcttccacaaacatacc

SEQ ID NO: 51484 - DNA, 489 bp, Arabidopsis thaliana landsberg
ggtttctaaagagtaaagcaatcggtggatttcttatgttgccgccgacgagatctttgaatttgaactctttttgttttggtgaagaagatgaatcattcaaatgcgagaaagttaactactctccatggatttatattaaagagaaatctatcatcttttcacgcctcactgaagcggttttcagataaaaagttcttcaatccgaaccatgaggacggtggtgttgtggtggagcgattatgtagagctaatagatttggtgaagccattgatgtattatgtggacagaagctcttaagagaagctgttcaacttctgggtcgggctaagaagccacctgcttctacttattgcaatctcattcaagtttgtagccaaacacgtgctcttgaagaaggtaagaaggtccatgaacacattaggacttctgggtttgtacctgggattgctatatggaaaccgtcttttgagaatgtatgcgaaaat

SEQ ID NO: 51485 - DNA, 606 bp, Arabidopsis thaliana landsberg
cagataagatgccccacctttttctactgtttaaaaaaacaagtaggccttacacctgtggaaaccaagcatgctctaagttaagttagaataatcaaagaggcttctttaaactattattcagagacaaaattctaacccattcttttggtgatagcctcaccacagtagaaatacacaatacaaccgaagaaaacatagtgttcaaggaaacaattttttaatacaaaagctaatctgaacccaagaattagtaaaaccccattcacaaaagcacgagtttagcatttaaaccagaaaagaaggaaggtggtctgacctgcacttcaacagaattagaaaaccccaacgcatagactataaaatcaacatccatagtcattgctttaacctgcaattcaagagtaagagaaaacttaaaaaacaacacacttgtgtaaaaacacagatgacagaatagattaatgaaaaagaaagcaagtcaagctcatgttactaattttacccttttgaagccagctataatttttgtgggaacccatccttcttcatccatcaaaaaaatgagggtaatgatcattctcaaggtttttcattaactgaaaa

SEQ ID NO: 51486 - DNA, 817 bp, Arabidopsis thaliana landsberg
ttatgttgggattctccggttgattggttttgtcggcagtttttttttttgtatttgaatttctccgagggacttagcttcggagatgagtgggtgtttgccttgttttggatcttcggctaaagacgctgcttctaaagattcggtgaagaaggaactttcagctaaagacggctcagttactcagtctcaccatatcagcttaggtgaaatttttcattcaagcttttttgggatctgttgagttttcgtgtcttagatcgattttttttttagtttctgggttctcgtaaagttcgtgtctttggtaatgatttgggaagaaatgttgatgtttctgatctaattcgtctgtgagagctgtgagctatggagtttgtggactataatttctgagatctgatgtgttttgggaggtttgattatagttagtatacaatttagctccaaattgttgtttgtgtccagattctgtttagttccctatgtacatggaatgcatagttctctatccaacaaacaatgaatcataaaaatgttagctttaaaatttcattattgaagagtcattgataaggatgttctgtaatagacatcactagtttagcaatagtagatatgaattttgtttcctgttgattgaagttaaatgtggaagctctttatctttgaacctgaaaagtattagggtttgagttgattatgattttttttcgaatttgaatagagcatggttaatgttatttgttccctttcctgtaagtactaacattttattttatttttggtagataaatcaaagttttcgacgaggtcc

SEQ ID NO: 51487 - DNA, 399 bp, Arabidopsis thaliana landsberg
tccttgattgattgaaagtgtgaaagcattcatctagaaaaaatagatattagaaaaaggaaaatctttttcttttctctcccctccctttcctcctcttttggcccagcttttccccttggcgcgcggcccagctagccggccggcacaaccgtgcttgctcccttctccgttttttccccctcgctccgtgagccggctgtgccacggcccacctctccccctcggcgccccctactttggtcccaagaggcggcccatccgctccccctcctgcatccctcgctcacaccgcggtcgagttactccgccgccgccgtcttctcctgcggtccccacctgtcatcctctctccctgccccaaatctctctctcctcctctgcccaacccgcccgctc

SEQ ID NO: 51488 - DNA, 988 bp, Arabidopsis thaliana landsberg
ttaagatccatatgaaggcttgtgtctgtatttatatatatatgcgtgtgtggacatatacatatttaaagatagataaagaattttcgacaaggaatatcagattttttccttgatgtctcttcataacgctggacatctaatttttgcagctttttatttatctgaacacatgaggtgaggataataatataaaaagatatgaaagttgaaaatttggtaattattgcaaaattagtattatttgaaaggtgcaatgaatccggttttagtttgatttcaagttttagttatgcggtctaatttgatacaatttgagcttcagtttccagaatctgtttttggccaaatttgtcttagtataaataattcgttacaaaacggtaaaatcgatgcttctttattgtctagtttggtttcattaattttggttacgtacggtatgttttatgtatataattaataaaaaaaattggttaatatttttgggttgtttttcgtaaaactaaacacattggtacgttagaaataattaagattcaattccaaagtgttgagacattatttcattctctctactctaaaatgttttgttaaatatgtgccaggtagaccgatagcatatgccgttggatattatgttgtgccatacttactttaaatgaacaagaatagcttcccagtccaaaataaaactatttctagaagtgaaaaacaaattaattggaatatttatctagttactttatagaatctaaattcatagaaagaaaatagatgaggaatatgttataacccactttacgagaacgttgttttccttatataattgcattttctatttagatttagattgtccggtaatttatgtactaatatgatcaaaatttcggatataaacaatttcttgattaaagaacattatttatgtactaatacaaatctagattagtccataagaatgatcttgcgttttctaaaaatgaat

SEQ ID NO: 51489 - DNA, 558 bp, Arabidopsis thaliana landsberg
tgagtgagagcttctgattgatggcaagataaaccaactaacaatctgcaacaatataaagaaaaacaatcaaactctaatttaaagaaaaagatgaatcatgtggccccggtgtccaggtccgagactaatccgtgggtccaccacggataaagcactggggccgaagtttaagaatccaagtggccacacaggttatgaatcaagatttgaatatatatacctgaggaagaggcaaacaagcgatgagatcaacgatgaaatctgatctcaagtatcttctagcaatcaacttaggatctttcacaagttcgtccacgaccaaacactctagaagtacgagaaacataagctgttctgaatttgatcacaatgtgcaaaacatagaacaaatctgctaatgttctgaagaaagtgataacaattccaagcttcaaatctgtagtcatacaagaagatcgtccaatacgtttgactgaagaaagaaagaagaacaaagggtcgacgtaaagtgcaacgagacaccagaagaggaaaactctgttccattgaagcact

SEQ ID NO: 51490 - DNA, 803 bp, Arabidopsis thaliana landsberg
cgggcgaagataacaaaattttataattacaaaccaataattgggccaaaacgaaaaacaaacttaaacccaaaataactaaaaatccaaacctattaaaaattagggttgatggtatcttggtgccgctaccctcttcataatcagcagatctacgtctgtgacggtgacggtgatagcgagggatgacgatatctccgtaacgaaatatgccccgacgtgctaccatagtgaaaaccacatgcagatagagagaattgactaaatagccatggatgaggatcaaaaggaaacggagaagaagctaaaaagattagatctaatgtttttatctttatatttatagtatctattaaccgagaaaactgatcggttatgtctgccgaaccgagaaccgaacttcaattataatttcgccgatcggtttagccttcccttcatagtcggttatcagaaccaaaaaaacggtttgttcagttcggtcattgggttaatccgaaatcccaggcctagtttttgctggattgtacagtaataatctgtaacagatgataatctattctagagcgtgcacaaatttacctaaatcaagttgcttttgaaatctaaatatttatagctaaagctatctctgttttgtgttccttagaagcagagattgcaagagcttagagatttgacggtcgagctcactttgagaagatagaaatcgtaacggttcaacgactagtgaaatagggccgtccaatatgtaaggaggacaccaagtgacctgaactatatatagcgactaagcttgaaat

SEQ ID NO: 51491 - DNA, 445 bp, Arabidopsis thaliana landsberg
taaacgaatttgcgtagtacttgctcttaaaatatgcgcatgttataccactcttaacacattcacaccgatactgaagaatctccgaattaaattaaccaaaacgaatgtatatcaccagggcccagcagccctgaacgtcgggtgcaagagccggccgatctccacgtcgtccgcgtccagcggccctccggtgtcgttccgcacgcgccgcacggccgatggtgttgagcgactcgtgctcgaacccgtacagcctgagaatttggtcgtcggcgaagttgagcgcgcgctccatgtcggtccggaccgcgatgcttcgtagctcgcgtactgcccccacacggcttgcacgcgacgaagtgcgtcaccagcggccaacgttcgcaacgtcctcggcggtgacgcaatcccgctgcatctcttcgtatctgtcacgatccca

SEQ ID NO: 51492 - DNA, 765 bp, Arabidopsis thaliana landsberg
  unsure (1)..(765): unsure at all n locations
ggactagaagagtagagtcaggttcaagactactctctcctttaatcgattgtttctcagaatcttcctgcaagaaataaacacaattccacattcagaaactgcaacagtgctaattgaatctagcaaacatgcaaattagaggttacaaatggaggagaaagcaaaaaacacaaatcaaagaagcaaaaggataaagatgagaaacctccatagccacagactctgctagagatgcaagctgatccatttacagtgagattaagttcacaaagatcgatacttttaacccgtgacctaaggaagaacaaagatctgttaaataaaaaacaaacccttacttgatgaaatgcagtgccgttttcgaaaccctaaaaaaacccagaacgcatatagatttgtgtctggaaatagagagtgagatgataagtgtaacttcgtgaaggggccaagattcggaacaaaagcttttcccaagattgaatttgactctcgaattttatttgtaacgtatagtataaatctaaaaccttttggttaaatatctgtgaaagaggttttttttttttctttccttctttgatgagttaagaaaaaaaaacttagagaagaatttattaggttaacgattaaagcaagtagatttcttggagtccgatctaagtttagggtttacgcccataaaatgaaaaagcccccccatgtgnttttgttttgtagtgaaatcttatttccatttataacaaataaaattcagtagtttta

SEQ ID NO: 51493 - DNA, 678 bp, Arabidopsis thaliana landsberg
atcatcatcaatatcctttatagcatcctgcaacactcggcaagtataagatatacatgagacagattcatttcactttgcatcttttaattttcaaccaaatgtgggacttttctgagcttatatgctacgaagctttgaaccagttggtttgatatcagaagtgggaggcaaatataacgcagaacagagaaagaaaagaagtaaacacgtatgagtttacctttgcaaggcttgtcacatatgttccagccaatgcagtaaccaacagacccaccccgagagttaaaagctggccgtttcctccaggcaagccaacattagattcttcttgctgaagcgacatagacagaagattgtcatttgttgattttatgatgtttgccagagtcaccgtgtattcacaattcaacagatatcagacacagtttctacaattcaagttaacttccataagttgactagcctccctcgtattgagtacatgtttaccattccatatcgatctccttttcattaagtcaaaaacaaaacttttagctgatgattttagctaggtttctaccctagacaagtgctgatcaacatgaacttattgtacaccatcggcttgacatgagaagaagatatgcatgtttttgtatagatcattttttttgttaaagtgtgtgcactttg

SEQ ID NO: 51494 - DNA, 624 bp, Arabidopsis thaliana landsberg
tctatgtttcaattctccttctccattacttttcactgatcatcttcttcttcttcttcagctgcctactctgatccatcgatggaatctgcctggtcttgctaatggcactgaactctggatcaagcgagatgatttcaccggaatggaattgagtggaaacaaagtacgaaaactcgaattcttaatggcggaagctgttgatcaacacgctgatactgtaatcactatcggcggtattcagagcaatcattgtcgtgctacagccactgcatctaactatcttaatctcaattctcatcttattctccgtacttccaaggtctcgcttctgattcttcaccttacatcgattcacttaccttttcgtgaattcatgtttatgtgtgtgtggtgtgtttgcagcttcttgctgatgaagatcctggattggttgggaatctccttgtcgagcgtctcgttggagctaatgttcatctaatctctaaagaagagtattcttccattgggagtgaggttaagtccgttgcattaagttttacttactaagaacaagaaatgagaagtttatacttagcctgatattgttgatcaaaacttgttcttgtgaagtggtaggctctt

SEQ ID NO: 51495 - DNA, 660 bp, Arabidopsis thaliana landsberg
tatgtctcagattcatgattatacccgaaggttacctcgtgctggctccctgtatcataatcgtcgatctttatctttatagagtcttttttcactctactaattatggattcgcccaaacttctcaaaatatgattctcgatatcgttgttattatcaaagtccaaccaaccatcacttttctctgttaagatcttccttatcttccacaaagatgttttgttatccatcactttttggtttatgttgatttctctgatggatattatgtaacatacacacatatatatatgggatataggaatttttagattaggcgtgggtaatcaaaaaaaagattttggatttaatattatccatcatgcatggattttgtttgacaaaaaaaaaatcatctttaattgaaaatatttttaaaaggacaacttaattgaaagtctaataaagttccaatttattcaattaattttataaattaaagattgataatccattttgatacttgtaaattttgttctgacatgtttcagcatattaaaaaggtatgatatatttatgtcttacaaaatgacttttagaatctgtaatatcttacaactttgctacttttagttccgactaattaaatagatatttacgtccttataaaagttgcactga

SEQ ID NO: 51496 - DNA, 460 bp, Arabidopsis thaliana landsberg
  unsure (1)..(460): unsure at all n locations
ttgaagggatagagagtttatcnnnnnnnnnnnnnnnnnnnnnnnngtagatctcatcaaacagctgctagtagactaggccttcgaattctagaggaggtgaatctagcagatccgcagtatgtctaggaagacgtctcgattgcgattcatgagttagaggacatgtcagcttgatggatcgcagttgctatcggcgtatgcgagaagcagcgtcagtcaactccacattgctcgaagaacttatgggtcattctggtacatctgcgatcagtcgatgatgaccagtagcgcatcttgcactccttaaaggtcggaggatccaatcacgatgtcaaccgactgtttccggtttaagggacacgacctgaaaagtagcgggttatgatcactcgccagctatcgcgccatgaggtactaaggtagctgccccagcacatatgcgctgaggagagactaa

SEQ ID NO: 51497 - DNA, 1004 bp, Arabidopsis thaliana landsberg
agcgatgtagtcatggagaagacttagatgttacagttgctgccacgtggtctcaccttcatatccataaatgttggactatattggctcactcttcaaaggagttttactcaacaagtgaactttaacaaacaaaaaagtgatttgttatgaatcttttggaaagagtgcatagttctcttgctccttatgaatcattgtatccaagtttgaatcgtttcatatacatatgatcttcttccctccctaagcctccttattctgagaatgataatctccgaacaagtcgccactcgctggagaagttcatgcagttagggcagcaaagacgacgagagatactattactgcctaaacaaaacgatgcgtttagggtgaatcgcagagagttaaaaagtctcgttataggtatggcccattataagcccattagtgtctctgtatataaactgtacgcgccattataagcccattagtgactctctgtatataaactgtacggcccatgatctgtgaggatgatattgatgaataacgcagggaattgatgaacaatgtcattttgttgtttacatctagtacatgagttaattcatattcgtcaacatcgatgcaaacaatcggactcatgaattttcattcacatcgcacgatgtattggagatggcttctacacacgtgagtaaatcttgttgaaacatcaaccacatttcattattagtgtttacaagtctctcttgtaagagcgactctgttttcagtcccctgtcttgtttaaattctcttcacttatacaacgagacaaacaaaaagcaaaaaaattcagtttggtctgatatggttattactcttattgttattgtaagcatactttattataaatgaatgtgaaagcaaagtctaattacattcatcaagttttgggctcaaaacggtgatgcccaataatccggtgagtcaaaataatgctccacgctattgttttcccatcccatatatatata

SEQ ID NO: 51498 - DNA, 750 bp, Arabidopsis thaliana landsberg
agcctggcatcaaaataaaacaaaatcagtgagcctactacacaaacaaattctatccatcactgcaaaaatgagaaactaaaagagaagacagaaatcaaacatacttcagcaaaagcactagcggatgattcaataacatcatcttcaatagcatctacatcaatcattgtaggagcaggctgagacggtgtaataggcaccgtaggagttctaacagaagcagaggtcccttcttgatcaacaggtactgcattcagatcaatcacagctttcctccgtcgatttcctcgaggtactctcacctctgacgtgttcatctttcagctcaaagtaaccaacctttgtacctgtaagtttcaaccaaacaataaaacaatctaatttactcctcaaagtcttatatacaaactcaaatcattgcaagcaagataatataatttccctgaataatctcaaaatgtatagtttcacatacacttagagaaaaaaaaaatccaaactttagacagaatttttcaaaagaactcaatttcacagcaaaaagggaaaagaatcaatctcccagaaattcatcgactttacgaaattaaacacaattgacagtaacgagacgatcaaattaacaaatccgatcctaaaattgagaatgatcgtttctaagcaaacaacaagagaattgaattagattaggtttttaaagagaagaacctcttcaatcaatttgattcgatgatcgatataatcacc

SEQ ID NO: 51499 - DNA, 617 bp, Arabidopsis thaliana landsberg
ccgtcaccatcggacccaggcctcccgccgcagccccgcccacggagccgccggatagcctctcgtcgagcaggaacatgagcagccccccggcgtaggcgagcgcgaggagcagggcggcgaccgcgacgcgccgtccgcgccgacccctgcggtccgcctcgggctgccgctactgtggcggtcttccgcaacgcgtccgtacccgcacccgcgaggactatccgtcagcgtcacgtcggggctcgagcgggaccatgtgatatggcctgtgagcgagcttggggttgaaggggaagcttgatatggatgggaacggcaggaattaatggcgggcggacgagcaggatggggaagcggcccgaggagaggattgggaagcgcggcacgaggtgggtttggttttgtgcgtacgtataaccgtcggaatctgtgtggccaaatgacgtgctattacgatcacctaggatttgccttccgctagctttgattgtttgtgctcttggtgcgtgtagctagaatcccgctagcttgggacacgcaccagggaccataaggtcaatgtggatctaaaaaagatgtggatcatcacgagcaagtatgtctggtatgatata

SEQ ID NO: 51500 - DNA, 925 bp, Arabidopsis thaliana landsberg
gcagcttagaaaagttttttgagtttagacaactaaccacttatcctagtttattgaggctttcaatagccatttctgctttatagatcttattatccttccaaatactttacttgtgtttagtgataatgttataaggagcattgtgtgcaagactattctacttgaattagaagcgggcattgttgttcaagactgttcttgtccaacatttattggccatatgatgttgatttgcttcctcctccttatggttttgacaaagacttccaaactaaaaagtgtatgctttattgaatgttcttggttagatgatgttttggtagaacttgtaagttcacccctattccgaaatctcaatttgagtgttattatttatgttagcttgtgcttatgcttattcttaacctctatgttaatcgatgttttgatttatttgactcttcgtaggcataatgtatcctgtcaggttaaacttctttctaccagaggataagtttgtcaaaaaaattgtttttttgtcgaaggtgcaactagagaacatgtaatcgaatccgagacaaaacgacatcgttttggtgtccgtactatgtccaggacaattgtctccgcagtctaataagaaaaagaaaaaaaagattccagcccaaaaaaaaagccagataggttgaagaagaatcctccatgtttgatcatcatcattactcttgattcaaatctctacgatcttttgcccagcttcacttcaaatctcccaattctagcatttcaatttcatccccagtagctagggttttcaagacgtcgaccttctgagattgagaaagctaaatttggatcaaatttcctgactggtaatttcgtttgattagtctccaatttcggcgttttagaaagttctaagaagaattgaagacgaagatga

SEQ ID NO: 51501 - DNA, 1155 bp, Arabidopsis thaliana landsberg
atttcccttaaactctttctactctctttttagatttgaattccatttacaattttccacccaagtttgcaaatgatgtaaacatgatggtgttttgagttgaatacattttagcattcattttttttaaaaaaacagtaaataagattttcatttgttgagaaaaaaatgaaaaaaaaagatgaaaaagaacgataagaaaaaaggcgaagataaaaagagaaaaaaaattaaagcaatcgtgatggagggaagaatagtgaaaaagagaagaatgccacgtgttatatttgagaactctgttatgaggcaaagacgcgggctatctccaaaacgtgtcctcttcactaacgacttaccaaaccaatttgatttcacttctctaacccaaacaagaaaagaaaagaaaaaagttagacgacacaatggtccaatcggagaatagtgagacaatatcgaccctaatgtccttttacttatctttttacgtgttagtttcttattattttatcaattatctaatattttatccatttatttttataaatgtacaaaaacacctataatgtgcaagattttgtttacattacacgaggccatatcatatgctcatacaaagttggtttggtgtagggattcttccaatccgatttttatatgtttcttttgtattaaattattagacggagtttctagaaaataatacgtgatgtgtatttcttcactatataatacgcgaagtttgttacgttaattaaatatgtgtacaatagtcgcaagacttttctcattctagtaatttcattatatataatatagtaagaaaagaaactccggattcgtactcgagctcatagactatatatgatgatcaatagaaaaattaacctattgtgcttatacttttacaattatcatattccacgtaaatcataaattcaaagctttgcatggtgacataaacaacatattttgaaaacaaatacatatccaaaagtgacgatgatttaaaaattatgtcggtaattgagtatttgctgccaacaagtatttgagtaagttaatataaacgtaaatgtaagaataatccgataacaaaagtataaaacataaatggtagaatccctgttgagagtgttgtccaaatagaaaaag

SEQ ID NO: 51502 - DNA, 889 bp, Arabidopsis thaliana landsberg
gctgctgttgttgctaaaagaatactaattaatatcataataacattaaaaaatgtaaatatcactcataaacaaattgaggaatttgtaaacaatttcgtggaatgaaaaataatttcgtttagaaattcttacagcgattatatacattttaaatacttagaaaatataaataaatcaaaggtaaaaacaatagtcaaatggagacattaaaagttaacggtgacttaaacccgttaactaaattggtcccttagttgatttagcgatatgtcttatttagcaaagtcaatgaaaattaacaatttaattggaaaattgattaaagttggtaaattaattaaccacaagaaaagttcacactttcgattttttttttctttaaagttttatgtgtatgtttttttttcatacattgacatcaaatattctcacaagaacatgtcgatcctcgattcctagtctgtgcagttgcgtcagagtccaagttcacttgcgaccagccgttccgcagccgtggaactagttaacgacaagatttacatttttgggggagtgtcaaatgtgtgaagagggatacgaagagatccaagcgccagtctctgaactatagaaaaaaggttttaatgcaaacttggcaagtcgctaatacatgcatcaccaccatgttagcttttagtgcagtatttctgctggaatgacgcaatggctggatacaatggcaagctgtcgtttttgtggcatgaaacgaacaaaatgcagatttacttttcaaacgaataagtctagatctcgaaccaccctcatatatatctaactggtacgatactctaataaaatcatagtaagtgtaaataaatattataatgtttaatagggttagaataag

SEQ ID NO: 51503 - DNA, 492 bp, Arabidopsis thaliana landsberg
gatgcattaatatatctcatcatgttattgttataatactgtgaaaatagtttatagcccatagtttatgtgcgacttgaactatatgacatgatcactcaacaaaaactcacgactaaattatatcattattatgaaagaaatattaaacaaattgcaaatgggaggacatcacgtttcagtatgtatgtgtatatagatatgtaaaggcaagaacgatagcaatatcccaaaaatctcttaaaaatagtcttcgatctaagcagccatggacgtggtcggagaatttcaaaaaggagaaatcgatgggaaaccatgtttcatataccaaaacgttataaagccacaaatacacagtccaaatttcttcgatgaaaaacaccttattcaaaacccaataccaaatcaaaacatgactaaagttgccattgatttcggggacaaccttccttctccaactttatctataagcccttcataccattaaactac

SEQ ID NO: 51504 - DNA, 597 bp, Arabidopsis thaliana landsberg
  unsure (1)..(597): unsure at all n locations
tgtcactgtgcatttggagttcttcgtctcttctgcgaccgagcaagcaaatcgggtcaccgcagccacggcgtcgcgcgtctcagcgctggaatcccgaatccgccatagcgcatttcgaggcgtggcaccccgccatggaatcgacggtcgccgaggtcaaacgcggcgtcgccgtgtccaaaccgtcgtcgccaacatatctcaaccgaagaacgtcgtccgttggagcaccgcacctacaacccagcatcctcggcgaattcggatcgggccccgcacacccatctaccgacccacggatcgacggccccgacgggcattgctccgagcctccgaccatcatcgtcgagaggctggttttggacgtgtgtacgcgtccacccacctcccgcccaatggtatgcccccattcaattcgcacacatttacccatcttctagggtcaccacacagtcacaacagagagccccagcgggttcgcccagtcctcacagttcggtcccttatcgaaggttccgtttcctccnnnnnnnnnnnnnnnnnacgtctttggatactcgtagcgaggactattttgacatatacaatgttgat

SEQ ID NO: 51505 - DNA, 966 bp, Arabidopsis thaliana landsberg
gtcgttagattttacgagtgacttctaacttacgagattaaccgtagactcgttcaaaagaccatcctcactttcctaagatccaagtaatcaaaattcactttcactcaaatcacctctctatttaaacaacaacaccactttttcaatcctcattaacaagttaaaaaaacaaaaaaacaccatcttcactttttttttcttcttattttttgttttctttctctatacatattgtatcaaaaaataaatacattttcctgtattttattttttttgtgagtattaaagaaaacacaagacaagaatgacatacacagcggtaactatgctctctctctgcctaataaatatcttttcatcttatggcaaagagtgtcgagttttggcccgacttgtaatgtagttttatcaatgagactcttaacattatatcatatcattgcctcactttattacattttttgtaacgttacgcgctgttagttctcttaattcattatattaagcatgccaaaataccttgatcagaatgacgaggaaaacaaaggaagatcaacggacaataacaatcaccgtcaaatggatcacaacgattggttaccagtcacagcgtctagagacgccagatggtattactccgccttcgactatgtcacggccatggttggcgccggagatcttggtctccctttcgccatgtcacaacttggctggtaatgctttaagacctgtctaaaattgtctgatctgaacttcacaaaataaagtcgtaatttaccgatcagtttgctgctaacaggggacctggacttgttgctataataatgtcatggactataacgttctactcgttatggcaaacggtacagttacacgacgccgttccagggacacggttggaccgttaccccgagctagggcaagaagcttttggaccaacactcggatactggatcgtcatgc

SEQ ID NO: 51506 - DNA, 551 bp, Arabidopsis thaliana landsberg
tccttccttcaccatcaaccatacaaattaaataatagtgttgtaattcctttccaactttttcttctctcggttctgagggattacttgtaacaatcttttacatagtacagatttgatccattggctgatttctttttatttatctattcagttggcatccatgctgttccttctattatttcatatttttctgtggttttttccacaatgtatgtaataccaaattttaggacttgttcatattttcttatttagaaattttgtgacaactcttttcagtgtcttgaaagtacaacatggttggatcatctgagagatcactaaagtctcactgcttaggattgtatgatacaattttgtattaagctcaactgtctcaggtgaaacaaagacttaaaccggttggtgctggtctcagacttgaaatgtctatacgcatctgcaatatgttttgatagagcacagtgtagccaagctgccacctattttaatgaaaagctgtaaatttgtctatgaagagaggttgatttgtaaacttgagttcatac

SEQ ID NO: 51507 - DNA, 613 bp, Arabidopsis thaliana landsberg
tatgctctgagactaaatttgatcttgataccaagaatctgatctagatccaaaatttatgtcaactgactcactatcatattttcaaaactcaattttaaagttagtaatataatgtacatcttaactattgtttttttgatctgtttagaatctgggccggtgcccactcaaagcaatcggcccattatacaagttgttaaaataaaattttatcaagaaaaattacaatttttggctccaagactttttttttttgtgcaaagactttttttggattcaagctaataaatgttagattacctttttaaccaaagatcaaagtaaaactaaaatcatagaagaggaagagaactcgtgatcacgtttctttggttaagtaatgttgtagagaagagaagagaagagaagaggaagaagaaaagcccaaatcgaaaattgaaaactagtactccaaactccaaagcatcaatattttatcactcctcttttcttccacgcaaacccaattctcttcgtcttcttcttttgcttttctcccctaaattcgtcgatcaaattcttgtcttttcaacttctcatcgaatttccattgccatagcctcttatatga

SEQ ID NO: 51508 - DNA, 272 bp, Arabidopsis thaliana landsberg
ctaatttatattttgctctatagttctgaggcattttatttacaaacatgaatatcgatgtccaaaagatcaggaataaattgatgcttttaagttgtagcaaaaaaaataaaaatatatgttttaccatccacactcaaagtcgttaagctagcttttccatcaaatgatgatatttagtttagaaattaatgaacatgcggcattaactgtgaaaacctctttgacgtaattcattaattaaatttttcgaaaatgaaatattatgggaa

SEQ ID NO: 51509 - DNA, 903 bp, Arabidopsis thaliana landsberg
gcatcggcggagatggagagaccgggacatccataaccgtaagaagtcaaaccaaatcaatactgaagcttctatccatattatcaaacaaacaaaaacccagagacaggcattgcaaattaccttgatcgagccaccagcaacacccatagccccaagctttggagtgatatggaatggaaattctgctttctcccagtactgagtaaaacccaaaggaagaacaatgagataacgctaactatacaatcaaagcaaacaaagaaaaaacaaaacacgtcgaacatgaagatctacctctgtcattattggagcaacttctttctccatgcattccctcactttcttccggatagcttgttcttccggagtcagtagatcattgaaatgataatagtctgaagctgtaacagtatatccacaaatgagacaagaaacacaataaatcatcaaaatataaatcctctggaagaagaaatccttactacaaggtggaaatgtagaggctggagttgcttgaggaaatgctacagacatttccataggtggcaaatcaaagtatgaactcttcaccttcttctcattactagctgcaagaccaaaacacaattcttatttcataatcaatattctcaacactcaaaaccaaaacgcaatgcataatctcgtttctaattcctatatacaacagattccataagtttcaacaatcatgatccctagcatcatcatctgcaaatgaaacagtctgcgaaaaattcaccatctgcgtcaaattacggtaaactaacacgcaaaacaaaatctcattgacctaatcaacacaatcacctgtttgatcgaaatgatcgacacataaatcatccaaaacgacaaaaaaaaaaagatcgaacgagcgagcaa

SEQ ID NO: 51510 - DNA, 563 bp, Arabidopsis thaliana landsberg
gttcttttaatatcatccaaacacctaaaattaggtcgatttattttatattttggtagaatttgattgtatttgaatggatattatattagaaccttgatagacatttgtgatttggactttaaacgattacatgaggtgtgttgaaaacaagcatgtggaagtatctttcttcttatatacgttattataaacttatattagaactaatccgtggcagtggaagagtcaaaagtcgaattattatattcttcgtaagataatgaatattttgtaatgcgtacaaatgtttgtcgggttactaaattaattatttccttacaaaaccaaagagtgagtgaggcaaagatcctcgcaatccattttaaattcgatacaacataattaattaattgattaagtcatgaaagatagcatcatgttcactagaatgtttttaaactaccctttttctcgaatttaatctcagagaaaaccacattttattcatataaaaaaaaaagaatgatatctttgtcgaaaatggaaaatggaatatttcacagccctcgcttttgacatta

SEQ ID NO: 51511 - DNA, 693 bp, Arabidopsis thaliana landsberg
aatattttaaaatgatctcaggtatctcacaattaccaacatttttacggatcagatcaagctccgacaaaaaaggattgcatcttccatgagagatcccgacctatttcttagagctacaaagctaaggctatccgactatgagagtcttccgaatccttatccctcgctcaatgagaaaccatgaattcaattggtttctttatggagaaactaaccatctccttctcttatacgaagagaactctatttacaagttttcatcctcagcttttggcttctaaactgtgtaagctaccgatcttccttacctttatgataaactgtgtaaaacgtctcatgcaagcaagaatcaaagtcttggaatttttttcaacatcacgaaatcaatcaaccgtcactatcgactcaccatggatttgcttgtgccaatttcctttctaacatttgtctccaagcgcttatgaatcacaaatcggactacctaatctattgttatgttgcattagggaacactctatcttttcatgttataaacattgggatcttggaatcattcctatcattgtactttgatttggtttgttttgattgaatgaatgaaatcaagtattccccaaaaaaactgaaaaacaaaagtctatttcaaaagttacattctaaattaatttttcctttttatgaaaaccaaaa

SEQ ID NO: 51512 - DNA, 487 bp, Arabidopsis thaliana landsberg
ttgcattaatatgagaactggatcgtgagactcagaatcatccttgaaaatctcaattcttttacttggcaactatatatgccaaataattcaagaatggttcgaatattctctataaagttagtagaacaaaattataaaaaaaaggttttaagcattcacttttattctaggaattttttttgaacatatatatacataataattaacaaaacggaatcaaatcagacaaaagattattaaatacatggttaagtagttaataaacaataactattcattaatggttaaataccaaccacagatattttatttttaaataaatataaggtcttgccctcaagatgactaacaaaatagcagtattaaaagagagactaaaaaagagagtgaacagagagatttcgatgtggacaaaaatagatgaataagaatccaagaaaatgtttgatggtggagtcctgagcagatcgtccgtttcatagct

SEQ ID NO: 51513 - DNA, 475 bp, Arabidopsis thaliana landsberg
  unsure (1)..(475): unsure at all n locations
attacactatcatgtgcattaccttgctcaactacatttactgcgaccttaagtccaccaacaggtgacgggactgcaatataatcaagtaagtcggataagtccatatggtagtagaaaccccctgtgcaataaaacaaaatcatgcctatgaacatacttagaagaggttatataagaannnnnnnnnnnnnnnnnnnnnnnnnnnnnnnnnnnnnnnntggaagttccagcaagaactagcacgaggagaattttcttcagaatgaatgaattctcgagtttttcttttagtttcaatgatctctcaagctcaggnnnnnnnnnnnnnnnnnnnnnnnnngaaattcgggtgtttgagcgaagttgcattgggataagactaatcttggcatgacgagagattaatgagtataacgcataggtgccccctgaatatcataagtaatcaaagcagttggcactgcatgtacag

SEQ ID NO: 51514 - DNA, 842 bp, Arabidopsis thaliana landsberg
ttgaattcggtactcgttacccttcatttgataaaataatttatatagtgaattaatattttacaaaatgaattttagtataagtttccatggtcatatatctcaaatcattgagtaaaaaaacaagagtgatgacaaattacaacataatgacgacacccacacatgaagctgaagtcccaaaaacaaaccagtaaaccacatttcaccaccacgattcaaaatataaaaaaaaatatggaaaaaaatgatttttcttaattggtccatttgatgaaaaaagaaagacatttggatttttgctataaaaatgaaatcagcggcattaaaaataataataaaaaaatgggatggtttttaccagaaaatctcaagaaagtcacgtactgtaacagtaaagcacattttaggtttatttttttattttatttttaacttttttaacaacacgtcgcctcttttatacacagcgtctctctctctctctctctctctctctcctcaatatatacatacttagctgcgaatctcgtcgtcatcgccccgacgaaccctgtttcgcgtctctttcccaatcccaatccaatttcgattccttcatttcaggattcgtatagccgtaaatccgctattgggttcttccgattatccaccgatagatctcgatcgaacgtttttctccgattggatttttgggtgatttcgccggaattcataatcagacgggaggagtcgcttctcttctcttgagtaatttagtccctctttgtgttatggaatcaattgggtgatgaacaaatacaagtgtaaaacgatgccgggtttaacaacacacatgaatg

SEQ ID NO: 51515 - DNA, 947 bp, Arabidopsis thaliana landsberg
tctgcagtgtcctgaaaactgaaactttttgtaaatatagtgcttgaaccggcccgtgtttttgcttctgttattggtttcaggctttcgccagtttataagatatatttgtttgtagtttttacatgtagttaggctgcttatgtaaacgttatgatgacagagaggtcaagactctatttacttctttgacttattagagttcttctcacatgagttcattctgggcaaaactcggaagagagaagtcaagcgatcgaaccggagagatcacaataaaactcatcaaagggcaaaagtaagttcaacaaaatcatttatcacaaaaccaaaataatgcaagcaaactatatgaccaaagcggctatcaacaagagaaaggagagcgaggcaaccataccataatcctggattacccgtagaagtgaacataaactaacatacacactttctaaaattgcctaaacctaagatttgtaccacccaacaccacaaacaagatagcaaatgcagcaatctcatggacggaggaatacaaaggtcagacgttaccggagaggaggctaaaacggaaataaatagtattagtacctaagcatttatttaataatacaacttatgaatttgggtttacaacgctagacgcaagaaaaaaagtggagcttgtggtggagtcgcagaggagtatacattcactgtgtggtattcgtgtcaataattcacaaaattggaagggctataaatgttttttggcaattttttaaattaccattagaatgagttttagttccaaaaatatcatcattagtttcttttactcaaaaataccactgaaatgtctttttagtgtttgtcttttgattttgttttgactttagtgtttgtcttttgattctgaacgttttataaaagtgtatacagtatatattaacagtgacttgtaaaga

SEQ ID NO: 51516 - DNA, 686 bp, Arabidopsis thaliana landsberg
ctctgggttatatatattataacaagggggatagaatatgttcacgagaatctgtataggtaaacctcatttattatttaacatttcatgaacatgtttgggtgccattatacaagatcgatgtttttgtaatttaatattaaaaagaactttaacataaaaacaagcatggaaaattcaaaaagaattggtcaaaagagtattgccaaaacaaaaatgtaaagaaacgggaaaagggaagataaagcagctaattttctttctccaactctgaccaatgaccatatccaagcgtgtatgtaatgtacctagtcaacatgttacaagtcgtggccctcctcaccttattatatatgtcatctacataaacatcagacatcacacaccaacatcattattatgttctttgatacaaaagtactcaattatcctacaattcacaaatctatctccatggcgtccacgatgcaaagaacaagcagctccgcggccactaacgagaggcaacttagccagctacagagacgagctccgtctttaatgatcaaaccaacgtcttttagtaactggaacgtggcgatccctctcctttcaccgctcgctccttctctaacatcatacttcgaccaatcacatgttcctccgccgcagaacaagactgagataccagtggaagaagaagtgaa

SEQ ID NO: 51517 - DNA, 471 bp, Arabidopsis thaliana landsberg
ccaacttttgaactgaacatgtatatggtagcgagccggtgacaacagaatcctcctcggatatctcctgttcatggtattgtgcatgccaaggacgtccaacaaatggttgaaggcagcggtggataggttgacctgctgagaaggtcgcggcggccagaggagttgaagggcatggagtgactccggaccaccactgcgcgatcttctaggtgagcagtgataaaagcgcgtggagtcgtagtccgaaaaagaatgtggcactgtcggatgttagatagaatctatttccattatagaaaaccgttggatcttagatggaatctatttccgttataaaaaccgtcggatggaatctaaaatgggccagcaggcagcgagtatagcgtccatggcgtgggcaacaccagctaacggataaaccaaaaatgagccgtcgctctccttgcttgcatttcccagcgtatatat

SEQ ID NO: 51518 - DNA, 509 bp, Arabidopsis thaliana landsberg
tttaagaagaaaaaacaggtgaatccagctgaaatgaggcaagactatacacaaatatcttagttttctgtatatcattcacatgaagcaggaggtgcaaagaggaaacataccctaggcgagcttgtgttctgtttttccagtatccagctgttgcatgcgaatcaatcatggcccctgcaacaaaggggaggtgtttgaccaaatcagcattgaaatagtgtcctctcatctcatgaatccaccataggatcttaggtagaactttaacaacattttcttttagaacagcatcaagccatttcccagccacagcagtattaagaacaatcaaatcagccttgagagatgtatctacagctttctgaccctttgcagagataacctgaagtcagataccaaaaataagaacttgtcaattaacagagctcaagacaacatctttccaacaaactctgaagtctattggtaggaactacgagagaacctgaactcctcgatccaacatc

SEQ ID NO: 51519 - DNA, 886 bp, Arabidopsis thaliana landsberg
tcattaaaactgttaacaccataatcaggttgggatttgttgaagaaggtggtatttcaccatatcacaacaactaattaattaaatttatttaacaaaacatgtctctccaaaactgaaaacaccaaaacatgttttcattttatgaatttcaatttaactagttaaaattttgatatcacatgcgctacacatgccacctcaatttgtcctgctcctactgtctattactaaactaaaagttaaaattagcgttgagtttttattgaatttatttactcattagcatttgacttgtatagagagtattaaaataaagaataataataatataatgcggttggcgaacaattgatgttgcggcaaaccggtaggcccaacaacaacacggacattcttgatgtttttctttgacaagcggtaatctcctgcaggtaagaccatcttactttaaatcatctcccaattaaaataaaacacgtgtgaaatatggtcaatttagttcagagaggcctctttattaaaatcttccattaacgtttaaagtgaagaaagcaaagaaatatcgaagaatttaaggaataaaaaataaaaacagaaagctggaggaagaaaaaataaaaattccttctttcctcctgaaggcaaaaaaggaagagaagagaacagaaggaagcagaatctaattttggattataatcggagagagaatctattccgacgaatcttttcgggtagattttttggtctttaatttgaagggtttaggtgtggtttcgaagatgatggtagcgaatagtttcgatctatggcaaaaggatgtttttttctctgcagctgaggaggttcaagaatctgctgatatgtatgtgttatgtgattctct

SEQ ID NO: 51520 - DNA, 331 bp, Arabidopsis thaliana landsberg
  unsure (1)..(331): unsure at all n locations
tgtcattatactatatacacttccgactcagcttcaacgatctagtcatgcgcaatctttaatgcctcacatgttctannnnnnnnnnnnnnnnnnnnnnnnnnnnnnngtcgacagtatgattactacctgctagtaggccagtacgcggtcgtatccactctattgagagctgataacgcactctccatctgagcttgtgagctaatcgacacctggatgagtatggaagattcccgctcgctacttaattaaaggttggatacgcccctgcatgggcgcgccatctattagcccgttcctcaggacattggttatgcatccacagatc

SEQ ID NO: 51521 - DNA, 741 bp, Arabidopsis thaliana landsberg
acggcaaatgttcatcgcgatagatacgaacggtgtcaatctgtgtgtgcaacggctgatcaagttcaccgcgcatatactcataacgtaaaaatccacgcaacgaacccacgacgtgctgcatggtggttcgctgaaactgccccgccaaactccggagatactgatgcaccgttgccagcgtgagcgacttgattactttcgcgttgcggtcgaagccaagaaattttaggaactttgatacatgcctttgataggactcgcaggtgcttttagccgctccacggtccttgcgtagatgttcactaaaacgggccacttcctgttcggaacgggtaagcgttttagggcagccaggcttgatgctgctatgcgcctgtaaaaatgtgataaacccgcgcaacccccaagcgtagcgaggatcacgacggcgcgtcgcaaaacataggtgtgctgcggccaaatcatcggcggtcaactcaacgatggatcgccgcccccgccggcgaaaccatgccgacaaatgtcgaactgcatccagttgaagatagacgctgtgaatcgtgtagccacgaccgaaagcccaagggacaaaatcatcgaggaagcatccaaaaatgggaagctgccgataacgattatgatcccgagggcgaacttgaatgagtgtagtaatagttttcataccggtggccagcatggcttccggcaggcactatcaaaaatgtaaagttccccagt

SEQ ID NO: 51522 - DNA, 895 bp, Arabidopsis thaliana landsberg
ggccaatcctaaagtccctatatatgtcactctcttctctttttctttccaacatcaaagtttaaaacgattggaccattcgttgacttaaaatattagagggtgtgcttgcttttgtgtgtgatttcttctttctttcgccgtgtctttttttcttcccatttgatcgactagtgggaagataaggaaaaatcataagatattatgtcttaccttcaataacgctgaaataataatgtcaagatgatgacaacatacgaagaattaataaatctaaatggtcaaacaaacaccgattccgttaggtaaaaaaagtaatgatgtcaagatgatgacaacatacaaagaatcaataaatctgacttgtacaaacaccgattccgttattaaaaactcacattatattttatttcaattgatatatattcttataaaacgaaggaataccaaaaatgtactctttcgacaaaaaaattgaaattgcgcagaatggtcttgtataataaaacaaaacgaccaagacattttacatgttctccgattataggtgcacgatattgactaactctctagttgcctgagtaaaactaattgtagtatgtgttattttttttggtttatattgcaagttgtttctgtaagttgagatcatgactaactttcattttggtacatatacactgggaatagtcgagtctaagattcaagaatcaggacaacaaatgaattaactctctagaccccagcagaaactgatctttcatgattagtataattaaggatagtctattgctcactaatagtatctagatccttcttccaaatggagatgaactgattagcttcaagacaaatgaaaggacttacccttcacctaagtatttggttgaataca

SEQ ID NO: 51523 - DNA, 853 bp, Arabidopsis thaliana landsberg
taagatgttatgtcattgctcactatgactatatattgacaaaaattaaaaaattaatagcgataactaatatcaattaggtgataggttgcaaaatccaatcaatgcccacctcatgtctccttcatggaaatggatctggcagcagaaaatacaagaaacttagcaattttataaatgcaaaaaatggtggatatccattttgtggttgcaaattagtggacctctttctatctctttaattgttatatttccacgtggatactgttatactcaccacaaattatcgatagtttttaaaaatggaagatatatgtgaaaagtgtaaaacatcatgaacaagtggaataaatgagtgtgattagtataacataattaaagcaaacgcaaaagaattatattggttcaaagatatggattgaacaaataaatttatttttatattttctatgaagtaacagtctcaaatagttactattcagaggctatatttttgtattttagtcaaacaaattaattatttttcacaaaaaaagattgctgttgacaaaaggtaacaatgaattatttttgtcggttatgcaaatgtcatcaaaagataaatacttataagtctgtattttgctatttattagtgttcaccaaaagctacaataatactagacataagacattattgtacggtaccactcatgatatgtataaagcatgagatcattgatgttgtatggtgttggtgttggcgccaaaattgggtttatgtcgcgaatctgaaagggtttggatttggatctgctggtttgactatatatacgtgagagatgatgcatcttcatcaataatcataatggtg

SEQ ID NO: 51524 - DNA, 774 bp, Arabidopsis thaliana landsberg
ttcactgcaaacacggaagggcttatcttttcgacaatgtgtaagtactacttacacggatttgatcatggaaggactcgtgacaaggttcccttatttattagcacacctttttgaattcttagtgtcaatgtgacggttggagagaaggagcatcgcgtcatgataactggttggcacactgtagctgacatcttctgtgttagctgtggctctcttgtcggctggaaatacgtacaagactcaaaactcatacattgtaaacaactttctttgtgatgatttgatgctaattctctttttctccctcaggaaatcgcttacgataagtctcagaaatacaaggaaggaaaattcatcttagaaaggttttcatctttcaatgtttaataaaaactccgcaaaatgattcaaacgatgatcaggtttaaagtggatgttgtgtaaccaatgtgaccaggtttaaggtgcttgggccctatggaggaggatacgacatgaaccagaacgagcctatgactggaagcgatgatgaagaataaaaatatggtatctctgttatttaacgacccattggaaatacttggatagtggccaatgcttcgtatagactatcggtgaccgggaaactcgccgggaaaaaaatcaacattttttcgtgtcagcgttcaaaagaaaccaaatattcatcatataagtaacaaatatagctttaaaactcatattataatgcatatcaagtctgtaatcgtttttcggatactgttttgtgcg

SEQ ID NO: 51525 - DNA, 775 bp, Arabidopsis thaliana landsberg
gaagaacccccaatctactctgcgtgatccaatgggaaactcgaatttaagaacattattcagtaaattgtttgagtttgatggaaagcatgaaaaccattaataaaaggatgagatttagaacatcgccttaacttttgcttgcaaaaaaaaacttagcgagaccataaagcatctatgaaaggttggctacactaaatctagactacagaaatttatgttgtaagattttatcacatcctacgtaccgtctacagatgtatcatggtttgaattgcacgtcgaaatttcattttgttcaaattttagacctaaagtttgtggcattttgagttttattgaaaaaacgtgtgatatttttggaaaacaaaacatgaactgtggtatttatttgagtcaacatttatagtttgcattcggtctttttacctgcgtttactagctgcaaatggcacctgattttaaaacattaaaacaatcgataatgcgctttcatcaatttaagcccaccagccttatacagaacaaacgtatcaatgataaggtctaagtgagaaactgaaatttaagaacgaaaagtaaccaaccttctggttttacagagttaattggccacattattatgaagttacaacttctctgatgacttttatgaaaaaaataagataactcatcccgtcgttagtgctgtacttttggggctatgaaattgctgaatataggtcacctctataacattagtagtagcttcttggagcgaagaaaaagaaaatac

SEQ ID NO: 51526 - DNA, 251 bp, Arabidopsis thaliana landsberg
cggcgggtagtagattgactcatacccagtccctcttcctttttcgacatgctgaactatacaagcgggtgtggggggattcataacaaacttcgcgcaactcatacatcaccacatatcagttacataaacagttatccggacctgagcactctcatccgaactcataactgtcataaacaggctctctgtcatacacatgagaaagctgaaaactgtcaccagaaatagcctgaacactatacaacaag

SEQ ID NO: 51527 - DNA, 610 bp, Arabidopsis thaliana landsberg
gtataaactggcattggagcattccatatgaattaaacatttgactccatcaaattatgtgatgaaagcagaggttgaaaacagttttcatcatcttcatcctgcaggctgtccgctaaataaatgcttcactatgtcagtgcactttaaagaatgaacatgactatgatattagtacatgaatagagtgcccaacatacagaaatacatacgcccaacatgtttgccttaataaatccactgataatgtgcatagaaaataccacacaatgaggcagcccgtaagatacatcagacacaccttatggagctaatgcttgtaagaggcattgtcaacttaacaggcctaaaactccgagcagtgaaattaaatgtccgtgcatatctatagctgctggaaaaaatctggaaatggcaccttggacaacagggtgcattataaagcccaactttcttctgaggcttgagctttgtgttcccaaattctggagctctgattcactaaacgtccacatattaggaaataacatgaccctgcaaacggtgcagaggatacaatcgaagaatatgccaagttctgatcgaattggagtctctatgcagcgtgaaa

SEQ ID NO: 51528 - DNA, 483 bp, Arabidopsis thaliana landsberg
gtcaaagcagatgaaaagtcaaaagagagaaaatgcaaggaggaggagtatttggtttttatatttaaaatttgttacacaacttattatgattgggctttgtttaagtccactagttttagattctaaaacatactttgtcatcagacaatggacccaattcctgggctaaattatgtgggcaaagtaagcggaatcggatatccaaaccgaaccgacccgagaagagatttggaggaaatgcaatgggaacagaagttgatgcgttggagcatataacagaacttgagatatcaccactctctcaccgaataaacaagccactggttgtacaaatgtgtgtattccacaaagtttcgatcggattcggatggctccgttaaatataaggtgggttaggttatacttgggaatcatgagaaggaagatcatgattataacgaataagataacaaagaatattagggacaatgtcccacatcg

SEQ ID NO: 51529 - DNA, 629 bp, Arabidopsis thaliana landsberg
  unsure (1)..(629): unsure at all n locations
ctgctgtggctgctgcttggttgaccaggagaatgatgaactgcttccgttgcatgggaacccagtctccactgccaagaatgcattatggcaatttgggcacagcaggttatgattaagataaattcttaggtactcatactgcatccggcagcggttgcaagatgtccagaatgtatcaaccccaacaggatgagtggtagtctcagctgctgctgcagcagcggcggcggcacagctgcagcagcggcattctttcgagccctcttgtttgccttcttatcataagtatagataccattggttacattgacaacagaatgatttcttctcttctcatcataaaccaccttcctgctagtatctgacaacacactccacgcctcagagatcagtttgaaggcctcctcagcaccaactgatttgttcttgtcagnnnnnnnnnnnnnnnnnngcttcctgtattgcttcttcacctcctcttcatctgcaaaggcgcctagagacaatatccgataccagtcactctctccatcaatcttggactcagctgcaagatgaacttcaagcgttgagacatctgcaatatgcttcaagtgtcgggcagagattctgggccttgagtgcgt

SEQ ID NO: 51530 - DNA, 619 bp, Arabidopsis thaliana landsberg
taatccatcccaatatacaccaatccacatggaattgaaataacccaacaagacctaaagcatgagtggatttaattaatctcaggatgattgatctgcgtctgattatggattctgaatgctaaaacaagtagtttaaacttagatgttgcacacgcccgacgtgcaggagcaatgaaaacgatgagaccattcagaaaatcggaatgcaggtcaccatgatccaaccaaactgctctccaatcatgctttaagaaatcggaaaactcgtgcgacaccgatttcagtggcagaagaagccatggggcagaagccatcgtacctcctgctgctcgtcggcctcctcgccatcgccatgctctgcgccggcccgggtcacgcgctgtgccaactgaacgacgccaacgcggtggcctggagttctccttgggctccaaggcggccacggcgggggccaagaccgagccgctggacccgtccttgagcgacgactacgagaacggtaccagccacgtggagttcgagccagagctcggccgcgcgacggtcgtcccgctgcgacaacgtcaccgtactgcagacatacacatcgaactggatggaaacaatgggtggggga

SEQ ID NO: 51531 - DNA, 568 bp, Arabidopsis thaliana landsberg
  unsure (1)..(568): unsure at all n locations
tgtcttttaagttgtagagtagaaatatactcggccaatatataaaaacataatccactgatacatcaacgggtgtttggtttgagaaatcactccacctaagatgaaatagttagcttatcataagtttattcctcaaatttgttgaaatgacctcattactcgtgaaggggtgtttggtttaagaaatcactccacctaagatgagatagcttatctaagttcattcctcaaatttgttagaatgacctcattactcgtgaaggggtgtttgtttgaggaatcactccacagatggtctatcataagttaattcctcaaatttcttagaatgacatcattactcgtgttagtactaactaactaagaatgaggtgatgacaaatcaattcattctattacacaaacaaaaaaagagtgagaagatgatagctaacctattatccaaaccaaacactctaaaaattaattctcatgctcaactccatgaatctgacctagtcttatatctgagctttggaaagtgatggaatatnacatttcaagccgaatagtctactttattgag

SEQ ID NO: 51532 - DNA, 742 bp, Arabidopsis thaliana landsberg
  unsure (1)..(742): unsure at all n locations
ttatttaaattgattattctcattgtcttctatgcaaaatacatttaactgggctactcagaagccttaaattatctgtatttgttaattttgtatttccgcttctctttttgcatgtatcatgtggagtgtgcatgcatattatcaggaaacgagccacgtcgtaagattaataacatcttgctacctggaatatttgagaatataccttatacctttgattaattgaccacatcatcaaacttggttaagactaaagtttcacatatttggctagttctggaaattgtaataagtagactatttttagttttctacaatctatagtatatgactattagtattcttgttttatactattgaaaatcctataatataaaacaaaaaagataaagaaatgatatccaataagatcattgtggcatggattgcgcgtgtccctgtcctcatcgtttcgttactttgaaaagttctttccaattttaaaaagtttctttttagccccttcacgcggttttcccttagaacgctgccgttttcctaacttttcaaaaaatccaacgaccgtttacttttacgccacgtgttcataatcaatggcccatattgaactgtcatctaactagctgtgtggccaccgtgaactttaccaacctcacccacttatgtctctttgaaaatatttngaattttgtcacataaaaaaaatacaaacaaacttctttttatgattgaaattttg

SEQ ID NO: 51533 - DNA, 490 bp, Arabidopsis thaliana landsberg
  unsure (1)..(490): unsure at all n locations
tgtgttggaccgaaacgggtgacgcataagtttaaacctattttagtatagtatcgcattatactacaacatcacatcaaattatactacagcatcacattatactacaacatgacattaataaagttaaaaattacctgaattgcccacaggagtgacggctggcgaccggtgtgaagctgcgtgcgcgcttcacgtgcggccgnnnnnnnnnnnnnnnnnnnnnnnnnnnnnnnnnnnnnnnnnnnnnnnnnnnnnnnnnnnnnnnnnnnnnnnnnnnnnnnnncgggtaatgcggcggcgggcgcgagcctctggggcaacggcgcggaggttgtggacgacggctgtggtctcggggcgcggaccacagcggcctcggctgctgacgaggtggcctgggctcagcggcgccggctaaggcacgggagcgaggcacttggtgcaaggggcggcctctgcggtgggcggccttggccaaggcggggag

SEQ ID NO: 51534 - DNA, 421 bp, Arabidopsis thaliana landsberg
cagcgccgacccgaccgaggtggcgcgtgcgcctcgcctcgcaccctgcgtgccgtacgcgccgtccacttcctgcgacttcccgcctgccactgatgtcatcggagccgctccatgacttgtatagaactgaaacctgactactgtaggcactatcctccctggaggactggcggccgcagcctgatatgattccgtgaggactacacagcgagagctctggtagcggtatggtcaagtcatgaattcaggggtgcaggcgagcacggtgtacggggggcagtcggagaatcggcgccgcgatcgcgctgcggatcgccttccatggaggcgcggtcgtggtcaactaccggcccgataaggccctcgtcgatgagctcgtcagcgaactccgcgacaacggggctttggagttggcctt

SEQ ID NO: 51535 - DNA, 557 bp, Arabidopsis thaliana landsberg
tgcagttattatcggtgcgaacaaaaaaaactgatattactactagacctatgcagttgttactaagtaacatgttttccgctgatcacggtaattattgatgtaccttccccgaacacatactagcacactaacatatgacagacttcctgactatccatcagtctcactggttaccatacatgtcactggtactattcacacaattatcactgattcgtggttattacgaaacataccttgttgtcctatgcagttattatggtgcgaacaaaaatactgatattattatcagacctatacagttgtcactgactaccattctccatgttataaaggtaatcattgttgtacgtctcgaacacatactaacgctgacatatgatagaattactaactatgtataagtattactgactgacactattaacacaatcattactaattcaaggttgttaccgaaaaaataacgttgctgtcctatgtagttacttcgaatttcttgcattttaggcctttactaggaataaaatcacgtttagatctaaaaaagtttt

SEQ ID NO: 51536 - DNA, 801 bp, Arabidopsis thaliana landsberg
catttacaagatttatctacatatacaccaccaaactcaataacttcaaatttggaattagtaaaattaatataccgtcaagattaggtaacatgaatgaagtagtgaacaagtgattaggcgaataaaaatgtctgaaaaagataaatgatcatatggtccaacatgggtaggccgctggacttggttggaaacagaaggtttgttgacatgggaataagcaggctaatgacagttgcagaggcttgggactttagacggcagaggagacataggactgtgacattgaacttgttggaggaggcgctcgaactaaaacgtcaaacccacaaaacagagccggatgttgtattgtggagaggcaaacacgatgttaacaagcccaagttctctactagagacacttggaaccatattcgcaaagagggcatcacggttacgtggcataacggagtttggtttacatgcaaccccaaaattttctttttgcgtgtggttagcggtcagtaatagactctctactggggaccgtatgttgcagaggaacagtggcgctcttgggacatgtattctctgcaacaacgctctagaatctagagaccatcttttcttttcttgtgtcttttgctctgaagtatgggctgcagtggcaaaaaacatctacaaagagaagtactcaacggattggcattctttttaatctcttcagtttgaggtccatggcgtgattgtatggaaagcttcatagcccgctacgtgtttcagacagtgatttatactatatggcgagacaggaactgc

SEQ ID NO: 51537 - DNA, 447 bp, Arabidopsis thaliana landsberg
agcccggggatctcggagggcggccgatcgctggtgaggactatctgtttgccgccttcatagagggcgttgaaggggtgggggaactcctcctgcatcgcctccttgcccttgaggaagtggacgtcgtctacgaggaggaggtcggtctcgcgaaagcggcggcggaaatcggcggtggtgcggttctggatggccgcgacgagctcgttggtgaactgctcggtgccgatgaaggtgatgcgggtctcgggcttccggaggacgatctcgtgggcgatggcctgcatgagatgggtcttgccgagcccggtgtcgccgtagatgaacagcgggttgtagaccttgcctggcgcctgggcgcaagcgtgggcggcggcggcggcgagctccttcgactttccgatgacgaagtactcaaaggtgtatccatcgctcaatggtggc

SEQ ID NO: 51538 - DNA, 636 bp, Arabidopsis thaliana landsberg
tcctgcaccacctgctgttgccactacgttgcgttcaaaggctattgagttcttggagaagtggaatttgtcttttgggtttcattacaaggagcttagacttgggtttgattaccttaagaataccctcaagttaaagttccctgatttacaggctaatgctgcacggattcaacgagagagacaggagagggagatgaagacaaaagagattttgcggaacaagtttgattccttgagagttagttttggactcttcaagtatgagattgaggtaacgataaaggaaatcaaggagtgtatggaaattgttcagtggagaggggatgatggtgttccacttgcgatcttagatgaggaagattttgaggagatccgttgttctcatctgaggcaaattcgtcttgattcactgaaacaatcagaaaaggttgaagaaactggtgaaaacagaattgtatttgatgtgttgagggaacagtgcaagctaatagtgacaaagcatctgatctcggctcaagatgggatctctcttctcattagggttgacgtaagtgatcacagaacgagagattccatgctgaaggacttgattgatatcaggaataacatattggcagctaaaaagaaatggga

SEQ ID NO: 51539 - DNA, 376 bp, Arabidopsis thaliana landsberg
tgcaggaagaggcagattgcttctaaacccaatacttaaactcaaaagctgatcaagattctcaattatcaaagttctaaagagctttgatctcatgaatagctcgtcgattatgaaaagcgtcagatatcgaacctgtcaaagaaaattatcaccgcgttatttgaccaacaaacctgatcaatcaacattgactagtccttaaaagagcaagtttcaatgaattgaacggatcagaaattgttcaaataatgtgaaaaaaacctgagagtggttatgtctcatgagctccattagggtttgcgaactaagtcggacctccgaatcagaatagcgaacaatggatttgatcgccttgagaagcctcgggtcaacc

SEQ ID NO: 51540 - DNA, 648 bp, Arabidopsis thaliana landsberg
  unsure (1)..(648): unsure at all n locations
agatattttctttntgtaagatcaatttcaatttattaaaacatcaaatagtcttatgtttaccgtttatatatgtttcggttggatttttagaatcttctaagccattgaatttgttcgtcataggcagttcggttggaactttgaatttcagatatacaaaaaaaaatagattaaaaaaaaaagaactaaaatcacanaaaatgtataagaacttattacatattctcaaataaaactggacctttcccttttttttttgtgagtcccatatggaagttgngcttagaaaattaaaagttgaaaaaaactntntaatttaaactaaatatttaaaaacagtctntntatagtttatatatgttccagttagattnttggaatcttctgaatcattgaatttgtaagtaacatttgcggntatgaatttanatatacanaaaaaagtagataagaaaactagagatcacanagaatatataagaatctattacactttcttgtccaatatggatatgggaagttgngcttannaaattaactcttttttagtaaaataaatattnttaaaacagtattttaatacatttaaatttaataattatattaaatataggcatgggtcaataagaaatatgcaaataaaca

SEQ ID NO: 51541 - DNA, 533 bp, Arabidopsis thaliana landsberg
gttccggtgttggcaggaggtcagggtgattcgcttgggctcatggaacgtgtctgtggcgaattggggccgagaaagacttggtcgtcgactgaatttctcgccgaggctctagctccgccgcaccaccgccgcgcgtcgtgggcggatcacctgggagcgtaattggaggtacagctaccactggcacgttcgtatcctctccctttctgtcttgcacaattcgcgtcaggattagggcacccaggggcgctcggctctcacggccagcggcgccgcactaccacggtgtcccgcgccatcggccgcgctcggcttggagaagacgggctccatgaccgtcggatccttgggaaccggatgacattagatcgtaaggataccccttcacttgactaaatcataaccgttgatgtccgatcgggcggtcgcgaggtgattctgctcgcatagaatctcgatcgtgggattcgaatccgatggcatagatcgcgtgctggtcagactcaggcgtatcacaccccgacgcttga

SEQ ID NO: 51542 - DNA, 1606 bp, Arabidopsis thaliana landsberg
tggcaagcacactccggaacgcggcgaacaaatccataaactgcatcatacatacaacaaatccaatggctttgtcattaggatcactaccgtagcaccagttggggcatagtgaaatacaaatgcctttttcttatgtcattgtcttaaacagacatgaccatctctctaatttacgactactttttcctttttgggctttgaatgaatcacgctttcaaataattgggctgcttctttctttcccattttagaccaatttcaaagacaaaaaataaaactagcaattgctaaccgaaactccggtatcccggttaacccgttgtaggtggggctgacgtgggtgcaatcactttgtcatatcaacacatcacgtgtctccacgtaggatgcagcagaaactatttactacattgactaaaatacccttcaccaccaaacaccaccagcacacgaaactttcatacgtttctttcatggcggattcgctctctcgctgaaactctctctctctctcgttactccaaccactcctaattattcacatcattattggcatgaaaagttaatctttcctatataacaattattaatggcgacagtaggatccctgaaacctctgcaccattcctcatgttcatcgagtttccctcggaatccgatcgtaaaccggaaagcccttcttggttttgtgtttgattctgcccggaaaaaccagattcgatgtgagaatttacgttattcatcggaaagcgatgggaagagaagaaatgcggcggcgaagaagaggaatcaatccccggaaagatgtgcggcggagggagtactgaccggaggaggggggtcggaggcgattgcggaggtgaggacgatgatgcctgagaggattaaggtagtgatattgacggcgtgcatgatgtgtctatgtaacgccgacagagttgttatgtccgtcgcggtggttccactcgccgataagcttggctggtcgagttctttcttaggggtagttcaggtattttctaatctcctaattttataggtttttctctttcattatctccgcttattacattcttgatccgcgtatcttgaagaaatcaagattacagaaaaattaatcaagatttcaagatttggtttccttatataaatagctaaatatagcttttcacataattgaatcgttcgtaaattccaaaattgttttttaaaagtgtaaaacacatgaaagaatatccgataatttaaacaaataaaataaaataatgatatataaattagaaaaagagggagtggttgttgaaaaaaagagtaggtgcgttagtttgagcggcaagcgtggagaaggcttgaccttaatgtgaatgtgaaacttattaccaaaccgtttataatgtggccgtgtgggtcacgttaattgtccttttattgagttttgtctggcttcaaagctaaaaattagttacaatctcctgattttggagacattcaattccaatgcaaaggacaaaaccattacataggaatataggatatgatcctaaattttgagtttagatcactgataaaccgaaattcagatttaatctcaaaacaagtaaaa

SEQ ID NO: 51543 - DNA, 570 bp, Arabidopsis thaliana landsberg
ctagaataaacttgttttgaaacagaaatagcgactcaaaaagcattttatgataattattcatgaaaagaaacctttagtgtttaatcgtaatttaaatagtagttacaaaatcaagaggggatgccacatgattcaataacaacgaacaatggacagacaataagataactaatttgactagaaaaataatctgatcggatatttgggtcccattgttaggagaaatagtataactggcgcatataattaatttaatgctgccatctaattatcaaatactgtttgatatttctatcgtaatttcaaggctcacttattatacactcaagagaaaaatatatcattcttcaactaatttggcgttttttttttgtttttttttcgtctatgtgacacagtcattgcaatatatggttcataagctaacagtggattaatgtgattgtttgctttgaataccataaaaaatcactctaacttgttaaaatatttgattaatgaagaacttcgttactaatgaccacagaagtttaggaataaagtataaacgattattacgtaatacaa

SEQ ID NO: 51544 - DNA, 1071 bp, Arabidopsis thaliana landsberg
  unsure (1)..(1071): unsure at all n locations
tagatctacatgtattgagatcagtacgttaccggaaagtgaagccacaaatcggaaagtgcgaaattgaaccgttggagccgcttgaaacttggaaaaggcttgagagttaaggaggagactaaaaaagacttgagtaaacgtaacagagagagaagctaagcgtttttggaggatgtgccgtgaagatgacggagacgaagatgggacttggagaagaaaaaggtaagctgaaagtagtcacgagctgattggtacatttggactcttcttcctctttacttgtatttacgctttctctcatttattttctcttctattggtcaatgatcaacatgaatagtgtatttgacaacatttaaccgaagtaccgaaccaaaccaaattcggttgtaaaatcaaacaaatattggacgtgattactgattagtataatcttgtaccactcacaaaattgatagcaaaaacgatgcaaagagcaatattcttattatttgttttggtgttgcgctctctattcgttatttatttattttgtactgcttttaactacagttttgttcgttcgtcaccgattgatcgtttacaattacaaaagaatatacacagttgattttttggtggcatatctagaatccatagatctatgcgttacttataaagtttatataagctgaccacgactgagtatggtagcgtgattgttaaataactaaacaattatgagataccttttcacttttcacttgcatttttgtggaatatcatcattttaggtgtgggccgattagagaatgacaacattttgataggggaaagcaaaaaaaattggcgcaaccaactcaatctatcattttcaaaccttttattttataataactccagaatggataaataaatacacacaaataccaacttagctcacatattatttcaatcaataattatgctgttattataccangagttttctttgtcttcatatcttctgaaagtttggattttgttacactgaagttatgttataagtatgacatactaaagtatggctacatacataatgcaaaatat

SEQ ID NO: 51545 - DNA, 1088 bp, Arabidopsis thaliana landsberg
tttagattttactataatgtttttggtcgaacttgaactagtcacaaaatatgatctcgttacaaatacttatacaaaagttactttcaacaacaaaaaaaaagttctagtttacttacttttaaaaatgatagtgcacgaactactacgagtggttttcatttttcgcataatttaatttcatagtatgctaattgctaagtaagtaatttatatttgttgttttcttattgtcttctcctacgtaatgagccaaaaggaacgattttacaagaattcttaaggatcttccaaaacttcaaaatcacaaaaactcggttagaatcactgattaccgaaaattgggaaaccaaaccagagaaaaagctaattttgtcaaatctaaaccttgaatccttaacatatccatgcaaccctttgaagtgcctcttggatcattcctgttgttgctatttttgtccctttatgctgcaatcaacattaaacattacatatcacatttcggtttgctcatattccggttgagtaacataaatcaagcttggtttaatgactgtaccttgcaattgacagttaagcagagtaaaccgtctccggttgacgactgaaccgagtgagaatccaagttgagatcactaatcacatccattatctcaagcaatatcccttctctccaagcgcatctaagctcaataaccacctcgttacctaatgaactgatccttaagttatccgttagaccagcataaccgatatcagctggttcatcttctcctacattcacatcactccccttccttttgctgttcatacaattcgctgatgctctttcctcctcatcatccggtttcttcctcttcatcatcgttatccgtgtctctgtatcagcagattctctacaagattccaactcttgaacccgtttctgtaaatcttgaagatactcaattgtatcatcaagaatcgacactttatcaatctgtagaatcagcaagagactcaagcttagaaccttacaagcaccacatttaaacatgtcttcctatgataaagaaataaacataaaacgttcctgaaacacatttgct

SEQ ID NO: 51546 - DNA, 724 bp, Arabidopsis thaliana landsberg
tcgactctagaggatcccctacttgagtttcatcagttagtttctcaagaatagactctactttgctatgaaattcaagcaactctttcatgtcttttgtctggaaactatgtattgaggatttcagttcttcgatcgatgtagcgtatttctgaacatcttcttcgatttgctggaaataacttgacctatgacacaaatgaaagacagtgtcaaactcaagacatatagatttaacttgtggcgcaagtcatctacctctttgtcatctctgcaagtgcatcagccattcctgatcttgcacctttaacaggagatttctctgcaacactattttgccctttacttgcattctgggaattcccttctacgccacggccttcaagcttccctttgagagcccaatagagatttgcgatttgtgctgatcttcttaatttgctagttgctttctttaaggatcttccgctacccggtggtgctgtaggtgccggcatcgacggagcattgtctccatttgtagaatgcgttttcgaaaattgacaaaactctccactttcagatgcttttgacataggaggcggcggtggaggagctggagctttgtgttccggtgatggaggtggtggtggtggttgtgagcaaaaactacattttgtgttgaacgttgagaccgtcggtgacggctttagcggcgatgtaagcggaggaggtggatgcacat

SEQ ID NO: 51547 - DNA, 864 bp, Arabidopsis thaliana landsberg
  unsure (1)..(864): unsure at all n locations
cataacactcaaaaggcacaagaatcataccgtgaggctttcgccgtgtttgtagaaaggtgacaacataacaggcaagagaaacaaagcgaacacncagagtgcacagaactgcataaagaaactcaaatcaagaactcattatatacaaagaccaacataaaaacttgaaagagaggaaccaaccactgcattatgccaaataccggcacagtaaatacgaagagcattaaagcttggaagtgattgcaagacatcattatcaaaagctacaagaccaccaggaaagatagctgcaatgaaaacggcaatgtattccatctgtattccttcactgccgctcaatcagaagaagcctaagaatttcataatctaagagtaaagcttcaaaaggaacccaatttggttcacacgaaaaaggcaagagctttacaaaagaatgaattttgaagaactcacctagcagcagcaagagcgtgaccaagttcatgaactgaaactgtaatgacagtggagacaagtacataggcaatgcctgataatgatacacgctgcaaaatcaaagtaattagctttatttcgaattttcacaagctgagatttttgtttaagtgagcttaccgtggaaggagagaatccaaatacggcggaagtgagacgattggagaataaagggttagagtgaaactgaaggagaaggaagacggtgacgaggatcagagaagcgacgccgaatcctagtccgattgagaaccagactttcaaaactccggagaatcgtcgtcctaaacggaagatgggttcgttgaaattcgagattttgaggtcacaattgcaacacgagggtttcgttttcaaatgttc

SEQ ID NO: 51548 - DNA, 598 bp, Arabidopsis thaliana landsberg
tcaaacatgaatgtataatgcattctaatataccaatcgtaaatatcagtcttgtgctcttctcttttatgcaacagacaagcacacacacgcacacaagtcattttcctaaaatcttgtaaaacatagtaatcaaaaatgtctatgtgagtataaaacatgttacagttacctttattcttgaatcagagagaacttccattttcttttgttttatcaacaaatgcaactactccatttttaaagtcccatatgaatttataataccaatatgcatacaattatgcatacacgagatggaaattacataaatgatacttactaatcaactttcaatatattatccatttggtaacgtttttattttttattgactatgctttaaatgtggtaaacatatacgaatatataatttggtaacataataatagtcttcattcactaccttctcaattttgtgtatttaagaactctcaatttgctttttgttttttatggtctggtcaaagacaacaattggtaaagcatatatataagaaaatttgctgttagaatctttcagttggttaacaaaacggccggtcagacctttaaaaca

SEQ ID NO: 51549 - DNA, 880 bp, Arabidopsis thaliana landsberg
gattgcgatattgaaagtgaaggagacaagcttttgattaaattatcgctttattatattttttttgggattttaacatgactcacatgttcatcattgtttctttctttttcttttaaagttacaataagttaataacctttcactttctttattttcatttgtccatttctttaatttgcgtaaaaggtgaaaggatatatgctataacaatgggattgcttttgcccaacatcttactttgtccactgtgtgaggcataacacgactgttatggattcccaaacacattcattggatccattaagcatataataactggatatttcgaataaattagtaaaattctaacaaattgcaaaatcaaactttttgtatattaaagaccacatttttatcttattttatattttattaatccagaccatcaatgaaacatttagaagaaggaaaaaaattagtatttatataaatataaattacataaaccaaatgtcattcgaagtttcatgggtacataactttgattgaaaacggaatttgactccggaacaggacaaatcttggtgaaaaatatttcaataaagcaattttaggcaatacatgtacattctttttgttgactttatgagtttttttttcttctgtgtgtagttaagtagacttatgaattactgaggccactgatttaaaaaaaacatataaagatagtggatgtggtagtgagctcactatcacattagttttacgtacatgtattattaaacatgccacgcaatcagagaggactgattctatattctcatgatgttaggattagatttgaatgtgtgcgagtgagagcctccatagagatcaacaggacgacatacagagtatt

SEQ ID NO: 51550 - DNA, 896 bp, Arabidopsis thaliana landsberg
atataacaattaaatatatattttatttttttgaataccaaaagtccgtaatttcttaatactctaaatcacaacatgtaatattagttaaatattagttatgactttattatctttaattttcatagactacataagagatcaaatgtatatgtatccgagagcacccgtcgaatcaccattatccaacaatttatttatttttagatttcaaatagaatattgcaacataaattataatattaatctcgtcgggtgtttgatcttaacagagggtggatatcaatccaaaagttcttgattacgaaaaacaaatatcaagcaaaatacatctctaagtatataaatcttttaattattcaattcacagtcaatcttaaacttatcactttattatgttagagttagtctgatttcagatgtaaatacttttcccaaattataatatctttttgaatgaattgcaaaaaccaaattccattcaaaaatcaactattttcaaatctgatcaatatatatgattctgtaatgctatgtgaatgattatacgttcgtaacactataaagagaaatacaagctatttaaaaaatggatacaaaataaacttgaactgaaattggctgcgtttggacatcttagtgttatatggtctgacatgagcgtgcgtaacacatggagacgaaatcttttgtcgggttggtgtcctccaatcttaagtgtccacgtatcaataacatggaagtttgactctttgaccggcaactgtattttgtggaggttcgcgagtcaatatgttcaaagaacaactaatcaaattataaatcttatggacccaaaatccggtcggcaaataatttaccgataaatgtatgagatgatacttctatgaccacaa

SEQ ID NO: 51551 - DNA, 807 bp, Arabidopsis thaliana landsberg
ggctttatatgtggtatgttaaccatgcgattttcttatttcctttttgtgtcatgaaatgtttcttgtgagagttactgaaatttcaaaaacctccttgcttagctctactagttcttaaaattacttccaagccatgaacaagataaaagatattgacatgtatatatgtttcatggtttttatttctgatattctcttcttcgtcataaattcatatgtaaaattctcaggtaggattggcccttgttgtagataatgaaattgtgctaggagtcatgggttgtccaaactggccaggagattcttcagatcgatctactggaaccctaatgctctcgcatataggttgtggaacgtggaccaagaagttgcaaagtgtatctggcaaagtaaccggtgattggacaaggtgttttgttgatgcctgtgttttagtgaacaaagcaaggttttgtatacaagaaagtcaaacctgggaatcacttcctctctctggtttcttcgacgcaagtactgtttcagaggacttaaaacataaagagattcttcttttgcccacatgttgtggaaggtatctctactaaaacaagttgttcattccatcaggagatagtaatgaacaattttatctctttagagaaactatcaccttataatactactctattatgcctgtatgcaaattatgatatttgtgctcagttcagttccctaatctgtgcgtacagattgtgcaagtatctgatggtagcttctggcagagcatcagtttttcttctccgagccaaaactcagcgaacaatg

SEQ ID NO: 51552 - DNA, 813 bp, Arabidopsis thaliana landsberg
aaccatatttgtgaaatgtcaaaattttcttttaaaactcgaagctgagtttcctcatttgtattgattccgagggtatgtctctatagatttacggtatcatgcattttgcaatattaagtaacattaccaatcaatcataatcgaaatgtgaaaaagtattttgtttgcggtcttagccattgtagacaaagaaaaaacattgggttgacctatttacggaggaaaaccggggtcggcgggctgacatttcccaaaatgcgaaccgggtcctactacacaatccgtaagttatagtatttatatatgtctaatcacattgaaaaaaacatatgtttacacaataaaaataaagaagacagtacacaaagatagaaagaaaaagaagaagccatttataacgttaagagtgtagagaaaaagctatgtgtacaaaagcaaaagaaaaagagagacaaaacagatcttaaggaaaagtattttgttatattcacattcatgtttccttcattcttccaatttggacttattgtagtttcccctttatcatcttgataccttatcctcccacttatctttgctttgttcacatcacaattcacatacggcggacaaactctcccgctttgacaatgacacccttatacattatagatattcaggctttgtagaaacaaagaaagagtaaaaaaagttgatattaaactacgaatacaagtcatataactcataatgtctagaaaacgttatctttcttcaatttgaataacaaaaactagacgataaacctctacagtattcgtactgtatatt

SEQ ID NO: 51553 - DNA, 679 bp, Arabidopsis thaliana landsberg
caacaactgttaatttccaatttgtcgccgacttttcgaccttaaatcaccggaatctttctctaggtcgccgtcaagcttctctccggagaatatggttttgtaataaacgatgacaaaacgatccagtaactgcgctatttgcgacaacactaatcgtccttgtatctgtactgcttgcgttaatcataggtttcaccacaaaatctctcataaagtttcgatttttttcgaaaccctcatagttttttcttccttctatagattgattgagtataacactttgttgaagtcactcaaaagtcgaagagattcattattatcaagattcaatgagctattggaatctaaggtttggttttaaagactcatcttttttttgttctgtgaagtatacagtttcatgtttcgttattagggtaaagctgatgatcagaagaattggagattgattcaaaacgagaagatttcgaagttgaagaagaagcttaagagtaataaggagttagttactcaagggaaggttaagattgagagagggtcttctgatcttaaagttaaatatggagatcttgattcagctcgttccactgtacgttaaaaatcgatgctttatgagtcatatgaaatattcaagttttgtttgatagataactatgttcttcttatgcagcttgag

SEQ ID NO: 51554 - DNA, 1253 bp, Arabidopsis thaliana landsberg
cagatcctgccttcgtctgtaagccgatctatttattgtgctctttggtgtctccacattggtgctagtatcacccccagaaagaacgtcagctgcaaatctcaaatccagcaaaatttgtaaaactcctttctctgaaatttggggttcgctggcctccctggcagataagaaatcctcataaataatggtgatctgcattgtacaatggaaggttgaaaaaatcattcttataggcaatcactagcttggaaatgtttactgatgaaagtgaaaaagtatcaataggaaacaaaaattatcaaacagctctgaaaattttgaagagaaaaataaactttttcttgccagaaatatctctgtcgtagatggaaaaaaaaaagaaaagaaggaagtaaccagagacaacgcaccttctccaacaggcttgaagcaaatttttgcaaaatagacctatccagtacgtgacctccaattcgatgaatttcttctgatgcccgacagagaaatgaaatcatatagagtgaaggcaacgatggaagtgatatcttcaactcagattgactctcgtcctgctcttgcttcactattgtctcttcccatccctatatcattcttaaaagatgagcaggacactacaatattaaccttgcatatgactattgaaatgcaagaggaagtataaactatagcataataacttcaaaaaatcagagtagttcagaatcatcttcaccaaaaacaaagaatttcaacataggacataagcaaactaactacctctgtcgatttagtcagctctttctaaaccgatgcaggagagacaactaagcagaacgaaataaaagacaagaaaatacagacaaaggataaaaacatatttagttacccttaaaggagttgtagcagacaatccatcatcactcctaagatcacgcaagagaatagctgaaagctcatcagataaccactttatccacaatgtatgagccttgatgcacagatctcgcatagttctattaagctcttcaaattttggacttgtttcctcttccgctcccagtagtgcagcaacagctaatgaagtctgctttctaagatcggtatgcaattgctttccagggctgtcagcagtggctggagtattcgagccaaatcttggctgcctaacaaggatgacaacttatcagaaactgcagtcatagtttctctacaccacaatcttggagaaccgagaattaagggaacatgtt

SEQ ID NO: 51555 - DNA, 654 bp, Arabidopsis thaliana landsberg
caaactggttcggctccgttatcggtaacataacaagtagagctaaagactcagagactaactccgacgacgtcgtttcagagaacagaatcttaatcaaaatctctgtagcgttatgagctgcgatcaaaacgcgatttttatcagaatcacgagcgaaaccacgtaaacggcggagagcggcggcgcgtgaacgaacagagacgtgggttcctgttatagcagaggcttgactgagaagagcacgaacagaggttggatcagctggttgtttaggagtagggatacgttcgactccattggagcggttacgacgcaccattcttggatgagacgacggagagtgtggttagggatgagtgtgaagtcggagagaggagctcgtgtgactggacatgttgtgttgttaccgatggagacccatgactcgatgctggctcggtcgtaggtttggccggtgcagacggtgactgggtcttgcataagttcgagtgagattggacatctgaaatggtatggtatttggatccaagatccagtggttctatattcctaggcattaagaacttgagaacagagagaaaagaagaagaagaaggtgagattgtttgttgtgacggtaagagtatgaggacgagccttatctgggtatga

SEQ ID NO: 51556 - DNA, 569 bp, Arabidopsis thaliana landsberg
ggtatgtcggaaactatttatatatttgaccagaatatttttattagaaatcatattttattgacaacacataactaatataagtgcttgaatttgaaatactatagaaataaactaaaagatgagaagcgtatagagatttgattaagttcacgaaaagcggtggaaaaagagcggccttggcttgtgaactctaaaaactcaaatcttatcatttatggtttgacaaaaaaaaaaagatagatagatagagaggtgatcagctgatacacgtgtgttttcacgttacttcttttttcgtattttgtggctcctcacccttacgtctaacgcaaaaagaaatagagtatttattacaaaaacaagatatgatttggaatattcaataatctttcttttgagtcaatattgaacttaatttttgttcaaaataagctagggagttgctctagatgccccatttcaaatttgaccgaaaaatttggattgtatgtgtttctatgtagaagatagagaagaactagataactatatatgtaatgatatttatatatcaaatgggatgaaaa

SEQ ID NO: 51557 - DNA, 1049 bp, Arabidopsis thaliana landsberg
  unsure (1)..(1049): unsure at all n locations
tgtgggatctctgaaggagagattgagattgaaattaagatcacttctctgttacgataaaactatccattgtctagtgttcgaaagaagtcgtgaaacacacttgtataacttttgaagaaagtatttacagtaggtaattttgacatccagagaaaaagagtgctaagattttgagctctgtttattgaactcaacagcgtttagtagttcctttgccgtagaggagaaagactttgcagtatcttccatttccgtcgtcctcaagctaattccctgcagagatacatacaaacaggcttttaaccctagaaatgaatcaatcaaagattaggttaaatctaaaaagccatgaaaagtacctgtaactttttcaggttgtcttgaagtttgctctgagccattttggcagctcccatttcctgcaatcacaaatgaagatgaaaccaacgcaaaccgaaactacaagcttgtataaggcttatagaagcttacatcggacgaggtaaacccgtatttcttcttgatctgatcaactgtggcgccgtttttctcctcatgcttctcgtcattggttacaacactcttctcattcttagctgccatctgtttcagcttacctttgaaattactaaacctattcgccatcttctgtttactaagccctgacaatatcccttgttctttaggcttctcttgttgttgttgattaggatgatgatcgtcaatgtcaatgtcatcttcaaaacgtcaaaaagaaaaatatcagagacatacgccaaactcaaatattgcatcacgaaaggacatcaaaagtggaccctacctatgtccaactcttcttcatcttccaccctagtaattgtattgatctctctactattctcaacattgttgttccaggggaaattagctgtagagaagattttagacagctcctcgatcgtttccttggagctntctggttctgtatcagttgtgcgctntgatttagtcttgaaaacagaaccaaacatactctgaaacaaacaagataagataaattagta

SEQ ID NO: 51558 - DNA, 564 bp, Arabidopsis thaliana landsberg
  unsure (1)..(564): unsure at all n locations
tgttcctcttgaagcttttaaccgggaagctgagttcttctccaactgcatatgagattattatatcagaaaaagaaactctcacacgatgaacagacatcaatatgctacagaaagaacttactcgaactggttgatgatttggacccaagttttcaccatggaaccccataatgctggcagtgtcttctttggcaagagtacattgtggtttcttctctgtatttgcttccttgagaatttgtctttcctataaaaatgtaaattttcttccatcagaaaagagttgcatattagagaataaacagctttggtgggttgtattattgtgcatcatacatcggttctaagtcgaaaaggctttggattcgtgagcttgggttttgtatacttgacacgggtaccagccgaaacagtcttgccattgaaacacttgtctgctactgtcataacctggttcatacaaatatacataaatacacagaagatgatagtagagcccacccaattagaaagtacataggcttgtaacataccttttgagtagttntacaaatttctttc

SEQ ID NO: 51559 - DNA, 926 bp, Arabidopsis thaliana landsberg
agcattctcctggttttcaaatacttccgatactgccaagcaatcctcaagctctttccctacagaattgacaaaagtgcacactacccaatttttaactagccaggaaaaaagcaaatagaacgaaggtacagacaagaaagaagcacctgatcagggtcgggcgcagtaggcttatcctctttggatgatgcaggatgcggcaaagtaccaagaaacccttttggatcttttgaaggactagcataaagaagtggttgattgttaacaagcccctgagacatgaaagttgttaacagatccatatgatgcggtgcttcaggatcttggattaccattactaagctccccataggatgcccaccacctagtatccctggaaaaataataaaagacaaaccttttagccccaaaaccagactctcttatcctcatgagacttgatgtgtaaataaaaaggagaaagctcactgtcaagatcacgaatcccagacgatataaaagctgtgccattaggaccacttttgagaccaggaatttgaggcgatgacacaactgatatgttgcgagagaagctgctaatactacgaacgtttggtgcagccataaccgaattaagtaatcacacttcacacaagcaactcagcttcaggttcaaaatctagaaaaccccaaaccaaaaaaaacaaacaatcaataagccgttactatattcctctatactcataaagtcataatgaattcacaacattctattcattcagacatttcatcgaacaactatcacgcagctgaaactaacaatatagctaaagatgcatattgatgggaaacctagaggctataaatcaaatattaccagctattttataagtaacagataagagaaactcaaaggcttcgtctatactgaatcttttctcgta

SEQ ID NO: 51560 - DNA, 502 bp, Arabidopsis thaliana landsberg
ctcgattagagaccttagaagtttgtttcatcaagtctcaccagtccccaactttacatgtggctttatttttgagaaagaaaagagatgatttacgtttgtataactattatcaattgctgtttttggacatgaaactgtagataatttgccaaaaggccaaaaacacttgtaaggaaaataagtcttatctatattatatatctaagccttgttcttctcaagatattacatgttaatgaagatttatttgagctttgaaggatgtgaagttggaagagaaagaaaaagaagaagagaagcaagatatgagcaacgaagaagatgaagaagaagaagaagaagagaagcatgatatgagtgaagaagatgataaagaagaagaagacgaacaagaagaagaagagaagaccaagaagaagaagagaggacctggatgtttctcatgggtgagatcaagacaaagacaagccagaaaatcaaagtatttcttccctatttg

SEQ ID NO: 51561 - DNA, 743 bp, Arabidopsis thaliana landsberg
  unsure (1)..(743): unsure at all n locations
aaaaatacaaatgtgttacagttcagatatacgtattggggccgatagcactagaagtgtggattagaataggtacttcatcaaatcatcaaagtatataaaaaaaatgtcaatgacaaaaactacaaatacagcactgtcttgaagagtcaatagtgagttggtcaaatgtgttgaccagaaaccacaatactcagttctcagaaatgttcgaagaactatatattatgaacaatattaacaattttataagaagcgacaaatggtgataacatcaagcatgatcctataggaagactttgactttgatgatttcctgtctcttcggttctctcgatcgtttactggtcaatgcatctttatatatactgttttaaatcatctatgtttattttttattttcaagcaactttcagaaatgtacgcaggatagttgcatatatggaagcttttcatttggagaatatatatgatgatgatttatcaggattgatcatgaatttcttattacctgctgtcaaaaatgttgataagaaatttcattcttgagtaagaatttaagcatcacacttgatcaccaatgtttgtgatttttcttcttttgatatacatgaagttattttgtatttaaaacaatatttttgaagtgtaatttaaagatttcgtaaantacaggggacaacaaaattatacatatattattatttgccacatttgttgatgtacatataatacatttttat

SEQ ID NO: 51562 - DNA, 841 bp, Arabidopsis thaliana landsberg
tatattgaaaacatttttacagccacatacgttaaattttttaaaattctaaaagtaaaattaaactcctcgtcgggaaagcttcaatttgacatattatttgttaaaattttacaaacttgacagtaactaaaaaggttacattgcgtattttcttgatttggtatgattaatttaattttttttggaaatagaaaataaagctgcaaaagttgaatgattaagttcataaattgaggcaatggaaaaaaaaagtgaaccaacatctatcgtggagaaaataaaaataatttgggccttaagtgagtaactaaaattgggcttatagaaaaccctaaaacgcagagtgacaaagtattcatcatcttcgtttcgtgaaactcaccggaggactcgttactcgtcggcggaaaactaaaactacacacaccattctctcatgggttcagtgaagagaaaatcagtggaggaatcttctgattctactccgccgcaaaaggttcagagagaagacgattccacccaaatcatcaacgaagagctagttggttgcgttcacgatgtttccttccctgaaaattacgttcctcttgctccctcgttcacaataaaccaccagctaaagatttcccctttacacttgactccttccaatctgaagctatcaagtgtctcgataatggcgagtcagtcatggtaagcttttactctggcttcaattgattttggtcactgaatttctaatctgtcctattgaattggtgaatcaatttgtaaagattacatattttggttcaagctgtgaacctttctagttttgtgagaaaactgaagagtatgg

SEQ ID NO: 51563 - DNA, 699 bp, Arabidopsis thaliana landsberg
gcatatccaggtgtctatggagctgcacctcctgtgagttatttcaacatcttcttaactctaatcttgattcatacgtttgggggacgctcttaattcttttcctgtattctgatgatcgttcttattgccacgcttttcacagctatcgcaagtaccataccctggtggtatgaaacccaatatgcccgaggcaccagctccgccaaataatattctctttgtccaaaaccttcctcacgagacaactccaatggtgcttcagatgttgttctgccagtaccaaggatttaaggaagttagaatgattgaagccaaaccgggaatcgcctttgtggagtttgctgatgagatgcagtcgacggtcgcaatgcagggacttcaaggtttcaagattcagcaaaaccagatgctcatcacgtatgccaagaaatagacaatttcgttttatttgtgtttcgatgagatatgtttgtatctgtcaatgttacttcttccatggtttgcgcaagaaggaaacttgtctttcttgtgtgtttgttgtagaattgcttagaatattacacaatcatctaacttacaattttttcatccagacaataagcgtctcgatttgggggttgtctatctaatattttcgtcacctttcttccacttatggataagccttcttcttccatattttgatcagataaactg

SEQ ID NO: 51564 - DNA, 637 bp, Arabidopsis thaliana landsberg
cttaaactgctagataaaagacatatctacttcttatcctatttttgcaattaagtgttagtctttgtgttttccatctttttgtcaacgacacttgtcaaaagtttcagtctgtggaatcaaaatttttaaatgagaccacttagttttacttttctttcatgattcgaccactatactttctaagaatatttattttaatcaaaattagataatgtttacaggattgacccaaattagattcgtaaagaatcgtcagctatgaggtcaaataaaagcagagaaaacgacacgtgtcaggatcttggagattcctgaagtgaggtccaccctaaaatccatttaaggttttctaagcaaatcaacaaaggaaggaaggatcctaccaaaagctcccaaaatctgagtccgcttttcaaaggtgtctcctttatgaaccccacttgatcccttcttctactataaaaacatcttcttctcagatcaatcccatcaaatctcgggtcttgctctgatcctatctttatgattcttttagaggttaactgaattccgtgtgtttaattatggaaacggacgatcacaacggtgatgttttagcgccgccgaccaattttttgaagggtgaagatggaat

SEQ ID NO: 51565 - DNA, 500 bp, Arabidopsis thaliana landsberg
  unsure (1)..(500): unsure at all n locations
gggagagcctagcccgtcactttacattcaagcgatgaggaatgagggagtagtagaggaaccgttttatacaaacgcaatgttgccgacacaagggggtggagaaaatggagatttacaatagctgagacatgaactaaccggtctgaaccgattttaacaacgatgctcgctctcgctttctcaagaatctgtggatgggacagcaaatgtgacattgccnnnnnnnnnnnnnnnnnnnnnntatctgtccccgcaagaaccaaagcctgtgaatatatatctccaataagtaaactgactccacatataaggaggataatatcagttaataagaacttacgagtatgacccctttgatgatgatatcagtataggactcgggttcgggttcttggaaagaaagcaaatgatcgatcaaagtatgaccctttattgtctctgaccgtattatcaaccagtttttgcagaatttatcgagacgattccccaagaatttg

SEQ ID NO: 51566 - DNA, 587 bp, Arabidopsis thaliana landsberg
atctatcgagcgattccccaagattttgtctggtctcaaagtttggacccaatttatggcggaagataatcagccaaatttccagaaccggcgccggccattatctccgctataagttccctcacgagcttggcttcatcattgtcttctgtaccgctaccgtagtatcgctttccggctaccatcatgatgatgttgttgaatgccaagttggttagtaacgatttcaactccacttcaacaaatccctgtgggacgattactagtcaagtttattacattgtgtaatttttagtagatctatgtaatatctatatcaaaggtgtatggttcagttgcatctattattttattttctgtcgtgacaaatttgatgcatacaagtaacctaacagataaatataatcttttccggccaatgaacgacaaataattaaatatgcgtgttgacaaataatggaaaatcctactcacatggacaaattcaaccgcaaatccgcaatagtcgatatataaaagtttgatttcctttttttttctttggtaaattttattgatttacgtaatagtaataccaaagaaaataa

SEQ ID NO: 51567 - DNA, 528 bp, Arabidopsis thaliana landsberg
ggcaacaccacacgttcacaggaactaggggagacccagtggtatgttatcttgcgccgcttgatgcttcaggtcaatgacatgctctgggtggagcatttggaggtcatgcagcatacccgttcaagcgtgagcctccgggcctacggccagcaggatcctttgatcgaataccgaaaggagggaatccgactcttcaaggagatgcaggaggcattctatcgccgcgtcgcagaactcataccgaatatccggctcgaagcagtggaaaaagaggagacgaagataaagaaggtgcaagagcacctcacgctcgcgggaggttcagaggaggcacgaaccgccccgcgctccgcaccggtagagaagggggtacagatcggccgcaatgagatggtaacgatcacggacggtacaaagactgagaccatgaaatacaagaaagcagagcctttgatccagagggtacgtggaccatcgtcgagacgaagtagtacacgaacgttcagagacgaagagacacagccg

SEQ ID NO: 51568 - DNA, 1641 bp, Arabidopsis thaliana landsberg
gtggcatctgcttcataacttctggcatgtcattcaagctgcaatccattcaatcagcaaagcacgttaagatttgagttgatacactataatagctcgaaaactttgttggaaaagaatggcatttcccaaagtgagtcaatgacatcgaaatgatctatagatatatgggaaaatgtattactcgttcaagattgcaaggatattgtctcgagctttgcacaagatattgacattctcatgtagctgcaatgggaaagaatctttcataagtacacaattggatagaactaacgtaaacttaagctgatatagtacaaaatcaatcataaaaccactggattgctcaaaagccaacagcacaaggcagagaatcaaatcaagtccaaaaaactcagcgaattatacaaaacttacaagatgaaaagtggaagttgaattcacctggaaagctgagaaatttgttgaaagttgattgaacatttgagcattttgctcgagaagatctccactcacaccaccaatagctgcaataaagccgaaacacttatgctccttctaatccaatctagaagatttagcctttaaatggaaaaagcctagaatcttagacaaacctttatatgaaataccatcatcagtatcgataggcatcataggcggagcataagaaggaccattaggatgaacattcaaatgagatgaggacttggctgaagaatctgtagctttttcctgctaaacagatatgtgaaagacaatcaatcagtttttgtagacttacaaatggatccacaagacaacacaagaactttcatccgtccaaactcacaagtaaatgactaaaggttcaagctagttacacattagaattcaatcaagctgatttatggtttgtacttcaaatatctttcttagccttgctagtatcgaaattgctaagtagcagcaaataggattgaaatccacatactttcttatctttgcttttcctcgaggaatgatcttctttcctacgctttccgttttcctttttctgcaatccatcagcaaccacatggaggtgaaaaaccgtcagttgattcttactaatcaataaagccaatacacgaagaaggttaatcaagaacaacaaaaaagtcgccggattaagcaaaatcaagaaacttacagtcattcatctacagcgcagggcaacatctcgaacagtcttatctttcattttcatagcaatcttcgcatatcgaaaaaccgacggttctgtcgcgtacctatataaagattaattactaaaagagtgataggatttaacaaggctcctacaaaaatttacaaccagtcattacagataagtagacaactcatcctctaattaaatcctaaaattttcacattgctctaacactaatgagcctatcataaaattgataccccactagctagctagccatttttctaggatcttatttattaccatacttgaaaccacatccaaaactcacaatcagctaatcaaaaaccactggtttctcttctgacatataatttaaaaaaacccgaccaaagctaacaattctcaacacatattccaattaaagctacatgatgcttgaaaggccatggaaaataacatattgcaga

SEQ ID NO: 51569 - DNA, 816 bp, Arabidopsis thaliana landsberg
atacataattttgttagctaatttatcagagtataatcactcatctctcatgtgctttttattttattttttagtggtcattttgtttagttatatttcattactttaaaattccaagaattttttggatgcagcacaaacacgatcttaatttacaaatgaacgtgtaattgtgtaaagtaactcaaaatatagaaagcttctcttctcagatttgattcgtgggaaattcaccattttagctccaaaaagcttagtgaatcctccaattactcaaaactagatctatctttattggtctttttaaaagcttttttgtcctgatatgaatatgtatatatatatcaaccatcatcaacgtacacaagtaacgcaactagaggacacaccgtacacattttgttctcgtaatataattttaattctatatatattttttacaaaatcacagacaagtagatgatcactagggcactaaccttattaaaaaacagtagatgatcactaacaaataaataaacgacattataaaatgagatggtggggatttgatctcgtgtgagtgttaccgaataggatcaaaactttgtcccacttggccagcacacgtgtggtggcatagttgtcttcatcttcaaagttcaaacatgctaagcatgtaagctacgacaacacatattcagataataacataatttcaggcctttcttcgatagatcatattttcagattcaaaatcaaccatagataataatatctgcgtaacgaattacacgctaaaataccataataggtttggcactactgttttttttt

SEQ ID NO: 51570 - DNA, 572 bp, Arabidopsis thaliana landsberg
atctctctttatataaaattgatattatctacaacaacccacacttctgccacaactaaataccaattatggtgacattggtgagaatgtagcaacggttgtggttgtggtggtgatggtggtggtgacataaccctggtgtaattttttttttgtctttaactcaaaacatattcactattctttgaatttagaatatgatacggttgcgacactaatacaaatatgtaagttacataatcccattttctagtagtacattatgttgcattaagatttcaagtttttgtattatgtccaaggttagtttgtagtatctatcatattaaggggtattttgcattttcttgtatctatccttcttgaattattttgtacttctaaagatttcaacttataggcacccacttgttttcttacctaaaaaggaatattaatatcaatatcggttagttatagcgtgtatgaataaacataaagaaatttttgacaagacgttgtactcaatgatttatatttcaatttgtatgagagtaatatgtatagcataaaggtcaaattttgaaaagatg

SEQ ID NO: 51571 - DNA, 626 bp, Arabidopsis thaliana landsberg
  unsure (1)..(626): unsure at all n locations
gggtttcatnnnnnnnnnnnnnnnnnnnnnnnnnnnnnnnnnnnnnnnngaaaaaatcatctggtccatttgtagctttctatgatgattatcgtggaccagcacgtcatcctcctagacataatttataatcacgacaacaacaatatataatttgtaatattttgtagaatattatttttagtttgtctgattagttttatgcttaagcttcggtaatctttttagttgtttgtacaaagaacactttctttctcctttataaaaaagaactttattttagattctaaaatgtttggtaaaagtattgaacatgtcttcattctagatatgttttggctttactgcaggagagcataagcagaccaatatattggcagatcatgacaccactaaggtttgtcttgtaatccttcttcaagacttatagatttagtctctttgttatcttatctatatatcttgttcaaaaagtttcttatatatataaatttatatacagaatacattttgtaagaagatgatgatcatcgtcaatgatcttaccagcgtaccgacacttgaaccatctacttcaacgaatgatatggagaactggccgcttgtgcgtgatgataccgatcata

SEQ ID NO: 51572 - DNA, 597 bp, Arabidopsis thaliana landsberg
gcaacgagcatgggaacggctttaacccccagactctgagccagtcggggctgggcgtcgatatcgaccggaccaacaaccacttacccgcggcctcatcggtaacccggcgcaggagcgactccatctctttggcgccgtgggcctgaggcgtggtgaattccaccagcactggatgttgcaccgacttttggagtagcgagttgaagttttcttcggtgccctcgaccacccaggtcctggcagttgccgaaccgacgtgggcagccggtccaacaggagagtcagcggaactggctgcggccgccagccccgacagatcgacggcatcgtgacgatgaatcgagtcagaagacatgtcatccattcaaccagatgcaccgaccgagcctcgccgagatggctgacgatcatgaccgagaaccacgttaacgaggttgttcccggcagtaatctgttgtggcgcaccagtcggtgagagaatggccgcatggtcatgaacgtgctgggaaactgcccaggaatccgactcatcgatgtcgatgccgtgttgtcggcctacacgacatctccccgatccttcgaacctgatcagat

SEQ ID NO: 51573 - DNA, 1023 bp, Arabidopsis thaliana landsberg
ttttatcaacaaaaaaatttaaaattattataattgggttgatcacccatactgaacaaatttaacaatttctattgtaaatttgtaatccacttctctttttaataaatctttaaagaaacttgcaaaagaaaacataaatggaaaagaactaacaaaaaataaggagtaattcgtaagatagatgtgtattgattcgaggcttcttctaagttgttctaaagttgtcatccacaaacatttaaaagtaaaaaaacaaaaaaccataaaactcaaaacacctccactcatcagcgcttttttaatgcatgtggctctcaaatgaagacatctcgtgttcctttgattcttcacaattcacacttcaccctttacaccactaatcttcgccacgtaaaaatttctcaagcatgttacgtaggcccaactttaccattttttttgttcttatatatattttacgtattatttgttatcctaaaatgactttcaatccatctttgctagtcttaatctcgatttcgtgatacaaattaattcctttgatcaaatgaatacaaatgatcaaattaattcatctttgatcatagatgaattagtttgttctatggatcaaaaccacagatcaaactctatcatacaaaaatcgttgtgatattcttttaaaaactcacaactgtaaacatttgaaatgacaaaaaatatttgtctaactacaagcttcttggctatctatctatcctgttttttagataaaaattcgtaatacctttcatttttttaatccaggtttaataatttttcaaatatatattctatattctttttaattaccattagcaaataacaagtaatatatcgaattgccaatgatgtgaagtaaaaatgtaaaattagtggttggatttatttatttatttttatttagagaaaaagacatttaactcgaattatgtaaaatatggaacgcttacagtggttgataaaatcataaaattaggttcttttcctagtaaccatgtt

SEQ ID NO: 51574 - DNA, 986 bp, Arabidopsis thaliana landsberg
tgcatcatatataagatactactactcaaaaatgtgaatataaatgtgggaaaggtaaaaaatagtggaattacgttttcaaaacgtaaaacggtgactatgtggttccatgacttccatctgaccgggatcattaatagagaagctgatcatttgtgatcccttgaattgactcccggtagcttagcgactatacgatgagaaatcttcacattggtattaacattcttaagctgagaagccctactcttaatatgatctttactcttcaaacccttcttagctttcctttcttcaatcatgttcatgttgccgatcattgcatcattatctaaaagaagagaaaattcaaaagcagaagtcattgtttttgacatatttgagttcaacattgtgtgacactatagctaaagcacatggaaacagtccaggaaatgaaaacgtttgagatgaaaagcagctaaaaacccataccgggacttgatacaacagcgcgtggacgtagggttggactggctttggtttttggttttacttcaatgtcagctcctctaataggcttattcatttctttggattcactttgagacatgaggacacttggtatgtaaatcttaggaatcttagccacggatatttggaaatcatcttcttggccattatctgtccaaacgagaaagagagaacatcagaatagattctcttgaaaatttgcattcgatttaattggcaacaacaaagaacccatatatgatctctatcaaaaaccaagtcaatgttgctaattcctgaacatatagctaacacagagtcaaccctaaatgatagctcaacaatgtaaatgagagtcaaactcaaaggaaaagaatgagaatgagagagaaattaccagagacacgagtttggagatagtctgagttcagacaagaacccctctgcttgtatttaccagcattattgtcaattttcactttcgggttcactac

SEQ ID NO: 51575 - DNA, 942 bp, Arabidopsis thaliana landsberg
ggaaacacactctcatctgctatgcagttctatattccaacatttgtgccagcttataattcttaggaaatgagtagaaaaagaaccttgggtgatttgctgtgttataaagtagttatatgcttaatagcattctatgcttttgtgtgtattgccaaatataccaatgtgtagtccggtatttatcgtttatatgggtatagtatagtattctcattaacggtatagtttgcttaacagtatcgacatggctgtcatatattattatgtctaaatgatctcaaatttcaagtttctgaattagctaattttctaaactgtttggagttagctatttgtgattagtttcatccctattgtagcataagctgtttcttctttattattcatctttggtatcaatatgatttatggaaggaatgttgtcatgtgtgtggttaatggatttactagcaactaatgatagatatttgcagaagagaatatagctgctccattattttgatatctgagctaaatacatgattttgtattactttagcccttaggagcctaatcataagactgatcttcacttttaggcagttagatgtaacatgtgagtagtgaaacatacagctcatacaattattttaagtccgcagacagaaaccttcctgtaatcttgtttaacaggtagtgatagggtcacattcattcaaacgttatggaatctttcaaatgatctaagcttcattgtgatatacaagctaaccttccttcctcactttcttaaactttgagggacttacaattgcgacctctgaaatctatttgtagtgtggtcaagagcttggggagaccctactgaatctgtcttgggcttgggaacaagctgacacattaactttttcgtagtttagtggagaaacttcccgaactggaaattttattaacagatgg

SEQ ID NO: 51576 - DNA, 705 bp, Arabidopsis thaliana landsberg
  unsure (1)..(705): unsure at all n locations
cccccccccttcccccctccgccccncccccccccccccccccccccccccccccctaatccccggcccccacccggcggcccttcccccccaccccccccccccccccccccccccccaccccccccccacccctcttctccccccccccctgttttacacgcgccccccaaacccccccccncntnncccccccccccnccgccccccccccctcctcccccccccccccctccccctccctcccccccccctcccccccccccccccccctccccccccccccnctttccccccccccccccctcgcccccccccccccccctcccgcccccccccccctttttttttctcncnccccccgggttgttgcgccncaccccccncacctgggcgccccccgccccacacccacaccacccccnnccccaccccccccgccccccccccccccccgcccccgtcctccctcctttctctctccccccccccccccctcccccccccacctccctccctgtcccccccccccctctccctccccccccccccccccccccgcctctcctctcccccccccccctctactcccgccccccccccctctccgccccccccccccccccccccccccctccctccccgcccccccaccccccccccccccaacccccccccccccctcctcccccccccccccccccc

SEQ ID NO: 51577 - DNA, 678 bp, Arabidopsis thaliana landsberg
  unsure (1)..(678): unsure at all n locations
nnnnnnnnnnnnnnnnnnnnnnnnnnnnnnnnnnnnnnnnnnnnnnnnnnnnnnnnnnnnnnnnnnnnnnnnnnnnnnnnnnnnnnnnnnnnnnnnnnnnnnnnnnnnnnnnnnnnnnnnnnnnnnnnnnnnnnnnnnnnnnnnnnnnnnnnnnnnnnnnnnnnnnnnnnnnnnnnnnnnnnnnnnnnnnnnnnnnnnnnnnnnnnnnnnnnnnnnnnnnnnnnnnnnnnnnnnnnnnnnnnnnnnnnnnnnnnnnnnnnnnnnnnnnnnnnnnnnnnnnnnnnnnnnnnnnnnnnnnnnnnnnnnnnnnnnnnnnnnnnnnnnnnnnnnnnnnnnnnnnnnnnnnnnnnnnnnnnnnnnnnnnnnnnnnnnnnnnnnnnnnnnnnnnnnnnnnnnnnnnnnnnnnnnnnnnnnnnnnnnnnnnnnnnnnnnnnnnnnnnnnnnnnnnnnnnnnnnnnnnnnnnnnnnnnnnnnnnnnnnnnnnnnnnnnnnnnnnnnnnnnnnnnnnnnnnnnnnnnnnnnnnnnnnnnnnnnnnnnnnnnnnnnnnnnnnnnnnnnnnnnnnnnnnnnnnnnnnnnnnnnnnnctgctttgactgagggcaattcgtcgcccgaggaactttgcagctcgttactttgggagctacgccatagaatgctactgagatgccttgccg

SEQ ID NO: 51578 - DNA, 743 bp, Arabidopsis thaliana landsberg
gtctggtataactcacactgcaatgaaatcaggtcacaatgtttttgataggaaacgttttctttttccattgtcccttcaatgaattctcatcttaatttcatctatatcttacaggaatgttagcagcagaggctgcatttggtgcacttcatgaaggcttaaacatgaacacgtactgggacaacttgagggattcatgggtgtggaaggagctctacgcagctcgaaactatcgtcctgttcgtaatatcatgaacatacatcagcttatatggttttctatctgattaatctttcctggaagataggatcttaatctcatattcttgcaggcattcgagtatgggctacttcctggcttggccattagtgctatggaacagtaagacccggaattgattctattatttttgctgggttctgtatgatcgtttctctttgctataagtgaactattgatgtttgattacgcagctatgtactgaaaggaaaagtccctttcacgctcaagcatgggaaagcagaccacgaagcaacagatgtaagtatacacgcagtgcgaataaattttttcagatataatcagatcaaaaccatccactgtacactaaagtctagctacatttttatgcagcttgcttcgaaatggacaccgattgtgttttctaagccggatggtgtttgtcgtttgtgggccacctttttttcaggtttggccacggataactacagatttttaa

SEQ ID NO: 51579 - DNA, 888 bp, Arabidopsis thaliana landsberg
tgtttattgagatgattcataaaggaaatgagtttgattcaaccacgcttttacttgcagcttcggcgttatctagtctacatctttcgagaaaatgttcaatgcttcattgtttagcaatagagactggtttggttggggattctagtttgtgcaatgcattgatgaatctatatgcaaaaggcgagaacttgagctccgcagagtgtgtgttcacgcatatggagcatcgagacattgtttcttggaacacgatcatgactaaatgtcttgcaaatggtcatcccaggaaatcgttgcaatatttcaagtcgatgactggttcaggacaagaagctgatactgtgactttttcatgcgttatctcagcttgctcttctattgaagaacttactttgggtgaatcactccacgggttggttataaaatcaggttatagtccagaagctcatgtctctgtggccaactcgatcatttcgatgtactcaaaatgcggggacacggaggctgcggaaactgtgtttgaagaattagtgtgcagggatgttatttcttcgaatgcaatccttaatgggtttgctgcaaatggaatgtttgaagaagcatttggtattttgaaccaaatgcaatcggtggataagattcagcctgatatcgccactgtggtttcaatagcttccatatgtggtgatttaagtttttcacgagagggaagagcagttcatggttatacggatcgcatggagatgcaattcagagcattagaggtaataaacagcgttattgatatgtatggtaaatgtggcttaacaactcaggctgagttgttgttcaagacaacaacacatcgagacttggtttcgtggaactcgatgatatctgctttct

SEQ ID NO: 51580 - DNA, 778 bp, Arabidopsis thaliana landsberg
ggtcaaaacttttagaagattttagtggtagaaggaacaacatcttaagttaccaagggtctgcattgcagtttaagataactagagagtagcttgttaaatatcagctaaaatttgatttaaaaaaaaaatataggtcaagttcatgcgtatggactgagatttgaatacgattatgttgcctagcagttgcagcaacttcatccacaagcaccgtccgtgtactctacactacgcgagtggaattgaaaccatttattacttgttttcgtatggatgtaatacacaagaatctcattcaatgtaatgcattcttatgactatatatgattttctaattttctaatttcattggaaatcttctcctttttttctttcttccacaatacataattggaaaagcatttcaaaggaacttaaccggaaaggatacgaattggatagcaccgaaagtgttatagttatttagacttgaaataaattaaatatctaaaataacaaatataaactaattctttagttggtatggtgctttttaacagtttgaattttttttgaacttttgttgcattgaagtttaatcaaatatcaaaaaaaaaaattatcaactgaaaaaaaaataaaaatatttggaacaaagcccgaaataaaaaggaaagaaatcactccatcgtgtgtcacacgcaaaagaatagcttacttctttttttatttacttcaccgtcaggagcaaaaaaaaaaaaaacaaatcacgtaaacctaattatctcttctccgt

SEQ ID NO: 51581 - DNA, 875 bp, Arabidopsis thaliana landsberg
ttgggttaagcctctccgcattttctttcagctcaaacccaagaacctcatcgccgattatttcttcattcttactctatcccgcgccgattaatctctctcaggtaaactacttcaattttactcatagaccaattgtacagagattgctaaatcctatgttgttctcattagattgttcaagggtttatgattattcaggatttcaaatctgaattgttggacaaataaaccctaatttcgtgtaatttgcatatcattagaaccgtccgagatgaggaagctcaagtatcacgagaagaagcttataaagaaagtaaatttcttagaatggaaaagagaaggtaaccatcgggaaaacgagattacgtatcgataccacatgggctctcgtgatgattacaaaaagttggtacctttttttttgctcttgaagctctgttctacttattcttcttcttttggttcgagtgttttgtgatgaacaatgcgtttttctgattcttgagaatgtttttcttttgcgcaggtattcaggattgtgtaggatggtgcagaaactgacgaatataatgaaacaaatggatcctgcagatccttttcgtattcagatgactgatatgcttttggagaagctgtgagttttttttatataccaatttgttcaagtatagagcttattacaagcaatggttctttgttttctctagatttaggtcgtagaacatgagacttgatcattgtctgcagtttttacatcgatcttgcctttttttatctctaataatttaactccgagaggtcgtcttagagacctctggttgtttttcttgttaaccacttttagagataattgaaattgggggttattatac

SEQ ID NO: 51582 - DNA, 629 bp, Arabidopsis thaliana landsberg
attgaacaagcgaatattagaaaaagtaaaccatgttaaaatttaattacttctaattaggactgtcaaatttttactacagtaatctttggaaaattacaaatgtcaaaattttataaaataatgtatataattttaagtaataagataattaaagagaaaatatcttaaaataccatttttaaaattaaaaaaatcttaaaataccataaaagaaaaattgttctccaagaataccaccacttgttgtccaagaataggttttaacgaaactatttcctaaaacttaaaagccgacataactaaagggtttaagaggaggggttttaagcttcccacttgtgttcttgactctcaaacctaacttcatctttgaaaatcaaacaactatgtcttctatgaatgcgaatgctgagaattctgagagcaaaccaaaaagcggtaacgaccctttggatcatcaaggaggagattcatctgctgcttcggaagatccgaacaaatccaaaacagtaagttctgatgatgatttgagtgagactaacaaggagaaagaggaagaagattgtgaagagtgttggcttagtcggtatttgaaaaaaggtgattgcaaagatgcattcatagaa

SEQ ID NO: 51583 - DNA, 464 bp, Arabidopsis thaliana landsberg
tgtgcatcgtcgatgttgcacatatttcaaattccctctcccatgaacatgtggtttcatgtatgtacaaatatgcaatgatgctgcatgctcaccgctaccactgcaattatattttttctattctgttttgtaaaatcatactgatctggttggtgctgggctagaccctgtctagccaggtgaccgatcccagcaagctgccaaagtggaactaggacgactccagctccagccaggccccagatgaggacagtgagtgtcatggcacgccaagcttggatgcagtcgtatgaatcgatttaccagcaacctacaggctatctcagaggagccattcaggacgggcaacaccatccgtgtagagctccatcttcgatcatcgcaagcggcatgttgcatatgtttattgatacagttcattgatccatgtcacatcaggtcacatctaaacaggtgtgtta

SEQ ID NO: 51584 - DNA, 649 bp, Arabidopsis thaliana landsberg
tctattgtttaaaaggaaacatgaatttgaaatcaagcggggtcttgttagctttgtcaaaaaagatgattgaaacctgcctgttatgcattttttaacaattatcaacaaaattcaagaacagccaatgtgatataaggacgtatatgtaaaaagatattctctgaaaactcaaaagcagtcgtagaaagaatcttaaaaatcttgaagaaaatagtttactatactataaagtagcaacctgattagttggtagacgcagaacgacctaacccgtcgttgactagtaagtaactctactcacaactttgtttatatatctaacattcctattttattagtattccctaacactttcttttcttaacgtcaaacttagtgattagttcaatacaagtatatagttgactgtttatgatgcagaattattattttcgacaaattctcttgtgttgtgagtctatcttgtgaacattttagcttccatttcttcggggaagtaattctggaatagtcaattcgtttaaattcttactatgtaaaccattcagaatcttgaaatttccatgtaaatgaaaaattataaaaattaaactttttgtttcctggaacactgtctgcaaactcagagccgtcgacaggaaataga

SEQ ID NO: 51585 - DNA, 723 bp, Arabidopsis thaliana landsberg
gaagaagatgaatttggcgatatagtccaacttctatatgtgttttattctttcagtttatagccatcattcctcatatgtactttattgatgcaagctatacctgaaatcttcttttcagtttgacgagcaccagatgaccaagataaaaaaaatgagcagaggaattacgggtagagtcagagagttgcattaggcaagtgcttacactttgtctacgttcttgaatcagtaaacgatcttgctcaagtcatgatggatctttctgcacttgtgatagatcaggtaaaccttgttaaaatccatattctctttgtctagcttatgattcttccttcttccttcaggaaaataaaataaaatattacaagcaacccatttcgttgtagctacaatagttgatacgaaatttgctagtgagatgttatgaactggaccaaatttcacttagatcatgtatgttattgtttgttgtagtcaagtttaccatacatgtaaagataacagttctgaatgttgcttatgtgttttggatatgacaccagtaggattggtcattgagctatagtgggaatcatttcactagctcacttatgaatctgataattgcttttcctacttggatctttcccttctgaaatggcaatttaaataggtgtgctttcacttgaaatcttgagttattggttcttttaaagggttttgtccttttttttttttttt

SEQ ID NO: 51586 - DNA, 513 bp, Arabidopsis thaliana landsberg
ccattatttataataggccttgggggtaaaactattaagacctttaaacgtacgtatatatatatgtatacagtttacatttaagcatattcaccttgctcatatgggcttttattgggctttataggcctaaacgattacacttgatccatgaaacaattcatcttcgttgccaaattctttttactgctactgcaaaattgctgtctgatttcaactataccaatcgattctatatcaatggaaatttcgttttcttactgtgtctctgagtctccgactggaattcaactataccaatcgattctacgataattgattcgatcaccatgttcgtcgactacgttggtcttgccacgcttcagcagctcggtgttttgaagtagagctcaagagccattgattcaggcagtgagatagaggttgaattaagaacaagttccattttttgccgagaaaaatggcaaatttgtttatctaaaactgtagaagtgcttatttagtggagatata

SEQ ID NO: 51587 - DNA, 532 bp, Arabidopsis thaliana landsberg
  unsure (1)..(532): unsure at all n locations
cccccccccccccccggaacaccccccacccccctttcccccncccccttgtctcccgccccccccacacccacacccccnncccccccccccccccccccccccccccttttcccccccccccccttctccccccccccccctctcctccccccgcccctcctcccccccccccccccccgccccccccccccccccccccccccccccccccccccccccccccccttttttccccccccgcgtttgtttgccccccccccacgcggcggccccccccccacacccacccactccccaccccccccctcccccccccccccccccccccccctccccccccccccccccccctccccccccccccccccccccctcccccccccccccccccccccccccccacccccccccccccccccaaccccccccccccccctccctccccccccccccccccccgccgccccccccccccccccccccccccccccattcatcccccccccccccgtccatcttcccccccccc

SEQ ID NO: 51588 - DNA, 604 bp, Arabidopsis thaliana landsberg
  unsure (1)..(604): unsure at all n locations
tatcatagaccgagtaattnnnnnnnnnnnnnnnnnnnnnnnnnnnnnnnnnnnnnnnnnnnnnnnnnnnnnnnnnnnnnnnnnnnnnnnnnnnnnnnnnnnnnnnnnnnnnnnnnnnnnnnnnnnnnnnnnnnnnnnnnnnnnnnnnnnnnnnnnnnnnnnnnnnnnnnnnnnnnnnnnnnnnnnnnnnnnnnnnnnnnnnnnnnnnnnnnnnnnnnnnnnnnnnnnnnnnnnnnnnnnnnnnnnnnnnnnnnnnnnnnnnnnnnnnnnnnnnnnnnnnnnnnnnnnnnnnnnnnnnnnnnnnnnnnnnnnnnnnnnnnnnnnnnnnnnnnnnnnnnnnnnnnnnnnnnnnnnnnnnnnnnnnnnnnnnnnnnnnnnnnnnnnnnnnnnnnnnnnnnnnnnnnnnnnnnnnnnnnnnnnnnnnnnnnnnnnnnnnnnnnnnnnnnnnnnnnnnnnnnnnnnnnnnnnnnnnnnnnnnnnnnnnnnnnnnnnnnnnnnnnnnnnnnnnnnnnnnnnnnnnaaaacataaaataaacagtacagtagagagaatgaataacactaaagggaattctttacaacgggcttctgatgatcaacacat

SEQ ID NO: 51589 - DNA, 725 bp, Arabidopsis thaliana landsberg
gatctgctaggtttttggattatcatgaatagatgacatccatgaactatatatataagttatatgagatattaattaccaagatctaaattatactttaaatatatctcatatgtacctttgggagattttttgagatgaggatttttacttgcgtaggaaattaaaatgtcggccagaaccacactgcagttttgtgcattaagcgtcactatcaaatccaaatatagaatagatctttgcgaaacataagactcgatggtgtatgtttcattcaagtagaatatgtttattgtttagtgctgctagatttaccatttatcaccgaaatctaaataatatcttaaatataaaggggttggtgaaatcactaaacgtatactaataaactacgtttaagtcaccaatacacaatttgaatttaagatagattataatagttaatcccaatggatttaatcatcgtgcatttcagacaactaaatcacatgaatataatttagtatagaaaatttagaccattacaaatgtttaatcgttcgtgttccatcatcggaaatatccattgaaatctctcgttagattttgcacttacaccataaagttataaaagttattattcctaaattaaagaaaattatccctagtctcaaatctgcagctttgctatatattcctttagtatctgcgttagctttctatcttaattttcaaattttgctttg

SEQ ID NO: 51590 - DNA, 344 bp, Arabidopsis thaliana landsberg
caccttgcggttcgagccaagctctgagatgaaggcgacaatgtttggggaccatccatctgctttattgtttgaccaaagtccatgtcatcaccatgccagttcattgttatattttggcgtcaatgttaatttgactcggagagtggggaaacataaacgagagaagttgggtcgtgtaggtacataatgggccgacaataacaaacgctaaaactaaaatgtgtgaaaatgccaatatttgggcccaaaagataagaaaactggaaaggaagtaaaagtgtacgtaggattaattaaaaagatagtgtaaaacaaagggggcattcggagaattgaactcc

SEQ ID NO: 51591 - DNA, 1097 bp, Arabidopsis thaliana landsberg
atttatgaattaaaaaagaaaagctatcagaataatatcaggacttacgtgattgcaaaggtttgttgccttgcagtcttgtatccaacaacaagtgaatcaaacgcagccgttttgctacactttcttcacttagggtttcaaaatattattttataaaattgatgtaaaaagataaatgattataaattgacaatgctaggagaattaacaaacaaaaatatttgcaatacttagaatcataaacattgttttttttagtttttcagttgataatctatattccgtaaaaagtgaacgtcatcactcattagtttataaagaaagaaagaaaaaacacttataactttgagtaagaaattatgacaaaatgcaatcaaatattttttttctcttgaaattggtttagttctaacattcactctttaacaattaagacttcaattgaaaatgcaatatccaactattttgcacacacttctgtatccatttcttttgttattaatataagaacgcatgtggattagaggattaaaggtattaccttcactgttccaataatttttatatttaaatatgatttcgttaataacataatatcaaacttgtagggttagaaaaataaaattaaccctctatttttgggtgataaattaaatatttataaattcgacgtcaatagatcatttttaaattagtccacttaaatgtatagtgtgtgatacttttttggtaataagcttggttgacacgttatctattctctattaataggttgttttagcacataatttatttttgttaactagttagtaatttttttgtattgagttttgaaattcaagaaacaagtacatagttttcttaataattatggaatgaattatcaaagttgacttttatcattcctgtaatgtttaattttaaaaacatgtatttgcagttataatactttcgaatgattggttgtcgctgggatgaattattagtcactaataattatttgaacatgaggacagaaagacagaacatcggctcatcgaagatacgtcgaaaataaggttccccaagaaaaactcttactgtcattccctatg

SEQ ID NO: 51592 - DNA, 574 bp, Arabidopsis thaliana landsberg
ggtcttgactatatatatacttttgaaacaatgaagggccacacacacttatgaaaagcaggttattctacagaagaatacattaggcatgaatagtttcaaacacatgcacttattgctttaaatgggccatcaacaactagacaaaaatgtgaccaagacaacttcctatgtacttatatttgaacatttagtttgaaaggttattgcatgtacttacttataaatgcatcagcaatgaattagaatgtcaacttataatgtaataagtatatatgaatgaacttaacttacaaagtttggatggggagtttttcttttgaaacttcacagaaagaaccaagctttactgtaaaagtaaaactactgatgggtcttgtcaagaagaggctaccaagagagagacaaagaacgaactgttcatcaaacattgaaatcataaaaaacattagtttttttctttaaaactttgaaattggtttctgagtgatgtaagccctgtgcgcagatgaacagttcccgtagtaataactacattaataataactacttgagtaaatatatacctaatcag

SEQ ID NO: 51593 - DNA, 1160 bp, Arabidopsis thaliana landsberg
aacgtcatctaatataattttcatagtaaattaattagttgaaattctagtttgatttaatgtttttctattgtaatttggtatattaattataccctaagacttcgacaaaaataaaataaaaaataataattatacgctaagatctaaaatcctcaatattacatattttttttttaatctcctgagaatctccatttatattttttttaaaaaagttgaatcatttatttggatttttggattattttaaacttttcagaattttaatattaataacttgatttactaaacattaacctaataaccttctatgaattgatgccgataaaaggatataattttaatttttgtatgttataagagataaataattaattgtaattctatacgagctgaaattttgtgtaaattaaagataatggaaaaatagtttatatgttttttttattgaattttctcttcctaatcaacattcaaagtcaaaaacagcagtttaagtctccaaacgcaaaagaatttcttgatcatagatgttgatggaacttataagagagtaatttcactaactctctaaagaattgtcaagagatacaaagggagcgtaaagccatgcaccaacattgcaccaacatattaatcaaagcaaaatgggaggtgaaattacatattaaaaatgaatttgtaatatctcatttgttttgctgatggcgacaatattcatggagaagccacaaggctcaaactcatggatactcaattctatatatgtaggaaaatttgttctacacctattaagccgaacgattaaaagtgttttaaaagaactttcataccaaaactaaacgagaaaaatcagattattctgataggaataatgattcatcgggtttgcaaaccaaacgagaaagtcagaacgatgaaagaaacatatatatggacatacgctgtgaggcatctataaaccatatatgctatggactcaagacgtcggttgagaatatgtcagagaaaaatatgtgccagatattattcttctggttcatcaggagatcttgcactctaggcatatcttgattactgtgcccagttattgagggaaatatgtgtgatgcactccgatgtcgcttggtatacgtcctatcacctttcttgtctac

SEQ ID NO: 51594 - DNA, 997 bp, Arabidopsis thaliana landsberg
gaatcaaactgggaaaagattaatgtcactcttctgatgtagattactacaagtttattgtgcaagtctttgaatgccaacacagagagactagtatgactcacactaactatgtctgcaaattctgcatttttgagctttgataattgttacaaccatttctagctttacaactaaatagaacatcagtatcctcttcatctaactgactaactcaagacatagaagttgataacaatctgaagataccaaccatccgcatcaactgcaataaacattgaatttctaaaagcgattgtgaatcagtacctggataacaatggaactttaccctaagatatcatctaaggttccatgtgatccagagtacaccagttaaagcttaaagaagtaatctcattgtgacacctaactctacaatcaaaccaggttaaatacccttagcgggtctccaagcaaatgacacatgaaaagtacacactgataacgtttatacaatcactaagaactgataatgaaatgaagaattcatgctagcttagtgcatagaggaaagaaacaaacttggagcatccaactagcaagaaaactcaagacagcaaattggcaaatcctatagaattcaaaatcataaagacatactgcaccagtgtgtgaattgagcaaacgttttattagaaatgtgttgtcaagacaaacgatgaacacagactaatgacaatgcaatggaatttagaaatttgttgttctgattcaataaaaaaggttcatcctttgaatcccagtaattcagaagacatgaaaggagcaaacttctcaccggaatagtaaaaaaaatctatgacttgcgaccaagctgtttcctgagtttcctatacttgtgcttgatcatcttctttcttccttctattcttcaccctatcagccgaaataacaatctccttcggatcctctttctccttcctccacgacgctgtttcagcttgatccagacctt

SEQ ID NO: 51595 - DNA, 784 bp, Arabidopsis thaliana landsberg
catcaatcgagaacatgtgattgataagagcaggcgagaactcatacatcttgccccgaacatacaccagatcaagaccacattctcgatattccatctctggcagattcgcatagaattcacgaacaacttttgggacaaactgttccaccgcaacgacagtctgagccatacccgagtgttccagaaaaacctttggtggcggtcaggacctcaggatctaagggcagagttttctggaatatgaaatcgcgtttagcgatgtgtttgtacctttcagcagcagcgggagacaaaaaaacgcttggtgtgtggcggcaccaaagggcgacgaagagttctatccagttcatctctctcggcaaaaacctgacgatgagctgcagcacgagcagcataagagacagccgcatctggcacactagcaccctctgcagtctcaacggtgggcgaaatcagaggatcaggcatcgggacgtctgcgaccggtgaagcaaccagagtgatgtttttgggagccaacggggacggaggagcagacggattggtgagaccagcgggttcggcatccttagaatcgctgagaacgagcggtggagcggacggtggtggaatcgagacagacggaggctgagaagacgtcgtcggcggaggagaggacgacagaagctcgcgaatcgacccaattccaaaggcgaaaagcggagtggagagaacctggtaagccgggttggagagatccgggtaatcgatgggctcatcgaccagacggcgacgtttgcta

SEQ ID NO: 51596 - DNA, 1083 bp, Arabidopsis thaliana landsberg
acaaaacattagagataatgcaccaacggaaagataggaatatcagaaaatagagacattacttattatttcacaaaaccccgagaaggtcaagacaggtaaattaaggcaaaggagtaaacttttgctattcaacatcttatatagtatcaagtatcaactactgcagcaaaataatcaccaaggcagtcccatatgcagcagaacaaacagagtagacagtaacattaaagatagaggtgttcagcaagtacttcaacaaaatataagaaaacaatagaacccaaggtctgaaaaatggcagcacacacctaaatccatcacaccaaaccacattcttataaaacccaaacacaatttcttatgttatttcttatgtgggatgatcccactgagatctatcaaaaaaaaaatcaaaaagattagtatatggtttatatatgaatgttaccgagaacttctcgaagctctttagcagtcaatgctgcttgaactggcccccgtcttccgatgagatacaccttcctgaacacattacaactttgtatcagggactgtagttggttttcaactataggaaagatggaaaggaacaagattcaactagttaaacggttaaatgggaccttatagaactttctttcagcgcagataaagcatgtgtagcaatatcagttgacgccaactctgttgtcggtcttaagagaatccgagcaacatctagagctacattaccctaagttttgaaggatcatatgtcagagaggtcttgagaaatacatttactagaaaatttcggtatcaaactgttgttgatatgtacatcctgctaactaacaactaataggctctattaatcgcacaccatatattagagtacctggccaagaatgacagctgagtcagacgttttcaagtcaggtttcaaactactgtagtcaggatgcccattataccaccagacgaattctcttgcagagtatataccactcaaactctaccaaagtcaacgtactacatcagaatggatagccaacaagtataagcaaccaaaatacactaacttatgtcgaaacctatcta

SEQ ID NO: 51597 - DNA, 674 bp, Arabidopsis thaliana landsberg
tagatagtatattactattagtatactaagaaatgaaaatttattcgcaaaagaagaagagggaatatgtaaaattctttagagatcggtaaattatttatttctttatttatatagcatgatcgcatatccatttttgttttttcattagtcgatatatcatatatcttacgaccaaagctacattaaatctataacattacatttcaaaatgctctaagaatatacaaggatatcagttactctctttcttgaactctgatcggttatatattttcatctttttgttgttgttccatctattttctttaaatatgaaatgttggttcatttcaatttaaaaaccatgatagagcactgatatcattgaatacatagatttttgtacgaaatcaaactaaagatgtttgtttagctatcccatctttgggttgttggtttgaaaataaatgtttttttctccgaatacgatgctccaatatgttactgttcaaatcattagtcctaattctatttgcggtgacccatagttacttttgtatttgaataaaagtaggcgtggtttaacaaattattgagttgcatattgcagtagataaattcatgccatgtgaattatttagatcccaacaaaaagaaaaaaaaaatcatcgattagaagctctaggaaatag

SEQ ID NO: 51598 - DNA, 683 bp, Arabidopsis thaliana landsberg
tcttcagattcccatatatatgtctagcacacatcctatattcaacctttggtagtttcctctctatagcattcaacaaacccttgaaaatgaaacagagaaatcatgagaagatagcaaaaatgttttacaatcttgagaaaagtaaactcgctgaccttttgtctataagagatgacggtatatacctgaccatcttgcagatttacacaatcaccattcagcttctgtatgaaccaagtccagttgtcttcattctctacatcgaccacagcacaaaatgggtacattccattgtttgcatatctaccaacagctgccaataactgtcctttaagagtgcttttgagaaagcatccatcaagtccaaatataggacgacaccatgtgctccattgggttcttaggtttgcaaaacaaacataaaacttgtgaaagagttttgttctttcatcatctaaaactatgtttaactccactagatccagggttcgacctatcaaacaaaaatagactaatcacatcgctggaaatatgtaagactcaaactggacattcaacatcaaaaaaataaaatcactgtcacagctacgtgtggtagtctttgagcctataaaactgctcctcatgctctttttgaatgatgtccaatgctatcttttttccttttctacacttgtcta

SEQ ID NO: 51599 - DNA, 560 bp, Arabidopsis thaliana landsberg
  unsure (1)..(560): unsure at all n locations
agccaacgcttgcgaggcaatcaacatccatccatatggcattcacgacatccatgggtgagaaacatttttaatctattttctattatctaattgcagggggtaaatgacagaacgtgacgagctacctgatcgcacccagtccatcagccacctcaccttcatcactgtcggtgcgcccaccttaccactgccacgagctgcgctatcagtagttaccaaggttccctggaagcgccgttccacgacacacgcgtctgcatcagcatcggcaacatcgtcccagcatccatcggctcaccaacgacnnnnnnnnnnnnnnnnnnnnnnnngggctccttaccgtgactttgcccctgtatggcagactccggcatcgacaccgactcgtcactcggcggatgacctgccttcaagtgaccatcatgtgtcgcctagttgtagcgggnnnnnnnnnnnnnnnnnnnnnnnnnnnnnnnnnnnnnnncacctgagagaaccagaagcacgaccgtcaagagatataggctcgagtagccgagctcagagaggtgtttgcc

SEQ ID NO: 51600 - DNA, 605 bp, Arabidopsis thaliana landsberg
atgtggttatgtatgtatagccgtttatatcaacacacaaaatttctagaatttttgtgcaattctgacaaagacatcaaacaaaaacaaatatgcctaaagcacaaatatggtttcctttcatcatcttgttatgcatctcatcaggtaatctaaccatcagtttgattatgttgattgaatctatctataaatattgattgttatatatgtgggattttagaatattatcttcaagtctttagttgattgttagatttgtttccatgttctttattgttaaaaagatttatttctatgtttctcttacagtaggaagtttcatgagagtcaatgcacaagcaccggtaagactgctcataaaagataacgaaactaaaaaagagcaaacaacaatgaatcatcatatggtttttatatccttttgagtttgctctatgttgtagggccaagggagttggtgtgtggctaagcctggcacgccgatcaaacaacttgtaaagaacttaaacaacgtgtgttcgaattcgagtgtccattgtgaggttgtatcggaaggaggtgcatgttatgatccgattaatctctataattcagcttctgtc

SEQ ID NO: 51601 - DNA, 804 bp, Arabidopsis thaliana landsberg
actaacacactaacactttccataaaattcataacttgtattcagctttttctgagtttttaatttacttttggtgtgagatgcttttaggtttatgtgatgttggtaaaaagtatattatccttttcttattgatttttgttcactaagatatgcaatgatgactaattttttctttttttcgttgtaatttttagaaattgttagtcttatttattagcggttggtatcttaaatatttaattccttacatgtatttgtcttgtgatcgcaggtcttgaattatttaagtttttttgtaattaaataaattatgattctattcaaaatatttggagtcttttatatatttgatgtgttgatttggaaaaagaattaggagaagatatggcctttatcttaaacagcaaaaccacatgcaaagcaaataaaggcaaacagatccaacagatagaataagattaaagagcttcacagttggtttctttagattttattcatttcttttcatagaaattattggaactttatggctccacacaccaaataaaagaaaaagaatagtgaaaaagaactaaataattcaaagccccaacaattagaagataaaatagaagaacccatttgttgagtatattaaacattgataatcttatataagttctctagatcatataccaaaatatatacatgtgaacatttcctctagaaattctagattgttaaaattctagaagtaatattcctgcttaaagccttagtaaaaatgtgagatagttgatcatgtgtgaaaacatggctagt

SEQ ID NO: 51602 - DNA, 570 bp, Arabidopsis thaliana landsberg
gatacaatcgtatacatagaaaaaccgttaaacacccgccaaatttagtagaaaaaatcgttaaacaaccgctaaaaattagtaagtatgcaaatttattttatattatcacaatattatacgtagaaaaaaccgttaaacacccgccaaatctaatactattaaatatcgatcataacttcattaaatgaaaaaaaactcaaacataatattaagatctacataacttcattaaaatgattaaagatctaattatttttcattttttggggcaaatatttagatcttctaatctaatagggaatgaactcaaagaaagatatttgtgtttgaagataagtaaactgtaccggaagttgggttgtgtctaccgtcaccgatccacgagagtatcgaacacgaaatctgaaccgttcacaggtccgacgtggcaataaactgtatttaaaatccggttttgagtctgaatccttaatagaaagagatcggagcgttggtatcccttttttcttctctgattcgaacagaataaataagtaccccaaaaaaaaaaaaacctcactgctttga

SEQ ID NO: 51603 - DNA, 870 bp, Arabidopsis thaliana landsberg
atgatcggtataaggcggtagggagattgtgagtgtgttaagtacagagttgtcaaaaaaggtacagtgttggattgaagaataaacaacagaaaggtcaagaaaaagaagaacgagcaatagcaagatctagagaagagacctctggatagtcccaatagaagaaacaaaaaggtttgtgggtttcgagaggaggaagaagaataagatagtaaggaaaagtgaatgataagagactgttaatcctaggatcatcatcaaatggtggttcttgtgtgtttttaatcatccgttttgtttagtcaaaattattataatatatgattagttaccatataatataacgttatccattttggtttactcttaagtcaaaagtaggcactgtccaaagttaaccttctgagatttgctacatgagagttgagactaaactggcttttgtatctactaatgctgcagaaattgccactttgttgttgtatatgttgtctcaaattttcgtgtcggttacgtttgttttgaagagataaaagagaattggcgtttggactttgggtgttgtaaattggttagtgtcacacccttttttatacaggttatatgtgaaacctgtaaatttcaaaatttatagttcaagaaaacaatttactcgagaagtgacatttaaagaatcatcacatcaaacacttgacttcaaactagaagtgatctgaaaaatccatcagttctttttttttttctaaatataatattgaccgctgatttttgacatattgtagtagtgaagcccaatcctacccaaagagatttgcatcagaaaaaagttgttttatattatgggcccaatctttttgatcaaaaaaaaaa

SEQ ID NO: 51604 - DNA, 170 bp, Arabidopsis thaliana landsberg
agaatttgtctcttcttgttcgatttgaaaattccttttcttccacgcatagtctcacgtacagtcagataaaaaataaatatataaattacattttttaatcataaatcttagcttttttgccttttcgagtttttttaccgggtgattcttgaagatgaatcgaacat

SEQ ID NO: 51605 - DNA, 347 bp, Arabidopsis thaliana landsberg
tcacaaatcaaatgcctttattattccaatacactataaagtaagtttttttatttatggagaattctaaactatgcttgaatctcccctgtaactgagggtggatacctttctctcattcgttaaaagctctcttaattgttttattaaaaaaaggttagtttctctttatggcatttaatatttaattaatctctcgtcatctctttttgtatttttttctgatatgatttcttatttacagatgaagaagaagaagaagaaagaagaaagcttcaaaagaaagataagagagaaaaaaagcttcaaaatcagaatttctagggtttttattgacctctcttccc

SEQ ID NO: 51606 - DNA, 595 bp, Arabidopsis thaliana landsberg
ctcaggctcgtttgcagtagaccggggtatgcgaggaagtaatcgcgtatcgcacgatgggcgtaactcattctgaggctctcaaaactggcatgttggtcggatggcgtggtgtcaaagatagacagtaaccctttgcagcgctgttgagtcaaggcttgcatgtcttctactctcttacttatttcgaccgctgtcaaaggccgtacatcagcggctaatgtggctggtgtttcggctgtataggcaaatgagaatggaaggatagcaggacatgtgttttggtgtgagagaaggttgtgcagtttgttgattacctcaatgtcttctggggcgagtttgctgagtatgtgggcgagcaggtcgtcgagaatgtagggaagggcgtccgcgcggtctttcaagatgagaaaatccgagtcgggttctaggttttcgaggaggaacttggttgcgagttgtgcccacagaaacacccctgaactcttgtccgcaagtaccctgacaatagtgcttacttcttctccgtccatctttccctcaatgcctgcagcttggcctccatgttgaacgtcgtggccaattaggtatggat

SEQ ID NO: 51607 - DNA, 1029 bp, Arabidopsis thaliana landsberg
cgtcatgtccccttgtgcaaaattgagttcccataaaaatctcagtatacatcataaaactaaaagtgtgatccgaaagttccagtctatggcccaaattgatggtaaattgggccttataattctatttgtacaagtaaataatccagcccatattcagataaaacagattttgactcttaccttcatgagagctgacattacttcttttgatatcgatgccttagtcaggctaactatatgcgatgcgtcaaacataaaatgaaattcatcctaccgagagaatctcgcataaagcaatgggagtcatggctcggattatgatcggtccatcctcagacactgacgttaacgtcagtcacaagtcacaacacgtgtaagatattccagttcttagtttagtttagagatacgcaacagcaaaatctctaagccacaaagattcaagtaggcccacttacagaatcttccataatttgagtttaaatgtcgtaaactttttaaccacgtcattagattagcgatgataaaaggaaattcagattttttcactcaattcactgattgattcatactgattgcaaatggaaaaagttgtaaccctaaatcatgatctacctctgttacacttcccgaattctcggaaacccttttcgattccatctccgattcttcggatttcgagcttcaagcgtcataagaaacgttcttgtcttgcatcgtcttcgcgtctagggttctatacagagaccaagaccgtttcagagagccatggtgtgatagttgacaacagtaccatcggaagaagattgcttggtttagccgcagccgtttcagtagcggtttctttgtcgatcttttgtgattccccggcactagctgagtctctaacgatcgctttccctgtttcacgtgctcgtgaggtgatcgaggttttttcattgagctctgcttctctgtttttaacgtctctgagaaatacagtctggattttgatgttttggtaagggtactacagtacagagaact

SEQ ID NO: 51608 - DNA, 738 bp, Arabidopsis thaliana landsberg
atcagagaattgagtagaagcaaaagtttaaagctttttttttttcttttcttctctctctctgtgtgagtgtgaatgtgtcagagcgtgccttaatacaataattaaaacaaaaaaaagaacggtactttggaactagccgttacagaagtccacatcttcctaatattccttctttttatccatttcttaatttttgtgtccaacaaaaaaaaacctatttcttaattttaattgttttcagatttgtttttgtttttgtttttgtatattgtatgaacctacaaaaactctggttagttttatttttttatcatctaaaatctcattgtgtaaatagaagatggaaatgtagattacattagggatgagacaaattatctgttaaattcgcttcaatttgttatctgtttcattttgatttgaaaagtcttgatatatgtaattctatgatgcaaaacaaatattaaaaatcattattcgtaaaaaaaataaaaaataatcacacactacaattttaaaaaacggatatctgttccgttttcagtttatagataattacatagatagatcttgtaatcataccacgaatattagatgtgaatattatagaccgatgctcaactatttttaatgtgactatccgcttctagtgagtatataacatgtcaaaaatgctaggatttgcataagcgatgcaaatttttcaaaatgtagatagctagccgtttcactttt

SEQ ID NO: 51609 - DNA, 923 bp, Arabidopsis thaliana landsberg
tactgtatccggtggggtctaactcttccaagtagaaagttacgtgaatctgcttggaagaagctttatattgatgtgagtttctccttggtttttcgtataaacttgttagatgtttccaagtagtattacattgctgaagaatatacagtgttagtttgcgttgctagtagaagtcagatcatatatatttttaagtgattcctttctcttgtcgaattttagcgtgatgaacaggacatgattgaacttgtcagaacctgtccgtcggatttcaaggagtattacgtacatatgcaagcagcaaagagaagccaagcacctcttccgtcccaggtaactatttataattatctgtttatgttttaggacaaatcatcacgtgaagaattttctcatgttcttgtttgcaatttttagatggtggatgaccggataattcttgacaatactgtacttgaacaagtttctctatggaagaaaagcaaaggacttactgataaggctgtcactggccatatttgtttgggaaccaaatgttcataccatcagattgacgacgtgttcatatgcaaagagacgggaaatgttcatggtatgtaatgaaatgctgtaaaatgtaactttgttactgtgttttactctaaacttacatagtttttatggtctttataacagtatgcgatgataactgcaaggaagtaatactgagtccagagggtgacctcatggtgtgtactatctcaggagtttgttctgatactttacttgtacaaactgagccagacgcagatgggtgttatgaggaagaagctgaactagaagctgaagtattcacagataaaagccgattaggtacacatctatctatctctttctcatatctctcacacacttcctttttcaaatattatttttatttt

SEQ ID NO: 51610 - DNA, 602 bp, Arabidopsis thaliana landsberg
  unsure (1)..(602): unsure at all n locations
cccccccatccccctccccccccccccccccccccccccccccccccccaattctcaccaaacccgctcccctccanaaacnncaccaccccccccccccccccaaccccccccccccctttcccncccccagttccccccccccccaccaaacccctcccccccccccccccccccccccccccccccccccccccccccccctccccccccccccccccccccccccctcccccccccccccccccccccccccccccccccccccccccccccccttttctcccccccccccgttgttcgccccccccccnccncccccccgcccccctcctcccccccaccccaccccccacccccctccccccccccctcccccgcccccccaccctctccgcctcccccctcccccccccccccctctccccccccccaccnctcctcccccccctcccccccccccccccccccccctccccccccccccccaacccccccccccccccctcccccccccccccctccccccacccccccccgccccccccccccccccccaccccccccccccccgtccctccccccccccccccccccccccc

SEQ ID NO: 51611 - DNA, 564 bp, Arabidopsis thaliana landsberg
  unsure (1)..(564): unsure at all n locations
taaaacactatataaacagtagaagctgatacggattaaagcttagtgaaaagactgaacttgtggataggtcatgggcaccaaccgatcatattctatagctatctcttatcatatctcttatctcatccttcattttaaacttcactatgtaaaaagtatcaaacaatggcatctacaattttgcatcccttattatacatgatctacctgtcggtgttcagacccgagggcctaatcaaccaatgaaataatgttgtgtatgccctaactcagatggtgatacaagttgacacgagttttttatcctcatacgggaaaaaagagatcctacttccaacagagggggatgagacttatattatttgctcctaagtgcttgcagtagggaatacaagctgagcgggagagggaaggatccaagtccctgggattgattgagacaagtgtcaataccgtggtggaggagaaannnnnnnnnnnnnnnnnnnnnnnnnnnnnntcgtaggctatcctatttatagccttaggaggggctgtccggagtactggagttggccatca

SEQ ID NO: 51612 - DNA, 612 bp, Arabidopsis thaliana landsberg
atctcatatgattgatgttgcattgtttcagccagtaaagccagcaaccaagctgatcccgcagctaagcagttttcggatcttatactcggaaaactcgaacaagtgtcggctctatacaatcgtaagtaaatatgcttaattctgatatcatcattaaataagtgaagttgtttctctcttgcgtatcacacatgtctacttccaactatcaaattgtctacattcacagaatccttgtttgcattttcattatcaatgcacgacttttttacatcttggagaatcagattatttttgtcttttatcgtttgtgggcagcaacttatatcccaagttgctaagtttattttctttacatgcttagggacggcaataagcagagtaagaataacgtccgtttcgtaaggaaatctatcaaggtatacaccttagtcctttcatatctatgcaagtgattcatttccattaaagccacactatttggccttggctattatcatcattgaactgctaaatcattcttctttcatctttgttttcttgctcgtgatcatttcatcgggcaatagttacagtcgtattgaggatttttgtttattaaatatgtga

SEQ ID NO: 51613 - DNA, 563 bp, Arabidopsis thaliana landsberg
tggccccaaccagagctctaggagacgttgatgtatctgatcatggctgggcaaaacatgtccatagattcgacgacccaaatccggggaataactcaaacgacgtacaaaggagaaagaatcaaacatggccgaggacggcgtcaagagaactcggaaatacatgattgagactgcagtccgacaaaaaaggaaccttgccggagctagaacagaggtctcaattcctctataaaccatgagaaacaaaaagcatccaaacgaacagggtcgtcgtgagtaaagaaattcgaaaagctgtttcaaaaaaattatactttttagcggaaaaaaatgagaagaatcaaccttttcgggttgacccgtagacccgccggttgttgactcggattaggactcgtatgtagtgtgaattagaggttctctggtcatttacaacacataattagaggttcgatgaagaaattattctgtggaagggggaatttaaatatagcaaacctataagctcaaaactttgaatatggccaatttataaagaaaattatgtgtggaagaatgac

SEQ ID NO: 51614 - DNA, 865 bp, Arabidopsis thaliana landsberg
tcataagctacacgttagaacacaaagtcgcctctactgttgcttttgtactaatccttaaaaaaatcatatagatttaattcaccaaaactaagttaggaaagaagaggtggtggtgttgaatttgattatgttatctattgatagtattcatgtgatcagtagacgaaaatttttcaaaatattgcctgtcgacatgggaagaatcgaatgactaaaaaaataatcgatcatgttctttagtttcaaatttaattatatatctatataaatacccttaacttgtttttgacgatcctaccaagccagagaacttataactgtcatattcataccatatgctatataattagtgggatataatactctatctttaactttacgcgtaacaactttttaattaggatttaggaataagaacctttcttttgtttgttaaaaaattctttctctttctctctcaattttttcactatataaattattaagttagacgcatgtatatgtctttttactaacacgtagaccggtagacgtccatgtgctccatgcacgtgtgtaaatacatctttttttgccatgtgtgaactaatttttttaatttgccaagccaaagttataattaattaaatagcagaaagagtcttaagagaaataatatgattataatggcagaagaaaagttaagatttacagatacatcaatagtgtatagccgcttaattaatctatccacaccttaacgaaaatttccgttggtgcgctaacgaattcaggctgtgaagttaaaagacaataaacagaattatagcttcacataagcgatcgatcttcaactttcacatgacagagcaaatactaaata

SEQ ID NO: 51615 - DNA, 1340 bp, Arabidopsis thaliana landsberg
  unsure (1)..(1340): unsure at all n locations
cataagtatgaaaccatgcatagaccaaatcttaattatattaatatgaaaacaaacaaaaaacaatgtaaattttattgtaaattaatctctaaatctaaaagaaatgttacattgttttttttttatggcataacttgtgaatagcttactaagattcactgtaaaaaggataattgataatttgatatgatgtgtattcgagcattagtaaaaggatcttcaaatctaaaagaaattaacaactattgatgatacaacttgcattatagaacaaatttagaagtcaaaataaatgactccatatactttttgaatccttcacgaaattttcagtaattagtacttgcgatgttcatattatctctctcgcttagatgggatttgtgttcacgagcttgtgagattcttgcatacataaagacaacggtgcatattttttcgggaccgattatattatacactaataatcctcagtctccaattatatgatttctagctactactatgtatctcctgtccactcgttaatgcttaaaaaataagaaataaaaatgtttaaataaaaagacgacttaattagataaaaacattatctagattctcaagctcttccacctctcattaaatgtgatccctaaagaaaacgaaagaaccttaaaaagctggctgatgaacctcttgatggctctatcccatcataattcaattctaatcatccccctaaaacaatcctgaaacacaacgcaagattacacaagtcaccatctcgctctctgtctctcgtactctctctctctctctcatctttctctctcatttatggaagatatggtgagatatgaagaaacagttagctttccctgaatcccatgaagacaatgacccaacatcaccaccatcattatcattaatcattcatcattatcatcgtcatctctttttgtttgtcccttctttgaaccaccacttgctagttgctagttgcaacatccacctacttaattcaccttattctataagtaacagtctccacttatagtttctattgggttgagaagatttcaaaaggagagctagctagggttttcagacagctcctaaatctgagtgtgaaacatcaagagccatgtaagggttttcttttgtcatatcatcatatatctagtaccattagttgtgacttgcttgagatctaatccctcaaccacatgaatagataatcgatttctcatcagttctctgcctttagggttttttctccttgtcttaaggtctatatntatataatcattcctggctcgcttcagatttcttctttacctttgtccacagaaaag

SEQ ID NO: 51616 - DNA, 774 bp, Arabidopsis thaliana landsberg
caatctcatttttccagtcaaattcagaaaacgcgtaagttctctttctcgttaaaagggtttgttataaaacccttgattttacttgttttagagaggttcttggtttaaatcttcttgtggtttaagtctttgtggtttctctaatattttcttcccaagatttggatttgctctgttttgtttgtttgtttcagttttaataatggatgatcagagtaatcgtggtaatgataatcataataatgatcatcatcatcatcatcttggtgtgaataagatgggaaaaaacattcgtaaagatccaccaaaccaacaaaatcaacaacaaaaccctcaagctttggtttacaacatcaacaaaaccgatttcagatccattgttcagcagctaaccggactcggttctacttcttccgtcaatcctccgcaaacaaaccatccaaagcctccaaattcacggttggttaaagttagaccggctcctttgacccaactcaaccatcctccacctccacctgcacctccaccgccggttcaatcagttccaattgcatctgaaccggttcagcctgttaaccaattttcgagtaacccggctgaatctcccatctcggcctatatgcgttacctaatcgaatcaagccctgtcggaaaccgagtgcagccacaaaaccaaaacccggttcaaccatcaaccggcttatttcagtcacatcaaaccgggtctaatccaatgtcgttccagtctcagcttcacagtttgctttgtaa

SEQ ID NO: 51617 - DNA, 996 bp, Arabidopsis thaliana landsberg
cattgttagaagatgtaaggaccttggaatccgtcacatgagaaggcttgtaaggaacgtttcttgcttttgcaacctgttgaatcatatgaatctgagcatttatcaattggggttttgttgtttacaaatctgttaggctaaagattttgatccactttcgttgagaagccaacttccaaaagctgtttcttctttggaatgggcggtttcagaaggtaaaggaagagtctatgtgcattgctcagccggattgggaagagctccaggggtttccattgcttatatgtattggttctgtgacatgaatgtaagtttaatagtctcactctacttcaatccaagaaagtttcatactttttttgcgttctgattctgtgtttcgaacagcttaacacggcttatgacactttggtatcaaagcgtccatgtgggcctaacaaaggagccatccgtggtgcaacatatgatctggctaagaatgatccctggaaagagccctttgagagtctccctgagaacgcattcgaggacattgcagattgggaaaggaagttgattcaagaacgtgttcgggccctccgtggaacctgaaaatcagtagttctgagaatatgtataatttcgaataaaatgtagacttctgtatattttaaagctacggattacaaaacctcttctgcgaattaatcgaccttgttgtcaggaactctgtggttcttcttgtctagttctacaaagatgaagtctatataatttatacatacacttagatgtatttactgttaaagtgatggcacgacttagcagcgacacttttggccattttcttacacgacatttgactttggttttcatcagaattggtgatcggctattgcgaggttcttcataagataagcacttagctcatgttaatgctccaatattcttgggctatggtcaatgtgttttcgacccaacaaccccataaaagcttagagatactatcaagac

SEQ ID NO: 51618 - DNA, 712 bp, Arabidopsis thaliana landsberg
tttttcttcctaagaatgtaagtattcataaaatgaaaatgtttatgttttacacgcgatacctaaggatttggtcccatgacaaaaaaaaaaaattagaaatatgctggtcacaactctctttagtggcatttgctaaattgcattgtcatatcacggtgcaaagtagagatctccaaatctataactaattaataacctctggttttttaggccaaaaggatcgtctcctaaacaacaacttgtgaatccaagctacccaaagagcatatgcatatcagcatataaagaccgcattccttcttgcggtgcctcttagacccaatactcctttttctgcctcccctctgacaatcaactttaatcttgcatgcgactattggaaatgactctactttaaaggtaacagaagcttcaaggtctctcagagagcgtttaggtagtgtcaaaacagaacatcataacttaatggtgttgtgtatgaccaaaaaatcatttttaatctcccttcaaaagataatgtcttattgccaaatgcaatatcttatgcattttgacactcaaaaaaccttcatgtatttctccatcgactcggaattcgagcttgtgacctgattgttccaaatgcaatatcttatgcattttgacactcaaaaaacttcataacattttagtttttttaatcaaccatgaagcaacatatataaaacag

SEQ ID NO: 51619 - DNA, 475 bp, Arabidopsis thaliana landsberg
ggaaaatataaaggcatgttgaccacaccaatttcagatttttattataacttgacatcataaatccaaaggtaaggaatttgatactctaaaactaggccaattcaccattcccacacatggtaacaacttaaacagtaaccttatggtttatacatcttacagaacatcataaaggatggcatggccaaaaacaaacaattaccatatttgaaacagaaatacatatcatatctaaattgcaaaccgtcactatcaatataccaataaatactttagtaacttaaaccatcaattaaccatatttgtattaaaactgttggttaacgatatactgaaacattaaactatttaccttaactagtttatacacatgatgaaatgtactacttattaattataaaataccaatcatcatataatatcatttacaaacatgaatctaataaagatatattacatcatctaatataat

SEQ ID NO: 51620 - DNA, 838 bp, Arabidopsis thaliana landsberg
ggagattccgatacttttaatattgcaaaagatagcaataaacaaacacacaaacacactcctctgcacaaatttgttttgtttcatccatcgttgtacctacgaattccaaaagaataagaaaaaaacccgaaagaatggtcggtggagaccactcaaagttgaaaaggttgtttatattttacctgactgtgaagagggtgaacctgatgagatactaaggcactttactcatctgtaaaaggaagagggctcaatagttattcgctttggataataaaatcatacccagacaaccttgttttaattaattagcttgatgtcaaatatccttctacaagtgtcaacttgtaagagttgaaactaagattcacaagaggagtcaatcaagaaaagatcatctacattttcttttgcaaacctaggctttgacaattcatagctattttgcatcatcttacgcacagttatcatatgtctagaaaagtgtataacaaaggctgtcttagcaatagactagctatagatcaaacaaagagaagtgcttatgatttctatatcactctattctcaagtttttccctagtcaagttttacaaaatgccaccaaccagatattttctctaatttactgaaaaggagtttcgccaggaagcacaggagatttgtctcttctcttctttatcaagtcaagaattgtgaaactttgcttactattactccaaaccagatcaaatatagaaaagagtcaagagatcacccaaaaaaaaaaacctttcttggtgggggccaaacgcaattttcttctagactgagaggtatcaagaatattcgaatt

SEQ ID NO: 51621 - DNA, 719 bp, Arabidopsis thaliana landsberg
aacttattgttgatggtttatagtcattattagttggtatcaataataaaaaaaataagtaatagtaaggcttttgaacttttgggtggtctgccacaaaggagacgtgtttgaaagtgtgaataaaaatatcaaagagagaagaaagaactatttctttaatttgagaagataaaaggagctatttctttatatatggcgaccacatgaaatcaaaacttcggaggcacgagcatgctttgaacaaacaaagggaaaaaaaaaaagcgagaacaaacgataaagtggaagaaaataaaaggtttattcatagaatcatagctcattatgatatatggaattcagcagcatatctctttttgtgcctctctcaagagcaatagagcatgtatctcattatttgtgctcgtaaaaatgcgattgattcactatgagatcataagaaataattattgtgaggtctaaagtgggcaaatgcctaagtagtgatgtgtgtgatgctatgtccagatgcgtgaagctagctggtatccatatatacatttttttcttataaaagtatcaatatataatgatatacatgttacttgcactatttttattctattttacatttcacataaataatatatttgttttgtgacccaatcaagatgatatcatgtggagtgtccaatagaagattttcgaaaataatgggcccgatcatgagccaggtc

SEQ ID NO: 51622 - DNA, 676 bp, Arabidopsis thaliana landsberg
atcttataaatctgttggttcataaactaatatgtgtataatacacgtaccttatatatgataatatgaaaaaatcatgggatgttgatttattttatacattatggtttttgtgctttacactgataaaaatcacaacaacgcgtttcacaaaagcctaacgtgacatcattatctccaatctgaccgttaagatcaattagctgacgtgttataacacatcattgtcctcttgtcatatactttttttttttctattttcacaagccacccaatgatttggaagtgttttcatattctaatcttctgagaaaaaaatcattataaaagtcagcaactaaaacttagcataaatcaagaaaacaattctcaaattacaaaacaattcataacttatcccataaatcaagattatttttttcctcaaatttctcttcttgatcaaatcatgcaattagaaagaagaagaaaaatgacacttttgtttaggttcgaatcaatcaaagtatggtatttttttccactcaaacacctaatgaatttggaagtatttcatattcttcccatatttgagaatattactataaagtaccaaaattcaacaaaattagcatagaatagatcaagcaaattaatctcaaaatgtttactaatctttttatcgtttagatcaatc

SEQ ID NO: 51623 - DNA, 1097 bp, Arabidopsis thaliana landsberg
agataacgatctagaattgtgattggtcaataaatcggcgctctctgttttacggtttgtatccatgtcttcatcatcccatcttcatcacacaactctcttatctctctctctctctttaattattccccatttctttaaagcttcaaatctctctctcacgaactcccaagctaacaacattcacaaggagagagaaacaataaagggcaaggaaaaagatcaaacctttttctttctttctttctcctgctctctgcaatttagaagaagatcgaagaatttgtttgttgtttatcttcttctataaaaacaaaccgtggggtctgttttcatttctggccttgcgattccgataaaactctcagcttctcattcaatccacaatccaaatccacttctcgaacatatatataattctatatttttgagagacagtttactttttctccttctctctccctctttctctttctctgtctctttggcttttctcctcctgttctcatggaagcttcacccaatgatcgacttcattttggcaaaatgggtttcgggtaaaaaaaacattcctctgtttttaactctgtttcttcaattctctgcttttaacagatctcttgggtttgtacttttgtgggtcgtctcttgttttcacgtatggtccacgacgatgtgtctcttgttcttagtgatccgtagattctatatgatttgattcacaaagtttgttcctttttccgtttctgattcatgggtcttcttcatctgtgtcctgcttttgattcattatagaacaaccgattcgtttcttaacttcaaatcatagatctgtcctcgatccacataatttgtcatccattctgatccatgtagatccgtttctcttttcatgtgtattattacgtgtaagcattacaagaggagatgccaaatcacagctccatgttgcaaccaagtcttcgattgtcgccattgtcacacactggtgcactgtttgtctattcgctatactatcatcttagatccagtctacaaaacttgatgctggtcaacgattcatttttctcaccctatttttgtttaagagctcattt

SEQ ID NO: 51624 - DNA, 477 bp, Arabidopsis thaliana landsberg
cttaagagagtaattctcgtcaacctgaggcagattcaatgactaggataaacttatgaaaggaactaaagtaatataaaaggcacgtccaaagagtcggaaaaaagggtcaaaaaagacctcgaaatgtatatagtcatatatttctctgtgatatgatttaatatgtgcaaaacctagagtaatgaatagggacgcggaaaaatacacgtatgggtacacttaaaaaagcatgtatgaacaccaaagggagcaagtcacgtgtaagcaagagtctaacaatactcatgcgaatctcgagacagatgtacttggacgtgagagttccctgaccaccgcaggtacttgttgatgtcgggtcactataagaggaacaccccaggcggccctttatcgcatgtaggtaaagccagtctgagctagttatgtgtgaacaagggacgcaacgatgctgtagtaaggataaaaggccccgga

SEQ ID NO: 51625 - DNA, 533 bp, Arabidopsis thaliana landsberg
taccaccgacagttccggaaacgagagaattgaatccgtcgagattgatcttatcgccaatttggaaatattgcgaagggtctccagacgagaaagtaataatgtaaattccgctgtttacttgaatactcgtcgcagtgtcaatgacaagaggtgctccagttcccgtagtattcgcgaaaaggatatcttcatcaattttacccgatagagcaatagcggcgtttctaatttcggctgaagtagcagtgattgggagacttagggagcttacgtagtccccatcattaatcatgctcgcatcaggagcattcgaaacatagtcaagtccgaggagaatatgatttagatcccgaacaaggagatccgtcataggattatagacttcttcacgctgagaaggagttccttgaataagaattccgttcgcatcgttcgtagcccaaacaactcgataagcaaccgcagagtcttgagggagacatgaactttggtcgccaagggtgatcttaaagcccgcagtgaaatcgact

SEQ ID NO: 51626 - DNA, 798 bp, Arabidopsis thaliana landsberg
gctggtctttttttttcgttgccctagaattcggcgcctttctacttcgatttggtttcttggtacctccgtaacccttaaattcctctcaaattttactcctttcgctagggttttcaattgggttcttcataagtacctgggagtttgtctggtccttcttcctagttgattccgctgctccgtgggttgttacaacggggaagtcttcttctccggtaagcttttcgtttctctttaaaggattcgtttttaatcggtccgttgtaatgcccgtgaattagacctcgctgagtttctagggttttgttgtggggaagaattgatatttattgaagttcaatttttcgttttcctaatttgggcaacttgggttttattcttcgttcttgtatgtcattcggttcaatttctgcttcagctcaatgtcgaatttgattgttttttctccgttttttaaggtacctagattagaattccgtgggagatgagttgaaacagtgtcaaaggaatgcactttacgttgtgttgattcaagaaatggttctacatttgacggtgtgtaaagttgtaataaagtttgaatatgatcaatggaggtggagagggtggaagtcagcggagagaactacaagggaaaagaagtatgtctcgtggcaatgattttgcgtacgccctagctagaatggccacggcgcagatatgcgagagcgttgagattaacagttaccaggaatcatcacagtcacgcgaaggtttgagattcagttcttttcaagagactgctcttgaaacact

SEQ ID NO: 51627 - DNA, 784 bp, Arabidopsis thaliana landsberg
ctctagttttggaaaaaaaaactctaaccggagataagttcatacttgaattatacgagtcttgtttttgtgtgacacagctggagtacggttgcctggaagatatttgatacatcaaaatggctatggagaggtgagtcaaagagagtttggtgttgattgttaaacatggatggtaattgatctgtaaattatgtgaatgggaaaggctactctcgatctttctgcaactggtttagaataaagtatacataacgagacctaatctctgttgtatgaaaaagagagacagaattaacaaataggtattgtagttatttgtctatttctgtaactgggttcctatgtgactttggtgtaatctagacttgtatatttgtagaataaaattgcaagtaaccagagaaatatcttatgaacatttgtacattaaactaggttcatcttgtttgtttgtttgacaaaaaaaaaaactaggttcatctgtcacttcacgtctgaatctgattgataataatggacagacaagtgattttactagtaaaaagagaagaatcatccaaaatcgttcacatcaaacaaacatacaataaccaaaaccacaatctccactaattgaaaccatggaacaattaaacaaatatacgtgaaagcagagacaagactccaacagaaatattctcaaagaaagaagaaagccttgtagatatatctttcaagtctttacttacggaaggttgtttctcatcatctcctcctcttcttcttccttttcgatcttcct

SEQ ID NO: 51628 - DNA, 1068 bp, Arabidopsis thaliana landsberg
agtgattttgtattacacatactaaactgtaaatataaataagcattggtaaaaaagtcaatttttcttcgtaaacacttacaaaagggaaaaaaaaaaatgcacaagcaagatcacttaaaaaaacccaggtcacagtcaattgttcggttttgtgattttcttagccactttttaattgatcggtttagatatagcctaccatcaataaaccgttattgtgttaacctgaaacaagccatccaatatgatcttttttaacttgcacaccatctcctctttctaactggcctctgttgattagtaacatcggctttagctctcagttcagtttgagatttgaatgtcgcttctaccgccaatttggttcccttgaacctctccctccgtttctccatctttttcagactctcttgtatacgttcattgtctatttcaacacctttcacttcttctattatctcgccttcttctttgtcatttatatctcgattctgcatagctttctcttcgcttttgcccattaactttcttggtttctgaacatcttgttgctcgattgtatctccgccattggagaatcttttttttgattggttagagacctgaaacacacacacaaaatatctatcacatgagaagggtcttgttcttcattgtacactaactgatgtctaaatatacggatgtgagcaacataaaacttaagtatagaagacagaccatataaagtgataaaacagtcagaaataacacaaagaaaatccagggatataaataactgaaaggcgtttatacttcattcaaatataggtttaaaagcatgtagatttagtttcccaatctttacctttccttgcctaccagctaagtcaacatgatcctgacgcttgatgaaagcatgcccatctcctctcagcttcttggatctgtgatgtctttcatcattttcatgaatatggctctgtaaatatccaaacctttgtttggtcgccatccgatatgtgtcggtactcttatgtcgccgacaaatatctcatcagtgtatgatggatgctcagaatagaa

SEQ ID NO: 51629 - DNA, 503 bp, Arabidopsis thaliana landsberg
tgatccctgatcctgccgccttagtggctgaaaggtaaagattgtgttcaaccagtgtatgaataccgccaccaagcacttgagagatctccatcctgaaactcccaacctaaaattgtacataaatccaataatccatatatcatcagcgcataatgaaaacaaataaagaacgaaattcttcaaggagttccccattaattgaaatgcatggagacaaacaaaagcgatacacgaccatcaggatcaacgaatcggagcttgcgtgcgacacatagtgcatacttttgtacctttaatctctgtcggggtgggggcgagaaacgcgcatggggacgctggggacgcctgctccggcctctctgtcaagcactcagttttattactgagattactctgtatagagattaaaatacatgtatagaactaacgctatatactgctccatcacaggaatccggttgctgtgcagcgacatccgctgagttgttggcttgactttg

SEQ ID NO: 51630 - DNA, 678 bp, Arabidopsis thaliana landsberg
tatccaatgttttttctctgatttcaggtagagcaggcgaagaatgagcaggctgctctgaagaaatagaataatataagtttgtgtttagtttttactttatgcagtgaatatactttcatgtaagcaaattgcgtgctgcagatttttccaagttttactgtattagtttatatagagaggcgccgtattgctctctccacccaacgacaccaaaataaacgaaatgtgaggttaacccacaaagtccgatgcaactagatgctaggaaaaggctgcagaaccatatgcgtatagaaactgagaatgttttgtatgtgtaagtgcgaaacaacaagtcaagtgaaatattagctgcatatgaagatacaagctgatgcagcgcatctttagtagttttagggattttatcaaacactcgtattgggagtgttcgacaagtaacgggttttagttttattttacttagcgtttcctttattgaagggaaaattacccatctcttgtagattacattaggattattcttctaggttttatctgtatctcttatatatagtgatcctaaagaaactttgtcattttgtgatttctagagaaattatccaaataactgataacaagagacatgaaattaattacatggaagaaaattgtcagaacattttctagtcaaat

SEQ ID NO: 51631 - DNA, 1192 bp, Arabidopsis thaliana landsberg
  unsure (1)..(1192): unsure at all n locations
agtaaaaacggtaacaaatacaaaacaatactattaaagaaacagcttaaccaaaaaaaaaagttagtattttagttgagagtataactaatactattacataaaattgtgtttagaaaataagtatagatgggttatcaaaaacatgtttagatgagatattagaaacgaaaaactgaatataaatatgaatatgagaaacagaagttgggaatatgggaaaacagctgtcaagttatgtcggaagagttgacttaggttgaaaatctctgacaaaacaggcaagactttagcattagtatatgtctaagactttggttggaccacactttctcaattatttagcgaaactttgctctcccccgaattactaaaagatttccttgtctcccttcatattttttgataaactcataataaaaagtattctactaatcaactatgtgatttatatacacttaatcattactgaggtaatgattcatgtcattatttgcatttgatatttgataatgtaccatattagtttgagctaatgtagtctattatctaatagctggattcaagttaaatttgacatattgatgtgaacaaaaaaaacaaaaacttgaccaaactaatattttttttaagataataattaaaaaatggaatctcagatcgactctgtgtatttatattcagtatctgtctatcacaaacttctcactttttttctctctctctcaaccaagaacatgaagcaaaccttgtgcctggcagttctcttcctcattttatcaacaagttcatctgcaattcgaagaggtatgttgttgaatacagtaatgattagtttcttaaaattaatattatcaataaccaaaatcatcttccttcaactctaaatctttatatgtcatcaggaaaagaagatcaagagataaatccattagtttcagctacatcagtggaagaggactcagttaatgtaagttcatctaaatttttccctaaaataaataagcaatttgcttattttattttcctaaaaccacctaaaatatgctatcagatgcataccaataaactttttcaaaggtgatttcttaatgatatttcatgggtgtatatttaatacataatgggngtttctttaatttcttcctaatggtagtaataagtatctcggaaattgcaaactatagggtta

SEQ ID NO: 51632 - DNA, 609 bp, Arabidopsis thaliana landsberg
gttgcatctgagatcaaacgtccacaaccaggagtgtcattcccttcccgaacaacaagcatattctgaagtcccatcgtgacatcctcggatgacgaaccattgtctcctcgaggaggatcagatgaagcttcaataacaacatcttcagtgcaaggtgaatcactatgctcagaagtttggctatcgaacttcaagatctgtggcagctcagaagacgtttcaacagaagtttcttcttcatcttccaaagaagcttctttatttagatcttcaactaatggtactacaacttctcctttaacagcagatccatctaaagattctaagtgctttgaacgatcaacagagttatgactacaacaacaaaaaacaaacaccaattacaacagtaaacatcatcatcctctactaaaacaacaagaagagaatttggttgtttaccatctgaagaatctggattctctgtgagaaatgacgtgaggagaagtaaaaacaggaggaggagatgtgaaactaagagagctaaacgtttgagcagtggagatagatttgaccgactcaattggagagagggtgcttatgtagttgaacactggagaatcctac

SEQ ID NO: 51633 - DNA, 821 bp, Arabidopsis thaliana landsberg
acattttttgactttttttgccccattccatcaattctcaatgataattcaccaatatacaaatgtatataatgttaatatgcatgtgtagcctgtaccctgtagggatagatataaatacgtgtatataaatggaaaattctcataggtttatctgtttttaacatctgtaaagtcccaacagaaagagttagataaatgatttctataaagaagagaaaaaaagtcatttgatattataacatttgcttattagaagacaattaaggatttaaacttactatccatattctacgataagtatctaacaaaaacaagtttgcatggtcttcacaagcatttgaaagttttaaccatttctgttagaaaactgttttctcgtttatcaatcttttcacttaccaaacgttgtgggttcgttgttcgaaaaactccattgcacataagaaatatagatgatagaatcgatttgctgtacaaaaaatatgaagatcgatatttccaaaaataatatgtaaatgataagaaaaccatgtaggcataataatttagtagaatcattcattctcccatttttttaatggaataactataaactaaaacatgtacggttgtaatgcacactagattttgttcgactaaaaatcatactaaataaaaaccctaatacacgcaagaatgagttgtaccgacttgtacgttcccggtcacctataaacctcattctctcaagtctctctgcataagaacttgacacaaaagtttgacttttcaaatttcgtcaacgattttgctcttcttttctttattgcatttaaggg

SEQ ID NO: 51634 - DNA, 477 bp, Arabidopsis thaliana landsberg
  unsure (1)..(477): unsure at all n locations
gctgaggngcccgtatcggtgagcaggccatggtggcggcaccagcgtcgcagcgtttggccgaggtcgggcgcgctgagcgaggcgcgcgcgagcatgccgtagctgccccagggcaggcggcgcgagaaggcgcccagcccctcgtcgtcgagctcctgcatggccgcggccgacagcagctccatctggcgcgccgtcatccggccgtccggcgattgcagcagccttggcgtgatctgtgcccgctccagcgctggcgccggatcgcgcccgtagcgccggtacgccgccaccatggcccgagcgaaagcgaccggcgtgacggcggcggggatgccggcgccgcggcgccggggcgaggcattcatgccggaagtgtgggccagcttggcacgatttgcaacctgcggagcccgcgcgatgcggcgacgccgttatgctggcgctcattgccaaagagtcctgccatgacgc

SEQ ID NO: 51635 - DNA, 499 bp, Arabidopsis thaliana landsberg
aaaagccactcttggaaaaaggctgatggtaggaaattattaataggctttatatctggtgcgtctgaaatcctggggaagtcagtattttacacggttgtaacttgcgccgatagtcaggataaagtcttgtggcaggtctgtttctaattgggtgaataagaaataattaaaggcccccacattatcattggtttgcagggtgtctattttacctcccctattcccaaaattacggattacccaatctgatttctgaaattctccgccaactgtcaggcgcgtgggtaaattacctgcacggaaagcataggtagtacgtgtacgtccgccaaaagtctgttcgttacggatttcataattggtgatgaaagggttttgtagttctgaaaccatcccatatatagccgttacatttgtccagtgttcattgaagcggtattcctgcgaaagtcctaaattgaaaactttctgatagattgctgctatttgtgcaact

SEQ ID NO: 51636 - DNA, 940 bp, Arabidopsis thaliana landsberg
tcaaagaagtgtctttgacccaagtttttttctttatttctgtaaatatatctgtctgattacttcagagattgagtcgaagttacaatgacggacaatgaataaacctaagcttagtgatttgatgtctctgggacgccggaatcatacttgagcattgacgtcggtagagtgattaacaaggacaaagtcgccggattcacgccggagatgttcagggacaaaaggaagacttcccggattttgctctttgtaagagagaatttaacggagtctgaggagggtaatggtcaagtatgaaagtctattgcttctccacttatctctttctggttcaatagaacctacacatgggaaaataaaagtatgaacaaatcaaacgaaaacgcaattgcggttaaatgtttgaaattaccttaacggttttgaggagagcggtttggttttgcctgaggagagaaactgttttgttatacatctggctaatgagttcttcgcttctatgtgcgacttcatcatccatgttgaagttaactggcggctcgacgaggtcatagtcgtcatagagagatccttcaaagtctaagcgtggtcccacgaactgaggtctctttctccatggtggtggttcgccatgtatcaccattgggttctccaggttccatctgaaatccaaatatatataagtcttgagtaagaagaagcttttactttaaaggggaatgtgaaaatatgcaaaattgggcctctcacatggttaagattttacgagctagccatgaggcgtcagagagataatcgactgatgcctttgaagtatctgaaccggagatcacttcttctgcagctcttccttcgagcaagacctgaaatagaaattttagaagtatataaactcgtaacatcgaatattagagaaatgagtgaagagtttttttaa

SEQ ID NO: 51637 - DNA, 1296 bp, Arabidopsis thaliana landsberg
  unsure (1)..(1296): unsure at all n locations
taaaaaacactaaagcgtgcgaactttttattcttgttgagatttactttgtcgtcccatatcttttcaaattttgatcctctataatatatgtttaaacctaacttatcaaactttacattcctttttcttttgctcactaggtaaggctcttgacatcgcttcacctcatctcttgtttaacatttataaacatgtagctgtctggttaatcaatttacatgtggtaaattataaattactctagaaagagatgtatattaaactgctaagttcatggctaatcttcggtatttcttgtttaaccgcgataagttgaacatatattaatgagctcttatggtttttgtttaatgtccatttggaggtgtgatcatctcatatgttctcaccaaaagattaccacttgaattcttttacatgtgaaatgttttaatttattaaccctcttctgttttgatcaaaacataaactatatatttgaatcttttatatataattcatattaattaaataacatcatgttttcaatgaatgtattgacatgatatcaatgaagaatatttactttggaaagagtcagagttgttctcgaaagatatttaaatgttccaaattatttccgtttgtctaaacatagaaaatccctaattacatataaatcaacanaaaggtaataattaggtcaaaacctcccccactaaatacatgtatactgagattcagaaatacaatactattatagtatatgttaattgaaagcaaaattcataagaaagatcggcgttgtatggaaaaaggctctacaactacattttatatgcatacgtagagagctgaaagtaaggaacaactctactccggtccagattaattgtaaagaactttatacattaattaaaacaaaaacgaacactttatactattgattaaaaaaagaagaagatgaataaaataattgcctgaaaaattaataattacacatgaaggcttagctttaattggagtataatgatgtccgtagctctgtaaacatgtgaagttctcctccttttgcggctagtgggtgctccattgcgtatcaaaaggaatattattctaatcataattaagtcattaaattactagtagtgtttattttttctcgcattatacggacatgtctcaatttggaccaatccatataaatgaataaacttattagctactactatattataacagaaaatatgtatataaaagacaaaaagtgggacatctattctggcaactaagagtttacaactttggatagaa

SEQ ID NO: 51638 - DNA, 577 bp, Arabidopsis thaliana landsberg
ttgagataatccaatacaacaaactcgtgtcacgctcaagtagtcaaatgtcgatttggtcacatccgcacccgtttattgaaacttatcaaatatatatcattttgaaaaagcaataagaaaacaaaggcatgcagagataaaaagctggaggaaatgaagaaaaagcccgtgaacaaatagttgaatggaataattagtatgcacagtacatatgaggctgtctttttaatttttaattaaaaagaagctcttacttcattctatttatttatttatttattttatttttttgtcaatccttacttcattctattataagtgattctgataccctatatttgtggaagataaaaataaattaaagctaatgagacgactttgagttaagttcaaacttttcattattaatcgcatgaaaagtcactatgattatgtttctttgttcatttataacacactcatcattgtatttaaataaaatttaagattgatgatgtctttaaatgacgattggtaagctagcaacctttaattcaaataaatttgcatgcatagctgacaaaccctttcatcg

SEQ ID NO: 51639 - DNA, 656 bp, Arabidopsis thaliana landsberg
ttatcctttggtagcttctactcgaaaacattacaagaacagtttgcttttgtttagatttttagttgtcgttggcactgaggaatcatcattgtcagaagattcactagatgaatctctttctcgacctctcactagtgatgaggttaagctttatcttcttctcctgtttatctaagcgtatctgttctcagatgataaagaaactatgttctgtaccaactaacaaactctccctttggttctgtagttgaagtcactgctcattgatacagagagagcaaagcttgttaaaaaattgagtgaagctaatcaacagaatcggttcctcaagcgtcaggtgcttctgttatatttatacacttactttagtacctctatctgtccattctcttagatgatttgagaaacctgcaactttatatcctattattctatttgagaaatttagtgtctatcagattttatattatcacactcttgataaatactagaaaaacctccaaggttttagggagatacatgtcagtgatgtcacagaaacatgttccttcacttctcttctttttctgtaaaacggcactgtatcaaattgggaagatgatgatgaatcatttgcatacttaaatacactttccactgttcttcatctgtgt

SEQ ID NO: 51640 - DNA, 811 bp, Arabidopsis thaliana landsberg
aattcaattattacaaaaattatagataattttcttatattaactttttaatcttaggagtttgcgaaactagtacgcttgaaccgcgaacctccaaaagattgggatatcacgtctcattgctttgcagtcttagatgtgggttctcaacgtcaatagtctgtgcggcaaagaaaaacggaaatcagaaatgacaattcacatgatggtgataacgacgacgattgtgagcctaatgaagttcaagaaactcaacaaaccaaggagatgtatcgtgtgatcatttataatgattcacaaccatcatatgaattcacacgatcgacaacattcaagagttgatccatcggctagtcgaaagaatggatcaagagagtctagcggatcatgggtaccacgtagaagaaaattttttgaatcgaccattcaagagacaatgtcttccataagagactttcaaagggaatcttttgaacgactacgtcctggtgcttttgaccgcgaagattttaccgagtttgaaagggcggtcgatattcttgaatcattggagattcgaagatacaatgatttctacgttcaatgcctccaacttctgaaaactgatctattttggcgtaattattggatgtcttcaagtcggttttagaccaatgaggataggatatgattattggagtctctaacaggatttacaagccaaggtgaaaatgtaggaattactcgtccaccgagtgggtcttgtacgcctcgatcatctgatccatcatctggtccatcatctgcttgtagtatgtctgcaaatacaagc

SEQ ID NO: 51641 - DNA, 441 bp, Arabidopsis thaliana landsberg
cttgaaattgatggttttttagggaggaatttttatattagttttaagtgaaggtctttataatttcaaaaatcagaaaattcaacgccttcaatgtttaactttgtttataaactattttgtcaagaaaacaaaattttatttgttaacaaacatcttatttgtcaaacataagttagatatgttttatgtttttgggttggactaccaatgtttcttattttgttcttttatctactcatcaagttaatccaaattagtaatattttaatttgatcaaaaagaaaaataaaatccatattttcaaaaagctccttaatatatcatattcaaaatgagttagaatcagtgtgactatctattcgatggatatgaaacatctttattctaacttaagagtgatgtactaatcatagttcgatggcggataggtcaagaaaa

SEQ ID NO: 51642 - DNA, 660 bp, Arabidopsis thaliana landsberg
gcagtagaatcaacgtgcttcaaactgtttattgcctttagagagtaaaacgaacatgttaattttgcctgtagagaaaaatatatcaaatgagacagagttcctgtggatacctgcaacagttctgaaccccagggaggccttgtctggagggtatgtctatcatactctagacagaaatccctgacacgttcgttggtgggataaagagatgaacaaagtctcagtcgcaacttaaaaatatttttgccatcttccaaataatccaacctctcctgtaattgtcagagtataattttataattattatgtttgaagtaatgttgctttgatcaatattaagaatgtgattacacattccaagcttgagtataaatagtaaaaagacacctaacgtagatttatctcactagtaataccaaagttaagaaatagaactaattaataggtgcaccttccactattactagactatactaaattatacataattctccaggcactatgcacagactttaatattcatttccctaatagatgccccagtgagctgatctacaaccatactagttttcttcattgatctcttgaaggatatgcacaatcgtatatgtcttgctatgggaaggtttgcactctcactcctactcccccccttcc

SEQ ID NO: 51643 - DNA, 1869 bp, Arabidopsis thaliana landsberg
atagagatcttgaggaacatggagacgtcatacattgatgaaaaggtaagaagaaaagcgacctgtcaatctttctgataaaccattctttggtatgaagcagattccttaacagagaatcttaaggaagggggtattcatttggaacaggaaggaacataccttttcattctccattagcattatcgaccgatcttgcttattctttgaggaggccacatgacacgagtgacccttccttgaattaaacccaaaggaatctgccaaaacaagtttatccagatcagtcacatgggacaggccttgaaaagaatatcatgtgcatcatctacgttctaattctatgaaactatgtgctggggtttggaagcagagaacttacagggccaaaggatcttgagtctaagctggaagttttgttatctccttctacccaacaatgaccttctgggactctgatcacatcccgagaactacttatccattcaccaggcatcccgactatcctctttatgtatctatctccgaaatgtgtcggagagctgccacagagatgcagttcacatcgtcaggagcttaatgatgtatttcaaaatatacaacttagaacacatacggcacaatgtcagatgaacattataaaacagatttgagacctgaaaaagctgagctaaaggaagcaaaaagcaagaatagaatccaaagagtttgtattcatgaccaaatacattatatcaaatgtaccagagattgaatatgcacgaatttcatggttcagcaccacaaataggacaacaaacatttgtaaggttttagggaattagatttaataaaattgtgaatgctgtaagcatccaagaaaaggtttaaacaagagatcaacatgtatttaagtattatgtagctataatcttcccttgtcaaaggatgactcaaatgtggcattatagggaacatacctgaacactacaacatcaccacgcgcaaacttgtaatccttaaggcaaaatttgtccacaagtacataatcatctgcatcaacatttgaacatctaataagaaagaagaatggaccaaaagaagcaaaagtctaccttctagcagtttgtgcagtaggacacttacctaaataagaattccgctggggattaaatgtgggagacatggaatctcctctcactggaacaacgctacaacatctatctgaaatggtaagccctataatacttccagtgaatgatttcttcgccacttgccataaaatattctggattcccatgtccaagatggcctaactaatatctgattctcagcaacattcatagaaccatctatctgcaacaaaaccagaaggctttatagttgatacatcatttaaatgagatttaaaatacaaccaatacgattatatcaaacagaaaaccattttagatcaaacactacagtctaaaaccacagcattgtcaaccagttaatgaatcgggttttctaaatctaatctcaaaccatgctaaaattagtgaactaaacctaatcgattcatggaactgaaagatgaaactaatctgaagtgtaagcctaatcgaaccgtatcgaaatcgaccacaggactgtgaaaacaaaaaaaacgcaaaatctaacgtgattgtaataacctgaaaatggaagaaatccaggagcaaaagaatgagagttggaacacaacgactcgcaaatcaattttgtgaagcggatgagagcagagaaccagagctcgcgacgatgtgaagaagaagaatcagggtttctcttttgctctacaaggtttagctggtaccataaattagccggttcaatcaaaaagttcgtgtcgcggatttagtctggttt

SEQ ID NO: 51644 - DNA, 1033 bp, Arabidopsis thaliana landsberg
caattagaaaaagcatttgtcgtgattttcgatattgtctcttttaacttgtctcctgcttctttcaatgcaagttcccagtgttatcaagcgcagaatcttggtcttcccatgtcaaaaataaaataatatagtacttactaaataatttgtttacagacatctataccaattcagttaaaaaaaacatcaccaaaattcacatatactacgcgtaaatagttatgttaattgaaaattccaaaacctagtagtactttaatatatttttcttatctttaaattaatgaatttgacatctatttattttcgttccttatgcaagtacacataaataaattgatgaatttgacatcttcgtgaatatctcaatcgaaatgagtgcgagctatgtaagttatctttttatgcaagtacacatatagtatatgttgaaacagtactacttgtagttaactaaattgttatcaataatttccataaaattattggattgttgataagaagagtcctccttattacgagagccgtgattattacgcccacaaagattaatatttctacgacggtgtaaatgtaatatgtataaataatattttcgtgacaatatatgggaagaagctgattgcgtgaagaaagctatattgattggattggttgattaagaatataagatacatatgtgtgtatatattagtatactggttagaaattaaattcataaagagttattgttttacgataatataataaagactaaagcgaagaagatggacccataaaaaacatgaccaatcttttacataactctcttcattagtcgtttgattttagtggtcaattattggagacatcgaaatttggatgacgtcggcattgttccttcaacatgcttgattaaggtttactactttacgatcctttatataccaaaaaaaaaaccaattaatagtttgataacaaaccacaaaccgtaaatattaattccactcattttcttctttcttttcaaatatgttagtacatattaaca

SEQ ID NO: 51645 - DNA, 571 bp, Arabidopsis thaliana landsberg
tggttacaaatatcatattactctactttgatctttaaaacaaaaaatcttattataacatttttatatatctttgtatatgttttgaccttgaaaatttctctaagtaatgaaagatgtttaatactatatccattaatgcatgtttccaccggattaggcagttgaatttgttgaataattttttagttgattatttcaaaatttgctatgtcagtgtatttgttggacgccttgaaccatctttagcaaaagtaatgtatttgttttaaatcaaccggtttaaattcatgcaaaaataaaattctttcacaaaggctaaaaatttgaccaagtcagtggtagataaaataaaaaataagaaaaaagtttttgatcttctcgaaagcatgcactttttgaattaacaatgtaactcaaatgtcaaaagccaaatcttatgactttttaacttataaaacattaatagtttatgtattggaacattctgcatgactgcatctatgtgcccctagtttaatgaatctagtttaatgaattacatcactatacccaataataatgtaaaaaa

SEQ ID NO: 51646 - DNA, 617 bp, Arabidopsis thaliana landsberg
  unsure (1)..(617): unsure at all n locations
ggctatggaggctgccacacacgctccctcgggtttcacattatttatcgtgtgacttgtgacttgcaacgatgtgcaatcgtgtcgtgacgtgttctaaacggcagtttaatttttgtcttttgtttatttggttatcgaatactacacctagactgtcatgtcaaccgagagtaattgacgcgcacgttacatgcaagatctccaaacggttgtacgtagaaatattccaaggggtggttcttagaatttagcagatcgaactgttatctagtttaggcagatcctctatttaatgacggatcctctattnnnnnnnnnnnnnnnnnnnaccaggagcgtacgaaaaacagaaccacctcgtcttctccatctcaattctctgcgacattgcttctctggcatgtcgtcacttcgtctgccgtacaacagatcaagggaaaacggtgtctctgaaccaccaccgacgttttgatgacctgcacaggtgctggcgaattaggtttctaggaagtgcttcgcgcacagtcgctcgggttactcaccaacactcttggtaacactataagtaaatctgcattttagtttattgcgatgacggtagctaatggttagat

SEQ ID NO: 51647 - DNA, 624 bp, Arabidopsis thaliana landsberg
aatatgttataaaaacttgaaaaataacttcacatgtggaaatcctacaaaaaaattataaaataaatcagcttatttgacaaatttgaaataaacttaaggataaatatcgaattaacgactaggattcttgtcactttttcttaagatatatattttgatatatggtatttcatgttcaccatcattatcttgattatgatcattatcaacatttatgatctcagaaactaaacaagtcttcaaacaatcatgaaaatcaagagagagtatttatagtaaacaaacgatcatgagtttttacttgattcagtaaataattctgaattttcgaaaagataacacatactgtaatttggtaatttcgttttatggtcatacaaaatacaaacaagttaatccaaatgtgaaaatttcgaatacttcttaattttaaagttttagctaaattatcttttaattagtaaaatatgaataatggggaaaataagaataacgtttttatttaacttttttttataaagacaacaaacagagagtttcgctcctccggtgagaaagtaacactttgatatcggagaacacacactctctctcccgggatggagagtttggctctccgtt

SEQ ID NO: 51648 - DNA, 992 bp, Arabidopsis thaliana landsberg
  unsure (1)..(992): unsure at all n locations
gccgaaattcctcttcgaatttagaaaattgagaaccagattgtatttctgccagaagttggaaacttggctcgttaaagacacaataaaagtaaatgaaaaactattagcaattccaattgtattgaatatttttgtcaatgattataatcgttttcaaagtatttcaatatctattgggtagaagttataacaaccgaccaagaacaaccaactattaattacgtgagcgtagatgtatattgatatcattcaaagatctttcgtttggtattaatatatacattgtttttgaacttcttgcagaaataaaacgataatactataatagtcactacactcaatagaatagagcccaaaatagtggtattcgtcgattttgaattacttgaataacaacttacaattataaacgacatggtttgcatgttgtacgttgatttggggaggtgtcaaataatcaaagtattatacatttatactagtagtagacaatattagcaaagacagcatttgaaaattcatatcaaaacgacatcttatgatcataaagaaaactagatcttgattcaccggtgacattccatacccgaccaaaacaaggagaaaaaaatagagaagtaatgttgcgtcgacttgcaagaaacaatagtgcaaactatatatgtatagtattcaattcaatatacagacgaaacaaaaacctattcaacatatatataaatgaataaaaaccctgagaatttataagtgggccaaagaaatcttaagaaatagagatgcgattttttgtccaaacaaagcaaatctaatgacttatttacttttgggttggacccacaagaagatttgatgttttactttctcttcttttctatataaacacaagcacacactattcgncacagtcttcttctcttctcgtttgctcaattctcaaaaactctctcttctaatgagacanaaggtcacagacacggaagacagtatcg

SEQ ID NO: 51649 - DNA, 761 bp, Arabidopsis thaliana landsberg
  unsure (1)..(761): unsure at all n locations
gagaggcgccattaacatgtgtttatcatttacggggaatctttgcaatttgaatgtaagaatgaccaaaggacatgagcaaccccctaagaaaaagtatgtcatataaacggacaacagcactaaagatgtcttctttttaaaaaaacatgagattatgtgaaacattgtagtaaggtttgcaacaaaaagagaagaaaaataatgtcaaattaacacgaaaatacagttagtaataatagaaaatgacaattatttaagtatgaatgatgagtggagctggcttgggtgagctggaagacaacaaccatatgaagtccataaacacttgtcacaagtcaactgtccttggatcccgttacaccacactccgcgtgagaatctcaaaatatattgtagtattcgtaatttattgatctagtatatagcaaaactgaatgttaagtttatgctctactaattcttattttttgtctactttttgaaagacaaattcatatatagtctcaacataacttacaattggaataatcatataccaacacaaacgcaagatccaacgatttttttgcctcgatatagttaaagaagtggttttctttatatataatactctttcatgtaaaaaaaaaaaaaaatactctttcatgtcatgtagcattccgattggtggtgctaggtactattggtcacgctagtgtggctcgagttctatangtagatattaggtcatcggctgttttgtggatgatattttttct

SEQ ID NO: 51650 - DNA, 888 bp, Arabidopsis thaliana landsberg
  unsure (1)..(888): unsure at all n locations
ctgttgaatcagtctctgaagtcgtggtttcactatgatcctctgtttcattctcatgctctgtttcgattccttcaatatgatgatgctctgtttcaaaatcttcgatatgatcatttgcatcaatctcatgctctgtttctaaaccttcaatatgatgatgctctgtttcaaaaccttcgatatgatcatttgcatcaatctcatgctctgtttctaaaccttcaatatgatgatgctctgtttcaaaaccttcgatatgatcatttgcatcaatctcatgctcagtttcgaaaccttcaatatggtgatgctctgtttcaaaaccttcgctatgatcctttgcctcaatctcatgctctgcttcagtctcatgctctgttccagaactttccctatgatgttctgttttaatctcttgctctgtttcctctgtttctaaaacagagaaatcattatcttcttcttctttttcttctgctaatatctcactctcttcattttcttcttcgataccaatctttgtttcactaacactctctgaatctctttgtgacaagatctgcatagcaaaccgcttcaaatcaacaggacttaacctatccaaagcttgagctcttaagttccatagacttggagatgtagagttactagacatcatcattgtccctggaagtactgatctcggtgttaatggagatggataaaaagagttgttactttctgaataagaagcagtcttgtaaagcttcttcttgcttctgatgaaacaccttttggtgttgtaaaactctttcttccttcagattcaagatccatcataccaaatctttctcttgtcgttntgattagtccatcaagagctgctaatacantgctcactgaaac

SEQ ID NO: 51651 - DNA, 670 bp, Arabidopsis thaliana landsberg
ttttttttgtctaaaattacatatagtataaaattgtttatcatttacagaaatgttgtttattattttaatttaaaaccatacgaccaatcatagaaaaatattacataacataaatgtacacaaaatattaaatatatttaaaattttacgtaaaaatgaaactttttgttcggagattttaataaaataaaataaaaaaggagaagctttgtcttcagtgaaaacatataaatttatttcgtatgagacgaatcaattgttgcttgttgtcctagcatggatcactctaattagtagtaatgaggttttgctaaaagtaacaagatcagttgaagcaaacaaagatgtttttagtgttgttgtttttttggacaaagatgtttttagtgtttagctttggttattgtggtacaatggtaagtcttgatctttggagttattgttttaagtcgtagcttttattctctctttatagcttttttttagcttagtatccggagataaatttgtctttcaccggcttagtttttggaagggtttgatccttgccggcttcatgtatcaaaatactataccaccgttgtaagttgtaatcctcaatggcgcaatgaatgataataaataaagttaactctttcaagtgatacaaaaaacgacaagaagaatg

SEQ ID NO: 51652 - DNA, 545 bp, Arabidopsis thaliana landsberg
tacaggtaaaaaggaaaaaaatcttagtgatttcattcttaaagatctactcaaaagaggttgattattttaaaactttaaaacgaccatttaataaaacaaagacaaaatagtatttgttacttgtcatacagtgatacagatgttaagcctttggcccttgctttgaggacgaactctatcgcgccacaccggtacaagtatagattacttgtcattcaaagtgaagcaatatcacataaagaggagtaaaaagagatgtgtacaacaacagaaaaaatctattatcatttctatacattcaatgtacaacaacaaaaaccaacaaaccatgaccaaagatatcacatagagcacttaatagccaactgagctacataatctaatcaatatttgttactagctaatttataaaaatgtgtatgggacacttgctccacctgtttataccattaatccgcctttgagtctatggatagatactctctctgaatattaaaatggaccgtaaatatatatttatatctatgtagatgcatagacat

SEQ ID NO: 51653 - DNA, 1940 bp, Arabidopsis thaliana landsberg
aggaagatttgtattttaatgtttcctgtctgacttattcttgttttcaataggaatgatctctctttctctttctctgtctctgtctctctccctctctttgtatccctctccatctgttaatccctctgcctcagtatctgtttcacaatgaactaaagagaaaattgttttgttagagctggagacaaagatttgatgaagagactgataaaactctgttctaaaccctaggctttaacataaaacctaaccttttgcagttctaactaatgtaaatgcaaaaagaaacacttagtaaggtgcagatttctttaagtcattgatttcagacgaaccaagtaaatcccaaaactaaagaattagaaacagatagtcctagcaacttacctgcacaaatccctcccacacacattgtatatctttaggcattttgtgtaggtggacaaaccggcttcttggtctgcttcattgcgtcctgcttacacacggctggctttttcttgaaggttgtgcgtttacggactttcagatgttcacccgttaacatgtaaacattcccaggttcaggaatggtgaaatcagcagggtttctattgacgctgcacacaatgggtccagaactgttcttcacaggtcccgcagaggcattgttattgcagctctctgcttttctcttttgtttcttttctttatccgtcatgtgaaatttcaaaggaagcatcatggaattcgatgctcccagcagctggaacttcgcttggtcgttgctgcttgcaaacaccggcttttcatgagtattgtaaacaggagcaaaggtgtcttttctcttggttttcttctcttgatgatgaggactccatgaagcattttgaaatgaaagtgaagacgtcccaataggtggagtgatggggaaactcttccgggaaggctcttgtgtgaatctcttgctgtatagatcaaaaggtatctgcttagttgagtaggctgacttactagagtcccctgtttgaagctctataaactctttggactggttggctggcggaaaatgtcttttagtaaatttagtgtttccgtgttggtcagcgggagtagttgacctcaggcgaggatccagaaggctgagtagatgcaatgccggtatagagctctcactagaaaagttatctattggcctactactactactactaaccccagcagcatgtttgcagccaaatgaaaattctggattaggcccacatttttgcttcccgttggcagcaacaaagttgaggttccatgtattttcattgttagatgcctgtgaaagcgtacccggatttgttgactgattaatatttaaagaaactggcttgtattgactctgtggtggtatcatggaagatggccaaattggatgagaagcttctctgtattgattaggaacactctggcaagtatcacaagcacgtaatacccgaaatgaggatggagaagggttctgattacccacagttggcaaattcccaagccactgacagttgtgaccagaaaaccggatggagctggctcggttttcttgggtaggaggaaagatcccaaacggagaaggcacataaggctgacttattgggaagaagtcatgagagttctgctgtcttcccataggaaaatgttcttccctccttgcgttgctactacacggttttggtggtcttattgtgttgttgtcctcaagtgagatcccgttatcgtaggtttcattgagatcaatcagtagagcattcttggatttgtgtgctgtttcttgtgatggctgtttgttgctaacatcttcttctttgtcgggaagacacctctcgtactggtttttggccatgagctccactatctccattggaatatcatcgttgttttgctcttcagtcgtagtctcctttctatcgtgactttgg

SEQ ID NO: 51654 - DNA, 1144 bp, Arabidopsis thaliana landsberg
aaagaaagaaaaagaatctttcgggtcataaaattcaaactaacaataagcaattgaatcatgtgcaaattttgcttgattataaaatctatatagcctcaaggccaagtcagctgttcccagtcccacatcggttctgatagtccatcaacaaactctgtgttcatagagacatcaatatgttctccttctgaaaacgaagtttccagtgagttttccacacggaacgatgtctcagctactgcaacattacttgttagctatttctctgtctgcaaaactccctcaggacgtttatcaaaagctctggagcttcctgttgttatgtagactcgacataaactgaactcacgtctcattttcatttttcaagaaagcaaaaacaaaaaatctcgttattaaaagtaacaagaatgttctaatttaaaagtttttaattatatgcaagtaccttacggattgtggaagcgttgactgtttcgtcaacggcgtggtactcattcattttccatttagtttttcttcctgtgggtgcttttccagtgtagaaaaccatagttttctttgctccaatcattttgttgtctttggaaaagactggaccaagtgatccagttgctttccagtatcctgaaccagtagttctactcggtctgcctcctcttgcttcgcgttcttgtcgtggcacgaagaagaaccattgctcagcgttttctcgacatctcactccagcaacatctgcaaaattgtgtgagtttcatatataaaaacattacgcatatatagtctttatggcattcatgtattttaggggtgttcaatctgattataccaaacccgaaccaattcaaaaccgactaaaccgatctggaatcgggttactattttcgtaaaacaagaaacccaaacaccaaaatggagaaagtttacgtgctataaaacctaactatgtatgatgtcctaatgactctcaagttatattaagatatgacgattttgatgccatagcagatatatatatcgacaattcatgtgaggctaaccgttaacgtacttggaagatgactaggctcgacctcaaagacgtcaagtacggtaatgacacgatgcattgagtcatcactccttccttcgagctggtttc

SEQ ID NO: 51655 - DNA, 578 bp, Arabidopsis thaliana landsberg
ggtccttaaaataatgatttttgcaaaagtctcacataaattaagacacattatgacaacaccattcactgaatcagtgacattaaacatttttctgttttccataactctgaaccaatagtattcatataactaaattcaaatattttcaatcaatgtttttaaaaaaaaaaaagattctaatttatttttccagtttcaaaattttcaagattaaagatattccttatgttccaataataatgattttctaaaactttcacacaaaattaagaaacagttaataaattatgaaggcaccattcactgaatcactgatattaaacactatatgttttctacaactttggaccatagtattcatataatttcaaatatacaatcaatgatttattttaaaagactttcatttttttgaagtttcaaaattttcaagattaaagatattccttatgtttctataataatgatgttctaaaactttcacacaaaacaattaatgaattctaacttcacaagttactcatactaagcattttcccatatctatgaactataataatagaaatttagatatt

SEQ ID NO: 51656 - DNA, 963 bp, Arabidopsis thaliana landsberg
cgtttgtagtgaatatagatcaattttctatattccgttaaagtaaagacgtaagaatttttatctaaactggtatacttgacagagtctcttcaagaagacaatctgcaaacattgaaactccgagagccatcaaagaacctgcaaatccgcctttgcatgatgacaatgttgaggagtctagtcagatatcatgttcagtttcaatggagcttaaaagagaatcaaagaagaaaccaacaggcgacgaatcagaggaaatgagaaaaacaacttgcggaagaccatcaaggcaagctgctgaaaaaatcaaatcgtacaaggaacctttacttaatgagaagatgcgagggggcttctgagtcttgctaagatcgaataccctctcgtcagcctcgtatgtattggattctgcgacttcacttttgttcagtgagctattgctcaatgctgtagatcacaatgtatattcgtagttgcttgtagataaagctagcgagtggtcttgctactgtacatgaaacggattgtcaggtttaattcggtttgatggagaacccctctgtgtactctgctaagtaaattctttcacaatctcatttgtaaaggggtgaaataatattttcttcatttttttcttacagtaaataaattagtaaaaacaagctctctaattatatcatgggtaataaaactcgagcggtggtaaaccaaaaacctcacagttttgagttgacaacgaaccccataattcaaagattgggagacagtgaaaagtacacaagtgaatctcggtacgcaatctaccgccttatttcttaaaagataattctaaggatttttgttcatttcttgttgttttcctataaaaggtttaataattgttacatgacagataatgatttatcagataagcgaatggccaacgactacgtttccactgttgtgcttaatcttagcctc

SEQ ID NO: 51657 - DNA, 545 bp, Arabidopsis thaliana landsberg
acccgacgcgcgctggcccatgagccccgaaggcttcagcaccagcactccgatcatttccaggaaagcgaagatgtcgcgagggttgctgggcagcacgccgccggtgaggtcgcctatgtatccggaagccatgctctcgatcaccccgagcagctatgccgcccagcatcgcgcccgcgacgttgccgatgccgccgagcacggccggcgtgaaggccttgagcccgagcatgaagcccatgaattaatggcccagcccgcagtagagcacgaccatcaggccggcgagcgcgcctatccccgagccgaggaagaaagtgaatgcgatgacgcggttgatgtctatgcccatgaggccggtcacctcggggttctgctcggacgcgcgcatatgctggtccagccgcgtgcccttgatgaaccacagtagcgcatccatcacgccgcaggcgagcacgaagatgtacgcctgcaggtcggtgaggtcggcgcctgcgaccgcgatgtgcgccggctcgatcagctcgggcatggagatgtac

SEQ ID NO: 51658 - DNA, 265 bp, Arabidopsis thaliana landsberg
tcggacaggcaagtcacggacatcatagaatgagaacgcaatcgcacgcagactgacatcgtgaaaggcatcagccgcacagtcagcggatcaatgtagtgaacgcgcgctcacatgaagtggcacagggaacagtaactaatccagtcaagacctggcgcatgcaatgcagctcacctactgctgccagatctaacgctgccgctactgcagccatccgcagtatccgatgcagaatcgctggcatcatccgcgacatgcagaa

SEQ ID NO: 51659 - DNA, 587 bp, Arabidopsis thaliana landsberg
cttctggtttgggatctaattcaggatgttcatttacaggcaggagttcctgatgtccacatttgggtgccttgcgcttctggcctttattcctctaagacggcttataacagcttttggaacggtacaacatcctttgagccggctaaaagaatttggatgagttgggctcctcccaaatgtaaattcttcatttggctagcctctctcaaccggtgttggacggctgacagattggcccggcgaggtatggatcatcatgacaaatgcctcttttgcgatcagcaggaagaaacaatccaacatattttgctctcttgtgtgttctccagaaacatttggtggcaggtgtggtgtaaagtggggatgcaacatctggcacctgggcctgaggacatgattttccaagattggtggagcaatgctgaaggccaggttcctaaagagaagagaaaaggttttaacacgttggtaaccttgtggcttggtggctgtggaacatcgaaacacttgtgtcttcgagggagcttcccgagcactagagatatcctgcagacatccatgaggatgctatgctgtggggtatg

SEQ ID NO: 51660 - DNA, 539 bp, Arabidopsis thaliana landsberg
agtctagtgtgagaactcgtcctttgttaatccgtatggtgttgacgatgatgttgttgttgttgatgatgatgatggatcatggattggagcaagattcatggttttgggtgtactttaattttgagaagaaaattgtgtacgaaactaggactaattctcttgacatacgtatatatatagatatataatgtgttatgactaatatttggagttgggctgcacgaaaatgcctttgtcatttggctttttagaaaattgggtgtaaaagtgtgaacgtgacatcaaatctcattattgtatgactcattggatccttcagaagctacctatagatcaactttttggataaacaatacgaaaatgaagcatcaaaatggaatctaaactaaatttgttaaattgaatatgatatgcaagacgtagaagaaagatcaacgcccctattaaggatgtatatggtggaagaagagttgtttctgatttagactttcgtatgggcattggtttgtatgcaagttgcgtgtattacaaagaaa

SEQ ID NO: 51661 - DNA, 702 bp, Arabidopsis thaliana landsberg
cgaaggcgacttatttgctcactgataaatcctttaagccttgtcttccaaggtctctgaaacaggaaaaagacaataacaaactcctatcttaagcattacataataaaacattaatagtaggaaaccacaatgcatgcataagaaataataagcaccatatagagtaatattatctatgtagttactatctatagttaacattattcgagataatgccgagatacatgtttgcaacccttaatccacagtaaaggaagaaagatgcatgtttataaaccacccgctcccatatgagtttccaaatcaagttctttgctctttctgataatatttgtctaatcaactttactaattttcagcttgcatacacaatgtgaaagtgaataagacaagccaggtcggtttactgtatgcaaccgtgagactcacatttgaaatatcacaagggcagatccttgggaatttggccggcatgagactccctcccaagcgtcccagctagtaggagcacaaggatcaccattccaacccattctatcaggaacacgtagtgaatccttcaatgctttcatagcagtcactgtaaaacaaacagagagtcaaaaatatgccacagaccagtttttttcaaagctattatcagaactccaatcaaatcaagaaacccatgatgttgcagtccatcaaacaacagtgagt

SEQ ID NO: 51662 - DNA, 1055 bp, Arabidopsis thaliana landsberg
gcggccgccgcatcgatgacagatctttctattatacccctggggaagaagaactaagcaatgcgcaacatcaaatctgcagtccttgtcacagtagatgtaaaaccaagttccctttatgtggagtctttatcgataaacacaaaatgcttaaaaggagtaactttgacaacgcagatacggaggaggtaaacttcatcactctctctatctctctctctttcttaatctctcattttcatgaaatcttactaactacataagctacttttgttggagcagtgggttcaatgtgaatcttgtgaaaaatggcaacatcagatatgtggtctctacaataagcttaaagacgaagacaaaaccgcagagtatatttgtcctacatgtttattagaggagtgtcaaagtatcaacaacatggcactcgttgactatacggattctggagcaaaagatttgcctgaaactgtcctcagctactttctagagcaaaggctattcaagcgcctcaaggaagaaagataccaaacagcaaaggctaccgggaagagcatcaatgatgtaagaatatgaagtggtttcgattcatttgagtttctgttttgagtttctgtttttttatacggaacttgttactttttttctttccaggtacctgaaccagaggatcttactctcagagtcgtgttttcggctgacagaaccttaactgtcaacaaacaatttgccagtttacttcacaaagaaaactttcctagtgaattcccttacagatcaaaggtgagaatcagtagtaccacaactgaatatttgactttagctccaaatatgtatttcaaaacttagttgatattaatttctactctttcaggttatttcttctatttcagaaagttccatgggagttgaatataatgccttctttggcattgtgtttgtcccaaaaagtttaggaatccagaatggttaacccaaacccaaaacccaaacgttaggcaccattacaatttatttttaatctttcggatttcttggtcaaaaaaaacttttttaaa

SEQ ID NO: 51663 - DNA, 500 bp, Arabidopsis thaliana landsberg
  unsure (1)..(500): unsure at all n locations
ccccgcccccccccccccccccccccccccccccnctccgtctcccccccccccccccccccccccccccccccccccccccccccccccgccgcccccttcgcccccccccccgcccccccccccccccccctctccnccgcccccgcccccttcttttcccccccccggacttgctcgccccccccccccgcgggccccccgcccccccactcccacccccccnccccaagcccccgcccccccccccccgcccccccccccttccctccccccccccccccccccccccccccccgcccccgccggcccccccccccccccccccccccccccccccccccccccccccccccccccccccccgccccccccccccccgtccccccccccccccccgcggcccgccgccctcgccccctggctccctcgcccccccccccggccccccccccccccccccccccgcccccccccccccccccccccccccccccccc

SEQ ID NO: 51664 - DNA, 595 bp, Arabidopsis thaliana landsberg
gcaactgaatatccctgttcttgcagattagctatcttggcttattccctttgtagaggttacactgaattgggatctctggaagtagtttagcctgaacaagagagtcaaaattgacacaacaagcatcagaagcctgcgaactagctaactaagagtgatataaacatattctatcatttcacaaacttatatttatgcaattacatctttatttcaatcttcaaaagagaattaggatctaatgaatctaccagagcaattgaaagtgtaatgtgaacagttgcttactgtgagtttttgactgtttttgtctgctctgcttccagctacgcctagcaatgtgtagagaatgtacggtggttgaaaggccgatgcacagatatattatatagaaagcctagcaggcagccagagtcgcatttgcggttttcgtctctagaggtaccacgttattactttggcctttacgtgctatctggtttaagtgataggcctccttagccataccagccttaagaagaaaagataacaaagaactcactgtaatcttatccggtgaacaacctatcgcaaccattttgttaaaatctaa

SEQ ID NO: 51665 - DNA, 605 bp, Arabidopsis thaliana landsberg
  unsure (1)..(605): unsure at all n locations
gaagatccagctttgatggaatttttaagaattgagattaattgaccttttgtcatttatgtataacaatgaaaccatttgtctcatgaaaaagataaactatttttgtagtcctcacaaaaaaaaaaaagcacatgcggtttcctctgcttcttccttcttacaagttggatgtctccgtcttccacggtgcttataaattagtgtaacaacaaaagctttggtcagtatttatattatcatgcatttctaatctctactttgtcaattcctatactttcactctcttcaattatataatctctggtccatagaaaacatcggtctcttgtcaccgttgattttatttggtcaaaatcattctctcctcgctgaataatcgttgatttcacttcttcttctggtcttaaaaaaattcaagatctatacgagaaaacacaaaacacgttaaactatttcaaccgtttttcctgtcggtaaagtttggattcttcttggtaaactttggtcttattgtcaaccaaaagaagaagatggtcgttcagaatgttcaagattggatgttctttcnnnnnnnnnnnnnnnnnnnnnnnnnnnnnnnggcc

SEQ ID NO: 51666 - DNA, 554 bp, Arabidopsis thaliana landsberg
atgagctctcccttcaacactccagtgcccgagctccctcccctgtggcctccgcatcggtgcgcccctctctgctcctctgccgtgtccctgctagcgcctgccgtcaaccacccgccgtccgagcagacaccgggcgccagaaactacgtggaggaatcgctatgccatactgtggtcgtggggttcctcaaccacgctcttcgtcgccgcgacgcgtaggccaccgcccgccattgttgccccgttcctgcaccgacgttcggtggtcgggattgggtcttgggcgctctacggcgtgtgtggattgtgtgtgtggagtgcccaatgtggggagcgacccgagcccctggaattcctcgtcgtacctcaccgccgctgcaactccgctccgcgcgtgtggactgggtaccttcgcggccaaatccctggggagccatcccctatcgcactcgcgctacgtgtaatttcattttttgcacatcaccgtaggtaagcttcactggatcgacggattaggtggctctccggtgagcgtgcagccgtgggggatg

SEQ ID NO: 51667 - DNA, 605 bp, Arabidopsis thaliana landsberg
cgatattgctggtttgatggtaggttaatttgcaagaaaatctttgttgaaagatctatacatccagagttattcagatatctcagtagaacatcaacatgcatgatgattcttaaattcaaggttggcatgtcactgtattattcgaagttcgaacaccaatgcacacaacaattagtgctatcaagactatcatatatattatctagagatcatatatattatctagagatatgtatatcactaaaatttgtagataatttagttataagttattctgtacttcgtatgagttaaataaaatcatcaagagacaaacagtgtatgatccctaccaataatgtgaattaacattttttcttataggagttggttttcatttttttcttcttcaaattctttacgttaatattgaaatatcaaatatatatactgtacatcatttccatgtgattcggtaatctaggacctatgagcaatttttaattgtattacaattttgtacttgtattcacatatcattctgatgaaacgaaatgtggagacatactaaaaataatatgacagtgtatgtacttcttgaagaaactggtctatgagatatt

SEQ ID NO: 51668 - DNA, 900 bp, Arabidopsis thaliana landsberg
attttaattgattaacctgattttgaaatcagttttaaaagtaactgttgaaaacataaattaaacaaaactttttttaaggctcaactatactttagaaggaaataaatgtgtttcctagtcaatttgtgtcgatgaacagtacacattgactttgattgtgtgcgatatcgcgttagtttgatttaaaatgattgtgaccatacacttcagaaaatcaaaatgcaatttgaccggaaaaaaaaaatggtccagtataattattattccatggcacaagtagatatggaaacaccattgtttataacccaaagcgaacgttacagagctatacaagaaattatatggagattctgttttctattgccattcttgctcttctcttttccggagtagtagctgctccaagcgacgatgatgttttcgaagaggttagggttggattggtggttgacttgagttctatacaaggcaagattctggaaacttcttttaacttagcgctttcagatttctatggcatcaacaatggataccgaaccagagtctctgttttggtcagagactcccaaggagacccgatcattgctcttgccgccggtgagttttcatctcccttattcaattattgcaatttttggtgggatccacaactcctcttcatttaaagcagactgaatcaaataaaaaagaattgacctagtcccgccggtttactccggttaacattctcatgtcttgcactaaccgttttgcactgcaatttgtgtttgtatgaaacagctactgatcttctcaaaaatgcaaaagcggaagccattgttggtgcacaatcattacaagaggcaaagctcttggcgacgattagcgaaaaagctaaagttcctgtcatatctactt

SEQ ID NO: 51669 - DNA, 632 bp, Arabidopsis thaliana landsberg
  unsure (1)..(632): unsure at all n locations
aagtgatagttgataacattggagaaggcactaattgagttctatgaaagaaagtcaaaaaccttaaacagatttaaaaatgaaataaagagttgtgatgttgagttgttgtagacaaaagttaaggcaaaatataggcaaaaggagggagacatgaaacagtgattgtgcaatgaaataccaaacaagtcatgaccaaaacacatgtttaacgaccaaaaacaccatcatgctacttcactaaaagtccatctcacattcactaattttaaattttaaattttataacttagactctcaattatgttataattcaaactaacgtcaaaatttataactgtcataaaataatcataatatctgagcacatactgatcaaaaatagaaaaatggggtatttgcatctgatcttataatcctaatattacatgtgatatattagttgttcactccgatcctagtcatttatcccgtttggagcaagtcatttgatttcattattattataatatagcacacttattaaatatacataatgagtgtgtcgaagtagcatggacaaaaagtggtcttttatacaactcngattattcctttttgctaatcaaaccctatttcaaattaagaaaaac

SEQ ID NO: 51670 - DNA, 729 bp, Arabidopsis thaliana landsberg
aagtcttggattataatattatgcaaattttggagccaccgaatttttaaattagattttatgtattggtaaaaaaatcaagtgcaatttgttttcgaaattcaatttcattgataaaaaaacatcatgtttgttattttacaaaatattttattacaaatttacaatacatattatattgtttagatgtaaaatttctcatatttacattcgctttagttagaccccaaatccctagacatgaccagcatcattattcctaaatacaccaatcgttgcacacattcattattcctaaatacacccatcgttgcacaattcattattcttaaataaaccaaattatccgtttcacttcttaaattctaagaaatatttatcgttaaatatttctccgttaaagatccagtacaagtactgccaaaatccaaggatgaagactgtatttttatgattttgtcaatttactctcttaattaagatattaatcgaatctatacactgaaaataactaaactatgagtaataaaatatctcatttgactctttatgtcatgcaacgcgttatcctaatgaataaagttccaaatgccgcaaattgaacattaattataggatcgtggtaggacttaattaatttttagggttgattagtatacttagttagcacttaattcagcactatagctttgaaggttgacattttacgacttttcatgcgtgtaattc

SEQ ID NO: 51671 - DNA, 599 bp, Arabidopsis thaliana landsberg
catgaagggacagctacaatggattggatggaacaagagcaagaacgaggaatcaccattacttcagctgcaaccacaacgttttgggataaacacaggatcaatattattgatacaccgggtcacgtcgatttcactctggaagttgaacgtgctttaagagttctcgatggagctatatgcttgttcgatagtgttgctggtgttgagcctcagtctgagactgtgtggagacaagctgataaatatggtgtgcctaggatttgctttgttaacaagatggacaggcttggagctaactttttcaggactagggacatgattgtgaccaatttgggtgctaagccgctggtgcttcagataccaattggtgctgaagatgtctttaaaggtgttgttgatcttgtgaggatgaaagctatagtttggtcaggagaagagcttggtgcaaagttcagttacgaggatattccagaagatcttgaagatttggctcaagagtatcgggcggcgatgatggaattgattgttgatttggatgatgaggtcatggagaactatttagaaggagttgagcctgacgagccacggtaaagaga

SEQ ID NO: 51672 - DNA, 874 bp, Arabidopsis thaliana landsberg
cgtcgatggtcatgatttagcaattttctaaagaaagcaagagcattctagaaactttggcagccatccatgaatattaaattcagcaagtcctagaaatatattttgaatagagtagatatctttttttttttgctcgacagaaaaaaaggcagagtggatatagagtggatttggtttataaatatatacataaaagaaaaaataggtaaaaatatagattttttttttaatgaaatttgcatcactatgataagaagctaaaacatccaatgatcatagtgtgagagaaaattaagaatatagtgacaatttttttaaggtttttgtttttgggtgaataatatataatagggtgagaaagtaatttgatatataaaaaaaatgagtgggaaagtaaattactaaaatattatttaacaataattatttttatctgtatccgtttattttccctttcccgtgacttaaaaaatgttattaattattatgtgtataaagaagaatgagataaataaataacatccgtcaaaaccatctgtctctgttttctcattcatctcctctacttgtttagtcggtcatcaaactatctcttcaagtttatcctcagaaatatacaaactcctcagaaaattctttcgtttggtttgcttcgttctacaattttgtattgatgagaatgttatattgagtcattaaccgtttgataaatcgtatttggctctgtaagtagtatttattggtattgaaacgatggatcatgtaatcggtggcaagttcaagttaggtaggaagattggtagtggatcatttggtgaactttatattggtatataaaaaatcaatcagtttttttttttttttttttttt

SEQ ID NO: 51673 - DNA, 701 bp, Arabidopsis thaliana landsberg
cttaaccatttcataggagttaagatgcaatgctttgcattgggcatcatcacttcctgggaaaacctttcaaacacaatcaagcaccttgatcaaagtctcaagtccccaattcttagagcaacacacaaaaacatcctagacggatccaaaaatctctgacttatgagcacatccaatgcaatgaaacatcattacagtagtccctctgtgacctttcaaactaggtcccggtttgatcaaattcttctgaatcccgcaagcagcatgacaccaatgcgaacacacatcgcaaccaacccaactacaagtattgctagctgaatcaaatctcaaacaaacaggacacatacaagagcaacaaaagcctttgttgttggaacagatcttgcattcacaatcatcaacaggcaagagactcttacaattcacattcctacatctcaagaagagaaagatctctaccaattcgttcatagggattctgatcttaccagagaggaaatacttaagccctgttcttacagctaccaagatatcaagctgatctttaacacatttcgataacgtctccttactaagatcagaccttttatcaatctggtttgaagattcaccagctttccttcttctccggtgaatcaatcaagttccttagatactctttagctgattctagagtttcatcagccatcccttga

SEQ ID NO: 51674 - DNA, 857 bp, Arabidopsis thaliana landsberg
atggcgtctgaagaacagcagtgctattcatctggatctggcagtggacatctcagcgtagagaagcttagtgcagatggaaattctgatcgtgagtattatagttctgatcatgatgagttagaacatgaagatcaagattctttaactctgggagggatgaacatgatgtttgggagcaggtctgtgaatgaatttcagaagctaaacaagataaatgaaggaacatatggaattgtttacaaagcaagggatgagaaaacaaaagagattgttgcgctcaaaaagatcaagatgaaggaagataggttcgaagaagagtatggattccctttgacatcattgagggaaattaacatacttttgtcatgcaatcaccctgcgattgtgaacgtgaaggaggttgtggttggagggaaaaacgataatgatgtttatatggtcatggaacacttagaacacgacctgaggggagtaatggatagaaggaaggaaccttttagcactagcgaagtcaagtgcttgatgatgcagctgttggatggtttgaaatacctccacacaaattggattatccacagggatctgaagccatctaatcttctgatgaacaattgtggggagttaaaaatatgtgattttgggatggcgcgccagtatgggagccctatcaagccttacacccagatggttattacccagtggtacaggccacctgaacttcttctaggagcaaaagagtactctacagcagttgatatgtggtcagtgggttgcattatggctgaactgttgtctcagaagcctttgttcccgggtaagagtgagcttgaccaacttcagaagatctttgcggt

SEQ ID NO: 51675 - DNA, 625 bp, Arabidopsis thaliana landsberg
ggattatataaatacatctattgtatgaatgtttaattgatagatcaaatagtgaaatatgtatagaaaatgattacaaagcaataacattatagccaaaagcaataaatttatatgctactcgatgacatgttagagagaagaggcaaattaatgacactccgactcttgaagaacgaattattcagtaattatctgttgtttacagaagtttttttcacgtcgaatacattcttttggaagttacagttttataaaagaactttaatcttagagagactttgtttttgtttttaaaaaaaatacataattaagattttaatatagtttctgaatgttatctaatactttaacgacacaagaaatttgttaagtcatacatttgtatataatcagatttaactattttcgagattagcaaacttttgacttagatgttgaaaaacaacaatccatccattagagtatctcacgaaactgaatagttatcgtgtaagcctaaatctagttagaggatgtaaaattgttactttttctgcagttgaggtacaaaagttcaatcagtttagttttgatgtgtctgtagatttcaatgtacacttttttttaattttttttaatttca

SEQ ID NO: 51676 - DNA, 902 bp, Arabidopsis thaliana landsberg
ctggcacgtccatagcttgttgcaaagtggttggaccgaaggagatgacatatttccagaaatgcccttatgaaccttaaaccattctctaattgcttcccatgagctctccttcttggttctttcgtcttgcatgtctggatctggtccttccattaacggtgttagggcttgtggcggcgttccccatctttgctttctccagtatgactttgagttgctcattctaatcaaagagtgatggtgatcagtctgatgtttgtgacgttctttttttttgtttgaatatctaacacaatggtttttgtaatggatagagattattggcgtatttatatatatgtatagagatgtatatgtgtgtagagagagacaaaagggacattttatcagtctagcggtcccagaagtttaacattataattttaaattcatgggaagaagcttatagtaattagttcgaatattgacaataaaaaataacttatttggggttttaaggtttctttaaaaatttaattaattcttgaaactacgtatggctacttgttgtatgttatataatctgcgtctaatagtaatagactatgttttatataattggtaaaccgtgtaagtattctgcgtgatattgatttttgtatattcagcattcagctatatatgtgacaaaattatgtaagttttatatgaatttgtcttgtcatttaaactgtattatatggttttattttgtcgtatggaaaatcaagagttatgttacaaatgtgtgtgtttcccaacttgttttcggcatatatgttatctatctatcttgaaagagacatgtatctataattagtcatacgtggaatggaaatgttgaacagcgactaataaacatgaataaaatccgagcatgt

SEQ ID NO: 51677 - DNA, 614 bp, Arabidopsis thaliana landsberg
attgtttctggaactttttgtgagcctaaggtttatctctctcttctagtcgtcgattctggtcatcgaagattccaatcagctaaggttacattcatctctctctctctctcgttgtcttggttttgattttggcagattgtgcttggaatcaacagtttcggttattcgatatatgagtactgttaattctagggttctatcactttcctcttcggatcttttgcctatgggttccagaataaaagttttagggttcttcttccctttattgcgaattaagtcatatgcattgcctctgattgtgcgaatcatgttgtagttccaatctttctcttaatacgatgagaataattgtagttagttgctaatgaaccttggtttaacaatctgtaggtaaagtgctatatctcgtttcccctgtctcggttcaagctttcaagagaattgtgattgattctataagggctctttgtcagtacaatggaagctaataaggagcctggtaatgtgtcaagtaattcgagcaatgataaagagaagtcgtctgaggagatctttgtcaaccatggtaagctttaacactcttcacaattgttaaggaaaagggactg

SEQ ID NO: 51678 - DNA, 663 bp, Arabidopsis thaliana landsberg
ttttctcctttttaatctcttccttaaacaaaaaagctgatttcatttttaaactaaaaagcttcatattgccaccacattaatttcaagaaaaaattcgcattaatttatttatttaagagatgattacctaaaatggtgtgtataaattgcaaaattagctctgttgttctgctaggagagttaatggagaaagagggtgttaccattaccagtacaactatagttgcagagttcaggggttccttggagtagcattaaagtctcaaaggagagaaaaataataaaaaaatacattaaagacaaattgagtcttttctcataaatggtttctttgtagtgtttatgatttgtttttacagagaaaagatctaaaaagagaacaaagatatggtttattttcgtcagatttttctcatgatcattgtagtttcattacactgctgcaaagttagattcttttgcattgttgctaatgctaaagagcttgatgactggaaggtgttaacggtggaaaacggtgaaagataccgaacccatgtcggaagatacgccggagaagagggcggcgagaagataaagcttcgagttttggaaaagtttcgagctttactcgatttgattaaaccctctacttcacggagaagaaatctcgccgagtct

SEQ ID NO: 51679 - DNA, 610 bp, Arabidopsis thaliana landsberg
tgtctacagtcttttagaaattaagggtttataagttttaaaaagatagtatgtaacacggtcattttaggtgcacttgaaactaattacagaaatatgaatagtagtctgtggagtgactatgaatagtaggataactcgaatccggcggacgtgtatgtaaggaacaatcacaatcgcggtccatgagcaatctgcgaattttctcaccattaagaaaagaaagatcacgcgtaacgtgaaatgacatgtgaccaagaaagccatgagaggtaccaaacgagcacatttatttatttatgcttctatgagagtaaacaagagatgacaacaactacaccttcatcctgtcctgtgacaacaaaactcacatgtgaaaactataggcaaaggctccatcaagtttcaagtggcggccaacttgtaggaccctcaaaaaaaacagaaacaatagaagtgaggcatcctacagtacttccaaatcaaggcttgcaaagtcccctcagagctgattaaaaaaaagacggcgccattttctcacaactgaagctttttctgggagcagtgtgatcaaggtttgagagcggcgaagggtagtgctgtgtttgaa

SEQ ID NO: 51680 - DNA, 713 bp, Arabidopsis thaliana landsberg
  unsure (1)..(713): unsure at all n locations
attcgaaccgaaaaccgaatagcccataaccaagaaaaaaccgaagcttcctaacaaatacagaaaaccggtaacataaaaccgtagtgtttctaattctaaccaacacacgtttcctttttattcacaagaaacatcagagttatgatctgccattaataacctaaacacaaagcaaggttaggtaaatgatatggaccccttatgaataatcatacaatacataacaacgtaagatccagtttccctcttcgaacatccatctcctttcagacaaaaaccatacaaagacataataaacaaagaaacagaggagaaacagagagatgcagttacatatatctccgagcttgagacatgttactgtggtcacagggaaaggattgagagagttcataaaagtgaaggttggttctagaagattttcttatcaaatggtgttttattcactactcttcttcacttttcttctccgattcgtctttgttctctccaccgttgatactatcgacggcgatccctctccttgctcctctcttggtacgtttctttcttcttctaacttccctcattttctttttctttnttaaatccggaaattatgtaaaatagtgaactcttgatttcgatttcttcgacaaaacattcgattctcactanaaaaaaacatatgagaaaaaatagcaatttaatttatactaaaagcattttac

SEQ ID NO: 51681 - DNA, 873 bp, Arabidopsis thaliana landsberg
  unsure (1)..(873): unsure at all n locations
tccaatcatcttctccaggaggtgtgttttaatgaatttctgagaaaaaatctctactttcattgtccaaatccaattcctggacccgggaaatggatcccaggaaatcaattgataagccgcctcatcacgatccaattctgggtgtatcttcaagatggagcgtttcttctaaagacaacaaagaagttactttcggtgatttgggatctaagcgtatccgtcatggttcagctggagctgattctgagatgctaagcatgtctcagaaagagatcaaagacgaagatgctcgtttgatttatattaacgatcctgacagaactaacgaacggtttgagttcactgggaattctatcaagactgctaaatactctgtcttcaccttcttgcctaggaacttgtttgaacagttccatagagttgcttacatttacttccttgttatcgctgttctcaatcagcttcctcagcttgcagtttttggcagaggtgcatccatcatgccccttgcctttgttctcttggtctctgctatcaaagatgcttacgaggatttccggagacataggtcagatagagttgagaacaataggttggctttagtctttgaggatcatcagtttcgagagaagaagtggaagcatatccgggttggggaagtcattaaagtccaatccaatcagactcttccctgtgacatggtgctcttggctactagtgatcctactggggttgtctacgtgcagacgactaatttggatggtgagtcgaanttgagaccaggtatgccaagcaggaaactcttctgaaagctgctgatatggagtcgtcaatggatttatcaagtgtgagaaacctaacangaacatt

SEQ ID NO: 51682 - DNA, 598 bp, Arabidopsis thaliana landsberg
  unsure (1)..(598): unsure at all n locations
caaacggtagctgctctcatgcatatccgacgggacatgctggatgatgtaaggcgctggcgcctgccgcctcgggcatgggccaccagagctttgaacgcttagccggcttatcatcccaatcgagcgtatagaagaagccgcccttgtcgcgatcccagcccagcgccatggattgggcgaagagctcttcggctgcgcccggcatccaggtcttctcgcggccgcccagggcatagagctgcaggatcagccgcgcccattccagcgcatgtcccggggtggtgcccgaggggcggaacatctcgttgccgcgataatccttgagcagggtccagttctcgtcgaaatgctcgccgacgcggaagccggtctcgcgggcgcggcggttgatgatcaggtcggcgatgcgctcggccttttcgagatagaggtcctcgccggtcgcctcgtaagccgccatcagcgcctcggtcaggtgcatgttggaattctggccgcgatagcccgggatcggcgaccagtccggctcgaattcctcggcgatggcgccgtgctcctcttnccagaactggttctcgatgatctcggtgacgtc

SEQ ID NO: 51683 - DNA, 418 bp, Arabidopsis thaliana landsberg
tttcagcctactagaatatcgttgatggccagatttgcgacgtgtctcttcggtgctgtttggttcatagtttttagtcttgtaaccgttcacaccactatctggtgtcattctttccgtttggttgagacagcccgtatggaaatgattcgtactcatctcctgcacgccgcagcgcgacgaggcattcagcgcaaggaagagctcacgccgcgcgcgcgcgccatctcgtcgactcgagccggggggccctccacttaaggttagagacacactagctgaacactagggcgccagtcacaaagagcgccggtctgcatgtgcttcagttgagcaatgaaccacaacgagcgcgctgcacgtagctactatcttgctcgcatgcatgcatgacagtgaacgggagtcggtgcttttg

SEQ ID NO: 51684 - DNA, 577 bp, Arabidopsis thaliana landsberg
ctgttccttctatgtgtacgtggcattattctcatggctaagagtgtttagagaacactgtaaagccaaaaatggaattttgggattatggtttgagacttcagagccacaaacttttgtcaagtgttatagtgcgagacttttgatattaaaattattttgaatatgcatgcatctgtgactgtaacttagtttttctactaattgtagctacattaaaaacgcggcgtattttaaataatttgaatggttctgatataggtttgtttgataaatattcaaatttcaacgagatagtacaaaaaaaatgagagaaattgttttgtcattgtcctggttttttattcattctttaaagttacagaataccatgagattttggttcgcgggttcgcagatacaatttcctagtttttttagccaaatgatcagataaaatattacactttctcggtatataacatgacaaatagaacatatagtttgaaaaatctacaaaaaactaatcgtctatttatgtgattcatatattttcttcgatcacttagaggtggcatatgtgctgaaatcccacggt

SEQ ID NO: 51685 - DNA, 506 bp, Arabidopsis thaliana landsberg
  unsure (1)..(506): unsure at all n locations
ggattaaattctacttgataaagtttcctttatactttacagggataattaataaaattatagcgannnnnnnnnnnnnnnnnnnnnatcattaacttaataattagcaatacatcgttactctgccctcacgaagcccaggggttctgagactatacgaccgcttgggcgcgatctcgactaggggctaggctctggactattgagctgaggctgagcctggctgcattgtgtctcatctcaccatgtcaacatcaaactgaatgccggacaaccgacgacattgaacagaattccttaagtacccatgtaggttcaggtgagaccccctcaagagcggacctgacctgctctcgagcgcttatacagcttgctggggggtacgggaaccggagactggcgtcattgcccatgagagtgctcaaggactcgactcttcttggagcgagaatgtgggctagatcaacgctgggctcgagcccacgaaatagcacgttcaatgctga

SEQ ID NO: 51686 - DNA, 478 bp, Arabidopsis thaliana landsberg
tacttaattctgtttttgaccaacatatctaaatatcgaatatgataatgcaattatttagacattggaatgtggaagagaggcgtgtataaatgactatctcttgtgtattcatcttgttttcgaatggtaatgtaacatgttatttttctatgcggagaaattgatcttgtttgatttttaaattggttgtaactcaacccaaaacttgaaaaagcccaatccgatagctgaattggcccaaaataattaaaccgattcacaaaaacaaagggaataaaaacagaggaggttaatgttagatatttcataagtttgtgggaataaatgaaacatgtcgagacatatagggtgcacattgtacatttaggataaaccctacttatcatctcaaaacccgcgtgggcttcgaacaacgaacagtgagtttctcacactcatcatttctccagatttgttagggtttctcaaacttaac

SEQ ID NO: 51687 - DNA, 899 bp, Arabidopsis thaliana landsberg
tacagactcggcctaaactgattactacacgtgtacatttcttattggattttaacgtttttaccatgcccttccttagccggcagttaataatgttctgattggattcttttttatccaatactcactttgttgttacgtttgcatgaacaactttaaaattgtggtgtacaaggttaattagacagtcgattatttgtaaaaatgggacgtttaggagatctgagagatgaagagagaattgggtatgcttttacgacgcgctagtcagagaatatttggatccgacagagacaggaagtgaatgaaggtagttgttacacgtcctataaaaagactttccttacataccaattacaattggattctcccaaagatcccaaacaactcggaagttaagtaaagctgctattccacacatcttgcaaattcctccttttccctttccttttctttgccaccaatcatctctcactttaaagtaaaataagacttatgcattacttttttttgttcatctcgatcgatagggttgatatacctaatctgggttattcatatatttgtgtcgagctctgatttaaattactggtatttttgtgcaagagcaattcaattttcaaagtctatcttactagtagttatgaaaatcgaagagattaaaaaaagaaagatgaaagagaactgtgtgcttcattatcatgatataaagtgaccatggagaataaatgaataattgaatatcatgtagtcagattcacttatatattgtgtggtaatttgaggttgaggtagatgataaaataaacatttctagggttttgatactggaccgctcaagattcttaatttgtgacttgtgagctaggggttggaaatattcatggtctctcttgtga

SEQ ID NO: 51688 - DNA, 237 bp, Arabidopsis thaliana landsberg
  unsure (1)..(237): unsure at all n locations
tgacccgatcaatataataagtcatgcgggtttttatatttccatcccacaggaactgatatctgggaggggatggtgttaatatnnnnnnnnnnnnnnnnncatgcacaccctctcttgatggatgctatcactctatctatgacatacaaccctcgcaccgcatttgtgtgtggagcaccaactctctcggcccgggatgatgcggaaatgtcaagcacgatcgatgccccccac

SEQ ID NO: 51689 - DNA, 522 bp, Arabidopsis thaliana landsberg
  unsure (1)..(522): unsure at all n locations
cccacccccccccccanacccccccccccccccccccccccaagaaagaattgccccgggacgagtcgtccntaaaaaaaacaccccccccccctaggaaanngggggggacctttnnaccccctgtcaagcgccgcccacccacccccttcccccccccccccccccccccncncccccccctcnccccccccctccccccccccccccccccccccctccccccccccncccccccccccccccccccccccccccctttcccccccggattgtcgcccccccccgggcgccccccaaacccacccaccccgcaacccccccccccccccccccccccccgcccccccccccccccccccccccccccccccccccccccccgccttccgccccccccccccccccccccccccccgcgccccccccccccccccccccccccccccccccccccccccccccccccgccccccccacccccccccccgccccccccccccccccccccccccccccccc

SEQ ID NO: 51690 - DNA, 890 bp, Arabidopsis thaliana landsberg
ctgaattaacaaacaaaaatgactaaattataattctttcaaaatttaagaaaaagaatgacaaaatgaacgggtaccagtagaactcccaactccgaaatcataccggataatccatcctttacttgttccaagaacaattacatcattcccagcagccatacatgtaatcatgccacgattctttgtcgcatatctctcgagaagatctactgaaaacacttgccttccttgatccatcttcttcctctcttaatcaaaaactgcacacaaaaaaagacttgtaaacttaaaactattcttcagattttgagcttttgaccaattaattacacctcgtaaaccaaaattcagaagatgagagatcgattctagttctgaaatcgcagaattaatacattgggaatttaaaagcagagattatcagaaactagcaatacaaatttttagcttgggaatttgccgattcatttaaggtttctacattggttacaacaatcggaatccgtaaccttcgtcggagatccgatcggagagcaggagaagtcagtcgtggtttatgaaatctgatcagcgatacaaaacgccaccgtctttttatagtggcttccgacttatatatctgtatctgtcgtcgcagccagcgaattcaaggctgactaaccataacaaccgaaacggcagcgttttgtggataagaggtaaattattaagacgcagtgtttcgctgagttagtaagttaaccagctaagccggttcaatgttgttgaattggattagcaagagagtcgtaaggagccatgagcctccacaccagagtattgctaagagatactgaaagtggatattctaaagtcaagtccagagagccgatcacaatttactgttt

SEQ ID NO: 51691 - DNA, 532 bp, Arabidopsis thaliana landsberg
taaagtctagctcttttgcagcaaggcttattactataataatagctccacttgtaatgctgtaaccaagagatggtaccaacatgaaacactgagcattcacaagttaaaaatgacgctaaagagcaaagatgcttaatgctgtgttcaacaaatttttttacttttttaaatagaatgttcaatataatttatattcttatgattctattgaacaattctatacaatggaagtgaagccttcttctagatgagttgcagctcaaaagttactagatgtgctaagtaataaatgtggtttcccaaagcatcagtgtcatgtaaaccacaaaacgtaaaaaacaatcagagagaagttcaagcaagggagagaaaaagaacttacactaagttattattatcaggaatttcagctggcatcaaagtgaagacagataggaaccaacaagatatacagacaaaaactggtatcccagatcgccaagggattgaaaagtgcaacaaaattgaagccacaacacctgctatcaag

SEQ ID NO: 51692 - DNA, 336 bp, Arabidopsis thaliana landsberg
ggtgataaccaattttttacccatttctctctccacaaagaacagcgggacatcttggaagatttaaaaaggaaccacaaacataattccactcacctgaatccacctcaccccatatacacagcccaaagaaaaacatctgcaacatttcaaactcaaaacataacttgtaagaaactttcttcactaacaacgcgtgccctccctccaaaaccatataaacaaccatgcatcatcactctttgaagaacaatctgaataactaatatcttagctatctaacctacacttcactatcataacatatactagaatctccgactacatcaaaccaaa

SEQ ID NO: 51693 - DNA, 551 bp, Arabidopsis thaliana landsberg
aactcacttttatgtagttctataataacaatgaaaattttccattttatcttttgggaatagaattctgtattaaaaatcaatactgaaataacattcatcattagtagtagaaacagttgaaaactcccagatatttgtgtttgcttaataaagtacacactccattattatatgttaataaagaaacattaagaagattgatgaagtctcttcttggcattctctgcttcatcggttgcgtcaacttgcatttttgtctccgttagatgagcctccgtagcttccttctcgttctttgccgtcaatctctttgtcttccaaaccaaaataaaaataaaagattataacaaaatgaaactaatcaataagtaaattaacgagacaccaaatacgtcaagtgatcattgattcaagaagacccatgagtctctgatccgcttgtttcagtggctcgaaacaagactcttgtatacgcacctggccaacaaaaaaggctttgacatagctaaacccttcctggcatgttactgccatggataaacagttag

SEQ ID NO: 51694 - DNA, 460 bp, Arabidopsis thaliana landsberg
acatcagcgaagtggaagcgcaatggcgtctgttggatcccgtcatcgaagcctggacccaagacaagcaaccggtgcatcaatatcccgccggtagccgcgatcccgctgcatcgaagatcatcttcgagcgcgaggatcagttctggcgctactccatcgctcttggcggagacgcgttaccgcagtaaacccgcacccggttcggacgcaagccggaccgggtcttcaccgcggcgataggcgcgatttttcctcccgctacgcgaaaacgcctttataatgcgtttcattttgactcgctagccgatcttaccgatgagcatcaaatccgataaatggatacgccgcatggcggagcagcacggcatgatagagccgttcgagccgaaccaggtcaagcttgtcgccgatggccagcgcatggtttcctacggcacgtcgagctacggctacgata

SEQ ID NO: 51695 - DNA, 1010 bp, Arabidopsis thaliana landsberg
agcatttgtaataatttaataatttatcaaaaaaaaaataatatggcggcaatgttgcgttacaaaaacgccatcttttatgtaattgtaacctaataacagcaacgtgacgatgaaccaccaccgagttgcgttagaaaaacgccatatatcttttatgtaacctaatatatatatcttaaacaacaggcttggattattgtctctcgaaaacctaaaatcgctctttctcttttcttgtcatcttctccatggctgagtctagcaagttatccgcaaccacagttgaagcagctcctgctatgattaaggccaaagacgtgatttctccttccgagaaggaagaatctgatcagacggagatcacgaaagtatccgtcttgaaaaaccttgatgagaaggagatgatcaaagaattcgctgatcgtcttcagcgtctcgaagcaaaggtggatttgttggtaacaaaggcggatttgttggcaataaaggcggatatacaggagcttctcatctcagccaagggtgagaaagttcctgccatgaagacttctgctaaggcttcttctgagagcgatgactcatacatggacacttcttcggaggatgaatcgtcttctgctgaggaacctgtaaacaaacctgctgcaagtgccgccaagccagctactaaagatcctttattctctgctggtttcaagccagctgataaagattctttattctctgctggtttcaagccagattctttattctctgctggtttcgagccagctgctaaagattctttattctctgctggtttcaagccaggctctttattctctgctggtttcgagccagctgctaaagattctttattctctgctggatacaagccagattctttattctctgttggtgtcaagccagctgctaaagattctttattttctgttggtgtcaatggtggatcgttctctgttacgggatttgacgcttcccttcctgtggatgatataaagagcgca

SEQ ID NO: 51696 - DNA, 534 bp, Arabidopsis thaliana landsberg
  unsure (1)..(534): unsure at all n locations
cctccactatgttcgtactattaaacttcgcatatagaaaaaaaaaaaaaaggtggggaatcgcagggggctcgggcaagtaggcatagggcaatgacgccgcgaaacacgtgtaccgaatcatgtactcggtattgtccaaaaatagttgtagattggagttcagggagtcctcaggggtgcgaggagcgagtaaattagcaaatagtgtacggggtaaccggtattacagcaccggcagtattgccgcgcacaggtcggtcgcaccggcatcgcggtctggtggaggacggtgatgacgcgtgggcccttgattagaataccaacggcttgggtcggggcatcgcgtngagtcattgcgcgccgttgatttcggatcggctggtggtcgtcgctttaggagtcattnacccgggccgtcagatcttgatccgagtttgccatgctcgttccggttcgtaatgggtggctctgatcaggagcgctcatctcggattctgcggtcggagtctatccgccttcctcagctgcggg

SEQ ID NO: 51697 - DNA, 590 bp, Arabidopsis thaliana landsberg
  unsure (1)..(590): unsure at all n locations
aatagaattaaatgatttcataacacataattttgtttatgttttccaaaatcaaaaatccactaacaaataactcacactttgtctttcaccaagaagcgtttcacaaccttgatgctttcatccaaaacagtattgtcccaaatctctcttgacgatcttccaaatgacggcgtacgtccaacctctgaatgtcccatccgctgcttttcagcttcatgatcctctcaatctgcttcttcgcaagcctccatgtgttctctttgatctcttggacagcttcgtcatacgccccctttcttgcttggtcccattcggacatcttctgctttctctcaggcgggtataagctgaagtaccggtcgaactcgggtattcctatggtcttgtgaatcccgtgggctcggattgcggacccggaatatctcgggtcgtagaaaccggctagctcctcgaacnnnnnnnnnnnnnnnnnnnnnnnnacacgtttcgagaggtactcgaacaggaccgacactgagacatcccccaaaggaagcacactcgtcctttcataatcataaattcaaaaggattttcacaaaatgaat

SEQ ID NO: 51698 - DNA, 729 bp, Arabidopsis thaliana landsberg
tggaattttgccgtctttctccatagaaagtttgtttccggtgtgcttgttcattgccggtggaatttccgggtaatcatcacaagaatttgctttctctttgccttaaataaaatatgaaatcagttgtatactcaaagctatatatatagctctctaatggtcttatgatcagcaaatgagtatgtgtgtgcatgtctactacttagatgagtttctttttctcaaagaaagttttcaagtgccagaattgtagaccagccaccgataaacaaaccacaagcgacccgaaactcaaccacgccatcttcgagtttgtggatctattcagttcttgcatttcctcttccctactcccacaaaaccaaaacacaataacaagtattaattaacctcatcatctctctctcttccgaccaaacaaaactaaggcttaaaaggtttgttctttgtctgttacctttcacgaagataatacatctcctcatgtatggaaataacagtatacatcaaggtcttaacctgatactccatcatctacaaaaacaacattaaagatccaacaacaactaggtatagttaataaacttttaaaatccacaaactctctacactatcttctctcattttcacattcaaaaccagacaaaaccctagctcctagcttacatgctcaaatttcatcaaaccaaacacaaactataaaaaccactgacatcaacttgactc

SEQ ID NO: 51699 - DNA, 853 bp, Arabidopsis thaliana landsberg
ttctgatgaacatccatcgcattcgtatttttagattctttgtcctgtttgctgatcaatttttcccatttgttcagcactgtacacgagcggtttatactgctccaattaaaaccatcagcaaccaaaaatacagagatttttgtgggaagtttgatgtaggacttctcacaggtgatgttagcataaggccagaggcatcttgtctgatcatgacaactgaaatattaaggtcaatgctttatcgtggtgctgatatcatacgtgatatagaatgggtaaaagagctttctgatgttttacttcttcaaagtttgatattgttctcaaatccctccatttctaagcagcctttgaagttctgtgtgaaacttcaatcacgtttccttgttgccgttcctatgactggcaggttatatttgatgaagttcactatgtcaatgacgtatagagaggggttgtttgggaagaaatcatcatcatgttgccaaggcatataaattttgtcctcctttctgcaacggtacttcttaatgctattatgtgcatgcatttagaaaatcttagttcttttgaggtgttgttttgcttgccatggaactaatctttggctatgaattttctcataagatgagtttgagaagaataggtgatttttttgcttcgggtctttgttagtcacgatcctaatgaactaaccgttcagtttatagcatctatgaagatatatataggcatagcttcatggttcagtcattattctccattctattttatacccatgtgcctctgaacttataacatctataaattcttaaggtgcccaacacatttgaatttgctgattggattg

SEQ ID NO: 51700 - DNA, 941 bp, Arabidopsis thaliana landsberg
aatttaccagccgatccatttgtgtctgtggatattggttatagtacaataattgacacgttatacgacttcatttcaatcacttcgtaattttgtatcgaagatgacaaagccacggtatcataaaatttgcaataaaagtccctaaaatctgttataaatcagtatagtttctaacagtacaaagtataaagactcctaatattttatcttaacaaaggaaaagaagatcacaggaacatgttatgtaaaagtgtcacattttctagatttttaaagtaatccttaagccttttcactgtgcaaatttgtcatattgagttaactatataatagtataaagttacagttcattataaatgaaaaagtacaaaaaacaatctgatttccattacaaaacaacaaaacccagataggcttatggtacacttgggaactctcactgcacattccccaaaactgtgacaattgtccatcatatctcttgaaaagaacaaaacccgtttttagatgcgttataatctctgattctccttgcatatagtgtgacaagtttcccatatatgtagaattgtatgatcgacttcaggcttgagaacagtttctatagtttcaggtaaataacatcttgagttcctctatacgtgcacttcgtacttcttgatcggttaaagccccagagatcattctctgcttcctcgcctgaaccgcctccattctctcttcaaccgttccctaggattcacaaaggcaagacatacaagtttctaatgatcattactcagcaacaacattttctgattttggaatagtttcagtgattggtctttatatggttaatggggactaactgctgagaaagaagagggtaccttaacgatgaatcttctgattttgacttccttagtttgccctatacgatgaatacgcataacagcttg

SEQ ID NO: 51701 - DNA, 880 bp, Arabidopsis thaliana landsberg
agatgaataatttaacatgagaaatacaaaaacaaaaagaagaagattactcatttcaaatactaaaaactacataagaatgaaagaaaaaacaacgaagtgtgtatgtgaagaacaacatcaacaaaaaggagaagtattgattgaagtcgaaaaaagaaccaatcaacttcgaagatttcttatctcttaatcacttttgacatccctctctaacctttttaattttgtcatacactaatacccatttgttttctttatgatttcccaaaaatctttacttgtttttctctcctatatcatcactaaaatactatccgtttataactaacaaatcaatatatgcaatattgatgaacaattttagaaactacgttcccctccacatacccataataagtccataacttaaggttatacacttatgcttaactttttctttcttttttggcagacaactcaaggttttagttaaccacgaaaaataattttacatgaaaaactaaattatgttataagaatcgaacctaataacctagatgcatcaacaatattaatttcgtttgttatgtatcaaccgcattaaaaattctgcttaaccatagtataaattagtgagaagctaatcacaattattgccgagctagcttccctctatttaacggcgacagaggataaaaccggttagcataaaccaatcagccggaaatagccggtaatgaaggaaaaaaattaagagagagatgaggggaccataaatcacgtcgccacactcgcgggccaaaaaagacagaggacacagcgtcaagaccttggactttgaaccacagatggtcccctcaacaaagcaatagcatgcgtttcggataagagaatcccc

SEQ ID NO: 51702 - DNA, 950 bp, Arabidopsis thaliana landsberg
ccaaacaaaaccattttttctaagaacagaaagagtacaaattgggtcgctgatatttgtttaatgaaggtgtgaatcatttaacttaatgtgttttgaaaaatgcaagagatcattataatttttattgaatgtcttttggaaacgacttgcctctcagttttagtttcgaaccagaatctaaactatcaatgaacacaagaattttgatgagtgggtctagttcagtgggtctagttgggcttcatccaccgagagcccacttcaacaacaagatccaggttcaccactaacttgaaccgacgtcgtttcacttttcttttagttaaagttttagaccaaacctttcaatttgaattagatggtagagaaacgtagggtttccgggttgtgttcggtttcacaacaaaacaaaacggatgatatttccaagactaccgaaacatcctaataagtaataacaaaaaaaataccacaaacttgtgcttcaagaaaagttactaactcataaatatccaaaaaacaaaacaaatcatcaaactctgaggtttctcaataatgctaaaaaatcccaactgaagaagaaaaacaaagttgaatcctttctaaatggtccaaaagagaattttgaaagaacgaaaaaaagacttaaaacttgagtcaatgcttctcatcagatctcctctaatcaatcctgcagcagaatcaaagacactccagcagactcactgccaccaccaatctcaggatgcttccttggtatgcaatcagagaatgtatcaatgagctgcttagccaaagcttttttatcgtctttgaaagtatccacaaagatctctacaacatgtttctccttatccgttgcctttaagaataccacgttagaaacttctctctgaatcaactttgacctgacctgagcactctagctgcctaatgagattcacaca

SEQ ID NO: 51703 - DNA, 672 bp, Arabidopsis thaliana landsberg
cgggaaagaagttgagccgaagccaatagtaaaaattttccttctataaatacgaatagcataatagctcaaaccaatcattaatgaaactatgaaagatacaaatcgcccatgaattatgaataagtatggatcttggtttttttagaagaggaagagacaacattgtcaaaagttccaaccaaacattggccaactttacatgcaaaaaccctgaaaacttgatgtaaagttaatggcacatcgcatatcggttcaagaaagtctaaataaatataacatttcatcaaaagtttaagaaaatataagaatttttactaagaagaacattaaaacaaatcaccaatgactcttctcagctctcgcttaatcattcctacggacgcaactgcagccccgcgaaactgcatgcataaacccaaaaacgttacgtgtaagtcaagaaaacccaaatctgccttttccaaacatcagtaagattaatttaccttggccttgagattcaatgtgaggaacttattgagcgtgtgagatctaacagagaaagcatccatgtgaagattgctcagagtttccatgatgtccgcaactatgtagtctctgtaagaacatcttacttcgatcacaacttctgtttctttgagtttaactctcaaatgtgtcttatctctg

SEQ ID NO: 51704 - DNA, 618 bp, Arabidopsis thaliana landsberg
  unsure (1)..(618): unsure at all n locations
tgggaattgcctgacgtttgcaataaatacctgtgcaaatttgttgtcagcgtttttgcgatccatttttcttccaggtgcatcccgaacgtagaaggatctgatgagcatagcacagatgtcagtatcaacaacaaaaaatgtgctagtggacttaaacggagtgtttaatcagtaaggctggtggacaaatgagtgtaatcttccagcattgctagaagtttcaggtaaattcaagtttttaggagcaggtggggagaaaactaacttatccatatcaattgcaattccagagttaaaatgcttcttcatgagttgccacattccagccttgggtttgcggtaaaggtcatctttaccacctttaccaccagaacttgagactccacaggctataaacacctgtttgcagaacaaaaccatttataatcttcacagtatcagcaacaatgtagggaattggcacttttaagactttgaaatttggggtgttaactaataagaacaagcangacagaatcactattttctctctgatatacctatacgccggaacaaatcattaaagcatatgactaagtacagaacaggcattgatacatatagttctatcatact

SEQ ID NO: 51705 - DNA, 832 bp, Arabidopsis thaliana landsberg
atgttcggagttctaagctcgattacttttttgtgttcggtggcttaggagcttgcgattttgctgttactcctaaggaggtgatcatcaagtccgagaagaaaacctccattaacgaggataagaaaaggtataattcctctacgatatttagggttctttgctgattcagtgctgatattactctctttaagtactggcgtagttatagcttctttaaaggctatatgattgtgatttgtgaatgatgttttgctggagacatctttgataaactagttgaattagtggaatactttgatgttggatctttgttggtgagcttttggcttgtttctctaatgtgtaggaatcgtaggaaaggtggaaattcttctgatgttcctctttgcaacgaggggaaaaaatcacctgaaatggttaggatgaagcactctgatatatcatatcaccagacggtccctcgtaatgagaatggggctactcatcttactcaggtccctgctactatgcctggtcctattccgactcaagtggttgataatacgagtttgttgcacaagattgaaagtaaatcaactcctattccagcagttgagaagaagctgccatgtaacgagggtcgtgaggaagtcaaggcttctagaaagcagggatctaaaactgaggttgattttgagaacatttttgctcgagatggatgcagtacgcgtgatgactccacgtggtagaccgcttctaatggtgaatatcgggatgtgaaaccgccttcaagctttcagtggacattgaatggtgaacatggagcttctgaaaggttatcgggttttaa

SEQ ID NO: 51706 - DNA, 904 bp, Arabidopsis thaliana landsberg
atttatataaattaaaagtagtctagcttttttattaattaacaaaatagtcaaattttaaactttaaagcttaacaactatctaaagtataaaaactaaaaattaagtccaaattttaaaaccctaactcattaaacccaaatgttttgatcataaaatctaaacaatatggttaatttatttgatactttgattttttgaagggttttcctcctaattatgcaatatgttttcctttggttttcgtttcaacataattttggttaaatccggttcatggacaggtagaagaaagatttgagcagtactgcaatcaactggagcaagtgatttcatcatttgaggaaatagcaggagaaggatcatctaaagtgtacaccggtttagctctccaagccatgactcgacatttcggtagtcttgaagaagcaataatctctcagctaaactctgttcgtcggagattcatcatttctcatcaagatgttcccaagatcatcagctctggcttatcacagctcagcttgttcgatgggaacaccacttcatcatcacttcagcgacttggtttggttcaaggaccacagagacatgcttggaaacccatcagaggcttgcctgagacttccgttgcaattctccgagcttggctctttcaacatttcttgcacccgtcagttttcttgttgctcaagtgtaataacactagtgatgaatcaaagttaaaatgttggagaaataacattagtttgattgctgtaatgaaaacagttatccgaatgaagcagagaagctggtgttggcgtctcaaacaggactttcgaagaaccaagtacactcctctgaatctaattctgctttttttctgaaatttttgttatcattcaaatcaataaatttaaa

SEQ ID NO: 51707 - DNA, 1100 bp, Arabidopsis thaliana landsberg
ctgtttaaacgaggtgattatatatggtaatgaaaaagttcgattgtctcaagagtcacgactgtatggccattaaattttagattttctactcataaccattaaatgtttcatactttcttctgccataaaaacacaatgtgatgacaattaatatttagaagatatgattctttaagatccttgacagatgtgtttgggtgtatcagccagcctcataaatcttattctgtacttcttttgattgcgtgtattcatatataattacccataaacgaagaagttaagctagtagaaaagattagtgatcattgagagtttacatagttacatggatttattcaaagcatgtgttcgcaatacacagtttgcagattccgagtttcgtggaaaacacactgagacgattcttttcattgttctcttaccaagaacgttttaacagagaaaccttagcttctttttctactcgataagtttcgatccatccttgaatcaaccgtatctcggcttcccgctggtccacaagccatttcgggtcttctggtgttgaaggtcgtagatccaagtgatgtgcacctgagaaaaaaagaagaaaaagccagaatcaacttagtttgtgagtttcaaagagaatagatgatgattatgattgtgatcatgatgttgtaagatagatataccaaaaataattcatcaagtcaataaaatgtagactactgctactatgatcaaacgtttttaagtctatgcgcctgaagaaaaaaaagaaaaaaacaaaaaaaggcttagttacgagagagattgatgaggcttttagttataccttcttttgtgacgagagcaacaatggtatcagataagttcttgagaacactgcatattacgagtcaaaactcaagcatttgtcacgattacgagattccgtttgtaaaatagcttttgggatttgagtaaagggaacaatattcttacctgccaccactcccaggatctaacagaccatttgagaaaatgatgttacttccaaatgacttcaaggtgggcgctatatccttttacattacagagacatagttaagattcagaacacagcattg

SEQ ID NO: 51708 - DNA, 434 bp, Arabidopsis thaliana landsberg
tacttgtgattgtgacccaacgatatggcatttctgccaggtcaaaaatcgagcattgcacgttttcatgcggccgtgagccccattccagccttccagggctatagcagcaggagtgcaggacacgacggtgaccgcgcgcgccggtctccagtcctgcctcttcagacggtggacaagagacgcgagaggggaaagggacgaccagacgagcgagttttattttatacctctggtgtcttgcgccgggtcggtcatctgcatgcacactatgcgccgtccactgcccattccagtgcaagagaaattaccttggctccgctgcaaactcacgcccttttttttttttgagggaaatgaggttcctgcgcgatacagcactcactggttgcttactagacttgagtgcggcaagtcaccgtcacgtgtctggt

SEQ ID NO: 51709 - DNA, 896 bp, Arabidopsis thaliana landsberg
aggattcaaactaaaacagagacatcgagaacgaatttgttatgagaaagtaaagatctatataatcatattacgctgataaagcgaaacaatgaaactgcgaatctagtaagatagaaacgggaattgaggcatggattggagtgacacagaggaatcgagaacgaatctgaaggaaatgaggaagaacagagcgtacctggaggagatgatgagaacttggatcttgagaaaaagcttggagcaccgacagaaatggagatttgtggactaaaatgtggaaacaaaggagaaagagagatttggagcgagaaaggaggggaagagtgatgtctctttaattttagaaattaactattttttaattataaaaacagaggctcgagttgactcacgtgttgactcggcgtcggcgtgagctttatgcgttgcttctttctcttcccatgtgctcgggcctccactacacgctctgttttttttttaatcttttttcttcgttatttttattttttactttttttctttgttccatgcattaataagtatatgactcttttttagtttagtctaaagtttgcatggttagaaatatatagaaaaatttacagactctttagtctaaatgattggtcgtttccacatcgacttgtaatatggattgattaactgaatcagaccaccagaccctactctagaggtttatgattcattcaacattttattacatttggtgggattgagatattcatattcttagctccctagtcttgcagtttcaatctaacaaaatcgttagactttctactactcaaaattgttttacgagcattcaatactgaatgtgtgttattacttatttactaagggttactcacgcaacgaaacgccttttt

SEQ ID NO: 51710 - DNA, 358 bp, Arabidopsis thaliana landsberg
  unsure (1)..(358): unsure at all n locations
nnnnnnnnnnnnnnnnnnnnnnnnnnnnnnnnnnnnnnnnnnnnnnnnnnnnnnnnnnnnnnnnnnnnnnnnnnnnnnnnnnnnnnnnnnnnnnnnnnnnnnnnnnnnnnnnnnnnnnnnnnnnnnnnnnnnnnnnnnnnnnnnnnnnnnnnnnnnnnnnnnnnnnnnnnnnnnnnnnnnnnggtcgacctaaagtcagtgtgaaccatcaagtgtccagcgaccatcgcaggtccgctgtctatgggctttccggaaaggtatcacgtgccaggtttaggcttcacagtgtcatagttagggcgtcgtaaagttttgccctggcgggagtaggtcactgactagtgacggctgcaac

SEQ ID NO: 51711 - DNA, 589 bp, Arabidopsis thaliana landsberg
tcatgatacctctaacacttacatatttaatgcttcgatttttctaattatacattcgtttatccttgtgtacaatatgatggattggcttcttggtcttttagcggtagaactttgtgtatattagtatatatatatgatttactggtcattgttttttgataaactatgatgtattggtcataaatcgatgctcaactaattttttatttagttttatgttgaactatgatttgtagtgaaatatagtcttctagttaaacattttcatccatggtttataatatgatttatgagatcttcatattatccactgactaaatatgtaaacatgcacacaagtcacaaccatatctcaggctttattgctacgtacatgtgaacagtttctcatattcaaaaatattcatagcccgcgaacatgttcgttggtaactaaaagaataaatcataatgttcttttcacagaaaatcgacgagagtcatgtgacccttaacatgtgtgcctcttttcatcatttattatcataaatcataaacacacataaccaattctttctcatctttttctcaactatatatacacata

SEQ ID NO: 51712 - DNA, 289 bp, Arabidopsis thaliana landsberg
tctagtaacgcccgacagtacgcacttcacgacggagctcagcccgctccttacggtgcaccaccgtcagcaccctacgcgtctcctccaggagaccataataagccgcacaaagagaaacctcacggcgcctcctacggatctccatctcccggtggctacggtgctcatccatcgtctggaccttccgactacggtggttacagagaaccgccgcagcactctggacatggaggaggttaccgatctaactccgaatcagtctggacatcgaggaggttacggagct

SEQ ID NO: 51713 - DNA, 677 bp, Arabidopsis thaliana landsberg
aaatttcactaattcatctaaactaacttcttttttctcctttattgtctgcctatcacaaagggggggacctttcttaccacattcaggatgcaaaggtcctactgaaggttctggtatcggattcctaggcataatgtcgatcatagtttccattagaagaccagactgattcacctcaaccaatgaattcctcgggataataatcttatcatcttctatctgcaaaacataacacacgaccctcatttcaaaaacaaatgtactatcaaaaccagattcaaagtaccagatcatacctcagcaacagcttcaatattcttcaaggaaggattaacacggataatcgtaccaacagtaaccccacggatcctaaccggtgttcccgtgcaaataccagaagcatgactaagctcaaacacagtctgatatttcctaaacttcgaccgcatttgaaaacctcgcaaccaagcccagctaagagcaagaagagtagctccagagacaataaacaaaccaacaccaccttcccaaatacttctcttaccaaacccaaaatcactcaaaggttttaaagtctgtcttcatatattcctgggcacatccaaaacaacggtgagaggattcttccccccatcagacgatggttgaccatgagcagcattcgaattggatgc

SEQ ID NO: 51714 - DNA, 580 bp, Arabidopsis thaliana landsberg
  unsure (1)..(580): unsure at all n locations
agggcatcgggcatggaggcgcgaagggcattccggcatagggtccttttcagcggacccggttattccggcaccccagaggccaatcggcaactcaaaccgtcgccaaacctgttaatccaggcaatttcatgccacggcgcgcagcgcgccaaaacaccaaaatcccaaaaaataaaaattttttccgcattctgagcgagccaaggcactttttcaaaagcgcgctgcgcgccgcggcaccaaaacgcgcagcgccccccgtatagatggagggagaagattttccctcaaatttccctcccccgctgtacgcagcgggggagggcaggtgagggggtcgccggatgaccagtaacgcccaaaaccagaaaggagcagacaatgagcaaaacaataaaatccaaaatcctccaccaacccgtccgcaatgagagaaccctccgagccgcgagcgtgagcgagcgatggccgcagatagagcgttctactgaaaagaaccgccctgacgacatcctttctgcccactggcaacttgncaactccacaataccaaccaaccgaaccgacccaccctaaa

SEQ ID NO: 51715 - DNA, 627 bp, Arabidopsis thaliana landsberg
taagtcaccatgattgatatataatgtctgactttttttagccataagttatctcttcgtactgatttttctgagtcagttgcacatgggagaatctcttgaggtccttaatattttttggtgtctggaacaaagttggaatgttccttttcttagctgtatccgatttaaagaacacaaattaaaaatgttgagttgattttggatgaacactaatggtggggatatgagaatgaagcatgtggtattgtttatatttttctcttaatttggatgtagactgattcgtttcttgcttattttcttatctcttgcaggagcatcatgtcaaaacttgccatggttcagtttcagttgtagtatatggagatcaagagaaaccagcattgatcacttatccagatgtagcactaaactgtaagagtggcgaatatacatttggtacatgatttgttttcattttaacatcatttggtaatctgattttagattcttgtatgtttttatggctgctagatatgtcttgtttccaaggattgtttctatgccctgaagcagtgaccttactgctccataatttctgcatctaccatattagtcctccaggacatgaggtttcagaattat

SEQ ID NO: 51716 - DNA, 829 bp, Arabidopsis thaliana landsberg
ggatttgtacatgatgattcctaaattgcgaatcattaagttgaatgtttcttagctttgacatttcgtttcttcggactttacattggtctacttctttggtcacacaagaccgtaaaagtttttggttttctatagagttaaacttctaaaggcttaaaagagaatttggtattgtgtcagttttaaacatgaatttggatttgatcataagatttgtctaaagccatagtttttgaaatgtgaattgcgattagtggcaatattactggaaaaggcataaaaattgtctctgtctaagagattctattaataaccacttttgaaaaaaaattgaattgtcaagtcacggaaactttctgtagagagcagacagctttatacagttacagtatatagtgtatacagtaaaaaaaatcaaacttcacgctgtttagctgagaatctcagcaactacttgccgtttcatgcctcttgtctgttttggtcggaaaagtacacatgagaagactcaaagtgacgaagagtgtttctttcttctgatattgcaacattcttttgtgacatcatttgttggcttcttctgtttcagtttcttgtaatagtaaaataaaatcatgccacgtcgttcccatccaaacgggcttattaagcccattttcgcaaactataaaagctaaaaacaatcaatgaataaaatatgactttgcctttttagttttttgttcaccactactcagccacattagggttttgaatagccaaatatcgccgtttcagtctccttttgatccctaggaaattttgatatacctttgatcattattag

SEQ ID NO: 51717 - DNA, 480 bp, Arabidopsis thaliana landsberg
gtgagctctggtcttctcgatccggtttacaagttagcttctgttggatgtgataataccgcgaggtgtggaagcgcgctaacgggtcatggaagatggattgctttccagctcttcaaaagcacactgattgggtccgtgatgtggcttgggcaccaaacttgggtctccccaagtccaccatagccagtggttcccaagatgggaaagttatcatatggacagtgggaaaagaaggtgagcaatgggaaggtaaggttctcaaggactttatgactcctgtgtggcgggtctcgtggtcgatgaccggtaacttattggccgtatccgatgggaacaacaacgtgactgtgtggaaagaggctgttgatggagagtgggaacacgttactgctgttgagccttaagcttttgatgctctgctatatctctgctcttgctttaaagaactgaatcaaacattttttctttactcttttc

SEQ ID NO: 51718 - DNA, 546 bp, Arabidopsis thaliana landsberg
agtgtatattcgagctttataatgtttactaagccgggatcccggatctgtgattggtgatacactagcctattgaattgcatagcaagacatagagagcaatgatcaactaatgagtacctatttacgaaactaaagttgtaatttgtataaacaaaacagaacttgagagagagagaagagagaacctgtaaattcttgatcttattcagaatgaaattaaggaactatcaactatgtctatttattgatacaatttggaacacgtttttgttgattccaataatttagttatacttgtaagttgtaactaaatcatgattgacctttttctgttccctttacttttccttcaaaaagaatatgagaaggaaaacattttacaaggccaaaccaatccccataatttgtaatttaagtcatattagaagagaaatagccaaactaacccaaaatatattagagatctcaagagcatcctggctgcatgttatcattctggacgatatgtcacgagacgagaggttcaacaaataaagcaataag

SEQ ID NO: 51719 - DNA, 949 bp, Arabidopsis thaliana landsberg
tctaatgttaaatgttactcttttcacttgtaagataagcgatatgggactttaagatagaacaagagttgaatattgggctattttaatgaactgaatgagcccaataagataactagttaggcccgttgagatatggaaagtttttttttctggtgtaagatattggattagtcatttataaaaaaaaaacttacaatctcccctaattggaaaacatggattttgttataaaatcatattattatttttttgttaaaaggccttctttataaaataatatcaaaagtaatttacaaatgattcgaggagacgatttacagtttagaatgtttctaaattgatacaaatcattgatccaatatgccttcccaagtttgtgtaaccatagaccaaagttaaccattatatcttcttttttcaaaatatctaaaacaattaatgattttttcacttttcggaaaacaaatctaggaaatctatttgtatcattcacatgcatcaaacagctttttattttatgttttggtcacatgtatcaaactgttttcttctgattcatgcatttaaatttgcaaataaaataatagtcacaataatataaaccctttcacaaaagaaaaaaactaaaataaaaatcacaatacattgttattcttttatctggccagtaataattattacattttatattcacattaaacaattatcggggtatatgaaaactgaccactcttattgaaccatgtgtctatgttcacacgttacctaagctgcattttgtatcctaatcgacctgccgttttatcaaaaaacgtgtcattttcgtggcgttttctacttgtttcgaattaggcatcgtttaaaatccgtatatacgcctcacaaaaacaaaacaaaaaaaaactacatggagaccaaagattaaccaaccacgtgcctgactaat

SEQ ID NO: 51720 - DNA, 577 bp, Arabidopsis thaliana landsberg
agaagtaatgtaagaagtaagaggagtgtggagtgtgccttggtagtgaacaagccttagggatccatctccatttctggtaataagagtcgggtcttccatttctttggcaacttagtgcagaactcagatatggacagcttgaatcatagagcggatacgtttcatcgaacgtccatttccccaccgagtaatcacacctctcctctcttctttcacgcctcgtctgcaaggcgttgagtggatcatcgtcccctactagccataactcatcaaactgagacaaaactactttgccaaggatgagacacaaagataagaacaagactcgagtctttgaggtagccatttgaccaggaaactgagcagtgtgggcttggagaaagaaataatataaagaagatgggcaacaaaaagtggataaagtgaaaagggcgttaattacggaaagtggtggtaattagtaattagacttatgcttgaaatcatgtcccgtgacttgcgtctcctcttctctccatcatatcatttttttataaaaacagattacagtattcaaggcgggatttgtgagttt

SEQ ID NO: 51721 - DNA, 592 bp, Arabidopsis thaliana landsberg
  unsure (1)..(592): unsure at all n locations
gcccatcccctagttgggttaaaatgtataaaattataagaaatttagtgcaattcgtacttaaaccaaatttttttgggttaaatccaaatttcactcctaataaaacaaatccatatataaataatattattttctggtcaataataacgttattttttttgagtcaaaatataataatgttatatgaatgagaaaaaacgagtggttggaaagtaaacaatattttcttagttttcttctccaatctggcaaataaatctcactctctcaatcaaaaacacacatcaaaatcaaaaccttctcttcttcttcttcttgcgagttgcaccgaaacactcaacaaaaccaaatcatccaaattgggtaaaacaaagaaacccttaacaagaagaagatcgaattcaagaagaagagatggagaatggagcaacgacgacgagcacaattaccatcaaagggattctgagtttgctaatggaaagcatcagaacagaggaagaagaaggaggaaagagagtaatatctctgggaatgggagacccacactatactcgtgttntcgtacaacacaagtctctttttaagctgt

SEQ ID NO: 51722 - DNA, 524 bp, Arabidopsis thaliana landsberg
taccagcgatggtgtacgacaccattgattttgaaaacataaggtgctgtaccgttatttatcggatctatcaacgacggcacccagtgaggtaaacgcgaaaagggtattgtatgagcgaatttgcctaaggaaccttttggcacgattatcaccatcgaatcgcagcaggtcacttaagggaggcggcggacatttgtaaggctccaaaacgatcttacctcctctgcaacagaggttgtacacaaacctgcgctgcgtaattgtagaagcgcttttgacccgttcttgaaaccagatcacagcgccacaatgtcggcactcgtctgatgggccaccatagtatgagcgatccttgtacgtctctacatgcgcagatgggtccaggatgcatggattacttgaggaatacgtagaccctataatctaggcaggcggaagataagcacctttaagcaactcgacatacgatcgttgcagaggcggtgaggttgcatccgtgctgactataagcagcaagttgg

SEQ ID NO: 51723 - DNA, 359 bp, Arabidopsis thaliana landsberg
cttttttttttcgttaagtcatttctctgaatagctccaacatgtatataagcttatgcacgtggtgaagctgagacagattcgtaagaagattcggcctagacggatggtagaagtcatacagcaggcggggagatcggatgcgtaagaccacccttacatacgtgttatggtggtgtacgtgtgcgctctacagatatgtctagatgtaacccatgtgccttgtcgtagatgacttgcgcttgtgacccataaatcttgagctgtactgcttaggcatttcctggcgcgacactgactcatctcagtgagagtgcagcattctcactacccgctacatcgcgctcgattgtataggg

SEQ ID NO: 51724 - DNA, 380 bp, Arabidopsis thaliana landsberg
ggaccttagctatgctaaatctaaacaacgactaagagcaactccaagagaaaccttaaaataacactaaaaatatttattggtgaaaaacaccttattgattcgtccaacagtatcttcatcctctccccaaaacattcgcatcccgaatccacccgtctctctcccgcatatattggcgtcgccgaatcctccccaatcgcccgagcgcgcgcgcacccagttgtttgatacaccatagtttgctcgcaaccagtatcgttggtcttggaaagcgcgaactctagtgggccacgggaggtttcagcggcacgcgtagaggagatttgagacggtcaatggcggttgaggaggcaaggcggcgacgaccgagggagatg

SEQ ID NO: 51725 - DNA, 431 bp, Arabidopsis thaliana landsberg
acggatcccctgatcagcatcgtcgccatcaccatgatcatgcacaggctgagggaggaaagcatcaccaccaaccagcacatccggcggcaggttaagatcgacagcaacagccagcgcgagcaatccaacatacaatcgagtgcacaccagccacgctagacgtacaaccggaacctgcgtggccagacacccattgacgacgtacacggaagactcgcgaaacgcgaagcacgagtcactggtccgatcagttaccgatgcacagtatccgataacgagcgtaagccaaacgatgacggacgccgcacagacctaatcagctccggcatcacggggaccggtcgcagtcgtggcggcgccatcaaccgcaccagaatcggcatacggcgcagagagagcgacaacgtgaccccatgcgacggcgttcg

SEQ ID NO: 51726 - DNA, 744 bp, Arabidopsis thaliana landsberg
aaccgagttgtgaacacactgatccacctttgaaggagttatcacatgttggttgggtatcattttatttatttgcttccagattccgtagacaactcacaacctcatgcataaccagcttgctgatgagagttggagatctttgtgatatgatgttccttttgcccaagtgatcaagtccacccaaaagccaaatttcctcggcatcataccaagtcttcgttgtgcaaaatgccaaatgactagacgaagcgggcatgctagcttaaggcggtctctagtatcatatggtccattataaaggcaacatgatataggaatcatcaaaccccatgacactagctggcttctagtcaaaagttcatccaaatgacttatccaaaacaagaaagcgtgctttggagttgagcccttaaaccagaccacattatgccaatctttcactaaatttgaaggtcttcgaacataccatgtctttgctgaagagaaacccatgcatttaataacatcaacaaaccagtcatacacatcttcacacaaactaacgcttggaggtccagggtggtcagatgagattgtaggttaaacgaacatacctcttatttcattttctcttagccgaacttctatacatggttttgttttctttaaaaaggggcccaaatgggcttccaaagccctaccaagaatatcccaacctccttttcttcaaggtttctaaaaggtcctggtttttttttttaa

SEQ ID NO: 51727 - DNA, 615 bp, Arabidopsis thaliana landsberg
tattcgaatttgttggcaattatataatgatgaaagctttgacttatgtttagttgtgtgagcactggcttctaattgcaccttctccacccataaccaccactattactcttttgaattaaataattttttaatgaaacgataatcaagccactctcgtcgtgagtgtaattgggcaaaatctttatacatcaaactagaacaataaattcatatgttagcatcaataaccccaaacgagactcatttccatagtctcatgagttagaacgaaaactactaacgaagattacttaaaactttttttttttgttcaggacaaagagaataaaacattatttgtccagcccacaagaaactggacttgacaattgctgcactagatccttctgcactatctttcttaaatggtctaaattaaaaacattgtcaacacataaaagcccaaattagtatgaattgggaataaaaataaggccattttgtaagttgattcatcggccatggcagggccattacgaaacattgtcagaaaacataaaccaccaaatgaaatgggatatttattattgcgttttttcagaacaagcatatataaaaatagatggaattacc

SEQ ID NO: 51728 - DNA, 423 bp, Arabidopsis thaliana landsberg
tttgaagtgtgattggcactatatctctaacagtagacccgcaggaattttgaaactttgtaaccacgtcaagtggttcttcaggaaacccctctgcatttagttttgttacgtacataactgcaccttctttcatctgattcggacctcgtcgccctcgtttccgcgtatgtcaaacagatgagtcaggcatcggagcatcctccatgtttcgtgtagaagatgcatcctctttcttctcttcatttgaaatctatatagtgaaacaattaatggcatttcatatgtgagcactattttagaatatagtcggcatatttctatttacctcttcatcgctgggaatatagtcggcatcaagctcatctgatgtttatagcctccttggaggtagaggagtacaaggatcgtcgtcactagcat

SEQ ID NO: 51729 - DNA, 624 bp, Arabidopsis thaliana landsberg
gctgcccaactgagtaccgaaagccccgcacgtagtcctaacattgaggtgtacttaaaacaaaaaaagccaatatatggcatcgggaagtagcaaagccagatgaggaaggtatagacaatgaaaagttttttctgcttcaactttccaacggaaacaatcccttctttaactcccctgatcagcttatataaccgctggtaccagcgcgtgtgcctgaatatcctcaataaaaaccaaagacctgccaatgtgataatgatgagcgccaggatcattaaattatgaaacaggttgccatgttgaaaaaagaccccgatcttcctgagcacattgcggtagaaaaaattgcccacgatatcaatctgtaccaataccgttaaagccatgacgacagcaagacacaacacatcaatgatccgttctaccagcacggtaccaatgaccttgtctacgggcagacgctcataacgtgccagcatgccgcagcgggttacttcacccatgcggtgaacagccaggttagccatgtaaccgaccatgaccgcactgaaggtggtaaatacccccggatgtaccctaaagatgaatgactgcgccagcgaacgcacgtgaaaaactaaa

SEQ ID NO: 51730 - DNA, 608 bp, Arabidopsis thaliana landsberg
aatcttacaaatcctgttatcaaaaaataaaatatttttttaactaaattgtgtggaacaaaataaatctattggcagacaaaaaaatatatacaaaagtacaaaattctattgaatatatataatattattggttgtgtacgagttattgattacatatatttgaataaaaaaagataacaactatatatatatatatatatagtatatttttcttacaaatatggtataattgtatgtaaaagaatttgtataaaaatatatgtatatatatatatatatatatatattatagtagttatttaaatttgtaaatttagatagtacatatataaattatatttataattatatgtaaagaaatattattttagttttacataaataaaatagttacctgaaaattggagaatatatgttaaagaggtgttgaacttctttttacccaaaagaggagagaagatgtttaacttcttatatgaacttgaaaacaatagaacttgatatgaaatgtgaaaacaatgaaaaatagctgtgatttataaaaaaatttgataagaaaaataatatttttattctttctaaaatcattactttttgaaatgtgt

SEQ ID NO: 51731 - DNA, 622 bp, Arabidopsis thaliana landsberg
  unsure (1)..(622): unsure at all n locations
tgcccattataatgtattaccgttagagtacccctacatttgtttatatagtacaaaggacaaacgtgcaagccgagttctagagattaatgcagcgacgacggcagagggcagttgacacctctaactacgagaccaccaaccggccggcgcaccgccaccccaagcagcggcgagacagcccagtgacgacggagccaatccaaaagtggagcgtgcccaagcttcggttttgggattactccggcactgcttgagagagatggaaattttcataacnnnnnnnnnnnnnnnnnnnnnnnnnnnnnnnnnnnnnnnnnnnnnnnnnnnnnnnnnnnnnnnnnnnnnnnnnnnnnatttgatagagtagtccgattggtatggtggcaaataatgcgcatgatgcaacgcacttagcagtggaacggagcaaagtgatgagtacgcacacgccgcagttcatgggcctcgccttctcttagctcactgaaattctgagtactccacggcttatacacacgctctaatcataattgcaaaacactctaggccggctccacttcgagtaggtataattaaccatgacatacagcgaggcggctatatggggcagccggaacat

SEQ ID NO: 51732 - DNA, 906 bp, Arabidopsis thaliana landsberg
attgtgcatttttaaggatatatcatacatttggagatgatatatgtaaactgataaaaacaattacccatctacttgtatataagcatataaatctcaatattttgtatatatgaaactacccaagaacgataagatgactatgtattttaaaccataaatgactgcacaatttattatgacaaaattttgaagtattacatgagaattttatttttcgtttcagattttccaaatgtgaagtattcatatttacatttgaagatcaaatttatcatgtgtaaaagaatcttatatatgtataaatcatcgtgaatccatttcctgacctatatatatatcatatttttcttatgtgataaaaatataaagccttcttaataattttaaagattgtgaaaaaaattcaaggaagtgatggattttgtttttcttttcattagaaaataattttattttgccacaaggaagcaaacattatgaaatgcttataagttgaaattcttaaaatgaacagtgtgaaatctactattgaacgattcaatacggctaagatggaggagcaagaactaatgaaccctgcatcagaagttaaggtacgtataacagaaatcacgcagcacataagaggggaaggcaattattctagttaatatcttaatcatgtgtttgtattactatgcttgagtttgagagttgatcgagttagattgtgttgcgtgttgtagttttggcagagagaggctgaaactctaaggcaagaattgcactcattgcaagaaaattatcggtatgtatttgttcataaactacaaaactatgagtaatcatgtgtttctaactccaaagtaagaagtactgatcttaattgtatcctttttgctaagagttgatcgtttctcacat

SEQ ID NO: 51733 - DNA, 992 bp, Arabidopsis thaliana landsberg
tttctttatacaaacaaacatactgaattaaggcttatatgagcaatgttcctgttgtgatcgttagagattgatatattgaccgcgaatctccaaatatgctagcgctcgaagaatctgtaatcttgagatagtgaattgctggattccgttctggctgagacgtaggatcaatcagacggattgatctgaactcgtaaagatcatgcgccatcatcttctttctactgctgaaactctttacaaagaaaacatcaaagcatgtagagtttggctgttcagtggaactctaacccatgcagatataatgatccctttaacatcacattcgtgcttacaagaacaaccagaaaaaattgtcgtttggtatgtcaaacaaaactattttgcaggttggaagatgtttacgtacttctcgctacgagggtgttcattttacatgcatattcaggatctgcctgatcaaaacagagatattaaacttctaaagaattttgaacctcaataattttggtatgttgatgtttatttgataatattctcttaatcttaggaaacccccacctggaaagtctcctacagatggtctattgctttcaaggtagttaaaaatattcataacttgaatgatactagtaccttgtgatggtgtagaatgatgttcatttttttttctgttaagttcatctgttcccactgtttgatgactacataatcttggttcttactaaaaatattttgtaagtgatagatatttgtatttgttaaagactaatgctaaatagacctattagaaaatctgataatatgtttacaatctcaacagtagttatagtaccaaaaatttgatgcaaagctttaaagcaagtaagcattgataaacatgattagatacagagaattggtctaaagaaaattgagtcatgcctataacacgaacgttgccaacaaaccccgaatcataacattgaggtttttgactggattgagtt

SEQ ID NO: 51734 - DNA, 531 bp, Arabidopsis thaliana landsberg
aaaagcctaggcaattgaattaactgcattgacaaaggaagtttcaaaattgcccattagagactctgttctctgcttaagtcggacaaagagaagtttgaacaagcatagcaggcatagaaaggcaaaatataaaatatatggttcgagtattaaaggcataccaggaagtgaaatggagcaaaatcctgtgttctaggaaataacagattaagggggtgggaacttggggcaagatcctacccagctgaatttagatccaggcatggtggtacacacctttaatcccatgagacaggcatgctgatctctgcattcaagatcaatctacagagcaagaaccaggatagccaagcttaggcagtgaaggatttagaaaacataaagctagtgataatgtaatagtacagggggatcatgttctaaaatcctgtaagcagcaaacttggcaacttcaagcatgtggctttgtgctctagagttaggaatggcaggaactactgggacaattgatgctggttagctggagct

SEQ ID NO: 51735 - DNA, 953 bp, Arabidopsis thaliana landsberg
caaactccaagtaaaacttgctataatggttatcttttaaaagttctcatttataaggagagtagaaattctacgggtaatggggtccgagacatttaattatggacgatgtgattgcagaaacaattttgttttcaaaccctctcttgatcaaaaaggacatttaaatcattgcatccacttcaaccacacacattcatttggctgtaataacatttcaaagattcttacaaaacaagtgaaatgtcattaaatgtccttttagaacaagatgctaacgacaatctacttggccacttgacttgtataccaaatttctcccaactttttgttcacagaatttgcgtttacaactttggcgtttgtgttttgacggattcgtctaagtgggacaatgcgcgtgtcggacatgcgcacttaagagggtagagacagtgagttctttagctttccttatattctctttcaaaccaaaaaagagactactattttttgtacacttagactaaggaaagcagagtttcatattcctaaaaattctggttttataagtatcaaagacaaactcagtctccatggaaatagagcaaagaaggatcatgaacagagaaggagaagaagaagaagacaacaatcacctttcatgtgcaagaagaagaaccagatgcagaggaagagatgtctgggaggtcaatcgagccgtggacgaagcagataacggtgagaggagtgttcgtgagcatagtgatcgcagttgtgttcagtgtgattgctcagaagctaaatctcacgacaggaagtgttccaaatctcaacagctctgcagctttacttgcttttgtctttgtccagacttggactaagattctcaaccaaatcagcgatttgttgcgaagccattaacaaaacaagagaacacaatgattcagacatctgctgttgcttgttgcggc

SEQ ID NO: 51736 - DNA, 778 bp, Arabidopsis thaliana landsberg
tgatcaaagatgttgatgatcgaataagtcaaattgaatattttccaacgcgatgcctcaggttgatcaatgatcatcttccaagaacgaaaaattcaaaagatcttgcatacaaaataaaggaatgagtcacagactttaggaggctcaccaatattatttagaacatttcatctgaaagtttacgatacaggtcatccttagcagcttagacaaaaaggtaaggataacacaatttaatatcacattcaatacaagtgcaaaaaaaatagtttataaagaaaaaatcttccatctatcccccacacaataaatcatacacaataacaacgagattcatactttatgaagccatcatttgagataaattaataaatgtatgatctactgtgtctattgactttttgtttttagatttaggttctgttattttgttacgtatgtccataaacttttaaaagtttgattaatgaaatcacattcataatttcgtaaattgagtcgtgatctgatatagcgttattgttaatgtagaaacaaacatgaatacaaaatcttttctaagttaggaccaatcattttaaacattcagagtctatctacaaaaagatataataagcaatcaaaagcaatttaacattattactaacctgtgttttattttcgaaaataagtcatttgtcactgcgactaatgcttctaaatattgctataggaaacacctatgattgacaacatctgacttagtttttataacactcggaatctatcccttttg

SEQ ID NO: 51737 - DNA, 659 bp, Arabidopsis thaliana landsberg
acaacatctcagcttctcatctccattcaactggcgtttaaacctttgtggactccatttagaaacaactaacctcaaaattggagtttgatgcctcccagtcctgactagtactaaatactaataatctatatcaagactcatatatatatctgctagttttatttctagctttaatcatatatatataaatatatattttgaatgaattctaaagttttattcataaaaaaaaaactgtttgtacagaatacgttgagtgtgaattttttgaaaattgttaaattggactagagaacctcagaaacagcaatgaggtaacgatataacgttgcccttgcaataagtgttgcaatttggtcccaatcagttgtgaacttgtctttaaggatccctttagtaaggtcccaatcaggcggtgttaacctgttgattccacgctttcatcatattaacatcaagtgttaatattattgtttgcttttttggttaaaatttggttttctgactttcttttgtgttctttgtctctttattttcttggaaattagtaaatggaaaaacaacaaaattgctttctacaaagtactaaagggcctccgtacgtattataacaaaaatctgaaaaaaatgtccacaaaaaaagggggtgaaaaatg

SEQ ID NO: 51738 - DNA, 138 bp, Arabidopsis thaliana landsberg
tcatgcactgacacagttgctctcatgtatgtcaaatcccttcacaggaaatggtgtgtatctgcaagtttaatatatgagacgcacaagcgttagcgcaacatgattaccagtgttcgacgatggagtgcatgccac

SEQ ID NO: 51739 - DNA, 604 bp, Arabidopsis thaliana landsberg
  unsure (1)..(604): unsure at all n locations
ggcatgggcgcttttgcggatgcataacatgtggagaagtcttttatggagaaatgcaaatcaacatattgttttcttcaacttcctataccatgtagttatgagaaagagattcatggtatcattatatctctttctccgagcaatcaataataaatataattttattgttatttaatttttatcgaaggtccaacacattatatatggcgaaattatgatagaaacggaaattttagcaacgacatatacaaccttcaccaactacaacaggatcacatggccaagtgcaatcagcgcatggaaccttttgcggatgcacaacatatggagaagtcttttggttannnnnnnnnnnnnnnnnnnnntgctccaacgtgtttctaccttccaccacgctaacacttgagaatgttatatctacaccgttaaaactaacttaagtcatgtatgctaatattgttttaaatagtaataagtcttattgattgagttttagattacagaaatgaacaaaatctcagagatataagaaatgcttacgggataggagagctatgaggcaaaagaaagtgaagaatgtagagacttacttcatttcctt

SEQ ID NO: 51740 - DNA, 587 bp, Arabidopsis thaliana landsberg
ccaatagagagtgggttgcatataaattcatgaaattagcatatatcatgctcaggaagaacttataatataaactcgcttagataaatggttttaaggaaatggtggtagtgttttcagattcccaactcaagacttcctaaaagttgcagcctgtagaattggttctcattccttgaagttgtgagatatccgtcttatttaaaggagctttataaatatggttacttcttgcgccatagatggaaaacaattatcaacatattcaatgtatgctcacattaacttgaaatctgcagtaacaactaaataagaaagcatttcattagttaagaaccgagcaaacctgtgtgcttgttctaacgagatagactactcaggaatatcaatgttgaggtttgattattgattaggttgagatttgtgaatctcatggttttacaggagttgagaataaaagatgaagacctagaaaagcaagtggcagatctcaagagcaagctagaggagctttgacacttgctaaggacgaggactgagcggtatttcccagtaaaccacagcctggtctaccgctagtggaacca

SEQ ID NO: 51741 - DNA, 508 bp, Arabidopsis thaliana landsberg
agaggatccccttaaaaatctgcatagaatcctgattgtaaaaaatgtttgcaaaagtattgaatttccagtaattggtagttctttttagatttggttatatagcttgatgtctccggttatggtaaaccggtaatttgtgtagactttgccaaaaccggttacttccaaattcaactaatctcaggggtacaatcgtaaaaccaacaaacaatcactcagcttcacgagagatagagagtgttccggcgagagaaataccctagcctcgccttagcctcgccgtctgctctccgccatacataagataacccaaccctaccactcatcttaactccgtattcgaaacttctgaaccaaatcattcgaaaccttgacatgattaagctacccaatccgatttctagggtttgtgatcgcttaatcatgccgagacataatgatgatgaagcagaagtatgttttaagatgtggaggatttgacatgacatgaccttgtgcaagtatg

SEQ ID NO: 51742 - DNA, 537 bp, Arabidopsis thaliana landsberg
atgtaacccttttactcatagattaattaccgtatgtttttgttgccataatgacagcctctacaactgtgatagttttttttttctgcaaatattaaattaggaatgcaatgctactatcaatagaagaaacagctgagtattacattttaatttaaagacaaaatttttgaaaaatgttataatttctaacaatattattaaaatatgatgcctataatgtatttcctatgttcttaaaatatttttttttatatttagttataaatacattatgaaccaataatagttggtgaattcaaatatctccattaatattttttgaaatctacaaattattaatatttagtcaataacaatgcatagaaagttccaaaaaaaattttgttaacagaaacttccaaattttttttttttatggaacaagaaataacagatagaaaactattttgttgtggaatggaagtagtaatatacattaagcaaattttaaaaaattatataagcctataccccctcaaagtatgttatctacta

SEQ ID NO: 51743 - DNA, 969 bp, Arabidopsis thaliana landsberg
cacaataaaagggcatgtggcaaatattataaactgttaattttggagaaatatcttcgggaatagtggggcattttacacgggaaatcccacatatccatatagatgaaaatcaaggataaaacgttataacagtgagattcaaaactgttaaattatatttagactcgaaaggttaagaactttctaaccaatcttaatctaaattctctgttatatttttttcttattctaaattataaacttgaaaattcgaaattttcgctgattgatttgattttttcgtcatatttctaacaaagctgtctttaacggtttcgtccaaaaagtttcctactatttaccaatctgccaccccaaaaaccctatcaagcaaacggaatccgatcaatatgcttttattaattcataacacagcatcgatatttaccacgtgtaaaaagtaactcttaattagtataaaagaagcacaagcttgagatctcatatctacaatgcctttctttctttcaaatctatagatctcaaattttacactgttcggatcttttttttttcttttttttttttgtttttaaattaagtgtaaaaaatgggatcaccattgtgcgagcatttggctaggctatggcttcaatgtgatttgaagatacactctaagagtagtgtaaacaattacaactattcgcggattccgttgtgtaataattgcgtttcgcagaccgctcttgtagaatcccttgaacaagggttgtgcctatgccaatcatgcttttcaaatcccaatgtaatctcgcgttttcttcttcttcttagaaacgatgctagtgattattcggcatataattttccactggatcttgattcctcttcttcgtcttgttcatcttcttttatcgatcgcaattgggaattttcccttggttccttacctctcaataatgaggactcatcatcatcttttgaaat

SEQ ID NO: 51744 - DNA, 552 bp, Arabidopsis thaliana landsberg
tgtatcattatttacacattcaattattattcatagtatatatcacatttactgcaaaaaaatattgcttttccatgtttgttttaatttaagacaccttaagaaagtaagaaaatctatatatgacgtgtataaatcccgaaagtacattggtacacacataaaaggagttaataaaaacattgtatttctaaataaaagttccggagatctagaggagaaataattggaaacttggaacgtagatccatgaaatgcggaattaacattaataaaagaaaagatattttgttacgagtcttacgactaatcatcatcgtggaacgttattgaagaaaaatatctaaaaacagaaatcttggatcctcttttcctgttttgttttttaatattaacaaaactaaagtaacctcaaaagaacaaatattgaagttagcgacaatactcatcgaacgtgtatctaagtaatttaagaattcgaggcaattaaaaaagcaaaaagtaacacaaacaattagaaaaaatgacaaatttgataaagaaggattaatt

SEQ ID NO: 51745 - DNA, 693 bp, Arabidopsis thaliana landsberg
aagtatatttaacttttgttttcttttacttttttctattaattttaattaaaaatttgatgtgaaagttaaaaacggtattttattgtgaatagtaaaagtcatgagcaaaatcatcaacttaggagtgttgaaaaaaggctaaagaagagtaaattagaggagagtcaaagattgtgtgtcactagtgttaatgctagtaaacatcagctcttttttttcttctctcttaatttttcaaacatttgatttctataaaccttcttaataatttcttccgtaaaataatatgattagttttttttttttgtaaacaagtgcccacttgcttgaccttcccaaccaaaaaaaacgtaacaatttccatcatcttctccataaagttcttacctttaagtgtgtttaatggagatttattcctctactcatctctctctctctattctgttccatttattaagctttcttcacgctttttaagataattaacagtcacgggttctaaaagctaaagggttttgcttcgaattcaagtgtctcccttcactttctctctctctattgctgctctgtttctgctgtcaattccctaagaaagtcctgatttttagcggtgatcgagagaagttgaagaatcatgtttattgagtgtcctttgttgatccatagggtcatctaattttgctaatttta

SEQ ID NO: 51746 - DNA, 865 bp, Arabidopsis thaliana landsberg
gtaagtcaatacattatgcacatcctgcaaatgtttatccaagtgtctacgaatattgtatgtaaacgaacaattttgttatcttctccaagaaaatgacttgtctaatgaagaaattgtgtccatttttcttgtgtgtcattagtttttcttccctcatttgtgtaatcccccttacagtgaaagcttcttgatccatatcttgtccatatttcagaaacttgagtgaaaacaacattcgtggaggaatacctgcatcgcttggaagcgttacgagcttggaagtattgtaagtaatcagtttgtttattaattgagtactttatgtgttaacttttcaattctgaaccctgaaactgaatttttatgcatctttgcagggacctctcctacaattccttcaatggatctatccctgaaaccttaggagagttaacatccctgcggattctgtaagattatcaactttctgtttgtctccatgtcaatttcagtggccagtggagttcacatggtcggcaacatgaaaccttttattgtattacaggaatctcaacggaaactctttgtctggaaaagtaccagcggctgtaggtggaaggctgttgcacagagcaagcttcaagtaagatgattgaatcagagacaaagtttttaaagaaatatttggacttggcatgtgaagaatgatgtttggcaaatagcactcactaccctgtaactgttttctctatctctgcagcttcacagataatgcaggtctttgcggaatcccgtggctaccagcttgcgggcctcacctttcttctggagccaagattggcattgcattcggtgttagtcaagtattcttattgatcgttgc

SEQ ID NO: 51747 - DNA, 1042 bp, Arabidopsis thaliana landsberg
agagggagaagctcttgtaacaccatggcaacagtggttttaatttttgaacatgtctagaaattttactctctcttgcaagttttcgagattgtcccaatatcctttcggttttcggtgtctataagcaagtgaaagattcatcatcaaagctattctcctaaatccacccattcttggaatggctttttcaatgtcaactcttccatgtaaccgaagctgcttcctcatgggcatgaatccttcttgtccatgttctgatatgaacttgagaatttctgatttcaagacttcaatgtctctttgtagaccaggaatcctccgtctctgcttagtttggtctgaaccatcatcattattgtaaactgtctcaactgatttggcacgagatgaagaacatgtttcctctgaaacttgacatgtctccagtttacatgactctgaagatttctctcctcttttctcaatgtaatcccggatagcgcataaatttgacggaagatcttcatatataacctgaaaagattcagagaaaacattgtggttccaataagaaaaaaaaaagattgcactgaactcagtcaattgtaagccaaacctcttccatgattgcttcagaaagaaatgaatcttttctcattttggactccacggtatacttgagaagtgtgtggtgacttcctagttgttcaaaaatccatttcccctctagcgagtcaaagtctccttcaacctgttcaaatctgatttcctgctcacgaatctcatgcaaatcgagaacagctcttgcatgaagcaccatgtaaagcaggcctttgcatccttcctgaaaacagaattcagttttagttatataatttcttgaaatcaagaaaagaaacattggctttggccagtatcagaattttgatcttcaagaccagactaaatacagagcctttctgaatcatgaaagagctacttatgagtcatattttggcaaccaaattctctcttcagacttttccagtgttagtacccaatacaagtacttgtagaatga

SEQ ID NO: 51748 - DNA, 600 bp, Arabidopsis thaliana landsberg
cggttttgttgtcaattatcgcttgtagtgggaacgtgagataattagatatagaatcttatacatttgtctgttgtcgtcacagtaagtcagtgactactagtattaaataagaatagaatattaaaccttagattttaatatatgtgtgtaaaatatcgattgaatggttaagccataaaacaaacaatgagattatattagaggtcaccactatatattctatcatttgtgttttatacactcataatattttcagggatctatcttcaaaaactaaattcttaacaacaccaacaacaaaaagtagtcatgacatcagagtaatcacaagaagccattacgtaaacctaatctcaaataattcagaaaataaaaaataatcgcagattacaagcttccaaatggattaaactgaacaatcaaattaaccaacccaaatattataaatataatcaattataatttggtattttatttattcagttaattaaaaacacatgtgaatagatgaaatttaccaaaaataagaacatgctcatctttaatatcctaatttttttaaattgatataattttcttaaaaataaactccaacgg

SEQ ID NO: 51749 - DNA, 550 bp, Arabidopsis thaliana landsberg
aaataccagaacgttggccattaacagttactgccactggtccaaattcttcagttttgcctttgtaatctatctggtttaatttatagtggtttgcacccgcaactgcgcttctatccaagaaagtgtaatttaaagttgcattagaatttccgttgccagctacttctccaaccttagtaaaagtttgtccatctgtagaacgtagcacttcaaaatggctgttgtttttttcggaagcagttttccagcttaactgtacgccgtttaagatgctttttccagtgaaggaagaaagtttgataggaagtggatctacagctttagctgataagttatcaatagcaaaacttggcttggcacttcccggagggtttggatcagctacattggtcttataatctctcatcacaaatctgatttgaaggttagcaatattgctggcttcttctggtaaaacaaaagttaatgattttgggtttacgccagcggtgccacttgtattgattggtgcatctgcattgttgataaactcattgtctatcaacgt

SEQ ID NO: 51750 - DNA, 735 bp, Arabidopsis thaliana landsberg
ttttttcttctgtggtttagggaatgggctttgattttaaaccgtttgttcatccaatctacaatgcgataatgtcccgcttgacaaatcaagatcaagaccaggtctgtagcataaatccccctttttagtcttgtttatgaaaatccatacttcttcgggcaatagacttaataatcttatttgaactctttctattcgtcattatgtttaattacagaattggaaaagcagatttctgcgtttgtatttgtaattttgtgttatttacatttcgtaatatctcttcccttcaacaggaggtcaaggagtgtgctatcacctgcatgggtcttgtgatttcaacatttggtgatcaactgagggcagagttaccttcatgccttcctgtgcttgttgatcgaatgggaaacgaaatcactcgcctcactgcagtaaaggttgttcttgtgcttctgttgaagcttttattttaaaattgtttttagctcaagtctctgattgtgtgggtgtatgcaggcattttctgtcattgccacttctccgcttcacattaatctatcatgtgtcttggaccatttgattgcagaactaacaggattcttacggaaggtatatggcttcttagcaccatatcttaataggcatcaaatatgtacttttctttggtttactttctcatagttagtggaaatttccttgaagacattatctggtattaatgtttttgtaaga

SEQ ID NO: 51751 - DNA, 147 bp, Arabidopsis thaliana landsberg
gaaaatgttgtctgtcgcgtttctttctcttttctctctctctgttctctctccttttttgttgtctctctgtcccgcgccgtgggcggggcccggcggcccaggggggcccgggggcgcccctctagggcctagtagggcagaggg

SEQ ID NO: 51752 - DNA, 1829 bp, Arabidopsis thaliana landsberg
catctcttctgggtcatcattatataacatatgaatgagaagcgcaacagaattctgctcctcctgaaaatcatcttcatcaacctaagagcgtagaaaaatatgtacagaagtcaaaatacaacttaatattggggtcacaagtgattgagaggatattaagtacaagatagaaagtatctcaaaatgcttataacaacctcaagaccttgcggctcatccaaatcgttgataattcctttaatcagttcaaacaatgcttcaacctaccaaagtaaaacaagacaaagaaattcaattttaccacacaaatagttcaacccaaagggtaatggcataaaggtatcctaccttctccgctgtagtaataagagtattgtttttcataatgcttcgaactataacagtagccattattctctttgtttcggtatcaaggtactccaccacgaggggatagttagttagtttaagggcggtgacaacatcattatacttctctaagggagcacttaaaagcgagacaagctcctttgttgcacgagtgtcatcaatctttccttttccggacagttgcttaacacatgatccctgggaagagttagtgaagaacattaaattcaaactctttcatccaatgtaccctattccagcaaaaaattcgtataagatacgtagtaggaagttttctgcaaatgtagcgtaccataaacatgtataaaaaagcacatacatataacagaataatacataaattcctgaaccaatatccgctacaagaatgataaacaaagatgaacctgaaatctgtttttttttatataaaaagattggcatcttttgacacaagtaacacaaatttagcaatgtctcagcaatgtgaatagaatgacaagataatctaaataatgagatcgataggccactaagcaacattgacagaagacggagtatttaaacttgagttaagaagagaacaataggtaaatacagtcgctataagaaaactgaccaacacttggtccgcataatcaagccgatcagggtgaacgtgaagagtaaacttgagaagggaggaatatagggttactgcactcagaataggcatgtcttcttgtgcttctatcacctgcaacatcatagtattcccacttaagaaaaaaaattcattgggaaaaaaggcgtcaaaaccacataatttaagaagtgaacacatgcagaactgtgttaattagggtcactctttgcagcggatacatccaacagataaagaacaatgcatctttctagatgttgatggaatcgtctaaagtgaagagtttcacttaaaaaagaaatgtcaagcaaaaaaatagttgggccttctccatgtctttcgtgatgctaacaagtccagtcaacaagatttctaagctgtcattactttcatacttttttacagaaacaaaagtgtaacaggactcacaggctacaagtaatgttacctttccaattgcattattcaactttgagaaagctttcacttgcaggaaataaggtaatactttcgcatttaaggcagcataatttgacagcctctccattaaacgggaaagcactgtcatgatgtcaactgatgcctgagaagaaaaccaaagagaaagtgaaaaaaacaggaggttagtgaaccactgacaccaaaaaccccgacagtgcagttgctatcaagttagatgattaggagcagagcataatgctgactacgagagagctactcagactacctgaagttgaggacacgccccaagaagtacatctagagtctgcaagtgatactcgtcaggaaaaac

SEQ ID NO: 51753 - DNA, 608 bp, Arabidopsis thaliana landsberg
  unsure (1)..(608): unsure at all n locations
ggtttagtgttgtcctgtcatgataataacacgtcactatatcggttatcaataacggtcctacgatacgattggcacagcaaaaaaatctattgtccgaatctctttcttctttttgtctatcgaatatctaatcaaatcaaatgtcaattcgaaaggtaaaaattttcaatattccaacgaaaattttaacaaaaaaacaaatgggaccctattattcaagatttggaaagagtttctatataaagaagtaaatctcactctctttacctattccgattaaggaaacgaaagcaaaacaattccatttattgcatttgtgaaggaatttattagataagaagagtaaatcatcatcactcgtcactaaagatttctttgcgtttaagaaatcgaaattaggtaaatcagaataattaactaattgcatatatattaaatagtgaaccctttctttcaaagggaagttttcaaattctcacactaacctattgaacaagaacatctaanaccctctcaaacacattcatttactctacttatgattttcttctactaatgtctttccctgaaaactctcctgatccanatgttgttgccatatcgat

SEQ ID NO: 51754 - DNA, 291 bp, Arabidopsis thaliana landsberg
tgacaccagtatacaggagtaagagcgcgtgagtcgtcgagaacgctcaactcagcgaactacgatccgacgaccgatagccaaagcaccgttgtactctagccatggtagaagagctcaaacaacgggctaacgtcaagacgcgcaggctccagccacagaggtcacacgacgtactagagcaggacattcgtcaagtggcatatcgcattgtctacgaggcgtcaagggtagccacggaatacctggacgaagtcgaggcggctcgaaatatgagtgcactagaacccc

SEQ ID NO: 51755 - DNA, 1156 bp, Arabidopsis thaliana landsberg
ccagctagtgtcatagtgcaaccgtgtgtgagcggcttcgaggtggttgtgagcagcttagcatcaggtctcgaggcttgccactctcaagagttcttgaagttcttcacgggcaaggacttgaagtcatcagctctttaacagcacgagtcaacgagaggctcatgtacactatacaagtcgaggtacggttacatatttggagttattgtagagttttttagtgtaagcttatctattgtgtaaatatgcttattcttatgtatccatatatatgatatatccacaggtaaatagctttgattgcttcgacttagcttggttgcagcagaagctaattgagcagttagtactttccacgactaggcactgaaaaaactaacatttgtcataagaatatgttcattgaatgatgcttttgtcccaatctctttgttttagtgtccgtaagggtgtgttcttttggtccttcactacttggagtgattttttttttttttttgtaaaaatgatctggttgattagattgaattagcaaattctaaactttcatgcatgcttctttatataggagaatcttttgatcaccaacaaaacaaaaatatagtgatgcgcctgatttctttatacatttttgaatatatatattcatcaatcgatgataaagactagagtctcatcggtgtctttttatacttcatatgcatgaaccatagttgatagatattttgaacatagcatacatacacttctctgagacttaccaatgaagatattttatgagaggagcatggtaatgcaggttaaataatggagcagctgccattcaacattagtagatatcttgtgagttttactgactaaattcgtacgacattgacctatagctaggaacaaacactgatcaaaagaaactttcatttgattaacccgcatatatattagtagataatatggcatgcacataatttgatttgactcacggttttcaagttttctaatcatgccatattttgttcataaatgaaattacatgacattactgaaatatatggaaaggaatactgaaaacgtttttttgggttaagaagaagaagaaagtacattcaaatattcatctatattttatagtaacgtatatataactctagggttc

SEQ ID NO: 51756 - DNA, 516 bp, Arabidopsis thaliana landsberg
taatagagtaaaataaactgaaatatcctttcttcaatccttttttttttttttttattgagcaaaaaaaataaatcactgaactatccattgaaccatttttgtatgaaccagaaattctacggatgttttgagcccataaaaaataatcaaaagaaaacaaaatagttacataactaacctacgtggccaaaaatcagccgattgctccaccaaatgggcgccacaaataaataaatacccaaacccgtaaatatatcctcatctcatcatcaccgtccatttctcaatccaacggtgtacatccctcggaaatctccaacaatatctaaatcactaaatcaaaaacagctttaaacaaaagaagatttcacaaactcaaaacacagagaagagtgagagagtgagaactccattgttgcagtgtgttccatgaactcctcctcaaacaactatggcgacgacaggttcactccaatccttcaccggacttcgtcaatcatcaacggagcaaac

SEQ ID NO: 51757 - DNA, 688 bp, Arabidopsis thaliana landsberg
aactccagattcttctccctcttcattatcacaatcttttgcttttcctcaaaaagaaacacagagagagggataggggagagagacaggcttggtaatgaaaagatatgcaggggaagtgacacgtctttttttgccttgtgtctgaaaaagatcaaacaaaagggtaagtctttaagaaatcatctttaaagatttgactaatatgttgctttttcattgttggtcctagctagagagtaaaaagattcaatcttgttaatgatgatgaacattagaccacaaactcaatgtaaagcaatgatttttcttctgacccgtgacctctccattgttgcagagactctctgaaactggcttggtgttgttggtcaaatctgaagtaagaggaggaggagaaattaaataaagaaaagaagaaaacacaaattgggtttcaacagtgttgtataagagggaccccacaaaatggaagagttagatacatcacatgcagtttctcagattttacctcaatctcattgaactgcatcaactgttgcattcatgttctgactcatctcctctcagtcccactcacttcaatatcatctgtcagagaaacaccattatgagattcattaccaagttagagagataaagacataaccttttgaagctgagaggtgagagctttcatttgagataa

SEQ ID NO: 51758 - DNA, 526 bp, Arabidopsis thaliana landsberg
gatggaatcaccaaaattaattagctatcatttccaatcatcatggcataatctgccaaaactccaatagcaccaaataaatttaatttcacttggtcagatgttatccatatgactgccaaaaaaatgttcaaagatgatacttgaagggcaggtaacaataaagccacggatatagctttatgcattatattcaaatgacgtgtttcaattagttgcaaaagcttctaacagcattattaaggctcactgaccatagcatgaatctcatcaagatacaatgtatgatatcttccatattatgttcttctgaggcgggttaagcattcaattgaacataaatgaccaattgtcaactgaaaagaaggccaggatagaaataggatgtgtcatcctctggaagcagtcaatctcaaattctcagtctcaataaatctgcccatgagacactatagtaaaatcacaataataagcagcaatgccaagattatctgcaatgaaatcaggcttgttgatgttttttgtg

SEQ ID NO: 51759 - DNA, 706 bp, Arabidopsis thaliana landsberg
aaccaaacgctatcctatcaataaaaatgaaacagccaaactcttttctatttcttttataaacaatttatgaacagtgttgggacattaacacttaagtccaaatgagtaaagaaattaaagttttgttaccttaaacggagcaagctcctctggagtagctagagtatccttggtttggagaagaggaaacatctgccttagaggagccatatatttgtcagctttgtaaatgtttcccgcagctacgtaaaccaaggtgctattgttaaatcccatgcccctaagcatcattccgacctacagagtgatgttaccaaaatgtatcacttccataatgtcttatatccgtaaagtgaattgtgatagtcactagataaactgaatttatgattttcagaaatcttggagaggcgaggtagtttttcagtgatacctccagtggggttaaagggcatttcccatctatgcggtttgcaccaggcctaattactctgcctctcctcctgaactttcctttccaccctctttcccgggccatgtccatttctagcttctccgcctgcccaaaatcatactcgcaacacgaaaaggcgaccatgtcctttaaaagaaaagtaaatagagattataagagaaaactacaaataaggaattgcagaaatggagaaattggcaggagattataaaccatttcaaagcggag

SEQ ID NO: 51760 - DNA, 1011 bp, Arabidopsis thaliana landsberg
ggagcaagtggaacagtttagagaagacatggtcaaaggccttaattaaaggtttcgggaatggaagaggcaacaaataacgaagtaaatccaattcgccgggttcatgtaccacaagttccgaaaagaacacaattgcttggtttaagttgtttaattataacggttcaagttctcataataactaaacggaatattaaagaaagtggatgttccattggattcaatcaatttgatatgtcaacataatcacttttttctttcacaattccgagaacataataagagcttttggacactcaagtcatcattgaataccactagacttggtctgaaaccataaaagcaaataaagaacatataccaaatccacactacaaagcaaatgatataagatgaagtttgagaggagttattgagaaatgtaaccatggatagtgatcttgagaaatatcacactttcttgttaaaagtttcagactttacccatcagactggttcacttctactctagaaaacttgtcagaatgaaaaactaaagaaaactgaaacatacattcggcaaaagctttcattttgctcggtcacaaccgcgcttattagctcacaatcaaagaaagtataacatactattgtaacggcgacaacttctatagccatgttctttcagaagaacataaacactcaaaagtagtattcatataagaatagcttagaagaacaatacacatcccaaacctctctctctctctctctctctcaatctctacacaccaaagttagagcaatgcagagatttctaagcaacacaatgagatgtatctcacagtcacaggacaagaatcagtttctccaattagtagaaatgctaatagacacaacatctttaaaattaccaattcctataaaagttcctcatgatccatacattctcactacacttttagcaaaacaagattttgatttgagaacagagtaaaatttgcaattgtgaacaaaatgagaaatttt

SEQ ID NO: 51761 - DNA, 633 bp, Arabidopsis thaliana landsberg
gatgtgagattttggcccatcccctgtgatcttgtaatgcgggcgccgcatagatgccccactaacaacccagacccactgtcagccgctagtcgtgcgtgcagtaataccgaagttttctccgatacatgggtcccaccgtccaatctcagtcgctcgctgttcacctgaccacgcgtgtgccatgtctgcctcccactgcccactgggtctagtgagtcaggccttcctccttccttatacgaatgcaacatctgcaacgaaaccgcgccaatcgcgtgggctagccgggttccagctaggggttgttgcggtcgagattcatgggggccataaatcgtggcttggggcttgatctctcccttggccgctataacccaaccactaaccgctcacgacgagagagtggatcggtcgctgccgcacggggaaggctagggctatcgtcgtcaaccgtcgagctctaggctgggaaaagaccgactgcaatactcgcgcacattggtgacctttcggggtgggagtgttggtcggggcacgccgattgctcgtcggagctatcaagccttcgtcgatcgcacgttgccgtggtcgtgggtgatcgactcaaatttaggtatgaagttcccagat

SEQ ID NO: 51762 - DNA, 831 bp, Arabidopsis thaliana landsberg
caaacgccaggttttctttgataagaaaaaaaaacgttagcccgttcttttgttaagttaattttgacgataccatttacctttaactaaaaagcattactcactttatctgttaattaatcaaacacgagaatgcaaatgctattcgagttggtcggcattacaaagcagcaaaggttatgtgcttttctctaaaccaattgtgttatattgtcgattcggccaagttaaaagagatgacctaatacgaaaacaataaaaaaaaacgaactaaagcaatcgatcagaaaaccaaagcatatcttaaaattgttttcaatgattcatttttcctatatcaaatatcaaaatatggtttttgaccgaaccacaaaaattcgtttaagacctaaattatatttctttgagaaattaatgatgcatatccgattaaatcctaaatccgaatgtgaagctaaaccatactatatattattcatattaaactaatttttgttttcgatactattaccgtactcatgcattaattaggtttacatgtgttagtcaccctagcttgttaaatcttatccgattctatcattctaatattacatactacatatccacaagacatacaatatatatatatatatatatatttggtgtatgtcttgataatatttttgaagaaaaaatatatttgacaagaaaaaaaaaaaaatacatttcgttgtctaatgcatgcgtgcatgtgtactttagactgattacgatttttgtcgtggtatacatcatctatgcaaagatagtagtgggattattcgagtaggttgattttggattccctta

SEQ ID NO: 51763 - DNA, 576 bp, Arabidopsis thaliana landsberg
  unsure (1)..(576): unsure at all n locations
ctccgagtccatagtctgtgaagcacagtttctgagtcttgtgctttacttcacaatacactttgatgcacgagggggagaggcaaatcattatctgggaaacgccgagagccgcgagcccatgcggcaaatgggacagatgccagcattagcggcatgccattcaagatcatcaccccctgttacctattgcccttcacgatcaatacctagagataccgatatacctaaaatagtcactcacaatcggtgctctcagcggcctcgcgaggacgccgcggatccgcgagcggcgcaaggaacgtagcgagtggcaccaggaacgtagctggcccaggtgatccacgtgaaagaacaacgaccatggggatgtcggggagccggcgggcgggccatcgtcatacgtgatttcagcttctgaaaacggcaatccagcaggtcagcgcgccacatctcgcgtcacagccgaaaattcggctcgcgtcggggtacatttctcaggtggcgtggacgcgaacgcgcnccgtcggggccatgagacagggctcgtaaaacccacaggccccctgggtgcag

SEQ ID NO: 51764 - DNA, 851 bp, Arabidopsis thaliana landsberg
tctaaatgcgacattttgactgatgggtctttgttgaatttgaagagagaaaaagagaaagagatagtttctaatggagcctccaacgggaatcttggcttctctgtggcaatttatactcttcattccttatttcactggtttactgcttctcggtgtcattaaaggtaacaaatttcagacttgagttcgatgatgttgacatgagattggcttacttgatttgtgtaggcctccattagggttgtttcatttattcatcaatttgcttcaacagttactgaaattagcatttctaaccaatttagggatcttcaatgccataaagttccctttttttaattgaagtaaacacctaatccgtgaacgttgttctgttttagagatcttgctcactagtttagtggcttaggatttatctaagagtgattaattggtacataacattcatcaagtgcttccgaagttagtgaatttggtatgaaattagtttcttcagtactataaagttctctttttttaattgaagcaagccccaaaggccaaatccgtgagttcttttactagtcttgttgacaagttttgtgggaatgaattgttgtgaacgtttctttacttcttttttgtttgcttaggtatcgttttatgcccgcttatatgccttactgtggctattggaaactctgcaatcatctaaggccttttaccagtacacgcgatttggactctatattcgatagcgaggtacttacttctttctgaaacaatctctgccctctataataataacattgtaatctctttcgatgttgttaagtgtttttgtttgaaatcagtgctaaacagtaggc

SEQ ID NO: 51765 - DNA, 806 bp, Arabidopsis thaliana landsberg
aaatgatctattagcatctaaatacacacatccactatatatagatcaaactaaatactaaccttttttgagttttcactgcttctctttcttcactagtactattcaaatcataactgccataagagaaaacaagttgagaatctcaacagagtgaataaaaataaccaagaccataaagtcaaaacaagaacaaacactcacactccgagtaagaacagccacacttctgcacgaatacttggatcaacaccctacagaaccataagaacataaatcagaaccagtaaagagacaagtaagaaacaagacatacatatggtccttgttcaaaagactcactctgcttctaactttcttcaggaatccaactccaccatcacggagttttccctccggtgtaaataaactcctccattgatgtggcgtcaatgcccattttcttttccggcgagaccacggtgatttccgccggctataaacaagtcaagagtcaacattagaagcttttacaatatcaaaatcaacaacattgattgccaaaatcaatctaacagcaaaacaaataaacaatccgaacaaacatagaaacttgttaatctttatcatactttccaagttgtgaacattcaatccgaactctattattggatcaaaaaagagaatcttttagatgccatctaaaatattccaaatctaaaagctttaggctactcaccgatcggaagaagtaactgaagacggagacgaaagattagccacaaagagaaccgaccgtagatggatccacgacgacgaagacgaag

SEQ ID NO: 51766 - DNA, 739 bp, Arabidopsis thaliana landsberg
gagtagatcatacaacttttgttatcatgtcattgatacatagattagccatgtgagccatatatatgatgtgaacatatatagagagcgacctataggttttgtttaggcctttataaataatgcattggagtttctcaacacagttaaagatccttttgagttgttataatgtcccaccactcttttaacaccagcttctttttcccttcaaatccaacaatattagtgatcatcttttttctaggcataatgcataatttttgaaatgtaaatctcacttgaagtcagaattgttggtgcatatttagacgggtctctatttattcaaatcaatgatctttacaaatatcttaacataacattttcatcattcataaaaagataaaagggaagaaaaaggttgcaagcaaaaagaaaatagaaaaaaaatcaatgtaccaataatgagatcataaagttattatctgtacctaagattacgtagagagaaactatgatctgtttcttagatcactacatgactttataattattattatgtttattcgttttttagaaaattgaaagaacaaacattcgtcattacatttcaaagaatgtggacattctccaagtgacccattaattcaacttataatattgaaactatttggatcaacctataacataagaactatgtagacaagtgacatcgattatctgtgtaaataaattgatctgttttataatttaatag

SEQ ID NO: 51767 - DNA, 638 bp, Arabidopsis thaliana landsberg
  unsure (1)..(638): unsure at all n locations
atgtgtaaattatcataaataagcgacaaacggagtcaaccacaaaacgcagatccaaaacgcaaatgcaaaaaggcagagtctttaatgacacccatgagagaatacatcaaaaccatgagaggttcatcaatggccaaaaccaaaaaccttcagcatcaaaacataaaagatagttgaatagcctacatacataaactgattaaaagcataaactacttagttacttcctgcggaagaggcgttgcattgaggagtgtcgatcatcatggcattgttttcaaacagaggagaacaaggccaggtacgtcgaaagtcaggcaccactttcttgaaatcccaaacgagtgtcgattttcgtccttggtactgaactacttcgaccctttcagtctctgtgtgatagatgaagatttgtgtatcacatctcatgtacaccaagtccgacttctgattgccgaccgcaacgagctgcctttctctagtccaagtcctgcatctcgtagctaccgcttggctcacttcccacatcgccttgccattcangttacacagcaggtctcattcaagcacattgcctaccttttcaagcttccatacctgcattactgacttattgctcgatgcgtattgtaaag

SEQ ID NO: 51768 - DNA, 528 bp, Arabidopsis thaliana landsberg
  unsure (1)..(528): unsure at all n locations
ccctcaacgcttggctgctgccgatgttcggcgtttcgaagggtttgaggctcgaggccgacacggacggagatctccgggctcattccgcnnnnnnnnnnnnnnnnnnnnnnnnnnnnnngcgcgagcttcctgaccatcaacgaaaaacgcgccgcgctcggctatccgccgatcgaggacggggatcagctataacggctaatgcgtcgtcgtggatttacccttccactcgcggtcatgttctagattttctggtgtaataacgacgttgttaccacggcttaaagatttttcggcagcgtccggatcttccagaagccattgcaatgttaaaaatgcaccgataggccacatacctcttttttcaataaactttttcatnnnnnnnnnnnnnnnnnnnnnnnnnnnnnnnnnnnnnnnnnnnnnnnnnnnnnnnnnnnnnnnnnnnnnnnnnnnnnnngacatgagaatgagatcatcaagcatttgctctatgccattttccggaataccaaagcgatggat

SEQ ID NO: 51769 - DNA, 520 bp, Arabidopsis thaliana landsberg
  unsure (1)..(520): unsure at all n locations
gatccacctgtgttgttattgcacaggagtttttggctggtgctttttccaactttggcgcgcgtcccaccaatcgcccgcgagaggccggaggccgacagcgcgaacgcgtcgctgaccgtcacggtcttcgcagtgttgtccttcgcggtgatcttgccgaagttgcgattgccggcggtggagtcgttcagaaagatgacgtgggagccgtcggtcgcgacgcccgagaggtccggcgacccgtcgagcgtcaccgtgaggccgtccgaggaggttgaggctgcgnnnnnnnnnnnnnnnnnnnnnnnacccgccccacttgcagccgaatcactgccggtggctgagttaactagaatgacaggatacgccacgtattaaccctcgattggacgaacacacgccgttaaaactagcgttgaaccacccggaatatctgtaatttgctgctgggttgcagtaccgtccaatacagccagcagatttgccacaaatgcgttgtagttaagaatgtcgc

SEQ ID NO: 51770 - DNA, 1542 bp, Arabidopsis thaliana landsberg
cccacaacatccaagtttgtatataaacaccaagattaggaaatcaaaatctctacaagaatcaaatgatagaaaaggagtgcttttttttaggtttcggatatgagtttttttctgttccacacatccttctcggaattacacttgaaacgaaaccttgcaatgagtttgttaaaaactctacttgcagtcacgtttctgtatttagtacctcgttgacttggcgtcgacttgtaagagagcaaacctcccaatacagttgctagaaagcttggttggctccgagggatggagtcaacaacaccgtcttcttcaacttcccttattacgttctttttccgggtttccggtgtggttgagaacctgattggtccaaaaacatgtattactatggagattccggataatgaaatgctaaaaacattttaacaccaaaagttcttacagtttgagttgtttgaaagaagaaacacggggtgtcttgctcttatgcttcaccattaacatgcagtagtttgagatatggcggatgaaccgaagctgaatgatggcagataaaacacattatagagcatcaaaacaaagcactatgttgtcaaaactaaactggactataacaatctacataatccaggttagagactctagctacccaaatgcatcgttctacgacatcacatgtaaagatgaaataatatcataagcatagactctttgatgtattcaagtgataaagaaagagtaaaagggtaacctgatcgccgtctttaatgccaaattcagtgaggtactcagactcattaatcaatcttttatcttcataagataagcagaattgtccccaaacatgcggcctttataatcacagggtaaaaataggatcatcaagaatcatttagcagttacttatcctaatatagacacaaaatcggaatcattataagaataactcaagtcaaagaatcagagatggtaccatgagatcttgccagggcctgagatgggcaagtgagaaaacgcagcttctactgccatcttgagctcccctactgtcgctgtcttcaacacttgaatacctacaaatccaaattacgcttaaagggaattgtactaaatcacaaattcagaaaccagtcaaatttctctggacaacctcaaacgaaacaacacagaaaaaactagaattcgttgtaaagcaataacttttagttcttttgagcaaacattcttagttaacatattaaatttaatggtaaaagcaagtaggagatgagtaatgggtaccaaaggaagatccatcaagcttgagaacagtgagtttgatgggctcttcaggcatctgattataattgaaactcctccgacgagggagtccatcgattagccggagaggcgagagagacgcagccaaagagcggcgtggtggaacgtccatagattgattattgagaaaatttgattttcccgggctaagacatctacttccaagatttttggcgacaagagcttgagttgggtcagagtggaagattgataccatga

SEQ ID NO: 51771 - DNA, 1100 bp, Arabidopsis thaliana landsberg
cagtagattttgtatcgttctttcatctagattgttttgttttttgatgatcaggttcctgtatacatagctgaaatcactcctaagggtcttcgtggtgggtttacaactgttcatcaggtatgaatatgttatacaataactaaattagtttttatgaatatgttatacaagaactaaattagtttttaaaaattaaatcagaagttacaaaatatatactctaaaagtattattttcatctccatcgatctttaacagtgttaacattgcagttactgatatgtttgggtgtctcagtcacatatctcttgggctcttttataggctggcgaattttagctttgatcggtaatatccgtcaacatactttaaataagttactcatactaaaaaattgttaattaattttttttttatgctccaggaatgataccatgtgttgtacaaatgatgggattatttgtcatcccagagtctcctagatggttggtacgttatccgtcaacatactacaagtttaatagtttttatgtacctaatgccaaatctagtctatccaatcattacgctaagtaacccaaaactttcattgttttagaaaataattgttcgcaaaaattctcaggcaaaagttggcaaatgggaagaatttgagattgcattgcaacgattacgtggtgaatccgcagatatttcatatgagtctaatgagatcaaagtaaagtaacactaaattctatttcttgagctcactacattttttacaattttccattaaagtgtaaaatctcctgtatttctatattttctaggattatacgcgaagacttacagatttatcagaaggtagtatagtagatctgttccagccacagtatgctaaatctctagttgtaagtgtttttaacttataaaattgttcaataagtagttattttcattattctatgatgaaatgccaagtgggttttaggtgggagttggtctgatggttttgcaacaatttggaggggttaatggaattgctttttacgctagctctattttcgaatctgctggtacatgcacctttaatattgattgatgtgcctaaaacc

SEQ ID NO: 51772 - DNA, 908 bp, Arabidopsis thaliana landsberg
cgagtttttagcaccatctacccacaggaatgtcttgagagtattgcgtgcaatgcacgctttcaaaaccaagtatgtctcattacttttggttatcatggtagtttttggagattgatgtcagctttaatattggtctattttaccattacagttttattagaaggtagccctggtgttggaaaaactagtctgatattggcgttgggaaaatattctggccacaaggttgtgcgcataaatctatcggagcaggttcgatttcgtcaccaggccttcaatactgtgtatgctacttaatctgttgggtactataactatggttttgttgatgcagactgacatgatggatttgctgggatcagatttaccagttgaaagtgatgaggacatgaagtttgcttggtctgatggaattctcttgcaggttaaagattgttttatctaaaagtatgtatcaatttaaaaattgcagatcctcaattatgcaatttctacaggctctaaaagaaggctcgtgggttttgttagatgaactgaaccttgccccacaatctgttctagaggtgagccgacaaaccactaattttatttcagtagaaattttcttgcgctagaatatgttgaattctgttgcctttccacatatattattctggtgagatttattaaaatatatttatatatctttccagggtttgaatgcgattttggatcatcgtgctcaagtcttcatcccagaactgggctgtacctttgaatgccctccaacatttagagtttttgcatgtcagaatccttccactcacggtggtggcaggaaaggtcttcccaagtctttccttaaccgattcacgaacgtatgttctactattcgatttcttggtctggatgctcatgacatgtca

SEQ ID NO: 51773 - DNA, 649 bp, Arabidopsis thaliana landsberg
tgactattgattctcaaggatgtggttccagctctaatgaacctgctgaatttgttaaccatggtgagtcagtgagtgagaagagtatgattggtgattggtcttattgagcatttgaaaaataattggagaattttttggggtgttacaggtcttgtgctatggaatcaaactcggcagcaatgggtgggagataaaagatccgagagccgtaaaagcgttggtcgagaaccgattctaaagtgaggattatataagacctaatggttcgaagagtccaactgttgtgtggaatataaacagtttgattgtttttgcagtgagaatgtgacttatgagagtctacttgggagcaacaagcgatttccgaggcctatacctcttgatgtaagttcaactccatgaactggaggaagtaactatccattctcatccaaattttgtttgttattgaaagttttatcattgcaggaaatggtgcagtttcttgttgaagtttgggaagaagaaggtctatacggctaaaagattcttttttacacatttacaattgtaaagagagctgagaaaaatatataccccaacaagaaatatttgttgatggacaaattttataaatctcttgatttggagtagttcacaaaaatgt

SEQ ID NO: 51774 - DNA, 482 bp, Arabidopsis thaliana landsberg
tttatttagcaatggatgggccagaatcgataatgagctagacaaaaaataaacgataatggccccaaaaccaaagcccatggacgccgaatcctaaatcactaaagaaatagaaacgactaaaataagagcgttgagcaggagacatgtcatgtgacttcaaggttttatcccaaatattgaagtttagatgttccctttgacaaaagaaatgctataacactctacacaatcagatttaatgttgatgtgatatgatatgaatcatatgaatgtcttatcaaatcactttatcttcttaagtatggggtcccatcttatgtttagttgggacctcaaaattgtgaacaaaccatttaacgatgtcctgttttctattataaagacgataacgtctccaagatttttgtcacactaagaccaatatatcatactttactcacatgatcactgatcacatcaactgtgcttttttatatatg

SEQ ID NO: 51775 - DNA, 564 bp, Arabidopsis thaliana landsberg
gcaaaagaagccccgtaataattgttgaccgtacgttgaaatatgcttaacaactccttgagactagaatcggagaatttgggtggaggtggaacctttgtgtaaatggaagggaaaggaaggaagggaaactcgaaagaaaagattttgagtgttagggaaacagtagatagaggaaaacatgtaaagggtagttagtgaatttctaggttgagcaaagaggtggaagttttctgtccttttcctctttcagattaaggttctttagattattggtgacaccatgaacagagtgacttagtaagaaaagatcgagaggatctaagaaaaatgtagtggagaatgtgaaaatggttcgaagaaaaatattatctctgttcgtttcgtttatgaaccatttttttttttaccagctgcacttctatgagatgattactacaacacttgaagaaagcatgctcaagaaacaagcaaggaaaaagtttaattttatttaatgacattaataaacccaaagttgagtgtgagagtagcaaaggacataattagttcaagcagaagcag

SEQ ID NO: 51776 - DNA, 593 bp, Arabidopsis thaliana landsberg
acggaatcggagaagcacacctcctattctatatatcaccttcccaccaattgtctcctttttattctattcacaacttcatgaagacaattacggacagaggataaaagcatgatgcatccatgctttatccactaatatgaaaagatataatgaaaacagttccaaggagaaacctctaactgctcgcaaacattatccatatcgactgttcaaactactttgcatttaatcttacaaacccttcgccgattccatagatcatgtatgttgttcaacatgttatgcgtcaaaccatctctgtctgggaaaagacaacaactttatatcatatcttcttctactctaactctcttatctgagtctatcatttgcaataagaagtggaaccagcacttcaaatgcacctaaacaacaatgtctgagctgcccaagatactaattctgatcatcacaaagaaactattgatctcgtaaagtaaattcaacaaaaagtattgaactttatacccatatccaattgccttgttggcttcaagcacgaagtaaccagctctctgacctcttcctttgtcaatggctcttctaaaatc

SEQ ID NO: 51777 - DNA, 777 bp, Arabidopsis thaliana landsberg
cacaccacatattgagagacttactgtatatactgtatttgaaaaaggagcgttgggttagctgaacttaggtgtgtaacgtgggcttgtttgtttgaccatcttgacaagagattgtagagaaacagtttataccgtacaagtttcaaacacatgtttattgtgggtcgactacatgcgtttgcaattagggtgtgaatgataagagtaaaacacggaatactcgattttttaactgtacctaggaaaatccgacctaatagtttaaatttaatttctgacatgaatcatgtaaaagtttaagaacatctctaataaagagttttcaaaacattaaaataacgaaataaagaattgaaagtaccaaaaataaccatttagttcaaaagaggatgagaatactcaaaaagggttttaaactattcgagatgttcttattttgatttagagtgcgcgttaacacaatctctagtacacattagccacattgttactgtatatatgtggttcgctgatcatacaatataattctatctccttcctttttctgtatcctccatgaccattactgcttttcagaagctttgaccatcctttgagatatgtctattttctgatatttaccaaataacaaagtggatcgtcttgacgaaagcccaaaaattaattatctctttttttttctcctctaataaactagtcttcttccgtcgagtcatgcactcatactgataatatcattatttgagtgtgggaaatcttcgggaggagaaactc

SEQ ID NO: 51778 - DNA, 1098 bp, Arabidopsis thaliana landsberg
atgtacttataagtttgagttcaaaattaaaatacctgctctgtgcaggcggcactacatgtattgaaatccatcgtagcaaatacaccaaagacgttgaaggaaataatgccaattttgatgagtaccttaatttcttctttggcatcaccatcttctgagaggcgccaggtttgtatcctaccctttttttgtttcattccttacattttaaccggcagttgtatgagtctattatactgtgtaggtagcaggaagatcacttggagagctggttaggaagcttggtgaaagggtgcttcctcttatcattccaattttatctaaaggactgaaagacccagatgttgacaaaagacaagtaagctttgtgatgaatcaatcattttatctctctttctcaaaaactttacaccgtagagcatagttattttggttgaagttattgttgcgaccatgataaccatgaagtaaatatttcagtgttattttatcttagtagagctggcaccgtttcttttttcaagtaattgtgacatgtatttatttcatttctcttaaatgagctgtgtatcactgcatgatttgtgtcttgctgcgttgttttatgtccatttgtgatactgaaatgttttcatatcgatcaactgatcctaagcatatgattgtttgttttaaatctgatatgcagacttattaggcacatgttattcatctaacagcttgacattatatatatttcataattgacagggtgtatgcattggcctgaatgaagtgatggcaagtgctggaaggagtcagttgctgagtttcatggatcagcttattcccacaattaggacagcactttgtgataggtttgatttattctgtatgcatgtttctttatgctattaaaaattaacattctaaacttctacaactttcttctatagtgctctcgaggttcgggaatctgctggactagcattcagcactctgtataaggtacctattcggacttttgttgcttatcagattgatctagttcactctatatgtatcgctcatctacgtttgtaatgcagagtgctggactgcaagcaatggatgact

SEQ ID NO: 51779 - DNA, 1048 bp, Arabidopsis thaliana landsberg
aaagttagtaccatataagttatatttgaaaactctcaacctaatgcaacgaattataaacacatgatattctcaacatgatccgtgacagccgatattcttgctgacgacgttctagtttgaatttgaactcttctacgtctatttcgttttggtagtaatagtaaacgtgtgttgcatacttactccaatgatggagtataacgaattcatcaccagccaccaggatgagtgacatccgcaaatgtgatcggaccaattaaaccttgaagcatgccagaaaaagtaaccttggaccaatcttgtttctcggcatcctccataacccacatatccgcatcctcgttgatcatgttattgcgaaatatccatgctaacttcccttggtagtttataagagtggaacctctatggctaatcgttatgttattgggagtctggacattgattaaatatctcagacctaacatcgaaaactcaccaaaacacaactaccgtccggatccttttctgttgctttgtaatagattgccccgttgatgcaaactgcattatcgaatggaaagtgacttccaatgccgcattgaaaattctcccatttctttttgggatctccgaatgtaagacttctatgcatataatttacacattttaaaaggtttgtttgttaataataataccctcgatctacgaatactgtatattgtccttttctaattcccacacgttgcctaaccgaagtgtgatattatctaaaataggtgtaatgtaattatcataaatatacaaattaaatttttgtaaagaaaaaaatcaattaatatttttcttatcttaaatccgcatattaagctaatcctaatttaataattaacaacataattcaatgttttaagggtaaagttagtaaagtatagtagtagaccattttacacaatttaagagatgtgcacaacactatctttgtctcattctaagtcaaaagtcaacttataaatcccaccgtgattgccattttcttttattttagcccaaaaacagataataa

SEQ ID NO: 51780 - DNA, 1475 bp, Arabidopsis thaliana landsberg
ttcctttctgttttagaaaagttgataaagacttgtgattcacttagttaatattcatattgttggtttgttggctctatacagaaccaaagaggaggaagagtgaaactccaccctatcgtctcacctatctcagaattcgaacatgctgaaaaaggagatgctttatatggtaaaactttaagcaaatatactatcttaatcctaaaataacaacttttctttttttttaaagatacagatatttattagtttactaatctttgttttcagcaatggagttggctctgtctctagagaaactcactaatgagaagcttctaaacgttcacaaagtaagttccctaacttatccatttgatcatcaaagattaaacttatagtcattttcctaatactaactaacacgtacttttggccaacaaaacaggtggcctcagagaacaatgatccccagttagctgatttcgttgagagtgaatttctgggagagcaggtaaaagttcttttgcctttgttcggattacaactagtgacttgtataatctgtacatgttctgactcagaatatattatggactatttctagattgaagcaatcaagaagatctcagactacatcacccagctaaggatgatcggcaaaggccacggtacgaatcaaaaccctatattgagatagtgttctaagacttgaatggtatttctaaaagcttatttacatttgttctgtctttgcaggagtttggcatttcgaccagatgcttctgaactagacttggacctctataagttcactttcagatgaccaatgttggggttaaaacagaagaacccgaagattctgtaaaagctttagattgaacattatggactaataagattgtagtagtaagctttgtgttcaagatggtttttgtaataacttcgtaagcttaatcaatgaagtttttgttttactatattctaactagctataaacctacggccaaacaatgcgtaactaagaaaatagtgaaaactcagacctatctaattaaacatagaatatttatgatccaacttgaaagagtaagcataacgaacctgtttatgaagaacatgtaaaagaagcatgaagcgtatgtcactttccaccgagaaggacaagctggtcactgggatataactgaacagcaaacaagaacaagatcactgtcacatcaaagcaaaagagatgctcttactttgattccatgttgaacagtagaaaatcatttctaaccaaacaaagacctgtctgttctacaaagagctgacaaatgtacgaaaatgagtatccataataagttcatggggtatgaaaacaccattaagcttttcttgtacagattctcccttagtgatttatcttttcatcatggttcttcaaaccactaagcattaagtaaagattgagaatcttatttgtataatgacgaagaagtccctcgcac

SEQ ID NO: 51781 - DNA, 542 bp, Arabidopsis thaliana landsberg
cagtagacaaccaatagggactgctgaattcaggctgcatttttctgaaaaaaaagaatgcagattgcaggggtggtctcgggccttagtgagctacaggcctagcccaggctgaaatctcgtaaccacaaaccagaaattaaagcgaaagctcagagcagcaagggcataggcattctcatatattcaccgggcttgtaagcccacttaacccaagcaagacctataacgacttaagaaacccgcccacgccgccaggcacgccaattcctccctctctcgccgaaaccctcctggacactcgctgcgatgggcaggaaaccctcctccgccgccgccgccgcggattcggaccacgaattccttgcggccgccatgcccgccgacctcctggccgcggcgactgcggtggcatcacgggcatgctctcttcttcgacgccctcgtgcagctcatcccgccgcgcttttatctcccatccggcgacgaggaccgccgtggaccagggcctgtcaaggcgcaaaggcggcttgaaggcaagt

SEQ ID NO: 51782 - DNA, 603 bp, Arabidopsis thaliana landsberg
tgtatgtcctttgctttccaaattgttagtcttacttttcactactttgatagacattgcctttgtttttccctgattaataagccagagtacttaaatcaaaattgactgttttgtgcatcctgcatcacgtttccaatcagaaccatagtgttgtcgttgtgtcattatccgaatttaagtggagacattggtaagttatttataaactaattacaatctatttttctaattatttcaaataacatatttaagctctgtagcttccactagacggtgaagatttgaagtgagagctctctttgcattgctcacccaccaatggatctacctacccttcttcttcttctcctccttttaaaccctaaaagtttctctttccttcaacaacgccacaatcatggctgtgttcttatctcctaaaaccatcactcttctcttcttctccctctccctagcactctactgcagcatcgacccttgccaccactgcgccatcggcgcgatcgccaagttcgcggctcagcgagatatcagtccacggtccgacgaagtgccatgggagggagattcacgacctgcacgccacaaggtagggattgg

SEQ ID NO: 51783 - DNA, 474 bp, Arabidopsis thaliana landsberg
gcttttggcccaccccgggcgcgacagcgcgctgaagccggtgcggcccagtgacggcccaagagcgagggggagacggcgcggctgcgaggagtgacggcgttgctgtgggcccacttgccagcgagaggggggggaggaaacggcgtcgcggccagacggcggggcgaaccggccgagcgagggagaaaaggccggccgccggggaagcttgacggcggcttgccggttgcgcccggttcttcgaccaagggagggtggtttggcacgggccgaggctggcgattccaacggcaggctcaatttggccctagatgcttgggagggggctgctcaccgggagggggcggagttcacggcggggatagcgccggtgggctctgcgtcacggacgggggttggacggcggtgcctcgggttcgtggctacgttagggagctgctcggccacgtaatttcgttctcgaccaacgga

SEQ ID NO: 51784 - DNA, 614 bp, Arabidopsis thaliana landsberg
  unsure (1)..(614): unsure at all n locations
tgtaagtctcttgtgtgtgcgagagagaaaaaacagcagcagccatatgcaaggttcttatggcgtccctaggccagtanggcgtccaggcggccgtagtttctgggcgtcgagctcgccgcgccttgggtgcgtatggcgtcgcctaggcgtccaattttaagatcgcgcgcgtagttgtgtacaagaaagggttttagggtttcatgtcctgcgcgccgcctctcctccaacaggcgcgccgccgctcctccatccggtgcgccgcgccgcctcctcctccatccagcggccggctcctccatccggcggcactctgctccatccggtgcgccactctgatgtctgctcttcctctgctctcctcttcctctgctctcctcttcctctgcttcctcagctgctgactgctctgctgctgctcgcttcctcttcctctgcggctctgcttcctcagttcatctgctgactgctctgctgcttgactgcttcctcaggccaacagcaccctgccagcttcatcaatcaatggctagccatcttcagtaactatgaccaaagacgacattgtatttctaacttacaattttgctattgcagtgtagattgtagga

SEQ ID NO: 51785 - DNA, 574 bp, Arabidopsis thaliana landsberg
taaatgattatgttagttcaaagtctcactatggtttatttagaaaatagtgattaagtagacattaatagagatgaatttttcttgagctaaaaatttctcaaaagttttctcaaaatatatgaacaagtgatgtgaaattttcttaaactgtttattaattttcatatgctacagttgcgtatatgattttattaatcgttccaattactgttatttccatagaaacctcgagctagttaagtcataattgaggatatttgttcgggaagaaaaagcaatgaactattcatctttcgtcggataacaaatttacatcactacctaatttttgttacttatcccgcatcgctattaaataaatccaacgtgtccgaaagtacaaatgttgtttgtatctgtgttttccagttcaagatcatataactaacacatgtcctcttcgtgagaccccacacatacaaaataagccgtcaaatctaaaccatcggatcagagcaagattatttcgattctggtgacgtggcacaaatcatgcgtccaagagagtgttttggtcacagttctaatcata

SEQ ID NO: 51786 - DNA, 912 bp, Arabidopsis thaliana landsberg
tgttcacaacaggatcgtaacaagttgcaggtttgtcattactatactgttttcgtaaaaaaaacttccaagtccgcattgctatttcaatattttaacctatttcttgtcttcacatacttggtatactattattcgttgtttctgagattttataaatggttatttcatatcagaagggactactgatccgtgaaagtgtgtccgcattgaacatagatgtcattaacaagctggtggaagcatttatgatgcaccctgctgattatattcagtggcttactgtcagttgccgagattccaccttgtcaaagacactgttttatatgattttgatgcattccctgcagaagatgaattcttcatctggtaagcttctgtccatagtactgcgttaacatacatgctgatgttaaagtcttttttttcatttctaagcaccgtagaaaacttggtcttacatgattttaaccacgatatgatgctgatggctgtgttttcctttgatttagaccctagtcaacttttggatcttttcgaactttgctttcctgttttgaagactgagtgggaagaacttgaggtcgaggttgatgtttctctgaaagaggtatagaattctaccagctgatgtaatattttcatatgatggttgatacatatattatcttgttagttgatatatttgtgtattacttgcagctgtcgaaaagcaactgccaagaactcctatatcaactccttgatacctctgattttactgctctgaattcgaaggttctgatatgcatgttttggaagttgggcgagtcattcattaaacttgaacctgcccacgatgcttcggtgggtgatgctcaaccatgatctcgttatatttggttatattgtaattttttctacccagcccaa

SEQ ID NO: 51787 - DNA, 620 bp, Arabidopsis thaliana landsberg
tgaattcacaaaggaactgctcctggtcatccatagagctcagggaagattgattcctccattcctagctggtttcagcaatggcagtcctaactaacccttcccttgtgtaatttggctaattgtatgctctaaactgtaatttcccaatattaataaaattttcagtaggggttcccctctcccgtcctatcaagaaaagttgcaaggcacgaggcagctataggagccttcttagggggcttagctttagtgatgctaggtctgacaaatgtagaaccgatcgaagcgacagtgcgttgggactgtcgctggcctcagatttggctgcgtatatatagagggtatgtatggtccaatagtcgaagaaatcaaagatagaaaggttatatttcttcatgccatttttatgcatgagaaggaagcaactctaatggagatgcacaccagctagcaaggagctcagtttctctagctttttatagacacatgtgtggttttttatcgccacccactaccagaaatccggctatttgccgagtgctcgacgctttgtcgactgtaatttatcgggcactaggcaaagcattcttttgccgagtgcaatttcggcgacctag

SEQ ID NO: 51788 - DNA, 1073 bp, Arabidopsis thaliana landsberg
ttttcgtgaactgccctaaccggccatataagttaagcatgctgtttaggacaaatgtatccggttctactccgttttcgctcatttctttcacaatggcttcacattttgttacgtctctggctttagagtaagctgatagaagcagcatgtgggatttcatcgtcggtgctatgcctagtctcttcatttcttcaaacacagcttctgcatctggttctcacatatatcaaaaacagagaatgtaatgtatgtagccaatggacatccctggcgagataagctttttggttacctgagtgaagacctgctctgccatatgcatcaaccatgatattgtaggaagctctgtctggttcacatcccatatgttgcattagagagaaaatctcagcagcaccatatggataacctgcacgactgtctccggattttgagggcgttacatttcagcttcatcgattgcctgcaatcattcttctatgggagagttagggtaatcacctatatgactccatgagagcgttatagacatatacatcaggttcaagcccatcttcttgaagctgttcaaatatttcttcagctttctcgcaaagaccttctctagcaaatgcattcacaagcgctgtgtatgtgcagatgttcggtttacattggtgacttctcatttcacaatacaatttccaggacatatatgatttacttgcctgcaagaaaatcaatgacatgaatatgaaatttccgaaaccccaatgtattcatagcaaacaaagttagactataaacctttccgtataaatttatcatcaagttgtaagtttcagtggttggtttgcatcgatcacgcttcatcctctggaaaacatcaatcgcttcttcggtgtttccttttctcttcattaacccctcaatataggcattgtatacagttacacctatagtttctcaaaacaagaaaatgttaattacaagaatgactgaaaactatgagccagtgtttggtaccaatgcatataaaaagcttaggagatgcaaagacatacttggagaaacatgatgatttagctctc

SEQ ID NO: 51789 - DNA, 690 bp, Arabidopsis thaliana landsberg
ctccacccagatgtttttagggcaactgtatgacaagacaagagagtcgaactattgtttttttttggtaagatttccattctgcaactatatacatcaaagccgtcgtctcatggtcaataagaaatatcttggaaattttggatatagaaaactaattgaaacacaaacaagaactacatatattcctacatggttcaccaaagatggatttatttatttttttgaccaaacaccaaagatgacttgattgattattttccatgaacgaatcttatttattagtggccaagaatataaatatgaaaaccctaatctaatcctaaattgatcacgaatttaagcctaaatagaaaacctaagctgaacctgcagaccattcaacgagaccagaatagttgtcatggcagagcgaagaattcttcaacaaatccaacatactttttttgttaagagttttctacgaggcaaatcaactactttggctacaatctcactaaaaggcaaaaccgattttaatcatatcaaaactgaaaaaaagaaaattaaaaactctatacctttccatttggaacctttcctccttaattattgaggataccatgctctatttagaacacatcggtcgatgacccttgaagcccgcaggacgttttaggacacctattgaatcccttttttataacaact

SEQ ID NO: 51790 - DNA, 611 bp, Arabidopsis thaliana landsberg
gccgcctggcgttgtgcgcgccgcctggctcggtctcgcgggaaggggcgatcaggtgaccgccgatttcgttatggacgcgcgagatctgaacgcgtagtagtgaacacaggccgttggatcgaaagcgataggatcagctcgtggtgccgtttcgctggaattaattaggagcgttggattcggatccagcgtctagagtttgatatcgcgtatgttgaatccgagccatcggtcgcgaatccatcgactgagattacgtacccgttcgtatggatgcgtttctaatctgggccgttcagccgagatcggacggctcagataccctcataccccgttcggccatccgttttgtacaagagcccctctgtttttacagaattaacctgcagtcctccacgagtaggtcctgagtcttgggagaatttgcatattaaaccctgagttatctatttttagcgcgcgcagtccagtattgtgagaaaataagaaaaagggtttagaaaaatggatttctagtgccaaaataattccagaacttgtttaatctctagaaaatacatattcaagccaaaatgagtccattccaatttctataatgatataatatt

SEQ ID NO: 51791 - DNA, 934 bp, Arabidopsis thaliana landsberg
aataaatttaatacatgtatctttttgttacaatgtacacgctttcatgcatacatatatactaggcatatataggatccaggcaaccagcaaccataggtcaggctattcaaaggacaacctacataagttggtattccttagcaccaaaatttatttattttggtctataattttattttattttgctaatttggtgtaaattgcacaataatatttttttggtgcaaattgcaaaataatatttctattccaacaataattaatttaacgcaattaataattaaagaaatgattaaaaaaaatctacaactagatagaagggtaaaaagggtaaaagaaatgagagtaactcatggctctcttattttctggagacaaaaagaaaacatttgtttctctctctaatccccataacgatctgtgtccacgaatctaggattccgtttcgaacttacattttttcagacaaataaaaccacctaacttccacgttaattacatcatctgccatttattaatttaccaaattacccttcgagaaaaagagcatctttttctccctttttctctcgtccctgtcgacaaaattcggtgattggctctttcagattccaagttatagcatcaagtatcatccgtacacaagccggtgaacgatttaattaaataaagaaaccataacgaaattaataatatgaacatattaagtaataatttgtaaaaatgtctagtaactacaaaaattcccaaatatcgaagctttctttgtgtgtgtatattaactgctgggacaaacaaaaaaacgtagtgtgatactgtgattagattttcacgacaggataaatataagggattaaattagcctcaagctgaacatatgtaaatagtcacacttcgtagaacacgagttacaccatcaatgtctcactcg

SEQ ID NO: 51792 - DNA, 169 bp, Arabidopsis thaliana landsberg
taataccttgcaatacgatggcccttttgaacatttaccatatattcctaatgctagccttgctaaggatcacatcggggggtaaggtgacaaagaactgcacttgaataaactccatacgacctatattttatttcactctaacttattaagggttcagggccttcac

SEQ ID NO: 51793 - DNA, 620 bp, Arabidopsis thaliana landsberg
catggctagagccaggcgaacatggcggcgaggccaatttggctggtggcgctctgggagggactggccatgaggaggtggcaggctccgcgatggtgtggtcgcgcggtgtggccactgggtgtgatgtggaaggcgaaagtggtgcttcgtgtccgtggagaggtggtgaagtttgtgagctaactcaattggaccttaggctactagagaggggagggagaactcaccggagcggaggaaggtggtggtgtgctagctcgattaagctcaggggagggggaggagagtggccgaggccggtgcgaggagatgatgggctcagggcggcccttttataggcgcttggggaaggggaggagcggaggctggtgggcaccgatgaggcacacaacgacgacgataatggcggcacagtggtggcgatgggatggctcggtgaagacggtggcatgcgggtacacggtcacagcgcgcgggggacgaatcggtgccaaacttcactagtgagcgagtaatggcgaggaaagggggaggacgatggccggcgatgattgcgtcgatgccgagcacgggtgagggagaagggactgatgtcagagacctacgtgctagagaag

SEQ ID NO: 51794 - DNA, 915 bp, Arabidopsis thaliana landsberg
tctatggaacttatgaacttcaccaatcgtatcaacatgtttaaatttcttctcttcttcaatcctccatggttttaaatcttccatgatcttaggacaatcatcatcttcttcttcttcttcaagaattgtcgtaagcccaccaattgctttaactttcttcatctccatcttaagttgttctatcaaatcttgatgctcccataaactctcaaacccatttgtatcttcttcttcttcttcctctgaatcagaaccagaaccagaattgtcgcttttacggttttgtcctttcttcagtgatgtttctgcgaaatctgaatctgataaaaacccatcttcgtcgttgcttgtgaatgtctgacttgaatcaacaaaatcagagtccgactccaaaaaatcttcctctgttaaaaatctgatttttttcttcttaacggatgaaacagagtaatcctctgtttttactctctcctcaccggaggaaacagagtaacctaaatcctctgtttttactttatcctcgccgtgaaaaacagagtaacctaaatcctctgttttctcttgcttctccttgaaacaatcttcaaccctaaaagtcgccgcctttgggttttcgaggacaaaggtgagatttttcgccgacggtgtctcgtatttcctcgccgccgccataaaaatcaccggagaagaatcagaagacaaaaaactgctctcgctctccacaccggaatcatcactcaacgatctataaccttctctgcttaatctctcgaaagtttccgtctgaaacgcgaatttaaaaccaatttcggcgattcactaacttcttcatcttcgattcccgaattttctaatttaatcatcttcgcttcttctgattcttcgagtacagagaaaaatcgagtctttgtt

SEQ ID NO: 51795 - DNA, 628 bp, Arabidopsis thaliana landsberg
tcatccttaataactagattttttttatttttgagcaagagtggccttttacgtgggttagaacttagaagccgagatgtaagagcccactggtatctactgtattctcctatccagcccaaagagcccaagtggagtcgtcagtcttctgtatatttaattgtcttctcttgtgacgtcatagttgcatcatggcagtcctagaggataggccctacatcgacacgagtgacctgcagctagtggcactggacagtggacactggtagtctggtattgtcaatgtctgcacgtaaacgcagccttgttgtttttccttttcacccctggcccacggagatggtgacaatagtctagctggagaaaatcaacagctccagccatatgaaagtgtctgtactctgttggcaaccgaccggcagcaaagtaaaagcagcagcaaatcgattgtaaggtaaaaattgcattacaacaaccatgtatatcctcaccgacaggaaacatgtattaaatatatataatatgtatatacggtatacatagtgtatcagtatgaatcatggaagcttgccccttatggcgcctcgtgtgatgcatcgagccaaatggaaagcacaccggaagaaat

SEQ ID NO: 51796 - DNA, 990 bp, Arabidopsis thaliana landsberg
ctatctatattttattattaattggtaataatatcctttactttctaaatttatatattttacacatttattttatagcaagcaaatagttcaacaaattttctctagagtaaacattattttaaatcaaaccacattgcataacatgaataaaaaaaatcaaatttatgatgcaattgttaaattgtaaagatcattttgtaaataaaaaaaattatcttcaaaatttgaagatacttaagtctttcatttttaagatgaaaataaagtaccattggaaaaaatctttttattttcatcttcaagatgaaagaaatgtgaaattgaaagcaccattggcgatggtctaaagcattttagcgaagaacgatttcgacttgtccacgaccacaagaggaatttgttacagatttgccgtacatagtctttaatcgacatggagtttggtggttaaaggcgttttcccactaaaaactgcaaattgcatcaaccgtagtagctttcaaaattaatccgacgacatggacaatagaggagcttttgaactcccactcttaagacctctagtatcaaaactattgggtaggaaatattaaactataaaaatgaataaataatataaaatatataagcctaaaagatgaatttcataaaaaggtaagaaaacgaattctttaacttttctacttaacccccatcggcaattttctctttccctcaccatgaatgatcatcaaacattagaaaacctaaaagaagatgccatagacaaagcccacttatcttcagaccaaagatgtacaaaatagtcagccatttttcattttgttgcacctctgaagaagaagcagaacaatactcttactggaactaaagcctttccaccttctagccagcgccgaagtaaccaaaagaaaaaaaaaaaaaaccaaagagaataaagaaaagaaaagagaatgaaaaactatcttccatctgaaaaccccgaac

SEQ ID NO: 51797 - DNA, 794 bp, Arabidopsis thaliana landsberg
tacaactatatttatgaattagggatgggcactcgacttttcaatacgatcgacatcatattttagaccaaaataattcttaaaacgctctttgataatatgtgtaaccaaaagagccacccattcatatatggtcccgtgatatattatcacatgatctctattcaaactatgacatgcatggtcccggctgttttaaacctaacgattcggacaagttattttcatgctacatggattagtaattgtaagtagtttaaatacaagctagattgttgagacgtctccatactattgtttcgtgcaggtgcaaaagacaaaaaacaacgacaggcatacggagagacgtacatacgcaaaagtctaatatagactttgtcttgtctataaatataatgcaaaagctgaaatatatagttgaaaaaagaattattaattatgctattggaaatatatcattacttttatcttaggtatagctttttaaaattttatttaatcatttagttgtttatacgtgactcagctgacattatttttttttaataatccctcatatagtagtagtagtagtggtggttatgctttttttttttaatcatgggcatttattagaataatacactcatatgtaaaaataatgtcagctgtcctgaacatatttttaattattctatatattttttggtaaaaaaaaatactagctagttactagagggttggattctttctttttgtcaccaatttaggtttgggttcaatgcacttacatcacaatgggttccaatatagac

SEQ ID NO: 51798 - DNA, 782 bp, Arabidopsis thaliana landsberg
aaaaaaaagaccaatatttcagaatttaatctcgaatcgaatatagagaaaaactcaatttgaaagaaagaaaaatgttcgtcgcttgtcaaaaaaaaaaaaaacgaaatctgtcccgtagtttataattttgaccgttcgattatcccttaaatcttgtccgtcgtcagatgaaaccagagaggggatgtcagaaaaaaaaaggttaaaaagcaaatagcataaccggttcacatttattgtagtaacaaattgacctaaaccctaacgaaatcgtaccaaacataaaaataatgtaaatcaaattaaagcaattcatccaatcagaactctggatttccatcaatccgaaccaaatttaaactgaactgaacccggttcaatcgcaacgagatccggttaggagaaagtacttgtccctttatattgtagcattgtataactttagtcttgtgaagaaacgtttgcatcccttctctgcgttcagcgttcgtcgtcaccaaggttcttctctctcctcttttagctcttgtatcttccaatttcttgacgtaatgctaagtctttttttctaccttagtgatgagtctcgctctgtaatcgtttcctgttcttaaaaatcgtaactttgaagcttagggtttcagaaaaatttctgcgaaattctccgactttagtccttgttcctcatgggtgtaaccaaaataacatcttttgtgatttttcatgcgttatggtagattctctttggagatttaggttattgagtttctaatccacta

SEQ ID NO: 51799 - DNA, 999 bp, Arabidopsis thaliana landsberg
agttaattaaagcaaaaagaagacgagtaacacgtggcatatactctatctatagccgtcataaaaaaaattgtgggaccctacaccctataaatcaagaactagtggttgttcgccagcgaattaactaaaatatttaataaacataagaaatgacaagtttagccctctttccataggcataacatggtggctaatttgggaatttcagcagcattcggagtcaaaataacgatagcgcgtgtcggtgaaatcgcggtatacgcgcgtcgatagccgccaggagaatcctttttttacacaatcaaagagagagatcccgtaaatgttttatactctgatttctagggtttgcttttgattctctttcgcgttccagataaataaatccttttgtggaataatttcgtgatttcgtttgtgggttatccgaattttgtctgaatttgagtttttgagaaggaaaggtttgttttttcgggggatggtggaaatgaggaaatctggaggtttaagaccggagtctgaatcggcggccaggtgccgagatgagctaccggtgaaattggagattgctgaagatgatttagaagaagagcatggtcctctcaacaaacgatctagggtttgtttatttctctccttttgtttttttcttctcagatgagctgatctaattcagtttctgcgataattcaatagcaattcttagcatgcagtgatggttttatatttagctggttgtgaattgtttggtgatgtattttttttaattattgattgttgcattgaatttagttatggagtcctgggacaagctcatcgacaatggcaccagctaagtataacccgcttgatgagccgagtcctcttggattgagtcttaagaagagtccatctttgttggagttgattcagatgaagataacgcattgtggtgatcctaaagcagctgaaacgttgaaagctggtgcacttggctctggtcttgagagagaa

SEQ ID NO: 51800 - DNA, 598 bp, Arabidopsis thaliana landsberg
ggtatttcttaggaacctttacagtggcaagcctctacaaaacaaaacaaaacaaatctaaactttaactccaaacagtcacaaaacaataaaacaaaccaatcacaactacatcaacacgcatcttacaagatactacatatcacgactactaaaacaaagttcatacaagccaaaaaaataatacctcaatgaccaaatcatgcgagctaggagaaactaaaccaaaaagagacgagttggtctccatctccacaattaacgagcggcggatatacaaaaccaccactgacacaacgctgcagaaacactaacacggaactgtgactctccagggtttgttcctcaattttggagtacaacgaagacgatgaaacttagatagaaccaacaagtgatcgtcttcataccagagccagaagaactttaaagtaaaacctaaattgttcaaattacaatgattatataactgcaatagaatcggcttaggttccaaaaatcgaagaagaaatacctccaattgtctgagagaaaaccctaatttctccgattgcaccaaatacgaaagagtttataggtgaagattggttaaaggcat

SEQ ID NO: 51801 - DNA, 499 bp, Arabidopsis thaliana landsberg
ggagagatcgcgcgtgcgggaggagaaggcgttctttagctcgttttagggccggccggcgacggaggacgtcatctggggggtctcctgcccttcggccatcgactggcagaagagctcggtttccgtctgcgggcacatcatggcgcagacctgctggtcgcggcggaagtccatcggcgaggcgttggaggagatcgggaagaagccgccgtcgcacgtacgcacgcagaccgtgcgcaggttgccgtggcccgagccgccgagccggcgcagttgcagccgctcgctgccctccggcgcggtgccgagcggcagggtgcgcgtctcgtccagcgtgcgcaacgtttccgtcgcggcgatgggcatgacctcggcattggccgtgcagccgttcttctccagcgccgcgagaaggcgcccgcgctcgcccctcgaggaggtgccgccggcaaattcgcggcgctcttgtcgaggatatcgacgttgcgctccatcc

SEQ ID NO: 51802 - DNA, 764 bp, Arabidopsis thaliana landsberg
attaccgagccaaaataagtcgtcgtatcagggattctaccatcggctccaaagaaagtagaagaggtttctttttcaccatctggattacttgcagtaaagaagaaagatgtttgatcatgttgttcagttctactttcaaaaccaggtctgaaattattgtcacagtggagatttgaaggaccagcttcctcagtcagaccagcttttccaccatctggatttcttgcagcaaagaagaaagacgtttgatcatgttgttcagttctcctttcaaaaccaggctcgaaattagtgtcacagtggagattcgaaggaccagcctcctcactcaaaccagctttacctgctttcttcatttttctcaagagagctgcttgttcccactgctcgcggacatctctatgagacccttctaaaatctcacaatcagaacagtcactctcggaaaagtcactataagtatcagagcctaaaccaaatcgaataccatgagagggcattgtagagaaagtctgtttgcattttgaaaatctaaaagtagcacacttctcctgaatgaattggcaatcgtcattatccacttctgcagatgtttgcaagttaccgcttgaactactcccagctttctgaacattttctgtctcatcatcatcatcgtcaatgctaatcactctcggcataatggactccttcctggttctggatgtacccggagctttccgtttagatgactcaggaaaatcaagaatgataacatcatc

SEQ ID NO: 51803 - DNA, 2750 bp, Arabidopsis thaliana landsberg
ttaagaggtttattgatttttctgatgcggtctaggcatatgtatacacctaattgcatattactgtgcagtctctaaattgatagttaacttatatagcgaatactcttttgggattctatctggcgtccttcatctggatattgaacttgcttcaaactttgtagattattggtgaaatatctgttgctggtgcaacttacaagacgatggagttcagtggtacaactatcgaaagtctgagtgtaagaaatcattctatatttcctacattatgggtcccttctcttatagaaataaaaattaatagctgcatatgatgttatcattgatttataaatggttgcttgaatcttttttggctgctagatggaagaaagaatgacattgtgcaacatggttgtggaagctgggggaaagaatggtgtcatccctcctgatgcgacgacattaaattatgttgaggcatgtatactgtcttgttttcttgtaaatcatatgtttcttcaaggatcattatattgatgtatgtcttactcctgatcttatatcttctgcagaataggacatctgtaccatttgagccagtatatagtgatggaaatgcaaggtacgatcacatggtactctagaatttctaaacagtgggcagagtaaatatggactgctggtatcgctatttgaattttttgtctatctggaaataactcagtactctggatgtgtaacacaacatgtttcgaacctactcttcatatgagtaatacaacttgatagaatggtcacactctataagtaaaaaaattgtattttttgggcgcaatttttggttgcggattgccctctgttggttatctctccgttggctaacctttctttttgtaattacagctttgtcgcagattatagatttgacgtgtcaaagctggagcctgtggtggctaaggtgggtttacgattaccaatttaaacactgagttatttctgccacttcaggttacttattttgttaatgtcttttttttcagcctcattctcctgacaaccgagctctagctagagaatgcaaagacgtgaaaattgacagagtatacatcggttcttgtactggtgggaagacagaggattttatggctgcagctaaacttttccacgcagcagtaagttccacttcttgtctgtatcttagtactcatgcttagctctgttgtacttgattttgcggaagaaactacaatcgtcaatcttgcaaaaggatctgttatcttgtattagtatatgatctgaagctaagacttcatcaaattgaaattgttccattcagtgatagttttctttattattttctatgtcatgcatagttatgtgttttgtttgtctggttgagtcagttttgctggcatgttgttgatattaggaaaaagttattgattctttctctaaggttcttttcttttctctatcaccacaatttgtttgcgttagtctcatgaaaatctacttgtgttttatcagggaagaaaggtcaaagttccaactttccttgtcccggctactcagaaggttagctctacatttcgacattgttactatctcaagtggtttaatcaaagaatacaaataccaaatgcattgtatctatctggtcatcttatcaggtgtggatggatgtgtatgctctcccggtacctggagcaggtggaaagacatgtgcgcagatctttgaagaagctggctgtgacacaccagccagccctagctgtggtgcttgccttggtggcccagcagacacctacgctcgcttgaatgaacctcaagtacgtacccattacttaccctacttattcaattatctgcacttcacctattcttgaaagtgagactaacaaagacgtgttttaaaatgtttgttacaggtgtgtgtctcaacgacaaacaggaacttccccggtcggatgggacacaaagaagggcaaatttacttagcgtctccttacactgctgcagcctcggctttaaccggccgtgtcgctgacccaagggagttcttgcagtaggctaatgtaatggcttcgtgtgaaaaatcatatgctatgcatcgacgaaatattgctaaatgatggggcattgtgaactatatgtatgtattttccttatttcgctgttggacttgatagtttcaagcactatgtcaaactttgatgttttgagtttgaaataataaaagagaaaaagagtgagttagataagtcaaaagcttatattctaatatctccatgaccccattagtgatttgatcgcaaaagttaattattgaaaacttggtgaaattttgctatcgaagataaatcatgcggtatcttcctttctggtttgcaaaagctagatatgcgtcatataacattgttattcacttattctgaaaatttctaaaatatattataatcaaataatgtaagctagtaagtcaatatattcattctctatgaacttaaatactgttgtatacttgtatatagaagattagtacagttgaaacatttgtagagaaagggaatatatttggtataacaattcattgaactagcaaagctgacaaaagagaaatatacaagtttaattaacccttaataatgctaataaataaataaccctcaataatacgtatttgtttatatagataaattagagaggtaacaatacaattgaaaaggaacaattgactcgagaaaagagtcgatagagatgtt

SEQ ID NO: 51804 - DNA, 586 bp, Arabidopsis thaliana landsberg
atgattttacttttacctagctatatgatacatgatatattgctattagttgtaagaaattttgagtttttgcaaattattcaagatctgatatatataaaccgatacattttgatgaaccactcgattaagagtactactaaccaaatatgacgtttttgagaaagaattttatcatacctttggatttaaaccaatttatcttactatttatatagcttttcgcagtattttttaaaacacaaaaaagtatttttctgttgaaattgtatggattatgaagatcacaggatcaacttagttcacgggtatcgtttttagaagatttctatcatctatactatacttataagtttaaactctccacttttttccatttgattagagaggcacagtgagtgtttcatgtgagtcttttctaacattttgtagtttacttttcgtttcttggttttgttgaatttttagaatacttgtcttcgactaacttctaaagaaaacggtaaagtgccgttttattttatctgcgaggattgggaaaatatatgagtcattttccagcaaatctttaatcgccgatctctaa

SEQ ID NO: 51805 - DNA, 1404 bp, Arabidopsis thaliana landsberg
gtgctctcagatgacttggctaacacgattgttatataatttttatatgatttttgtaagaatgttcttataattgtttcacggcttatttggtagaaaaattaatttcaatttcctacaaaataaatattggttagaaaatcactcctaccaaaaactttgtagtcaaaattggtaagatttgcctttttatctttgtagtgatatatgtatatatacgttgcttcttatacatttaaacttttattttcctagtcccaatgataaatctatatataagactcaatgctttcttatcctccattaaatcatttcaataactccattgctcagtattagatatttttacttagttaacctttcgatctcgttttgttaattaattaatcttcttatttcttatttatcattgcatggtataaacattcttatagtagatgttttacgaattggttttcatatttgtctaaccaaaaataaacaaatttatgaaaatcaaaatttcatcagaagacaacatatagtaacttttaaagctgcattttttttctttttcttttgggcaaagcatttttttcgttcttattagtaaaagcctttacgctgaaatttatacgacattgaagcgagcaaaattatccaaactcaaaatatgcttaaaagtaaattgaaagacgaatttttttagtcgcagaatttagtttcaaatctaagataagaagtattgatttaacatctacatgagagtaggaacataccatcgaatctgttatctccacagttcttataatgcaggaatcattgataagaaactgaaaacttttattgtacgtaaactagctagttttttttattgataggttaaaacaaaaagtacgaaactcaaaagatctattaatattgtgagtcagctagatatatattaattgctttctacgtgagtgtatacatatataggaaaacaaaataaaaaagaaggaggaaagtggtcaaaggcaataatggagaagagaatgatggtgttgatgaaatgtagaatctcatgtgaaggtgttggtttgaaagacgaccaaacatggacttatatggtgaaactctttttcactaacatccaattactctttgtttttctgttgatgtatttttatatgtttatggtattcatttctagctcatgctatgcttatcaagttgcctttgatcaagtgtgtattctaaatagttttttttttcacatcaaagaaaatcttacacttaacaatgtcttaatgatttaaattagtttacttaaggatttactaatcgtgcttgtgcgtgatgggggagatatgaaaacttttttttacatttctttgccaaagaatcatttggtttatcttattttttaaaactattttttttttt

SEQ ID NO: 51806 - DNA, 810 bp, Arabidopsis thaliana landsberg
cagaaaaagtgtcgatcgaaagctttgaaatatgttctaatgggcatatataaaattttggatctttcaaaatgaaatagtttctatatctttttaaagtttaatggtttgtgatcaaacagttgcgtcacatctaaactcgtgttattcaccaaaaaaaaaaaatctaaactcgtttattttcaaccaaaaaaataataataatgagaaaccgttgcaagtgatatcgaccttttgcctactttcgcactcatgttggtgtctcgactaaacctactgtggacgcatataaccaccggatgagtacaggttaaagtttctattattttaatgagtttagttagacaatccaagtctaataaaagatttgaataattgcaagttgtctccacaaactaaaataagccaaatccaaagtcagtcagttttggagttatgttgtaatgacagtcactgctttgtcatcatttcatcttttaagacattgaccttttctttttgctcgacaaaatccattttccattcatcaatttcgaataaaactgtataacagtctaagtaacaaattcattttgggataccaatttgaatttgagtttcattggatattgcaactaacatcaatactctcaatcactaaacgattaagattcagttaaattgaaattgttgaatgatttgagttttacttcttattatgacatacaaaccacaactggaacatatggaataccaaaaagaacactttattttcttgaaaactctaaaaacttcagattttgtttattcaaccgaacaaaaaacgtgttt

SEQ ID NO: 51807 - DNA, 1197 bp, Arabidopsis thaliana landsberg
atccctctttaatggttcttaacaaaattttagtgaaattggtgtggtttgttttaggctatttatcaatatcttctaggttcatgattctatttgttatttcattttgatattattctgccatgccctttacccattttgcaccacctccatcatgaggtttgatattgatatccattagaaaatattatgaaaacatctttgacacaaaaaattatgaaaccaaatgtaatattcaacaaactaaaattttcatttttattggtttacaaacataatccaaaccacgtacgtaactctcttttttggtctatcacataaatatcacaatttccaaaccatacatttacatgcatataataaaaaatattgcaccttcaaataaatatttttacaaaaatccccaatgaaaaattagccaattaaacaacaacattagaaaaccggactcttgatttccaatcgcgaatcgcagacctgagcgtatggttcggtgtgagcttgaagtggtctagcttttgtcgagtcaccggtgaaatgttatgtttctcaagccacgctaagatcgctttcctctcgtacgtgaatccatcggcagcaatctctggctcctccattatctcctacatccaacaatcaaaataaataaaaaaatcaaaaccggttcaaatttcttgttactaaatttgtgtaccgaaccaggtaaccttttactcacccgtaagattggacagaagtaatgactcggtgcacgtaaattgcttccttctttctttattttcgaattcgccgtctccacaagccgtttcaaaaccggtataacctctgatttaagatccggtctatctcggcatcgaaattcagcacattttaaaccgatccgagccaattcctcggtttctgccaaaggccaatcggtaaccgatttatctagcatttcggttaacgtccctttctttaccgcgttttctaccgctggtacaatcccgctcgggttacgagccgtcaacaactgaagaatgattatgccgaacgcatacagatccgactttggtctaattgttccggttctgtggtattctggatcaatataatgcaatgtaccggcaagaaccgagtttcggtacatagtaacattaaccggtgcaacatccgtaaccagcttggctagaccaacgtcagcgattttgctcacgt

SEQ ID NO: 51808 - DNA, 1118 bp, Arabidopsis thaliana landsberg
gatttcaagtaaagcttataactttgtaaaaacactgatgtaaaggttcaatttttacaatcctaattccgaaatctacggtctttgaacaaaaaaaaacatgcataaatcaccaagtttctgaacactaatggccgagcaagtaaatttatcagagcataatcaccggagagggttaacccttaccttggtttgtgtggagagagagccgattgattcgatcggaagagaagggatagttttcgacggagaagtgaagttaaaaaccaagtcaaagtcgtctttacgtcgaccaagtgaagaagatttgagccaattcaattgcagcaacaagaggtagtggcaaagagatttagaaataacgaaggagttgatgaattggtttctaaataaagaagaagaagccacaatgacttagagcgaaaatctccattaccaacaacaacaaagggctcgtggagaagacaacaaatctggagcgttagattacaaaaaaaaaaaaaaaatgaaacacaaagaaactgctgacgtcagcctgacctaaaacccagtatgctttatttatttattatggatgagagaataatgtaaagtttactcaaagtgtgacattttatgtaataagatattaattaaagtgcacgcaaaaggtcatctctgtttcgacctcacctaaggtttgcttctagatttatatacgtctaaattagtattttgatttcgataataatattatttagtaaagcattgaatttgagaatgatgaagtggcttggtttctagggttataagacaggaacccacgacgaccatcaccaacacatcagcagatcagctactaggtccaactccaactctttatttttgttggttcaacaatttactgcaaaagacttaaaaaaatgtagcccaaataatcatgtcaggataatggaccgaagattggttgatgggccgttttagatcaaaaaaatcattccacctttggaaaagatctctttagcatattactttaaggtttgttgcaaatgaaaaatagttggaaaatattttagacccttaaaagtcttatccgataggtaaagtatttaaatcagttcatgggttgagtttcataa

SEQ ID NO: 51809 - DNA, 1138 bp, Arabidopsis thaliana landsberg
  unsure (1)..(1138): unsure at all n locations
aaacgccgtccacagttccataaattctagctagttttctgtaatatttcacataacgattcatagacttttctgttcagacaaatatatactttgcaaaacagaacatcaagctcagtagctcacaaccaaaattctctgtccaaatttgaagtaacggaacctagtgtcttgctgggtttgagacttctcaatcaccatatagtcagaaatacctatgaataagattatcttgatgatttttttaaaaaagattttcttcgttaagcttttcttttgtaattagttataaaccttctcactttcaatgaaattcacattcatataagtttaaattttaaattaaaatattggtcagctatagactatagtaagtatattaaataataataacattttttgtggacaaagagaattcgggttttggggttttggcaaaggaaagaaatggtcatatgtggaacactacgtgccacttttcatgcaataacatgcaaatattaggtcagccactaggaatagaataagttgaatagttttttacgatgataagagtaagcgggaagccataatagaccactatcccaaaactttaatctgcttccaactcattatgggagcaactaatacaaaatgatatgtattccatgttccaaccactccaatacgaattacgaagcaagcgtgtctcagtgtctgagtgcgactgccttctctatatatataagagatatacatagtgaattaaacatcttaattatactgatctttatcatgttgactagatttaagaaacaaaataataagatggttagggcaaatatagtgagcatggttctgttgatgcatgccatcgttgggtttccttttcatgcgaggggattaagtatgacttactacatgatgagctgtcctttcgctgaacagattgtgaagaacagtgttaacaatgctcttcaagccgatcccactttagccgctggtcttatccgtatgttgttccacgactgtttcatcgaggtacttaacgttttctgtttaataattgtgttnttttcgtagaacaacccttaanattaatgtgtaatttttggttcataataagggatgtgatgcgtcaattctgctagattcaacg

SEQ ID NO: 51810 - DNA, 1144 bp, Arabidopsis thaliana landsberg
aagacaattaattatactttactgcaaaaattaggtgaaacgactatattaatcaagcattttcaacaaaagttttgatgcagtaccaacgtctaatgtgttgccacatatgacttgcaacttctaggtgagaaagcgtaggccatagtatatatgtaataatcaatttaatcccttaatttatttgtatgatatgaataacacatttttaatcctccaatagttcaaagattgaaccattaacaaaccaaacttctttgatccaaagctattcacatataataaacattattgattggtaatgtgttaagtgcatgtgttttcattcttatagaatcttcttgatttttgagtacagaagtttcatcaagtaaattaactaattaagataatgacaatatactactaaactgttgatttggccacatttcattaaaaaataaattgaaaatgacgtcaaaacaaagtcccccacatatattatattgattgacccgactcggtctccacaatgctcatccggctttgataaacccattaattagagattgaaaaaaaaaaatccgatcaaactctacacatacatacacacttttctgcttacaatttaatcaaatacacaaacatatgcatgaatatatacacaaatagatagttttttttttttctggtcaaaacacaaatacatagttacatctgaaaattggtttagttcttgaaaaccggaaaggagccccggttctctgtaaccgggaatttatttagaccggaagtgcatgaagctgaagctgaagctgaagaaacagaggatgaataaggagaagtaaacggtgaagagatcttcttcgaattgaaagaagaaggaaatatagagtcagtgccaacttctctttcttcctccttgatcgtgtcgagtaccttcgccgttcttcgccgcatcaccgtgacaaattgcggtggcgcaacttccgttatgaatcttgcaagtcttgaggtcgccatgatcttgaaaatttagggattagagattggttatgagtgatgttgatgatgagagatgatggaccgagtttgagaggatttttatagtcggtgactttgtaaaatgaaattgttttagtgatttttaacaattattttgtat

SEQ ID NO: 51811 - DNA, 718 bp, Arabidopsis thaliana landsberg
tgtcactttcagcattcaactcttttaacgatcttagattctttccttctcttgttttttcaacttgtttattcaaccttttgccacaatccttcttcataagtgttctacttgaggatctatcaccatcaatatacacgccaatcctgtcagaacaagtcatcatcaaaatttcatataaacaataacttgaattttagtaaattctcacacaccttacacctgaggaactagtcggttccacagacactgccacgtttttgcttttcttaactttctgcctctgcattctgcaacatcataagaaccggaatagactattacctttaataccatagaagatcaagattgcaactttacacagatcacagtaatgaaccgatttactcacatgtcagataaaggaatggactctggcagatcaatctccttatcctgctgatcgattgtgggaaaatcattaagcacggcgattacactttattccaaaacaaatagaagaaacttgtacctcatcggccgaagtgtcatcctcgagtaactcccagcgctcttcagtgagattaagctcttcggaatctccatcagaatatattacctgcaaccagtgggggaacaaacattccacatcaatcaattaagaaacaggcacgattctgataggaggaacagaactgaataacagatcagagatattctctcacccgatgcatcttcg

SEQ ID NO: 51812 - DNA, 1285 bp, Arabidopsis thaliana landsberg
aaacttgtacattgttaaattcctaactagctctttcatcattttggtaatttgatcaattacctcagttacaattttttaaataatatagaattgtattttgacctagtagtagatatagaattattttaccaatacttagatttctggaaaaaaatcttaatgctaagtcaaaactaacgaaccatttttgtgaaattgtcataaagctatatattatttaccttttcacggaagatagtgcgattggctaaaagaagaaatgcaacttgaagtttttctaaaccaacatatgtgttttgtcaatattttttgctttatcgataagaaacttcaaagcaaacaatcaagttcgacatagaactctgttcaaggaagataattactttactttgatctcggcggtcatatagtgtgttccatgaacggacaaattcttcctcttccccaaaattttccaaaggttatttttggctatttacgggttgtcacaaattaaaaaggaaatgtgcaaatatttattattattctttgacttgagggttaggatactcaatatttacaacaacccctattcaaaacacagataaataaatatgaaagtgaataacatttaattgatggagtagtaggaatcaatcaaggagagagctagggccgctcatatcaacaagtcttcaccttcactccactccaccaacaagatttgatctataagataaatgtgataacgacaacgaagatttgagtaattgtagcacatgcatcccaaaactgattattgttgatgatgaagggtaaagtaggcaactctatcatgcgacgtatcctttttcttttgtttattctttttcctgtccgtaaagttcgccgagaattcgaaaaataagtaatcttatgctatccaaccatatatcatacgtggcacatttcatgctatcctctctactcattgattgaatgaacgtaattttggtgacatggaacttagaaggattccaatgtcaataaaccctatatactctgaagcaaaacataaaaactttgtttacatctccttttgaaaggtgtttaaagatttcttgatgtcatttgaaatagaactttagttccaacagtttcgaaacggtgagaaaggggatgaattattagttctaatccgcgaaagaactttctaactagagaggaatcatcccctagcatccaataaacgtaactagtaattaacggggttgaatcttcttctcatgagtccaacactttttctgccatcttgatttatata

SEQ ID NO: 51813 - DNA, 706 bp, Arabidopsis thaliana landsberg
ctaagcttgttcctcagttccttccggtcactcccacaatctttcaccagcttcgaaatctttccaacatcctctgaaacaagctcatcacttatactacaaccaagatcaatgtcactctcatcatctttctcaatgttactccgagtaaatcccacttgctctgaatcagctatggaagtagagaacatagaacacagacctaaaggaagcacacaagctacgggaggttccatatacagtcgaacaatacaattattgctcaaactaggcaaaacattactaaatcttaaacacttaactgcaggagccctaaagattgatagccttgatctaatcagaaaaattcctctcattccgagaaagaacagtaacagaaccagagaaatcacaggtcttttgtgattctaacagaccaaagttcttcactttagccacgttttgcaatacccaatcgatgatttatgaagtaatcataagggaatcgatacagattatcacatccgacaagcagagtgaagctgaggttattcgtagatgggcttctttgctatttaatttgttggcccataaaatttattcggcccatttactatctcagcccatttattttcttttgtaaccccatgggccatgtatatgtgtcaaaaatgtagtatatgacattcatataacttataactaagtgttcccaaaaaaaaataat

SEQ ID NO: 51814 - DNA, 1424 bp, Arabidopsis thaliana landsberg
ttttttgttttattatcggcggttatatatgtattaatagtcgtttgcatgtttgtgatatacgacccgaaaatgaatcttgcatgtcataagatctgtgcgtggtattaacgtattctattctacgtgcccctccgcataaaggcatagcgtagacccttttgtgaagagggtgacaaaaaaaaacgtatccgctttagtgagctagtggaaaaaaaacgtatagacttatcacacacatgcaatattcagttttaattgaaaagattctacggatatatgtttttttagatactcaaatcagaatctttttggaattagaggaggccgcgagaggatgcaacaaatcaagaaacatatagaattacaagattccaccatcaaagaatctttttggaaaagagattccccatgatttatgcttccactaatataattgatttattgtggatttccaccaagatttctttctctttcaatttccaaaagaagatatcaatttcgtaataacaacattgaccgtaaatagtgtttccaaatttgatctcaccctctttggtcaaaccaatatatagaaataataccccaataaagaatccggttcatggtaggcttggtagctaatgtcaaggatttagtatttttaaaacgttatgcattagctttctatcactttttaataaatgaaaaataataactcaaacaaatataaaaggccattccctctacgaaaagcaaaacatgtatttagaatattaaaaagtctaaaatcaaacctaaaattcaaaaatcaattaaaggccacaattgtcctataaaattatgggcttgaagcccaataatatctaagtgaaaaactaaacttaaatgctctctcaagggaccaagtctcattattaccatcacctccgagcgttctcttctctccatctgtctgccgctcctttaacgtcggctcccattttcttattcacaatgaccccaagaaactcgaggagatggaaaaaagcaaaaggtaaaaaaaaaagaacaaagctttcttcgagaaccagagcacattgattttaaggtaattactttctcaatgccatggaaaaaggtcccattttgttcccctttcctgtaatctaatcgtttcaatccgtgattatctcggtaagcttggaggaaatgacttagatttcataaatcgattcatgagttgtcagaaaggatttaaattttgttggtttgttcttatttcttctggagctgctatgaatttttagatttagtttggctatgattctaaacctacgtctttatgaaagcacttacattttctagacacaagatcatagtgagttcatatgaatgcgaaaagttattattctctttggcttttcagtttatatttatggtaggatcattatcctcatttacaa

SEQ ID NO: 51815 - DNA, 1363 bp, Arabidopsis thaliana landsberg
cagtgtcatactatatttatttagtcacagactaaacgttttaacaagaagaagcgtgacacttgcttaattaatgcaacttatttaattatcagtctcgttttagcctttagcattgatagccctaagaaaatgctatcagtgtggagggtccaaagctattgggcttaagcccacaaatcaacacgaattgatgcattcttctttttaggctttccgcttggatcgattcccaagggaatatgtgaaaacataacaaaccgaaaaatgtaggaaaaaagcagcttacatatttgctactcaaactcaactaatttgtatgcgcatctagaaacacttttcaacacaaaatataatattaataagaaatatccagcaaacattcgtttctaaaacatagtatagaattaatttgagttcataacatataattctcatagaatagaaagaagtgcataacatataattctcatataataaaaaagagtaattataatcatcaaaatcttcagaagcagaccaaatcacatgtcttcttcaggctctgcaacatcattttgtcctaaatgaaaccagaagagtagacaaacaatacactcgtacacggggaacccaaccatagctagaattggcactattggatagagcacaataaaagccccaaattagacagcagaggaaaatttgacgttagcagagacggtacggactgagagtctccggtgaaagtttgcatagtcgacagcgttgagagggaattcagactgagattcgtcgttggtgagtgagacgacggtggaaagagattagacagcagagggagatttgacgttagcagggatggtgtaagtgtgcaagagagctagagaatcccgaggtatagtgagagattttgcatagtcgactgaggcgttgaaagagaattcagactgagcgtgtcgttggtggctgaaacgacggtggagggagatttgacgttagcagggacgataaggattgagagcctctggtggaattttgcatagtcgacggaggcgttgaaagggaatccatgactgctatgttttgttttgttttctgcgaataaacgaacaaatactgtacaaaaaccaaaccctttctctcttcaaaaaccctcatgcttctctcttaaagaaacttagtcgccgctgattgtgttatcggttctagtggctcttttaacaccaaaatcggaatttttttagttttttcgagctgtatttttcgtttggcttcctttatgctacatatcaaagatttttttcttaatacatatgtcagtaccatgtaattaatttctttttttagttttctcgtaacatgtaccctactactttttttt

SEQ ID NO: 51816 - DNA, 660 bp, Arabidopsis thaliana landsberg
  unsure (1)..(660): unsure at all n locations
ccccccctcccccctcccccccctgcccctcagccccccccccccccacccccccccccccccccctccttccgccccccccccccccccccccattccccccccccccccccccccccccccccgcccccccccccccggcccccccccccttttccccccccccgggtgtttacccccccccctccaccccaccccncnntttnccccccccccccctcccccccccccctcttctcccccctccccctcctccccccccccccccccccccccccccccccctccccccctcccctttctcctcctcccccccctctttccccccccccctccccccccccccccccnccccttttttttccccccctttgtttcccccccccccccccccccccccccccaaacccacaacccccctcccctcccccccccccccccccccccccctcctccccccctccccccccccctcgccctccccccccccccccccccccccccctcccccccccccccccccccccccccccccccccccccccccccctccccccctccctctccccccccccccttcccccccccccccccccccccccccccccctccccctcccccctccccccccccccccccccccccctttccccccccccc

SEQ ID NO: 51817 - DNA, 1072 bp, Arabidopsis thaliana landsberg
tgagatgaaaaccaaacactgctcccactcaaatgttgtaaaaatggaatttataaatatttggtgctacaaatgtcgtttggtagcctttggaaacattaaaggtaaactagagatatgggagtatggaacttaatctctttatgtggttgtatttcatataatttcacgtggcccaacttgtttctgtcaatccattgatcaaagttggtagacaagagtgaacccacacacactcacacacatacacacggtcgatctttttttctattctcgtgtccctacgtcctctaaaccccatcattatacttcttgtgttttattggtatgctgagctagagatagttaacaacaacccaacaatgcgggtctggcttagtttgaacctattcgaaactagttatactccgcttgaagtcattggttcgagactaactttggagatgagtatcataaacagctctaacttaagattacaatacatcctcttgttagtctaagttgagaggtgttgccattgactatatatttctttgggaatttggtttaccaggatgttgcaaagaagatttaaatagttataaattagtacaaattcaatccatatgatatgatattcaaaaaacaaaaaaaaacaaaactgatctaaaagtcgaaccaaattctaatttgattagagcatgtatataattgaatcccaaagtaaaattcaacccaatacttgagaaggtagttatattcttataaattatggatatgatttgattaaaactcaaacctgaacccaaaacatactagaatatacgtttttactttgtaactatttgtcacattccaaaactaaactcggtactatatttgattcggatccatacaaattttgtatatctggtttatattctccatgtgagattaaagcggtgaccaatcaaaatcattgctggaatatcttactattaagctaaatgttgttagttatatacaagccaatctaaaaaaactgatgcaaagagagataaacgaacatatcccaaaatggtaggatttgatttaatattcccatcctcttatt

SEQ ID NO: 51818 - DNA, 583 bp, Arabidopsis thaliana landsberg
  unsure (1)..(583): unsure at all n locations
gtcgacacaagcagggcaaaggtcgtaatcgccaccatcgcatacgctgcaatggaagtgctcgtcctccatgggctcgttgcagttgttgcaatagacaacccacgaggtgcatacattgctcggcttggggcggaaccaagacccgagttatagttggcagttgcaaggttgttgaagaagtctgttatgggtgttagctaagtgttgtacggcaaatcacgttcgcgttggtgcttactctgacgggcagtgaaggcctgcggtacaggagcctcgccgtcagcatctgccgtctttggtggcgacacaggactgatggcctccttcttttccatgtccggcgagcgggcaattaccggagaaacaggtgcattgccctgtggagtgagggtatctgagctcatgcggtgaacagatggcgcgtacgcntggaagcgnnnnnnnnnnnnnnnnnnnnnnnnnnnnnnnnnnnnnnnnnnnnnnnnnnnnnnnnnnnnnnnnnnnnnnnnnnnnnnnnnnnnnnnnnnnnnnnnnnnnnagcgtcttgtaaacctggggtttgtcggcgtcgaggatgaca

SEQ ID NO: 51819 - DNA, 493 bp, Arabidopsis thaliana landsberg
cccgatgctcttcatcaacaaatgtgaatcctattttcgccaacagcgcaccatggcggaggaacgcgtgtggatggcctcttataatctggaggacgttgcgcactcgtggttcatccagctgcaggacgacgagggcacaccatcctaggggcggttcaaggacctcctcaatcttcgcttcgggccaccactccgctcagcgcccctgttcgagttggcggagtgtcgccgcaccgggaccgtggaattcactccaaccggttccaggccctgctgccgcgcgcgggtcgcctcacagagggccagcgcgtccaactctacacaggcggtcttcttcccctgttgagccacgtcgttcgcatccacaacccggagacacttgatggggccatgagtctcactcgtcaggccgagcagctggagttggcacggggaccgcaccggcgccaagggagccctcgcgctcttccccagcgtcgggcccaagcag

SEQ ID NO: 51820 - DNA, 891 bp, Arabidopsis thaliana landsberg
cattgacgatcattcttattatgttatgtttattctccgacaattatacttattattttccataacatgtttattttgttgtattccacttactggttggtactttcaaagatgcaagtagttgtaattcgaatagaaaacaagcgacaagtcttctaaatatagcagtcatcgtcattggttgctgtaaataaacatggtatatgtgatatagatatacctttacaagttaagcataatttaatatttctgttaacacagaattatgcgattaatttaacatgttaggtggtattgtttgaatgatatataccagaatttgagtataaatctaatgtgttaaccatcaatcataagaattatatagtataacatgatctcggacctagagagaatatgagacaaagatgtgaatttttgttattataagaaaacaaatagatttctgttacaatatagttatcaaaatgtctcttttttttggtaaaaattatcacaatgtatcttctttatttatgtaggtcgactcatctaagtaaggcctcaagccttgtgatattcacataaaagtgaagtaacctttctcagcttcggtgacgaatccactctgccttttgttctagaatctgttttgttttctcaagatttattacatcttggtaatacaggttactagcgatgcccgtggtgaaattctagcatgattaaagacaagtttggttttggtatatcactttgacgaagtaaatggtattagtcaaaatagggggcacacaacacataatttagacttttttatgtatattattcatatacatagtcacacatgcacaaaactttctctcgaaccttttcttgttttctatatttaattatactaatcaatacttg

SEQ ID NO: 51821 - DNA, 624 bp, Arabidopsis thaliana landsberg
  unsure (1)..(624): unsure at all n locations
cctggcagcaaatggaagacagtttacggatgcacattgttcagtttccacctgtacaccttccaggttttctggtctcgcaggtaggtatgcctggcgcaaaaaagggacaaatattcttcctggtaatgccaatctggtgattcctacagatattatgaccttgcctaaaatcttccaacaggctgggtatctgacaggggctgttggcaaatggcatttgggattaggagaaaagtttcccattgactggaatcatgaagttaaaccaggacccagagaagtaggttttgattattcttttatttttcctgccaccgccgacagaacacccacagtttttatggagaatcaaaaagtggttggactggatcctcacgatcctatagaagtcagttataataaacagtttgcaggagagctgaccggaaaacagcatcctgaaatgctgaaagttcaaagtgatccacatcagggacattcaggacatataacanatggtattgggcgcatcggttttatgacaggtggcaaaagagctacctggacggatgaagaattaggggggacattcaacacanaatcaattgattntatagaccggagtctggctgctaaaaagcc

SEQ ID NO: 51822 - DNA, 650 bp, Arabidopsis thaliana landsberg
  unsure (1)..(650): unsure at all n locations
atctacaatgcataaacattttcattattgtttaaagttattatacaaataaaattttttactcgattttgaaataaatggcactgttttgcatttctagtatcgataagtgatattatagaaactaatttgagtaatttcattacatttttaaaagtatcaaattggaaaatacatacaataagaggatatactcaaatatctgacgcaatttgacaattgtttcatcctcatctcttgtattatataggttcaagttttttcagcacatattgtactttccattaaaattgcaagattcttatgataaaaatcatatgataaaaaatgtttttgatatgattaaataatacactagcagtaaaaaaaactttccaaaaagttcaaacaaaaaaactattttgtaaatagataagtgagatgctattttctttctattgaaatgttaaataaaaatgctattttcggctatattagatgctttaataatctatgtaatttatttgagcatgtcatgatatattaaaaatggtttaaccgaactttgggatagtgacacacaaaatgattagaacatatagtatacaaagtaagatgtcaaatgtttntaacaattgaaacatatgacgtactaagattataaactaatc

SEQ ID NO: 51823 - DNA, 2135 bp, Arabidopsis thaliana landsberg
gttgagatatataagaaaatcttcgttcaccaagtattgaagaacgagtattacaatttaaaatgatgatggtaagcaacacaagaacctcagttatgtggattctccctcggaaactgttgccaaagtttactctaagttcaaaaggctttatttcagtaatctgataagtataagctgttagtatgaggcagcagaagttatggtggcatagacacaactaaaaaaaaaaaaaagacttaagaaggaagggcgatagtaacctcggcgtggacaacagaaccaacttcacagctggatttcttctttgccctcttagaacgggaagtctcagaagtgccggaaacagagtcaagaagtaaaagcaacctcccagacgttaaagggttttgcacagccttaacagaagcaacaacactgcccatagaaaataatcaaaaaatacttagctcccatcaagtaactacaacagtaaggacagctatgtctattgccaataaaaggtacaatgagctgccagtggatgtatatacaaattcaaattttattagtttagttgggcagggcaaagagtatatgggaaattaggaaccatgacaaagggaagcaaattaaataagtaaaagattggccaaaaatggacgactagcaagctcacctttgtccagtggaaaattgtttcactggcaacttctgagtgttatagtctgatactgatgcatatcctatagtgtaaccatgctctggaatcgacaaaacctggaaaaaaagggcagctctgagtaacaatgtaacatgcactaattatcaacttaatgcaattatatacttaccaagtgttgctccttcacaatctctacaacagcactgaccctctggtggacttcaagttccttggagattcctcttttacgtttctggagcaagataaaacacaacatgatataagccgtagcccaatttagacttatgcgaaccacgatgagcatgggagaaaacttgaataaaacaaaactttgcgagaatatatcttcttagagtgaaaccttttttgaactgttggacacctctttggttaagttgttcaagagctcaggcctcaaagacaaatcaactagtctctctgccctagatatatcaagaacaactgcattgacaacagaaccgggtaccaaagtagctccacccactacaagaagaaaacataatgtatcactcaaagactatgtagagatgtctaaatcagatgcaatccatactaaactgtaccgagaaacagattctccaaaatgacttactatgatgctgaggtataaaaccaaggacgttattaatattgtcaaaattcaccaccacaccaagatcattttgttcctgtatggttcccttgatcaaactcccaattgagaatttctcaacccagctacagtcacttttagtaatatcagatgattgcaggtccgatatctggacaaataaacagtaactgttagaaatcaatccttcttaaaaatcacatgaagtacagtgctagccagtgttatgcagacccattcgaaatatcctgacacaagctcaataaaaatgcagtacataacagattacattgagttctttagcccaataaaaagaaaaagatatgtctcaagaacaccaccttctcatccatgaggaagtactcttggacaaaagaagcatctacagatgcgcaagatgactgtttcaatgaaagagttatcctacttttttcttgattgacctgaaaaatattacaactgatcaagaccttataacatcttcaacaaacttaatctaaggcctttagtccagtgttcacatacatcaactatattagcccgaactgattgtccaacaaagaaggattctgacacatctgccttggggtcgtcaattgccttgaaaagaaaaagaaacaaacttcaagaaacaaaatatacaaacaaacatttgacaaagaaaattcatagtaaaaaacaatccaccttgcttcttggggcgaaaccagtcaaccgaccaagaaaacggacaaaacagccattttcaatcaaaaaacaaacaaaaccctgtatacgaattcatcaaaagtaaatgtgagtttatgaacgaattatcca

SEQ ID NO: 51824 - DNA, 1016 bp, Arabidopsis thaliana landsberg
  unsure (1)..(1016): unsure at all n locations
gctggtttgtatgctggatcccgagctgcagggaagaaacctgatctcgctcttgtaacatgtgatgtctaagctgtagctgcaggtccaatgctggcttttgtggctcctttaatgttggttttgtttgtttgaaatgtaaacaagcttttttgacttttatcttgaaaataattttcaggtgtgtttactactaatgtggttgctgctgctcctgtagtttactgtaaaaaagttcttgagacttcgaaaacggtactcctctatgtcattaattggatttcggacttagaacaatgcattttgtgcttctgagcattgaacttttagtgttctttaggctcgtgcagtgttgatcaatgccggtcaggccaatgcagctacggtaagatatctcgagctgtgttgtttaggagttaattcatatgattntgaagtagcctgaaatctatagggttgttagctatggatcactcattattgttatacgtttttcagggtgatgctggttaccaagatatgttagattgtgttggatctattgcgacggtatgcttttggtgtctttcattcccatgtctcccgcgaaacttcgtatctttcaacactgttaccgtttgtttctttaccgttgtagctacttaaagtgaagccagaggaagtgttaattgagtcaactggtgttatcggtcagagaaatataaaaggtgtaacttatttctttctcacttttcctccatgcaagtgcttgacacagttagtttactcgtgaatctttgcaggaagagcttctccacgcacattcaactctagtcaactcgagatcagactctgtggaagagtataatcttcttttctcaatctctctcttaagatcgtaggtcacagtcttcactttctttgggggtcacttggggatatcactatgaatgttgaaatgcagggcagattctgctgctggaggtatcatcacaacagatcttgtaagcaagagtgttgcagttgaatcacaggta

SEQ ID NO: 51825 - DNA, 607 bp, Arabidopsis thaliana landsberg
ggtagctcaccagcacgctggtggtatcggtggtgctctataccgagaggtaactaagagactgatttagtttaggctactgcaaaacgaaaagattgaaactttgttattgaattgagactcttgttgtgttgtggatcagaacggtgaagggatatgcgcttcaatgccgaagtatggcaatggagatgaacctggaaacgaagctggttacattgttggaatgtcgtcttgttatccagctgatccagtgaaagtgagctatggagagacattgactttggaatctaattacagtaatgccgttggtcataccggagttatgggactcttttacatcctcgttgctcagcagctgccggaaccagatagctccttgcctaataaacaacattttgaggtaatcactccacccggtaccagaactcggttaaggtcaaaccggttacgatacatatacagtgtattgccatgtgattatttaactgacgttaatatctctcacttccttgtaggcacctgcgagaagcttgagctttttagccatttttgcagtgacggtagttgtggctgttgtggttttaatagccgccgtgatataccaaag

SEQ ID NO: 51826 - DNA, 688 bp, Arabidopsis thaliana landsberg
  unsure (1)..(688): unsure at all n locations
atcaatccggtatggcttctgcatgctactttcccgctagcagtggttcctgcaatgcattcgggtttatttacccaaaaaattgagatgttgcactctaaatcttttctttgcgtgtgaccttgcttctaaaagcattggccgtgtagctacttactcatcaaggattcacgttacagtcactcaagaaccgatcttcccgactcagatgccttctccaatagtttttgtaatttgggattcccagctcaagccacggcttcatgttcccgttatagtgcaatatggctgcgttttttatggcttgtgcattgatgtagtagtcataaccaagccctgatagagcccatttgtcgtcaagagcatatacttggtcttgaaatgtgagcaagcttgcctgcaatgcaattgcttcgctcgactcatctccactactcatctgctgcacatgaaaaaaggaagtcatcgctcagaatcacccaattatctcttacaaaaggtttttcaggaaactgacctctttataatatttttgataggtttctgaaacacccaatgccctccatctagcaagatcaacgacattcaaaccagacatccagagacaagcattggtatcaaaatttcctgtggtgagagtccttatgttgttatttctntaangtcaanggctttcagcgccattcac

SEQ ID NO: 51827 - DNA, 575 bp, Arabidopsis thaliana landsberg
ctcgaggagaagaaaatatacgtactcctacactattatactaggcgaagagaaagcaagaaggggtgtgggcacgccaggggacacatgaaggcaggcagcggggacccagaccaaaggagggcacggctctgctggagaatagggagtactcatctcaccggagcagaggggtgcatggcatggcattcacaatgccgatgccatgccgagcagacacacaccagacacagacaggcatgcacactgtagtactactggtctacttgtggtagcagcacccctggttgctttatcaaaagaatagaaaaaaaaccaagccgccccaaagcgagcgactcctgacgagcatctcacagtgttggtaggcagggaggaccactctccgttcctttgtttccttcactttttcccgtgccctacgtaggctggttttgcaacactaccggtactagttactgcttcaatgctggctatagagatgtttctaaacatccgaattatatgacaaatttaatattttacaatagattttggcgcaacacaagaatataattctaaataatgtttttgtg

SEQ ID NO: 51828 - DNA, 1417 bp, Arabidopsis thaliana landsberg
ggggttgttgacaaaaaaatttcgtgaagttgatccaggaagctgaggatggaacacttgaccttaactattgtgcagttgttttggaggtatgctaaatgtatcttaatatttaagttaaaaatgtatgtctcaactcgtagaagatctaattaagaacgtggactaaaaagatcactcacctttataacccttgccttaactgtttgatatctccctagttatcttcatcagcttgttaggatctcctcttatgtgcttacgtgttcctgcgatccctcttaacaggtacaaaaaagaaggatatatgatattacaaatgtccttgaaggaattggattgatagagaaaactacaaagaatcatatccgctggaagtaagtacacaaattttttctttcttggatacattgcagcgtatatagcttgagttcgtctgactttgtgtatgcgctattgatgcaggggtgctgacaatcttggacaaaaggacctgggagatcaaatttctaggcttaaggttcattgtgacaagcattttcacgtgttttctttgtcgtagaacttactgctatgcaaataatctgtcaaattcatgatttcattatttttctgtcttatagtttatttcacacagttattttcaaattccccattactgaccggttacatatctacgtattttcagtcagaagtagagagtatgcaatctgaggaaagcaggttggatgatcttataaggttggttgcttgtgttcttatattatgtttggagacttatccattgttcctttcccacatggtttgaagatcatcatgttatgtatctccagggaacgacaagaagctctcagatccttggaggaagatgactactgtagaaggtattcgtcagtttatttgagtttcatctttttgtatatacacgagagtgttgctaagatcaatgatggaaataaacaggtacatgtttatgacggaggaagatataacgagtctcccacggtttcaggtcctccccaactagttcttgaaaatcatcttatgttttcctcagttatttaacatactaaactggtagtccttatacagaaccagacattactagcaattaaagctcctacagctagttacatcgaagttccagatcctgatgaggtgagcgtttttaatgctttcatatttgctgtacagttgtaatataatgtgtcacaaagtaaagcatctgtttttgttcacgatagatgagttttccgcaacagtaccggatggtgattaggagtagaatggggccgattgatgtctatcttttaaggtacttagttacacattccactctctgtgtctggtcttatctatatatttgtcagtcagtgttaataactgggaacaaacatgatcgcagcaaatacaaagg

SEQ ID NO: 51829 - DNA, 608 bp, Arabidopsis thaliana landsberg
ccctgcataactcgcataggtagaactcgagtgcagtcgtagatagataaggctgggagatcgcagcgttgagccgagcatcaaaaccagaggaagaggtcagatagagatagagaacggccggtgcggatcttcatcaagcgcggtgtcgagcaaaggaaatggagaggggagagaaaagatgaagccgccgtcgatccataccctcggcttgctgcgtcctgggtgggtgtcctgggagatccaccataatactgtgattggtcgccggtgtaaggatctaaccgctgggccgcgggtcacgtgcgcagggcacctcgcagcttgtaccaaggtatgatgactcccccattatgctcacttccgctccctcttgcatctgcgcttggttagccgttgatggacctgggagcaccgtcgggcgtgactgtgatgtgctcgcggccgtgggggtttgggcgccgcgtgtactgatcgggggaggaagaaaggctcctcgccatccaatccgtgatgaagggtgggtcgatcttgatcgtgggatttcgatcgtgggccaaagatagatgcggtagatggcggctaggaaatccgatctgggcagttga

SEQ ID NO: 51830 - DNA, 831 bp, Arabidopsis thaliana landsberg
tgtaaccacaagaaccattctcagtgtatgagtattttttttgagttgcaggcgatttaatttagagctaaagaaatctctggaaaatcaagaataaagacaaccatggatttcattgctactccttgttcttttgattatatgacacgtatgcataaaatgtaatttccttctttcctgtattatgtactttgactcaataatgtcaagaatcaataccaaattaactatttgagaagtaaatcttagttatatactatttctttgtttagtgtgaagaacaacaaaattgtaaagtgtgaaagaaggaaagttgaccatagtctttgactctttgatgctcaatcagtaatcattccaaaaagggtataatggtaattaactaatgatgatccgataaccatatattcccacacgcaagtttgttttgtaacgagaacgtaaaaagacgaagaagaagggatatggtagatccaacgatccataacacgacgacgtatctcaaagagatagcaaaaggaaacgggcaaaccaagttcgagattttaatcttgaaaggcttagaactcatccatgtcgggaaagggatcttacgttgtaaattacttgtcacagatcatgtcgtggtaataaaatttacttaatccaacgaatctagttttaatcttccttttttgtgtttttgattggtgaacgttattattactaaacaatgcgaaagatgattctcagggagaagatggaagttggaatgcgggagtgattacggcagtgatggactcgatcggagcgtcagctgtgtactccgccggaggcggacgccatatctct

SEQ ID NO: 51831 - DNA, 802 bp, Arabidopsis thaliana landsberg
cctacaacaacaaagctatagagcttttagctgcgatcttgcaataatgtctccacttctttcagagcttgttcaactgcatagatcaccatcttttttatctgttcacatggcaaagattaaaacaagattcaactacaaacaaaactgtatccattgacagaagttgctaatccaaaattgaaaatatcagaaaaagaatcacctcaagtttgtcttctctggctttatggttcttagggagttgtcgaaactcatcagtcaaacggagacactcatcgatgttttcaggggaaacaaaatcaacagctacctttgtgcacgactgtatcaaaatccataatacaagttaaagataatgagaaaaagtttagttaataggacagcttccattcaaataataaccttgagattccgaacttgatgaggacaacctgctggaataaacactgcttctcctagcttttgcacaaatgtccatggctcaatccctttagttcaaacaaacaaacacaaaaacgtaagaatacaatgtcggtaagtgacagttactacagttacaagtaaccataccaaattctgccttgagttttcttttatgctccacggttaagaaatatgactgatcatgtattggatgatacacctaacataaagaatcctatcagcacaataacctctaagactcggaactgaaaacgttgtgtggattatttcttacctttgtaacacgagagcaataagtatgtctgaattctatgcaatgcttccttagatactcttcaagcttaggaacatcttc

SEQ ID NO: 51832 - DNA, 591 bp, Arabidopsis thaliana landsberg
ttttttgaatgactgttctttgtaattgaaataagaatatgactaggctccgctgatcctagtctcaaacccgtgaactggtgactcttacagagacgcatgaaccatttgtcatggattatttgcagaaaaacagccgatatttatgccatattagattagatgttttagggtattgagtttgtaccacaaagattgatgcttacggtgttactctattattaaaatgtttgatagataagtcatagatttcatgatgtcatggttaactgttttatactactattggttcaaacttattaaaaaagtgattggcgaataattaaacaagaattgttttataatatatgtgaaaactagatcattaaacttttcggaacataggcagtattattataacggccgcaagctattgctttgcttgctgggccttttcaacggctatggagacattaattaatcttaatcattgaacacgctgttattcatattgtacttttatttgacgatgggaataagaaagtctctatgaggttaaatgaagaaaaagattgtaattgaatctatcggtttgataatacatcatcgctc

SEQ ID NO: 51833 - DNA, 689 bp, Arabidopsis thaliana landsberg
tttcatattccaactagaaatttagacaaatatcaattataaatgttttaaaatatggtctatacaaacagtatatacgatatatgtgtttatatgttagataagtcatactttatttttaatgctacatggtgtaattatataagcaaaacggacgtgtatatggtgtttaagcggttgtgtttacgatgatcattgtttctttacatttttaatgtcctaaagaaacatcattttttacttctttatgtgacttttgtttatcgtatagtagtagttttattgataatacaaaactggtgttacacacaaacggcgagtttgaggagtacaagaatcaaaagccaacaaaaaaaaaaatgatattttctaatcacaagccaagaaaacaatgataaatctccgagaaaaaaaaaaagtgaactatgaaaaaacatatcaaattttttaaaccaagcatctccagataatgaagcaatcacggagtgaaggaaatgtacatgtattactttacatggcatatatagttatgattatatctttgtacttgttgaagaggtatgaaacacaataaaaggtttttctttttctttttggatttgtggattgtgccactcacttgcaagctgatatttgggttaaagccctttacaaatagtgatggttggaaatcaaactttactgacaca

SEQ ID NO: 51834 - DNA, 550 bp, Arabidopsis thaliana landsberg
aacaatgaacaacatgccaatcgaaagcctttcttacttttgattttggtcacccactcaccaatcaattaggaatacggttttttccttcttggttatgagttttccatggtatttacaaaccaatgctataaattaattgtattttatgcgattaaattattttaaaacaaagagtacgatagtttttttttctctttttttggtaaaatttatgtcgaattaacaagaagatataaatatttattttcatatctgaactctgaagtgagagatattattttcccaaccaaaaaaaaaaaaaattgtattcccattttcttaatttggatctattgtagcgtctgacgttcagttgctttagtcaggcgcgtggatggtttagaagattatttgagagcaataagacttttacatcacataaagaagtcaaattggtttggtcatgacatgaccaatccaacggcaacacaaagcattagggtgatgatgaccaacggtcgagatctattccaaagtcactgtccatttgaactgatgaccaaacgaa

SEQ ID NO: 51835 - DNA, 1403 bp, Arabidopsis thaliana landsberg
acaagacatattttccaatattctccaaacttttgagaagaagaaaagcaagtttcaaacgtttcttaaatcgtgagaagaagaaaagcaagtttcaaacgtttcttaaatcgtaactcaatgtaagtatgtaacaaaattacacaaacaacttttctttggtatatacccaagtataaagtgtctaacaaattttactatccgtacttaaatttgtgattaaacatactttgttcatcaaagtttcttgtgcaaatctttttaagttgttaaagtgttgaaatggacttgacgtagtaaaactggtatatgcgtatagccaaaggatttttttacttttattatacgtgtcaattagtaaacaatgcaacacgagtatcaaaaagagagatattgtgtgcataagaaggtgcgttcagatgttgaagctagtactatgttgggtataagaaattaaattacagcttagaatctaagcctttgatgttttaaaaaaagaattgttaacttctcttcttttttgtacgagagagtaattttatataaggaaaaatatggtaaaatgggattagaagaagtggtaaggtcacatggaaacatgtgtaagctgagtaggacatggtcaggtcggctggtgggtcttaatttttaacgcaaagccccaccattttcacttcatttatgtaccctaataaataattcacgtaatccttttgaagttctgttttggaaccaatgatttggaatttatgaaaagaatcgagttcaacgaaacatgtaagagtatttttgtggattttctctgtaataccgttttctttttttttttgtcacatcatccatatgtttatttgtgaaatttcgataaacgattagatagtggctgtatatgattttattataagagacttccgcaatgttgcaaggaaaagtattctaaaaaaaaaaagtagtactctaaatactttctgatataacttaagacttttgttaaaaatttcaaactcaaaatgatgcgtatcattaattctatagttttaagaagagaaaatataggatatatttaagaagacaaaaatgtttacatacacaaatgtgattgtgaaagtcacatcttactcaaaaagtgattgaacctactctgagatctaaatgtgtggcgaaaaaggacacgaatctatattaatagatgcaacttttttaaaaggggattgactaaaaggcactaaataaaactctccttttgacgggcgatgtctcaagggaaatcttgaatgtgactcaaagcgaagagatgaaacagctcgaacagatttggtttgagaatcaaaattgtcctcatacagacaacattggtggggccaccgtctcaaccttaatagcttatggggtctggttttaat

SEQ ID NO: 51836 - DNA, 429 bp, Arabidopsis thaliana landsberg
tttagagactttaagcttttttcacaaaaagtactaacactagatcgttaagctttacttgttacataacttcttgacttcaattgttattggcagttcatccccaggctagatttttatctagacgattgacgattttacaatgttatgttagtaattttaatgaaatgaaatggaatttcttggagacttggtgatcaagaaggataggaagttttattgaactataaagttttgtgagttttagtgaacaagaatattaagaagaataaaaatttcgagatttagaagaatatagaaatacatgacttttctatgtaagtgaaaataaaattgtttggaattaagaaaacattatttgttatgaagatgttcaagattacattgtgaatttgtgattggttatatagtgaagtaggtaagttgagt

SEQ ID NO: 51837 - DNA, 3053 bp, Arabidopsis thaliana landsberg
cctcttctgttatcttcgttgatggtgtacagtctcatcctcctgcccataatttcaggtaacatgttttttttttttttttttcggatttgaaatcctcttaagaaatttgagatttcgtatgtgcaatttccatgataaattatatattattgaccatcaatttcgttacaatatttctattttctttacatatgaatcaaataggaaaaagcccagtcagctgtgatggcgcatgcactagcacaccacaatgcaataaaatatgcacatcaaagggttacaaaaaaggaatttgtcacgggagcgctcatttattttacatatgttgttgctacgccaaatttgaatctcaatatgatccttccatttctagtccccctaattactaattaactcctaaatctatatgtactctcctttatatgaataaaacacaaatatgagatatttacattatgtcatcaaaaatttatgttgatcgcattgtttaagggttacaaaaaacgaatgcaattaaatatgcaaatttcagggttacaaaaaacgaatttgtaaagggaccctcatttactttacatatgttgctgcttcgccaaatttgtaaagaccatctgagactgagaatcgaagacctcaaccttaaatcatttgccattccccaacactataactttgagtcatatatatagttagttctcaaattcttgtaatagaagtcgattagcgtgttgtgtctggtgaattctaggtcacacatcatgttttgtaaatttggctccccgagtcaatttttcgacttggaggctcaaaaaccttgctaagaagacgtaatatgaaatgaaaacaacaaaaaagtgcacaaaaataagtaaagacaaaagaataaaaaccaactaaatatgaacacatcgatattataaatttaaacaccaactattgattaacatgctctaaaaacatttcgaatcaataaaagttaaaaataaccaatgaaaattcactcataatttcaaaactgaatttttgtcagtattcatattcttcctcaaatcacactattcgatttcatgaattttaactaaccaaacacaccaaattacgttctacaagctttgaataattaacaattaccattaatggcaagaaattaaattatatgtaggaaattttatactaacgacttagattgtgatacatggttatcatcaaagtcggccctgagtaataatggattaagcacaaacaaagaagcctctcgcatccacaccaagcgtggtaggtcactcaagctgttcaacataattggccgctgaaagagatattatatcgaggagacctttcggtgaatgactgacctcccacgacaatattactggagaggtctactaaagctcgacaacatatgcgcaaatagttagcatccgtcttttgtctaactggaggtttaacatctcaaataacctcgatcatatatcgacaatctccattttttatgctagcaatttccaacaatcttagaaaataaccacaagataattagtataatcttgcaaaaaacaattaatgattaagaatcatgcactaaaaacattactcaaaaaagataatgctaggcctgcaaaagtaattcaatagctttagtcaaaaaaggataaaaatatccaatcatataaaacacaagtatagctagtggtgtaacctacaaatgatagctcaccaacaactttatatccatccaactaaaatatttcaggtttggtttgtcatcaccatttggtggcttgtgcctcgacatgattcgctgctttctcataaaaattattgtctacccttttattatttcacaaaaatatgaaataattgacaacaattaaatacaaaactaaaaaagtaaaaaaaaacaaaacaaaactgtttgttcactttattccttcacggtctccatacgccaaatctctgtttctcattcgacaaaaaaacctctaatctcatgtctatgtcttgtctttagatactatcttactctctcttcgagaacttatgtctttagaacggtcggagttcgtcgacggtgttgcggcacggagtctcagtgagatctcagaagttgacgccgtgagaattggaggtgatattatatcttcagcgagacgtctcatcgcacttttaaggtccgtaggagattgtcaatggcttcatcatccacccgttattgctgaagctattagaaggtgagaaaaaaaaaacttcacctttactctttctcctgagtttttgatcggacggttatgattcatttggtctctttctcactgttttagttatcttctggtccccaaagtttggatttttattggttttgtatctgaaagatttgatttttatgatcatgtaattaaatgtgagtgttgttgtttgtgtgaaggtatgatgagctatggatgccgttgatttctgatctaacggttggtttaaagccaccgatgattttgcctcctcttgatgttgaatgggtttggttttgtcactgtttgaatccagtaagctctgattacttctctttcactacaaagattctgttttgatttggtataatagtttggtttatctttgttaggtgagttatagtgattactgtgaaaggagattctcaaaacttatagggaagcctgcgatttacgacgaagagaacgaggattacgcggttttacaatgcgaaaagatctggagtttacgatatcctttagagagttttgagaacagagctgatcctgattcacttgagactgtttctttagttaatgaagatattaaaagtctagtgaagaagcagatgtttctttgggagaagttttcagctccttacatgtctgaaaccgtttacttgatcgctgctcggttacgttacaaagggttattgttgatactacacaagtttaaggatgaggtttctagtcttattccagcttctgatatacttattatgtggcttacgcatcagagctacccgacagtatataaagatgatgatgatgaaatgatggaggaaa

SEQ ID NO: 51838 - DNA, 1073 bp, Arabidopsis thaliana landsberg
gtcctctatgacataaaaatacaaacgcaatactatattgactacagtatattccatcaattctctgtttagggtacatattcatttgataccatttgcagtcttccagtcaatttatttttgtcatttgatgtattatttattttcaaccatttaagcatggatttgaaactttaaccttaagcatacatacatgtgagattgttactgaatcgaacttgaagggatgtgatagaagcatgtatgatcttaagactgatgaccaatttaaaatcaaaaatttctgttttttgtatagaaagattttccactcatccgatccacacgaccacacccattacattttagtgtatttctgttctctcattaccatttttatacaaatctcgaaaaaagataaaaacaaagaaaaaagtttgcaacgaagaaatctcaaagtaaatgagaggataataacatggggagtgcattaaatatggatgcagttgtatgtaatgtaaaagaggtagactgtataaatataaataatgcaaccataataatggagctacgtctagtcttttctcataaaccacatgccaatgctttttcttctgtgctttcaacgtctcacctatgcatctatgtattatagatatcatccaatgaggaaatatgttttaattacacttctaataatatacccctcttagaccccatatgataatgtccgtacgtgcaactcttttggctacgtgtatgatggcgaggacactaatcttcttttgcgagactgattcatcattatccatagaagtttttaatacgtattatggagtgatgagtgtgagatcttaataggttttgaactctgtgtaaccatgcatataatctgcagcatgcaagtaaagaatacatcaactaataaatattgtagccgagcagaataatttttttttttttgtatttttttatccgagcagaataatttagtctgccatgatttaggttcgaaagcattatggactaaaattctaagattcttgattaaaggaagatagagcatggtcaatcaaatgtccaaattggtcata

SEQ ID NO: 51839 - DNA, 616 bp, Arabidopsis thaliana landsberg
tgaaatatgcatgatgttaacgttgtaacacatatcaataaatagatcaaatgcacttttttagttatgtcaaaatagattccgaagattaatcgatcctaaaaaataccttcgataccaacaattcatgagacatggttttgaacatgctccccattcaatgagtcatttgtatgtcttcgtcagcagcgtggatctatcatctatgtcctagtcaattttttttttttttaagtatagcatccttcatcagcaaatctaagaaatcactctactcttgaaaccaactacttttatttatgtaactctaatttgattgcgcagcataatcgagttatccctaacttgtgaattcagagtattttgctagcggcacttatcattcaaattttatgtccttatactcgtaggaaatattattaatctactaataggttatatattatttggctatttgcaacatcaaatacaatgtggatgaaaatgaaattggctcaattgtaaacttagaagaccaaaatggtaaactatagttggttaaccaagttccccaatcccctatggtttttcttttttctttgaaaacgaaaaactatggttaacaaacttaacaact

SEQ ID NO: 51840 - DNA, 982 bp, Arabidopsis thaliana landsberg
agcactataatcataaataaaaaaatgagttaaaaaataaatttaattgagaatccctttcatcgagtaagaggtttcaattaagaagtccaagtcaaaaccttctgatccacctagaaggtcttaaaagccaccgtcaaaaatctacaaggccaacacgtttgccgttaaaaattaatttctaatttcttcttcttcttcttcgtacgttaattaaaatctgaagaaagaaacaaaatcgtgaaatcgatctctttaagcatcatctagggttcatcactgaaataaaaaatgcaattaaatctctacaaaatctctcagatctaatcccagatcgttgttggtttcttctccgtaaaccaatcccacatatgaattaaagattcgatctcgaaatcgttggcttttgttgttgttgcattcttcggtgatggctccgactcggattctaaccagagatgaagagcttggtgttatatcagacgatgatgattcaccatcgggtaaaagatctaaacttgatcgcttccctcttagccgttgggaactcgccgtttctctcggtgtattcctcgtcttctcctctggactctgttgtatctacatgaccatgcctgctgctgaatttggcaaactcaaacttccaagaagcctcgctgatcttcgtttgctcaagtaactttctttctaatgttacgactcaatttttgtagccaattaggagaatttactgattagtgttggtgtcatgattggaattgacaaatctgtaatctttgttgttgttgttgttgttgtttcagagataatctagcaaactatgcgaatgagtatccggcgcagtttgttttagggtattgtgcaacgtacatttttatgcagacctttatgattccagggactatcttcatgtcactattagctggagctctctttggagtattcaaaggtgttgtcttggttgttttcaatgcaacagcgg

SEQ ID NO: 51841 - DNA, 1687 bp, Arabidopsis thaliana landsberg
  unsure (1)..(1687): unsure at all n locations
cgttcataaatagtccaaatttcgcaaatgcaaaaccaaacaaaaaaatatgcaatcaagaatggccttaactactataatccttttcctctcattcagcatcattccattactcaccatcgctagagcagataaccattccgtttactgccttccaccaccaccttgtatttgtatttgtcatccgggaccacctccgccgcaacccgatccccaaccgccaactccaccaacatttcaaccagcaccgccagccaatgaccaaccaccgcctccaccacagagcacatcaccacctccagtagcgaccacaccaccagcacttcctccaaaacccttaccgccaccgttgtctcctccgcaaaccacaccacctcctccaccagctattacaccaccacctccaccagctattacacctccactatcacctcctccaccagctattacaccaacacctccactagcgaccacaccaccggcacttcctccaaaacccttaccgccaccgttgtctcctccacaaaccacgccacctcctccaccagcaatcacaccaccactatcacctcctctggttggaatatgttccaagaatgataccgaactaaagatatgtgccggaattctagcaattagtgacggtcttctaaccactggaagagcagaaccatgttgttccatcatccgaaatgtgtctgatcttgatgcagttacttgtttctgtaaatcggtaggagcaccacgtttttccctctctcccaatttcggcatcttctttaaagtttgtggtcgtaggattccacaaggctttagctgtcccggaccatcaccaacaatctcaccaccaccacttcctccacaaactttacaaccgcctccgccacaaacaacaccacctcctccaccagctattacaccaccactatcacctcctctagttggcatatgctccaagaatgataccgaactaaagatatgtgccggaattctagcaattagtgacggccttctaaccactggtagggcagagccatgttggtccatcgtacgtaatgtgtctgatcttgatgcagttacttgtttttgtaagtcggtaggagcaagacgtttttccctctctcccaattttggcatcttcttttaaggtttgtggtcgcaggattccacaaggctttagctgcccatgatgaccattttcttgcaccacacacattctcctcattctctctagtcttaaatatacaaagacagccttgtgattttttttgggttccaacaatgtaataaattaccaatgaaattatattgtacctttgtaacctttgcatgctctatactagaccgtaacccaacatcaagaaccgccgtaaatcagaaatccgataggacaatgactcatgataagcaaatgaaattaattattttacatcataaactaatacagtctatgtaaatactagatggaagtttgtaacacgtcataaatgtataaatatatgaataaaatgaatgagtatatatctttcttataccgataagatttttgatcaaaataaattttttaatagtttaatacanacaaagaagatgtatanaattaccagttaaatccatttaacaaaaaactcattttagtattgaactatatactagttccaacatatgcctatcgccagctaattcc

SEQ ID NO: 51842 - DNA, 625 bp, Arabidopsis thaliana landsberg
  unsure (1)..(625): unsure at all n locations
tcttgattcgcggaattcattacgaagcaagatttcatttcatttccatttacgtcattagcaaaacaagcaagattcacctcaggatacgacgaattctggaacacttccttgattgatatatgcattttctagagcaggcaccattgactgcttcttcaacgtctatactatacgagacgagacgagttattgtacgagtcaagcttgctccagaccaagctcactttacacgggcttagaactcaacctgacccaacaagaaaacggatagacgcagcgcaacggcttgatagcctgactcagcaagaggcgaggatgcacgtgactaactaaaacagctttcgcgctatcaacttctttgatcgaacctggcctggcgattgaagcattcgagatatagaagaaactgcccaagtcaaccggatattccaaagcaagggttatgaatcaaaagagaagtgccagctggatctctggttcaaagttcagggcatggaattgattcgtatgctcgttctctcgctgagcagaaccatctctgtctgagaagacccagtctcccagtgtttctagaaaaggaaatcccattngtcaacctaaatggaagggcaggtaagggaag

SEQ ID NO: 51843 - DNA, 947 bp, Arabidopsis thaliana landsberg
agattcctctaggccattgttctccttgggggcaactccaaaatcagccaacaaagcttcaagctcagcaagttccttctttttcctctctatcttggagagttgcctgtctgcctctttaggaggtgcaagaactttaggagctatcttcacctcaggctctggatgaacctgtacctctgtttactgttcctgctattcctccacatcatcatcaccttcagcgagaatatctctcttactttcactctcctgacaatcacaccaagataattccatcagcaaccaagataatcacacgcaatctggacaagaactaacgcttacacaagtcaacctacacaaccatgtgctaccacaacataggtaacacacaaatgaaaaatattcaggaaggataaagcaacatgagcaacaataacaaatcctcttctctcagacaatagacaccacacacaaacaatttttgtaataactaactagagccataagcataagataaattaacattagaacagaaaccagctctcagaattcccaatcacaaagagaatcgttaaccaatagacacagaaccatcatatccattctcaaccaatttaggaatcgcaacaaaatcataaaatgtttagacttctgacctcaacatgaacgtctttggaatcagtatgggaaggcagagaagtactccaaccagactgaggaggagcagtggttgcataatagtcatcatcgtcgtcttcatcatcaatatcagcccaagacttaactttcaaaggcgtaggagcccaatagacctgaggctcaggctccttctctggctctcgtgacttagaagaccctttgctcttccctgccttgtcagacttcttcttcgtgttacgagtgtccaatgctggaaacaaattagtgctctggatcgtgaacgatccttcatctattctgtt

SEQ ID NO: 51844 - DNA, 1044 bp, Arabidopsis thaliana landsberg
cacaagagtattttcaaggctgcttgcttagtaacaccaaagagtagtatatcctacccacaggtgaatcaaatctgtctttttctaagcttgttctttctggtttgtatatatggactgacggttaaacgatgtctcacaggtgtggaaaggtgtaggctcaaggaaatggaaactcggaccaaatgatggaatctttgttcagtttgaatctccctctcttcggaaagtttggttcatatctagctcgaaagaaaagggacaaactttgtgcaggttctttctctaaaccacttattatgtttagttttgcaatgtgctttaagaatttgatgaagtacccttgacttcacacaagctgttgaattttcttgggtgtattaaagaatcaaacttttgcatctaactcaagattaaaagagttggagttttgatttcagggaaccgcaagctctggatatcggcgcacatgagattctccctcgcattttcaaggagaaatcgaaaagctcgtagggcattgttttgttgcagtatgattctctatatccagtttttgatcaagactaaaaagataaaaaagagttcttgcgagtgtgtgctacttagaaaatccacctttttgttgtttcttatctaatgatcaaacaaaactttgaacttttgagtcaaaaggctatcttcgaatcaaaatctttactcgaccgggctaggttcaacataggtctgagtaggtcttaaatcggacggtgttgcctccaaatctgtacatgccatcaacaaatctgggcctctttgtaatgggccaatttctataacgagctaagcctgttaacaagtttcttcgaacttctctctcttgtatttgtttgaaggaaatgcccaatgagacaaacactaattttgatttactccataaaggttttacataagcatatatggtaaattggtaataaaaaaaaataagagagccacatcatcctaattttacaaaacgcccctacagctgtgtaataaaaaaaacaggcggggacttcaggagag

SEQ ID NO: 51845 - DNA, 518 bp, Arabidopsis thaliana landsberg
aatgtaatcaatttaagaagatgcatatcgactaaatatctaaatatggaatctaacaatattttataattgattgataattttaattcttccaccaattatggtatttgctaactaaattaataataccgtataataatttacatgaacagttttatcccacacatagtgcgggttgttatctagtttgtgacagatataggttaaaggtttttgaattcgcatgtcatgaagattaatgactactaggccttcccattgttgcaaatgagaaaaagtttaattgatactttatcctgaatagaactcacaactcctaggaatttcttgaagaagaggaagcgttcgatctcatatgatgatgaactgacatttgccttatgccacatggcacttagaagagagattttaagagctttggggagagtgctgatgtggcttctcttaagactagctataatggtttggggtaaactatataacaactggtgaaaataatatatccactacaatgatgt

SEQ ID NO: 51846 - DNA, 1110 bp, Arabidopsis thaliana landsberg
tcctgataattctccggtggagtaattaatatgaatcagcaattcttataagttaatatgcacggattaatacaaaatagatttatgaaaagtttattatcacttctatcaaaatcaattttcttgtttttcttttaacttgaaattcgcaatcctataccatatatattaaaatgatgattaatttgtttaatattcgtctgtgttagaaagtaaatatttctgataactgtttgtaagttcggagtttctttaatcgtaaatttttgtattttacacttttatatacttgtggaattttgaatcattcgttgccaaatgatcatgttcttattcgtgattgacttactcggatgggtacgattttaatatatatatggtagttggtacttgtataaaggatatggtaaatggttttttgagctcattcatataaaatcaatcatttaaaaaaccaaatacatgtttcgactccgtggactaatttatgaaacttgatttggaaactaagtcgaaacgacatgaatatttttttttttttgttacggaattattgtcacatctttaatttcataatttctaatggaaaatgtgtatatgtaataatgttggtgacgaagatatcacaagaagtagaggaagagacagaggtagtgaatataccgaggagtgtggtgtcggggaacgttgcagcgcgaaagggtaagcagcaaacgagttccgggaagggtggaggtaccaactaggcaccttcctaattttagcttccacaagtcttcgtttcaacaaaaagtcaacttcaacattaagttaataatattgttaacatttacaacttctcaagcttatgtatattgttataagtatattatattttatgtgaattatgtgattattgactgtttgtaagctctttgagtcatttcatgtatgaataaaagataaaagcaaattcccttttatgatatatgaaaaagttgtaaaagaaaaaataattaaataaggatgaataaaaagtttgggattgtgactgtaaataatagtgctggctagttaagattgtgattcagaactacagatcttggccaaggtgaataaaaagtttcgcaa

SEQ ID NO: 51847 - DNA, 614 bp, Arabidopsis thaliana landsberg
  unsure (1)..(614): unsure at all n locations
nnnnnnnnnnnnnnnnnnnnnnnnnnnnnnnnnnnnnnnnnnnnnnnnnnnnnnnnnnnnnnnnnnnnnnnnnnnnnnnnnnnnnnnnnnnnnnnnnnnnnnnnnnnnnnnnnnnnnnnnnnnnnnnnnnnnnnnnnnnnnnnnnnnnnnnnnnnnnnnnnnnnnnnnnnnnnnnnnnnnnnnnnnnnnnnnnnnnnnnnnnnnnnnnnnnnnnnnnnnnnnnnnnnnnnnnnnnnnnnnnnnnnnnnnnnnnnnnnnnnnnnnnnnnnnnnnnnnnnnnnnnnnnnnnnnnnnnnnnnnnnnnnnnnnnnnnnnnnnnnnnnnnnnnnnnnnnnnnnnnnnnnnnnnnnnnnnnnnnnnnnnnnnnnnnnnnnnnnnnnnnnnnnnnnnnnnnnnnnnnnnnnnnnnnnnnnnnnnnnnnnnnnnnnnnnnnnnnnnnnnnnnnnnnnnnnnnnnnnnnnnntacaaattcaggattgtattatacagtctcttgtatttagaaaacataagtacatactaacacagcggtacgacgtgcgcaacggctttcaagagaagataattcacgagcataaacctggggtaatatatagatcacgctccaaagaaga

SEQ ID NO: 51848 - DNA, 1070 bp, Arabidopsis thaliana landsberg
ctataacagaggggaagggtcttttaataaagaacatagtgacccggtgcttaaaagatttattatggaattactcagccatttcatatacgatagagattagtctcgatttctgtttaatctctcagttttgggtttttaagaactctttaactcgttagatttggtaacaatacaagtatacgctcaaaatttcaaaaaaaaatgagaatttttgcttctgaagccattaatggaggagcacgagaatctcacagtatcgtttttgctctttttattgctaatcgttaatgctccttttagactttttagtcacagatttctgagcttataattattactagctagctatagttgctggttagtctaatctgaaatttacttcaatattgattaccatatttacttttggtagttgggtcatatatttatagcacccattgattattctttcaacatttatttgaatgcgtgtatttgtagtcataaatattatatacgagtcttgttggatgaacttgaagttatgtattttagttatgggattttgtgatgaaaaaccattgtttctaaaagagaaccgaaccacccggtcatatcgctctaactctgattttaaagaatatataggttggttccattctaatcacacaatttgtttagccaacacacgaacaccggtgtaaatactaaatagtgtcgatcagtgattacacacataaaaaaaagaagagtttctattttgagtgtaagttttttggattttgtagtggtaccaagtaccaattggtaccacccatccgatggtccaagcgtggcttttgaaaaaataaaacagcaactttgttaattttgtacgttaacaaaaaaaaaagtttgataagttttgtacgttaagtagactaaaaacaaatttaagcaaattattttgttgaagcggaatgaaaataaatacatcttgtagtttgcatgcaaataaaaaactactctatagcatgtttcagtctcgtattacctacagaaaacaaacacagtagatgaaaaaacaaaaattatcattagacgatcat

SEQ ID NO: 51849 - DNA, 893 bp, Arabidopsis thaliana landsberg
caaataacattctcttgaacaatatcttccttttaaatattaatgtaaaactttttttttttaataccaatattaatgtaaaacttatgtaaaccaaaaccttctacatcgtcgttagcaaccggtttaacaatttttatgagttgctttctttttttaattatcactttaggtaactctccttttcagttgcttttaaaccttgtactgttctcccacttctccttgcttatatattgatcaaaagctcttgaaatgtaggaaaaatacggttcatataaaacttccttaatcaatcttagaagaaaaatcggaaaacttttttgatcagaagtttcgttcgatatatgtcttgagctctagggtatagtttcaaagattctaacatgagatatggtcgaagtcaaagtcaaaagaccttgagactcaacacgtcaaatcacgaagcttataatagtatgtccgatcaagaaaagatacaatgctcgatcaattgattttaatattttatattgtaaaaaattatataaaaaaaaacacattcctctctataaaaattttgtagtagattaaccattatcaaaaataatagtagcataattaaaaagcttaaatatttccccaacatcaagaaaaccaaggttgctaatatattttttttgtcacaatttttttaaaaatagtggttcatgtcaatgtcatttgctatccacttttctactaaaaccaaaacttggatacaaaaaataagatggaaaaagggaggaaaaaacaaaaagcacacgagccagaaaaagtcacacgtgtgaaagtgaaacataatgaacgcagtacaaaacacaactaccactagtttcggtttggtcaaagaactgtaaatactcaaacaaact

SEQ ID NO: 51850 - DNA, 1309 bp, Arabidopsis thaliana landsberg
  unsure (1)..(1309): unsure at all n locations
ctcacccaaagaaaacaatcaaaataaggtctccaaaatacactctttgttttttgttttttttgtttctcttttctatttgagttgatagaaaacatatctcagatttgagatgctaaatctatcaaaccgccaccaaagcaatatcttggtctagataaggctattactttaggttaactgctaccaccatttcttctcttcttctctccatttgcaacaccagttgttgctttatccgaatccgacaatttctttgttttcccaagagaagtagaagatgaaagcctcttctttggcaataccatctgtggaggtttcttcttatcagcaacaacctctttctttggcaaacttgttgttccgacattaaccttagatttcacagcttccgcgttagccaagtttcctgttgttcccacactagacttagatttcaaagttttcgtgttatccaagtttctttttgtccccacattagccttgggtttcacagtttgtgcattactcacgttgcttgttgtttccacactaaccttggatttcacagtttgtgtattatccaacgaatttctgcgcgaggatgagctaccaacgctttcatcatctttagcgttttcagatgatccaccaccgatactgtgcctgcgattagtaacctcgatctttttactctttgtatcattgtttacaggccattgaatagaactttggctagctgactttagtgttttagatctggcaggagaactcttgatcgagttttcgcgtttaagagaacttttaacggaaacttgatcgtcaatggattcagcatcccacggacgagaagccatccacctctcaagccaactccaaccccaatctgttgtgtttgtgtccatcaaagtctgatgtggaagttttaaagagtttctccatgtttgctgttttattttccaacatcaatatataaacaactatgactaagttcacaatgatgttgtctttaatttatatttacctgatgactgtaagcatacgccaatgccctttctcgtcttactgaagcttcttttcgattcaccgaccttgccacgatctgttcctttgatttattgctggaatcaaaatttcccgcggtaacctacaacaaaatatgctccagttcagaattttggttcacccagtgtggtaaaatgtagggagattttaccacataacaatgggatgactctctntaattttgtcatatttttagatgaacggttgcatatattgtaaacatggttgaataaattttacattcattcacaaaaaatgtaacgag

SEQ ID NO: 51851 - DNA, 599 bp, Arabidopsis thaliana landsberg
atctttctgttctgttctttttttctctattcagaatttctcttttttaaaaatattcttcataaacttatcattcattgggagttctaatagtgtatgaattaaggccccctgactaaatttcgatattcgacaatatttatcaacgtaacgacaatagcttaactagcaaaacctccctataaaactagaatctctaccatatagtatataaaacggagtatatatatattaaaaataatttctaatagtaaatgtgaaccaaacgtgcatgataatcgatacatgtatctggaatggagagccaccatataatgccagctttgggatcaattgattgcaatcattctctctcggatataattgcgggtatatggctctttctagatttcatggaagtttcgctaaaaacagcttatatactttttgtgacgcttctaaaaaaagactttaataacatgttgaaagtttatgcttttttttaaacaatttgggctttcattttagaaacacagcattgcaaatacatataacatatagttatttctgatacattcttaaaaaaaaaatccaaaaactattgcagagctgcatattta

SEQ ID NO: 51852 - DNA, 748 bp, Arabidopsis thaliana landsberg
tagtacaaaaaaactttattttatatgagattcggagtgtttaagaacgggtcatttgcacttaacgttttcttaaatatgtagttgcaaacatttcaaataatatcgaccgtatagttgaaatgcatttaaataacaaaaatattgttaactattgaattgttccccacttcaaatcattggtgttcatgtcatccaacgagatttgatcaaagtgtcaatagtctgttttacaatacggatagggaaatcaatttatgtgggtctccaactctgaacaaaacaaacattacaagtggatagtaaagtattagattttatatgaccaatatagtttagatatttatgttgattgttttgaagattagagacgaatactaaactagttaataattaagccaagtagaagatgatacatattaataaatctttgatcatacgtaataaacaaataatatgagtaccatccagatatctagatattcgattatcgtatctactatgtaagtcagtctccaagtgcatatctagtcacgcttttcaaaattttctctttattgcaagttgattatatataaactataataacatacgatattagatgatctttcctcttctcttattctattcaacaagattaactattcatttccgtacatgtatataattttttttctttgaatgttgaaatcagccctcaaggaaacgtccatcttttgaacatgcaaagaggactacattaggagct

SEQ ID NO: 51853 - DNA, 1136 bp, Arabidopsis thaliana landsberg
agcctctcccatttccgtcccttggaatgccaatcaaaatttctcccaaggtgtcatagaatagagtcattagtatgttgtagctacctgtatgtatgcaatattcagagtcctagacttgtattgactagaaaagaaacaaatgagaccgaatgatttcataacattttccctgtaactagcacaagtaccatgtgtatgtataaatcatagtgaaaagaagtactaggtgttgttgtcttgtctgacgtgttttctcttataaccctgtttataaagttgctcatgtcttgtttccacatcgaaccaactagtcaaaaacttacggtgtgaacgtttcttcgtttggtccatcagccattctatttttctctcaactactcttcaatgtttccatcataggatttactttttctcttcgttatctttcttgtttggttttagtctgtctttggtattgcaatcgacattgcaactaatatatgaagcaatcttctagatatattgagtccatgaactgagacctctttaaaccggcaaaagatccataccgtagcagatcgaagtagaacaaaagatagagaaagcggacacataccagaacagggatggaaaaggtaggtgaagatgaggagaagaccattgaagaagcaaacaactcaactgaggagacgaggagtgataaagaggaggaaaggataaaaggtactattgctgatcaggttgatccagtagattccactgaagaaggttctacgggtccatccaactcacacactgtagtctccaaagatcatgattttagtgaatctgatatggaggacgaagagcaggttctcgagtttttcagacgtaatcacggtttttcacctgaggtcaccaagagaaacaacttcccatatgttaacaactctgaaaggatggtacttcagttccaagaagacacttctgcagaaacagaacaaacaaatgaaatgttccacagtttgaatgatagcaacgagattcttgaaggaaccaagtcatcatcagcttcagatgaggataccgaggcctcccctagtaactcagaccttgattccagcctatccaaatattattttgacggatccttaccggtttcagctcatgtcgga

SEQ ID NO: 51854 - DNA, 250 bp, Arabidopsis thaliana landsberg
ttaccttgaaaaaccggtgtcttcactccaatcaacaggtctattttagcactaaaattcttatcgttgtcttaccttttctttcgttgctctgttacatactgagataagccaaaattctcatgcttttccagatgaagcattgaagagccttgccaatgaatctccaaaccctgaggaaggtataagacacgtttctctaactcttgtggcttttttattcttccctccatatcttttgtccattcat

SEQ ID NO: 51855 - DNA, 1140 bp, Arabidopsis thaliana landsberg
tttaacagcaagcactggaggcaatggaagatctgcaacaataatctcttatgaaatagaaaataggagaaacacaatgatcttgaggtataatgtaggaggaaaaagggttaccatcatcaggcaaagtgtccctcatccactcttcgtccacaatgtctataagcataccaagacttacttccgccatattcgaaaaactggagcttggaaatcccacaaattactgatgaaatcatccaataagtaaacatatatacaaatatcagacaaatggtgaagaaatttggattgttgaagtaaaaagtcaatttctttacaatagcaaaacattgaacagaattgggacttctgatatccaaaattttgaattttgagaaagtgacagtatataacagacagaataaagctcaataacctatatatgaatatctaaaacaatctacaggtagtttcgccggagattatgaaaaagagagtagggattcattgagaaattacgtcgagcagttggtgaactatctagtaaagagaccaaatacgaaatcgtaccacaactcaaagccgactctttataaacagatatgattctctaaggaaaaaaacctaatttgaatcgaattagcaagagattcacctggtagaaacaatgcagccgtactccacacagagaactaaaaacctctagcttataaaaaaagctgattttttttctctttggttataaatatacagtaaccttctggtttacctagagtattcaaaaggctgatgaaatttaagttagggtatctctttatacggttcagagcttaagccggccactacagcgaccgacttctctcgccgtcgattaccggatcgtctccgttattgcgtgcttcatttaggtgctttcttcttcttcttctccagtttcagattttcctgttcttgcatttcacctttgagaaattgtgatataaaagttgtttactttacttcaatccagtaaagtaatttggtgattatcgtttcctctaccgcgatcactgtgtaattgatgatgagggttttatacgttcagtacaaatttgagagcttttatgttgacttcaatttgtaaccagtgtatcaattctgggattttaattttcatca

SEQ ID NO: 51856 - DNA, 540 bp, Arabidopsis thaliana landsberg
  unsure (1)..(540): unsure at all n locations
tattttttttgttttcaagctttctgcccctgccatattgtttctttggttgtatagtttttatgtttagcatgtcaaattatgagctgccttgaatactacatatgtgctagatataaatgctagcattggtaaattatttgggcaaatatgtttttttcgtattttttttttgaattacaatggcctgtgtcatctacttagtttgtgtatagggagagttctctttacatgtctttttttattccaggccatagttcgaaagggcgcccaatttctagttcgggtaaagaggtgtcgcaaggtgaacaagtgaagagcctaacaactggtataatatatttcatcattacaacgtaggttgatagcagcaactattgttcgatacgtattgcctgacctagtaatgggaaatatcttgtgtgctaggaaatggtgaattaatttcacaatccaataatcaacctgttgatatcatgaagacagagcagcatgacacactggaggtgctccnnnnnnnnnnnnnnnnnnnccaaatga

SEQ ID NO: 51857 - DNA, 826 bp, Arabidopsis thaliana landsberg
ttgtgttaccatacattttctatggtagccaacatatttatagcacttttaccaaaaccaaaaaaaaaaagcaaatttgatagcaattaaacagaaaattaccaaagatatctctacctaataaattgttccacaatttttattctctttctttcttacaataattaaagacctcataataaaaataagatttttgaaaacatggaacgcggtgattttgatctgtcacaaccatatgcatgaaaaacgcttaaacgagttaatacggtcacctactactactcctccaccgtcaagtactgaaaaagacaacaaaaggccactttttacaccttttaatataaaccgttttggtacaatttggtaagcaagtctctcatttaacatctcaccggtctggttcggtccggtccggtccaaacatttgatagcaaatggtcgtgggtcaaattgtttaaggacgaaaattaaagtagataataaacccaccggttcaattggttaaacttaaccaagtggctaagacatgactttgctgcctccaatatagtacgagaatcaatcgtctcttaaccatacggtccggtttgatagttgacttgtgtctcaagaaatatcccacgttgtgttttctcgtaacttttcgtatacgtaacctatcttgaccggttagttagccgacaatggtcttatcagttgacattttcattcccatttctatacttgatttctctgctttttcaacctttgtatacggatcttgattcaatatattaaacaggtatagtgtttcaaatttgacaaaaactatatgtcttacacagga

SEQ ID NO: 51858 - DNA, 424 bp, Arabidopsis thaliana landsberg
aatgacaaaagcgaagaagttgatcagaatgatttgggagcagaaggtgttagcaaggttgatgtcaaaacaaagaagagcaagaagaaaaaaaattctttagatcataaaactgatgatatggaggggaaggatgatgtttcattacctaggaaagatgaagaaccagaatttgacagggaaaagcttgaaacgtcattgtcaagttctgtcttaatacaaaatgataacgtagctcaaggagttatttcatcagaaactggagatgtacctagatgcacatgtaaagctcaacgtaccagaaagttggttatatttgatttaaatggaatccttgcagatattgttcagggttttacaggtacatttcttccaaatggtaaagcatcattacagatcacgaattaaagaatcattttcaacg

SEQ ID NO: 51859 - DNA, 464 bp, Arabidopsis thaliana landsberg
aacccaaaatgcattgtctttgactcttcttaggtaggtgtcttatacatatacgaagtttaattcctcaattaactctgtctctcctttttctcttactagtgggttggattatatgatcaacattgtcatgaaaaaccatgcgaggaatctgttgttctgttttgtaagtgatccctgcaacctctatgagctattttcttgactttgagagtagattatgagaaatgcagttcctatatgagcaggactgtattatgagaaatgcagttgagattgagattgtagaaacacagtctacaatctttgtgaactttgcatttctttgactatgagatatgtagcttacgtatgagcagaactcattctaatagttggtccaaaaaccagctagctaatgaatcttatggacacaggatcagaatatatgcactacaacgaagtttaaaactcaggagaagaag

SEQ ID NO: 51860 - DNA, 945 bp, Arabidopsis thaliana landsberg
ttcatgttaatagaatccaaattcaatcaaagacattactcagatcctttgcttcggagttacgttagttaactcagatggtcaactagataagctaaaggccaaccccaaaaaaaggcggcaaaagtcttccacgttggtcttattgacttctagctacgacaatatataaaaattgagcccattcacatttgtcccccatatatgccttttttatattatggacttgttttagttggtttatcgttcaaatgcacactaattacaatcttttcttcccctactaacacatgtcatcctcaacacttcacttttttcttgaaattttcctttgtgggtatatcctatgaaagcatgaatatacatctacgtttgataatgaaatcatttgcattattctaaaaaggttttcatacttcgtataggtttttctgcttaccacactcatacacacagatgtatataaatattgatagcttactttgatatatatttatatcatgaaacgttgacaaaaggaatatgtatgctgatctcgaatgagcactttggagaagtttaaatctcgtcaattataaatctccttccacgaccgccttagttttttttttctctttgccttatctattttataatgtatagccagccaataagttatcatttcaatgagattcatcatgatcccaatgccattctctatataaattgtcgcaaccatgtgatgaaaaaacacaacaacccatctataccatttttctagctaaaattaaactaacacctttctaaattgaaaccattgtcacataacacatggctaacttgaaattcttgctgtgcttgatcttgatctgcgtttccttatcgcgttcattagcgtctcgaccgatgttcccaaacgcagacgggattaaacgagggcgtatgatgatagaagcaaggaagtgt

SEQ ID NO: 51861 - DNA, 923 bp, Arabidopsis thaliana landsberg
tctatttttttgggaatatctaattctctaaccgtatttattctaaagtaacgaattattaaaaagttttcaaattaattacatatcttaaaaaaaacaaattatgtgtaatatttttgttcgttggtaatattattaagagaacttgataatcttcttgtgagactaattgtgtttacgcatcaacaacccaagaaaaatttaaagattaattaacacactctcaagagattcaaaactatcaaattgctctaaatcttcaaacatttatgcatccagctatcaagaacacatcgtctgcaatgtcagaacgatttacagatacactgcctaaacaaaatgagttcaccaatctcatgactattaaccttttgtttcatctaatcggtttgtttagcactttgcgattctagcacagagaaatgtcttcttagctgagatgatacctgtgacagatccagaggaatgaaactagacgaagacaacctcaaatttagcacaagggttgttttgaatgtgactacttagactcgaatttccctcgaatttgaagttgtacaaagcctgtcgttgcgttaggccaagcgggtaaatccgatgtattttaagctctttgtctccttttaagtttccaggcctttccttcttccacactgcctcatgttttaaagacttgaacttggcgagaactgcagattctagagcttcctgagtcacacttttacccctggattggacaagaaacgatattccggttaaatcaatactaatcattgttttgattcagtggtgaaccaaatgataagctttcttacctcagaaagactgattccatttcaaaccggcctctttctctaacaaaaacatgataaactgtgtctgatcctcccctgctacatttgcacggtcgtttcttgaaatta

SEQ ID NO: 51862 - DNA, 767 bp, Arabidopsis thaliana landsberg
aaaacagagcatgctctgtttcgtctgatcattatcgtgatacctttttctgcgatatcgatggtgttttattaagacaacattcgagcaaacacttccacacgttcttcccttacttcatgctcgtggcttttgaaggaggatcgatcatcagagcgaaccttctcttgctctcctgttctttcctttggactctgcaacaagaaaccaaactcagagttctctctttcataaccttctctggtcttagagtcaaagacatggacaacgtttctagatcggttctaccaaaattcttcctcgagaacttgaatatccaagtttacgacatctgggctcgaactgagtactccaaagttgtgttcacgagcttgccgcaagtgctggtggagaggttcctcagagaacatctcaacgctgatgatgtgattgggactaaactgcaagaaataaaagtcatgggaaggaaattctacacaggcctagcttctggttctggtttcgtcctgaaacataaatcagctgaagactactttcttgatagcaagaagaagcctgcacttggaattggaagctcttcaagcccacaagatcacatcttcatctccatttgcaaagtaatttcctttccttcttaaagttactaactttcaattttgtttaagtttcctacaaggtcatatctgttacttttcaaatttcacaaaaatagattaaagtttagaacgtcttcttttgttctgaatctcccacacaggaagcttatt

SEQ ID NO: 51863 - DNA, 640 bp, Arabidopsis thaliana landsberg
gtatacatttcttacacgtgcttaccaattcttatcattcgaagtaaaccattaaacaagaaatgttttcattattataaatttttcactaatataagtttattatttagtgcaagaaagtgcgttgcagatgaaaacttattctattgatccgggtccataaagaagaaaacaaaaattcacctaatacgagtacgacttattctagtggctacatatttctctaatctctaatcatgtgactaaaaatctgctttcaaaattttgacattcagtatttctttagatctatatcactaaaaattcatttttttcttttgcattttgattccatatttaatacaagattaaaaaaaaaacccaactaatatgtttgttcactgagcaaaccattattgttgatcagtgaactgtggtaactggcaaaagaagcaaatgattcgaaatcctactttcttacaaaatcaaattggataattttgtgagataataaaatcagtataaataaataaaatatatgtcgggaaaccattattgttgatcagtgaactgtggtaactcgcaaaagatgaaaatgatgcacataggactgtgttttactgacttacttccactaatcaaaagtaggatcggtccctac

SEQ ID NO: 51864 - DNA, 1367 bp, Arabidopsis thaliana landsberg
  unsure (1)..(1367): unsure at all n locations
tcctgaacaatgcccgatctcatacatttttcaaactcgatgttgacttatgtttttaatggattctcctgtttaaatttatttcaaaaccatgcgccaaactcaacatctagtttgaaaaacacaaactttaaactcaaaacacaaatatttttcctattcctaaccactagtctgtaaaagcttaatgttccaatctaaacgtaagttgtttgaaagaaagttcggcaattacgaggaaccaatgaggtgtcaccattgtccacaagacataaataaggtttaactctaaagtctaattttgaggcctaaggagacgcgtgtcggacacaagccccacgttgcggttaatggtcgttgaggtcgcagttaccaaaggagaagcttcaataattacgtggcaaatttgattccgacacgtgttctcccggggcagatttttcctcgagcctgcatggccggcagattgcgtagtctttgaacttttactatgttacgtagtcgacatttgtcaatttggtaccaaccttttttagttgaaaaaagaagaaaatcgacgctcgtaacctatgatttaaaatgataccatatgatcagactatcaaattattgtattatgcttatggaaattggaaaaatactaatcacacaaagcctattgacatattgtactaacacaaagccattgtcaaatacactttttttttctttccgaatccatgacgaccatacagttacaaacactaagctacaaatccttgttaaaataattagatatgagtctttgttctatacgctaaatgttttgagaaaatgattgctgtggtttgactaaaccaattcaaaacaaagacgttgagtatttctcctaaccagtaacctcgtacatgtaacaaaatatatagtatggtgaattttatatttctttcagatgcaagcaatatggcatgtgaaatttgaccgttgagtttggtgaggttgctcatctgatctaatacgccattatatactaatttatgttaattagttaaattaaaagattaaatattcctcaatcaatgtttaaagatgccatctttccagatcaccacgtgttaatcaaacccgacattttgcaaaacaatttcaaaacattttataatttggaattgacgactgtccggggaaaaaaggaaaaaagaggagtaattaaagggacataaaaccaaaaacaggaaaattccaatttcttctccaccaaaagtttaattgatcatgctttccgtcacgacacaaatgacacatgntcgatcactaatatatacaaattaaaagtttaatagatttatatgcttaagaagtaagaacccaagtatgaaaggcatgct

SEQ ID NO: 51865 - DNA, 753 bp, Arabidopsis thaliana landsberg
cgctttcccgaagagagctgagagctgaggatatgggaaatttggaaggtggaatctcaaatggcttatcttccgggtcaaataagacgtatgggcggtggaattagtcaactgctagagcagatatatgggttttcgagaagatgtttgtttcgggtcatatctatgggtcctacaccttgtcatatcgcctttatcatggatggaaatcggagatatgcaaagaagcgtggtcttgaagatgggtctggtcacaaagcggggttttctgcgcttatgtcgatgctgcaatactgctacgagctgggtatcaagtatgtaacgatatacgcatttagcatagataattttagaagaaaacctgaggaggttgagtctgtaatggatttgatgctggaaaagataaagtctttgcttgaaaaagagagtattgtgcatcagtatgggattcgggtctattttatcggtaacttagcgcttctaaatgaccaagtgagagctgctgcagaaaaagtcatgaaggccacagctaagaatagtcgggtagtgcttctcatctgcattgcttataactcgacagatgagatcgtacaagctgtcaagaaatcttgtattaacaagtcagacaatattgaagcatctggtaattataaacacgaggatagaggtagtgatatacaaccaccggatatggagaaccaagagaagaagataaagttggtggatatgaagagtatatgcagatgagcgtgg

SEQ ID NO: 51866 - DNA, 501 bp, Arabidopsis thaliana landsberg
cgagctcacccaattcctccacagccttccagtgagtaacaagcattgccaatatagctaaaagctcatcaacgtacaacccattcgagattttcttacctaaaaccctaacagctccgtctctcacagctctactcctgttctcatgggctatacaaagagtgaagatcgctgcagctacgtctttgatagctaatggattcccttcttctaggagatcgataagcggtttcaggattccggacttccctataagtactttgtttgaatcgagagctgacagagtgaagatcgctgcagctgcattgcttctcgtggcgactgttccacgcctcaatgcatcgataaggagaggaatcacattaggattttcgcagacgagcttcttgttgctgtcatcatgtattgatatgttcaacaatgttgtaaccacatcttcttgaagcttctcatctgggtttgacccgtgtaaccaagggattcaccaacctggtgatctca

SEQ ID NO: 51867 - DNA, 531 bp, Arabidopsis thaliana landsberg
aaaattttcaaggagcggtgtaagttctgagggccggaagtcatggtaaactatcagttttaaaattaaggaattccggtatgcatagcatacaccaatagatccttgctccagtataaatccataaatagaagaattgaaagggccacataatcagcatgacatgaggggaataaggcatccaatgggcccgaccagaaaagtgcaaagagagcccacataacaaataactgaacctctagccatcaaaattaaccatttcatgtagcaaagagtcgttgactccaacagagttaattgtatcaaacaggaaataaaccacgattccatcagagtacgtttcagaaaaagcaaaaagcgccacatgcgcgccacgtccaacctgttaaccaacaaaatagttgccaaccagtgtacagaaaataccaaacgacccaaaagggggaggccaaagccttacaacctcgccgaggtattgtcttcatcatcattgtcatcattgaagtgagggtccccacctgttcatcagag

SEQ ID NO: 51868 - DNA, 736 bp, Arabidopsis thaliana landsberg
gcttcggtttactagtacacaacctacagtgcacagaatactcgatcaggacgttcagattggaggtatattcttacattacatatactgttttatagttgtttttgttatagatgttatgatgaacaatttttaggatttaaactagacctatgactcggccggctaataaccaccagaaacaaagggcatgctagctaggggtttgtcaggctgattcatccctaatacggtcgggcaagatcaaaccaatttgtttccactgttcaccataacaccttctaactgattagtgacgtgtttccacacaacaaccgaaaacatatggagtttgctcatgagttagttgtttttgacagattatacattacctgctgggtggctattttttggcatccctcaagttcacttcgatgaagaaaagtatgatgacccacttacctttaatccatggaggtggcaggtaactttgattaatcaagagtattataatacaaacataaagaattagggtaagtctaaacgtttatttgtgaggataataatttcagggaaaagatatacacagtacggtatctagggaatacatgccgtttggagctggagggactcattgtgtaaggtcagagtttgctaaggctataattgcaatcttgctgcatcatttgtccagattcaggttaattaatttaaacttagctagtgtttattaaaccaaattgaaaaaatagattgt

SEQ ID NO: 51869 - DNA, 921 bp, Arabidopsis thaliana landsberg
tttattatgttttcttgcggaagcaatgcaaagtcttgtgttctttttgttctctctttacttttctttttttttttatttggctgactcaaatgagaaaataagccaatttaaccggaaacgtcatccataaaatctaaaatttcagcaatctgcataccggtttaatgtcaaaatataaccagatttatccatgacaacataagcttgcgtactactacataacaacctttacacagtcttaatcttctacactcatccagctgatgaacataagctttcttttttactcatttgtttacttccaagaatggagttctgttgttagcttcgccaagtccttgttttgttgatattttctccaaacttgtgtgttcttcgctgagagtattctgcgaaaacaaagtcctcatctcctcaatcgaatccaggcttggcacatttatggattgtttctttggtgtttcgttcttgtgctgatcaacctgttcattttatccaaagctttgctgttaatgtatacacatatagatcacactatagattttccattatgattgcttaagtacctgatagtcttttatgagagactgttctgctttgtttctaatgtttgaaacagcttgtccatgattctcctgcaataatgtgacctggttcatgcaagtctctactatagcctctgttgtttctttgttctcacggtcttgcatcaatgagtctgtaaaaccaaggattaggacgtttttgagtagttcttgagtagggaatggaacagaggtttagtgtggttaccattaacagctgcgtgaagttcatttgtcctagagacaaagttagcatccattgaggaaaatgtggatgtaaatgcatcttgcaccttctcattttcttttgccatgtccctatagtagatagttt

SEQ ID NO: 51870 - DNA, 412 bp, Arabidopsis thaliana landsberg
caaatttagtggaatctttaggtttgttgggttccatataaaatatatatagacaaacattcaaatagctcgtgtttttcagttatcctcatagattatctttactactatgtagaaactaaagggtagactgtctctcgtggttctaccgttctgcctaccccttgtcctgcatttagtgcctccgacatctgggtcgcaagtgtcagctctatcttccttttcatcgcagctctgcactcccccctccctctcccatccaaccaccctcgccctagctcgcacccaaccgccgcatgcctaactagcacagaagctctatagtgttggtcctagagctatttgcactgtctttgtttcggtgcagaaagtgctaggggccagtggaatttccattgacgagtaacttgga

SEQ ID NO: 51871 - DNA, 1236 bp, Arabidopsis thaliana landsberg
  unsure (1)..(1236): unsure at all n locations
gacaaaaacaaaaaacccaattaaaatagtaaatttatattatagtcatcaacttttttactttgttgcaaaataaaaggaaacaggcgcataataatccactaatcacaaacctttaccctttcttctcggggccaatcaaaaacttcaattaaccagaaaaggtcagattctccgccgcctcacacgacgggcaacttcagttcctgccgtcgcgttagatcccgccgtcaatcggtcatggcgaccggtaaaacctcttccgccgcgaatcttttnnnnnnnnnnnnnnnnnnngatttatcatccgctgattcgcctccttcaaaactctctctctcctccgatcagctcaaccactgccaccaagctctcggcgttttccggggaaagatccaaaatcctgactcgatcgctcatgagtttaccggtttacaggttatagatccatcctctaaattgagaatattcctcttcctagtgtttcttccttaaaaaacaaattggatcataatacactctcttcgaacgtaggctaataggatgtggccatcggagctgctgctaaacagtacagtggctatgaacagtgtcaatgttgagaaaaacagatacagtgatgttgttccatgtaattttcctctctttttttgtgtggatttgctagttagtggtgtacagttctagattttgattttgctttggatatagttgacaagaaaaggattgttctgaatccatgtaaagactcatctgcaaaaggatatgtgaatgcaagcttaattaaggtacacttcttattagtctgtttatctgtatctttatgtggtgatagatttttgaaggttttacaatgtgttaatgttatgtacacgtcggagtctgagagtatttctcagttcatagctacgcaaggtcctttaccacacacgatggaggacttctggcagatggttattcagcagcattgcccaatcatagtgatgctcactcgattggttgataataatagggtaaacttccttgtcttgcttgtgtatatgagtctctttttagacgattggatattaatatgatctgttgcaaatatactagtacaagtgaagttgttgtgagcatttgtttctcaagttaaatttcttcgtattaaattttcccaagtcccaaatgttccataaacagtgataaagataaaaactatctcgttgatattgattcttgaacttatctggtttg

SEQ ID NO: 51872 - DNA, 1236 bp, Arabidopsis thaliana landsberg
aatcgattaaagtaaactgtcatttacgatggtagagatcgtaaaattatcaacgatagcaatgccaataatgttatgtaaccatatatactggagtatttgttttgagtaatattaaagataattatgttcagcggaaaaaaactaatgtaattaactaaaatcagataattgttaatgatgaaaataagatctggataagattttgaggggtcgacatcattagtctcctctaattgttgttcgaaaattaatgctcaacttttaatgtatgtactaattgattataaaccattatattagtgtttgaaatcaccttaaatcgatagatagaaaaatcattaaagttttttcacgtctagcatttatcaacaacacacatctgcaacattttagccgctccacaatgtagtccgttccggtttttatacatggttccggtttcatccaaatttttacagttattaatagtttatgaatacttgaacaaaattaaactatagtaaaaaaaaaaaaaagtttctctaagattttgctattgttcgattaacttttccactctgattctttggattgggttcttaacagaaaaacaaatacgtgatggtaatcctctctcagtttttaccatcggaaaatgaatttttatgatgtcgtcaaatatcgaacatgcggtaataatcagagacatgcattgctattagtatttcgtttccccacctatattttggtcaaaagcaaacgtgtgggggtatacataccttttctttcatgtaatgatacatgctttttatttgtatataaatataattatattatatgatatctagagtatctaaatttattcagtgatcttcttaatcaaaggttaatcatatcaaaacaacattagtgaactggattgggaccactaatgagttgaaataagttaccagctatttcttctaatatctgataaatactactatttagtcataaaaccaccatttagatttaataatatccgtaaccataattgagagttgacttgtaaaaaaaaaaaaaagttatctgatgtactcaggaactattgcaaaaatactataagagcacaatttaaagattgattagattttttaaaaatgagataatggagaatctaatgatgcagacattgttgttcccacacggacatacaatatgatagtgtattactttcttgattataatcccgtggaagaagattttatcaaaaca

SEQ ID NO: 51873 - DNA, 565 bp, Arabidopsis thaliana landsberg
  unsure (1)..(565): unsure at all n locations
attgatttgtcatatttccaagtttgttcaacggaatcatatgtctaacgtgttaataaacacgttttctatgtgaagctgaggccgtgattactaattagtcttttaataattatatgagagccggtgttgtcgtggcttttacaaatggccaggccaaaccggtcagagggcaatatactataatctaatcaagtcttgttatcttgataacttatctaaaaaccgataaacttgctctcacaagctagattttatgtggagccaatgattaacagctttctaagtttgatttaaatacacttacgatttcacacgtcacttccacatttgtaggtatgaggttgatatctatttctactcaatttaagaaaagaaatatattaacatttcgtaaagactctaaaatgtaagatgattaaggtaagttatggaaaatgtgatgataacagannnnnnnnnnnnnnnnnnnnnnnnnnnnnnnnnnnnnnnnnnnnnnnnnnnnnnnnnnnnnnnnnnnnnnnnnnnnnnnnnnnnnnnnnnnnnnnnnnttgcttagtgtatt

SEQ ID NO: 51874 - DNA, 598 bp, Arabidopsis thaliana landsberg
  unsure (1)..(598): unsure at all n locations
tgactaaaactaattctaatatcaatgataacaaaagggaaaaggctgcttaatgtctagtggttttagttattttaatgattgattagatcaaatttaaactatgattggattcttgctgaaattttcctgttgactctaatgattctttgacttcaagttgagcatttctaccatagtccaaatttagtggcctactatttatcataaaacaacacaatcattcaaacagcatccaaggtcttttagttgaggtttcttcaattacaagtctagaacgcgacacaaactactaccataattataacaagaccatacccactttaagtgactacataaacatatacataacattcaacggaccggactatatacatgttaccctctgtttagtagaactcgcgatctggaaggatgagtggtgcaatgagtgtccatatgtagagtccggccgtgacccaacccgtgcatatcttgacccagaccgaggtccacccacatcgatcagagtcgactctctgatgagtcagtccatccgagagaacattgcagcgtacatgctcgcagcgcaaagatgatatggnagaggagtatgagt

SEQ ID NO: 51875 - DNA, 743 bp, Arabidopsis thaliana landsberg
  unsure (1)..(743): unsure at all n locations
atctaatataaggcatccatgttttacctgagccttttcattctcagcgttctttgtccatagagagagcctggggcctctcgctctgaagttcaaaactgctccacacatctcatctccttggtcaaattgctcaccaaccaacgcaagtaactaaaaaaaggagacaagaaacatcacaaagatgcatcaaacaagcaaaatagccaagggaaaaactacaatgaagtcctgaaaagttacaataccgcgttaagccaattgcattctagtgtagctttagggaacatcatactccattnnnnnnnnnnnnnnnnnnnnnnnnnnnnnnnnnnnnnntcaatcttatctttgaagcagtaaagatccgcccccgaaacccacttggttggaggatgaatgttattgtagagactgcatcaagaaatcaacaaggagccctttaaacacatccataacatacacaggacacctgaagatagaaataatctaaaacgcagaaaaagaaggcacacaaaaaccaaactagcttctgagatggaaacaatcttaagtaaagattacaggtttatgtacagatacaattcatgtattctccaatacaaaacttgaagaaattcacgtttatggatagaaacaacgctttctatagctataaatctaagatcaaggcacaaacgaatcatggagctcagctatcgaatccctaatctactggttctgtctcaaactatttcatattc

SEQ ID NO: 51876 - DNA, 877 bp, Arabidopsis thaliana landsberg
aaccacaataagatagacaaaagtttcacctttttatctacgaaagaaagagacagagattgcgatttgcaatgcaacaaaacaaaaactcgaaatttgaattacccagaaagaatttgagaaaaagactcaacctttttgtctccttgttccgccggtccgttggagcagtgaccggcttgaacggtggagtttcaaatggggaaatagcagaagatcgcagattttgctctcagcatctgttttactagattttcttacttttgcgattaaagttagcgttttggccaaaagtcaatttcataatctctcgctcacgtgacggttacattatattatattatatagtatttcataacttttctaacaataaaaaattcaacttttttctagcacatacttactttaagatagaagacaatggcaatgtattaggcgtatgagaacatgaatcaacattgatatatatcatgaatggtgagtgatccaaaacaagaaatgaatacaaaatttgttcagactacaattcaatacaactacagtttaatgtctcctgaatcagttatgttccatgagttggtccaatgttagagattgatgagttatatcaacattgatatatatcatgaatggtgagtgatccaaaacaagaaatgaatacaatacaagaagatctggaatttgttcagactacaattcaatacaactacagtttcatgtctcctgaatcagttatgttccatgagttggtccaatgttagagattgatgactcagtctcctccactcttaaacacccatctagcgctcagaatcacagagacagagaacaaaagatactgcgaatatgtaaagagagaacaacgtgctttacattt

SEQ ID NO: 51877 - DNA, 660 bp, Arabidopsis thaliana landsberg
gcgtcgttttattgtttaagatgatttgttatcgaaacaaagactatagatgactttaaccaatgtgaacaactcaagaaaaagaaaaaaagaagactttttatatatatgtttgataaatttaaaagttgcttgagaattttcagtatttcacattatgaatgagtacaactctgttatttgggtcagattgggcctctaatttaatagtttcacagctatagtttagtaagcttttttgacttgcccaacaaacaatattttcgttcaataccctaatgggttttatcttctcaataagcccgtcaaaagtcgctggagacagtttcttgcgagtgagagtactcttcctttgatatatacaggtctatgaaattattcttgtgtctgttgtgttagagcatgtggacattggtttgatgaaacttccttatgtttctgacgataagaaggcatcaaagcataatcttgaggtagtaaatccactgatgctttcaggtgtgacttggaattgagaacgagaaaattcaacacgtcgaagccccgatttgaagatgttgaggtatctatatcctctttggtgctgtctggataaagaataacatttagaatatatgtgttgttgactggttccttggactttcttttaatcttttctaa

SEQ ID NO: 51878 - DNA, 749 bp, Arabidopsis thaliana landsberg
gttttctgaggaagatgtccacgtgatagatgcagataatctaataaaagaagctcatcctgaaactttgtggaaagagataccactgatgcccaacagcccgctgggcttacctctgattctgctcatgctactgctgctggaagcatgccaatggaggaggacgcagatggacgtattaggatacatgtagcctccacaacgaagcaacagaaagaggagatcaggaagaagcttgaagatcagcttaacgtagtcagaggaatggtaaagaagatagaggataaagagggcgagattggtgcatataacgattctcgtgttttgattaacactggtattaataatggaggagggaggattctgtcagggtttgcatcagctggacttcctcgtgaggtcattagagcaccaaggcctgtaaatcaactaagtatatcagtgttggagaatactcagggagtcaatgagcatgtggaaaaggagaaaagaacacccaaggcaaatcagttttatagaaattcagagtttttacttggtgacaagttaccacctgcagagagtaacaagaaatcaaaatcgagttcaaagaagcaaggaggggacgttgggcatggttttggtgcagggactaaagttttcaagaattgcagtgctctgcttgaaaggctgatgaagcataagcatggttgggtgttcaatgctcccatagacgtgaagggtctaagtttacttgattattacaccat

SEQ ID NO: 51879 - DNA, 902 bp, Arabidopsis thaliana landsberg
  unsure (1)..(902): unsure at all n locations
aaaggcccaacaaaaaaaggacaagtacaggttgacctagaactaaccttttttttgttcttaagccctctttttggcattgggtttcttaaaacatatcacattttgaagaaaaaaagaatgttgatcacaaataaaagatgaagcgaagattttttgtcttttggctttctatgaaacctgagaagagttatatagagttgttgtctatttctcgtgaacgagagggctgtaaactgggaaccacatgttgcgtgtaatgtaattcactgtatcctcctgttggtggcattaaaagaagcaattagattccattttctaaattaccttatacatgttctgatacaaatatatctctcagttacttgattcataccttagacatgtggctgagatctttgggaccaacatcaccatgtccttctgcaatgtcatcagtcaccgcagctcgtagaacagctgccccgacttcagctgttatgtgtcggatgctgcaattttttcagaaaccaattgcttcagataacagttttaatatactaaaatataatcaacggataagaatgagagggatttagaggaattacttgttgattgaagggtaaaggatgcctttttggacttcttcatcggtcatgtaggacgcaaggctgtgtatgtttgaatatgttaatcgtcagcattgtcataagctcatttttaaaatttgaagagaacaaaacgcaatcattattaccattcagaagctgcttgtagcattccatcagttacgatacgtgcaccagagagaagaagtcctagccccgaccctggaaacgattatgaccaaattaattctgataactatatctatggattgaaatgcaacacagtgaactatatctatggatngaaaatgcata

SEQ ID NO: 51880 - DNA, 556 bp, Arabidopsis thaliana landsberg
gaaggactttggggttgtcgattgcggcgtcggcgatggcttcttcgtcgtcttcctcttcttttccggggacgacattggcgagtagaggcgtcgatcaacctctgtattcttttccgacagcagaggacaaacgttaggggttttgacttcactttactaccgaagcgcgtgtgctttaaccgctaaaatttcgcgtgagaatttccacaaatcttataagggctaattaacacttctaggcccaatttataagtcggtctcaaaagccattatatatctgaatgggcctcatatcattatttgatttcatcacatgctttctttcaagactgaggcactaatgcaacttgatacgatgcgaccatggatagaatgtctcattcttaactcttaacatgtgtgtatataacagaataaagatttgtgaaagaaaaaaagcatgtgataagccgtgtgaaaaacagcatgtgataattttatgtatttttttcacaaaatacctgtataagcagttatcttcttttggtgtgatgatattaaatgaaaacacaca

SEQ ID NO: 51881 - DNA, 788 bp, Arabidopsis thaliana landsberg
aaatttgcacgtcgtattttggttgtctcgtggagtgtgcttgcgaacatggtgactttgtggccgctttacacctctcgatgcaaactctttggattatgctgtattatcatgttattgttaggagaagaacaagtactacaaaccgcaacagaacattccaagcctcatcacactagtcatccaatttggtaacaaacttactgccacgtagtcctagtgggctgggcttttaaagaggccttttccccttcgatcatatttactaaacccgaaattaaaaggcccaaaaggaaccctttggatgaagtcaaaggttctcgacttctttcttcttcctcttcttcttcgttttcaggcgggtggaggagctcagagccttccagaggtaaccaaccttttattaccgacaagattctgccacacaattattacatatttttgttcccatgaagcaattgttcctttcaagcatgtttacgagcaaaagagtgaaagggtagcttgatttttgtctactctagcttcattttctggcgttctttacttgagatttaaacattttgctctcggattgataataaagaagaatttggaatatcattaggtttggttaggactctcggattctgttgtcggttagatatttgttttgtttaatccctagatttagcagagaaatccctcaaatctcacacaaaccatgtaaggaagaagatgacctccagtatcaaatcaagtctgctaaatctagggctccctattatattttttcgcttcttcttcct

SEQ ID NO: 51882 - DNA, 324 bp, Arabidopsis thaliana landsberg
agaatcttttttttgtttatgttattacagctcagagaataattggagagaaaggaggagaataatagtaacgcaaaaaaggacgtgtcttttgagctggtctcaatttgttgctccacgttatatgaattattttcatttgttttctgtaatttaaaagagagaaaacaaataaagcaaatggagataagaaaaagcaaataagaaaaaatgtaacagatattattataactaacgcgtttggaaaattttaataattaagaaacagaagataataaaattaagaaaatttactagagtgtgaaatttcagacaaattaagaa

SEQ ID NO: 51883 - DNA, 922 bp, Arabidopsis thaliana landsberg
gacagagctataagtgtagtaaaaaaagtattttagacttttacctttttttactatacacccatttaaagtgggtacgggataagctgataagatgtactttagcgttgcttaatagtatcatctatttcagtaattgcaaaattattacaatactaatatcacatgtcactagttaactcatgtttcattgaacttactatgtgaagtttaattaaatgtggctaatttgtctccatgcacgctccaaaagcaaatgctttaacgcggccgctaattcatggttgttcgagctaacctacttgtaaacaatatttttggagaactttttttgttttcctatgttggatacctactttttactactatatataaaccattaatcttttctacggtaaatatcgaataaatgtttgtttcaaagtgatgcaagattgataaagttgattagcatataaaaattcaaaatgtaagagtagaccacacaagttaattcaattaggtcttttttgtatacgatatggtaacatggcaacatataggtcgaacattagcagaagctaaccgaaacaacaatacttaaaacatggggataagggtgaactcggaggtttctaccaaaggagcaactaacaaagaacaggaccgaccctgagtataacaagaccagagcaaaaaagaaaattttaagattattttataagatttgaaaattaggggccaattatttaaaaaaaaaaaatgagggctgttttgcaaacaatttttggtgaaaaatatgagaaaaatgtggagggcacagcaagatgtttcatcttgttgtgccaaggccggcgctgaccaagaacatccaaaaaaacaaacatctttagtttggaagaccttgtcgaaactatgatgagaaggaaacaaaacttccaaa

SEQ ID NO: 51884 - DNA, 544 bp, Arabidopsis thaliana landsberg
gacacctgtatgaggaaaagaaagtctacttcacacaaatgcaagagagttgccgaaaagatattgagcgtgctttcggagttcttcaagcccggtgggcagtgctgcgtggtccagcacatggttgggatcgcaatcgtttaactgagataatcacagcttgcatcatcatgcacaatatgattgtggaagacgaaggcccttttgctgctaatactaatttcggagataacacttcaggcatagacgcatcgcaaataattcgagaaggaagggcggaatgggtcattaaccactttgatcttcgtcgctaagataggtcgtgctcactccaaaatgatcttgtcgagcatttgtgggcctaacgtggcacgatgtaaacgtgtcgtttcactcgtacgttgtttcaactttaaataagttattgtaattcactgtcatgtcgtacttatgcgtcttgcacaaataacctctaccacatgactcctgtctgggctcctacataaccccctcgtacatacacaattccgcctgaacatgtgga

SEQ ID NO: 51885 - DNA, 535 bp, Arabidopsis thaliana landsberg
tttattaattctacatagaaaacgttggaccgacaatgtcatgtaatagccaaagatgtgtccacctaaaatcgatgtttgatatcgacaacaaaataataactacagaactagcactttttgtttaaagaccatttacaaacttaaatctcttttgaaaacttaggatttttaatattattcacgttcaagattcttaaaccgtttgttgctggggtttattcgactccaactaggttattttcaagtcttttgatgaaagagatagatcatcactgagtctttatcagttgttgcaaatcagataaaagcaaaaccgaatttatatagaaaaaaacacacacaaaaaaagcagaaatatgaactgatcatctagacattatataggtacaaaactgtattatagtttgttcaagctcgatctatgtcagtctcatcaattcatgttggtattgaatcaatgtgaaaatagatggactcaagattgtacttcaatatctgcatacatgtactacaagtctacaatattattact

SEQ ID NO: 51886 - DNA, 1078 bp, Arabidopsis thaliana landsberg
tacctacagagaagaccagaaacaaagctcagaggtgatccaagtgatgactttgccttctctactttctttcctgaacatctcaggtgaacgacatttctccctttttactgtactttcgagtttgcccacaaatcaattcttgcctcatatgttgttggtaattttgtttttcaaaataaaatgcaggccagtaattgaccccattgccttaatctttcaccggatgctttgtggaagatcaaatgccaccagtgaagaccatgattattctaccagtggtgcaccattgccaggttctgattctgctgaagcatccaggaggaggtaaaaaattattttcttttcctttttctctctttcctgttccacttcaaatcttcaatggtagtttagatgcaacgatcttactaaattccctgctctttaggggtcaatgcagatcatgtctacaaaaattagtatacaccgttttttattggcttgacactgttgaaacataatttaagatctagttgatgcaagagataatgaacgatcctgttcacttgattctaagaataaatagtaatggctcgtcatcagttttaatcaaaatgtaagagttagtgttacgagtgagaaaactagaaaggcaaaaaacttgttataacacaaaagatgttgttgttgcagagaaagaggggcaagagctctagaggagagactaggaacggaaagattggttcctgcaaggaacaaagatgaattgcagagtgatggtttagataacgtataagtggagattgcaataagcattttgaagaagctgttgttggttcttacttgtgttcatgtggacagttttttttttttttttttcttttgttaatgaaattggcgtttatacagaatcagcttcgtaaattcctttgacagctcaaaaaggtagtacatttccttggacaaaccaccaattagaaacaattttcttggacgagaggatataaaagtagttatacatgttctcacttgtctctaaacttgttattgaaacagtcgtaactcgtaatggtttactctaagacacaaaaatgtt

SEQ ID NO: 51887 - DNA, 1228 bp, Arabidopsis thaliana landsberg
attctcttgctgatctgttgtttgccatgccatgaatatgtgcaacagctcttctctgtgttttgttcatcacacatgcttcaaactaagcttatgcagctccttctcgactagcttgtcgcttgagttgtctatgccgcggtatagaggtttaaagtcgtcataaacctgaatctgacccttgaaatcagcattagacagtccttaaacttttagagccagcaaatatgaaagacaatcctgaaaaatggataatcataagaccacaaaagtcttttgaaaccatttaagatcaggagccagtacactatccgtctatcagaatctggcaataaatattatcagaagcttattgattatgaagttaatacatcttaaatagaatcagttaagcgttttttgtaaatctaaatcacatgtgaaatttctttatgtcacgttttcatttgtgtaaaacaatatcttttgatttattaagcaaataatttgcagctaaagctctcaagattcaaataaattgaaatgtaagtagtgtaagtagtgatttcttatagaaatagttgaaatctaaaagtattaggacactgatgtaagtattgttaaactaaagagaccaatctggaaatcaaatcactatagtttttttttttttttttaattccttgagtttatcaaacaaaaaaatgtaaatgtccctagcaagtaatgtaggttcattttttttgtttcaaaagagtatgttatttcttaaaaatcgccaaagatagataagattcgaaatttgcataaatgtggcaataaatattatcagaatcttcttattgaataatgaagttaatacaccttaaatagagaattaagcgttatttagatctaaaaccacatgtgaaatttctttatgtcacgtttttgtttgtgtaaaacgatctctttgagttaatttgcaactgaaagctctcagcattttacattaattgcaatataaatagtgatttctcatagaattagttcaaatcttaaactattaggacagttacgtaaacattgttaaactaaagggaccaatatggaaacacaaatcactgtagttaatttttattattatcttgagtttatcggctatcgtgttcgaattctctggcgcttacttaaaaacagtcgaattcattttctgccttagaaaagatttttatcgaaaatcgacgtttttgaaaaaactcacattatc

SEQ ID NO: 51888 - DNA, 565 bp, Arabidopsis thaliana landsberg
ccgcatcagactgcgttatggccatcgctccggtcgcaactataattaccgcgaagaacttaagaagacaagacgctgtcaggatcaccgaaaacaacctcatgctatggttcaccatcatattgtggccataatcctgatagatattttgacagcaccatgcccgataaatgaactatggaataaattaataataccacgtgtctatcaactcgaacctcttgcttatgtagatatagatggaagcgacaacattaatcctctttatttaagaaggaatgcgtcgaggaaaattaatgccaattataatgatccaactttatactataccaaaacaaaatgatgcaactgcctgcatggacacaacgtattcgtttagaccacgagcaggttattaattagcctttatatcagcgaaaaagactaactcaaactggcctataacgccaagggctgatttcacaagagctatggcaagacatctgatataacataacttttattacacggtacttttaacgtttagagaagaaaccacatatacttctcaattgacccaatcgac

SEQ ID NO: 51889 - DNA, 896 bp, Arabidopsis thaliana landsberg
  unsure (1)..(896): unsure at all n locations
gaggtagattatcccaccgccaaatacagtagtcgatgaatggccgtgataatgccatccaagcagagcctgttaccaagaatcgcatgttagttagagacaatctcagaacaaaacaatgtaacatatcaaatggctaacagactctgaagaaaagtcttcccaacaatcaaaggtaactacacataacaccaacttcttagtattatcgcagatcttatcaaatgttctaaatatgatgatgaaagttttgccaagcaatctaagcataatgattccaagttgtttaaccaatgagaaatggagcaagtctgaaaaaacaccgaccgaactaaacagctaagcaacataaagacaatcaatcaaatcaagtctgtgaattgctcagagattattatgatttgcctagcagtctaagtatgatgattcagtgtttcatccaactatatatgaatcaaatcatagcaaatattcctccaaactaaagagctacacaacataaagagaagcaatcaagtctaaggactttcacagagatgattataggatttagagggatcaagcacctgtgaaaagcttgaatgctgttgggatgcttcgtctttgcgtaacccaaaaaacatcatatttcttgttcaaatacagtccaggatctataatcaccggttttgctctttgtgatctaaaagaaaccaaatcaaaacaacaaaaatcagagttccttctactatacgaaaacaaaagacacagaaaacaaaaactctaaaactcttcttacgctttccatccaatgttacttgtatgatcaattgaagttcaaatcccgcggcaaatgcgaaaagatatgcaacanatctgatacacaaaaaaaagataaatctttaggaagaatcata

SEQ ID NO: 51890 - DNA, 760 bp, Arabidopsis thaliana landsberg
acctttcggcgtaatttcgtcttcccctttgcttaacattttctttctttctttttgaccaaatattaaaaaggtatgcatttttattttatttttaattaaattcataatttgcatttgtaatagaaaaaaaaagaagagaataaatccaaaagagtgaagcaaaaacattaaagcggaaagaaagtggtaaaacaataatagaaacaggagaagcagaagtactacttcttcttcttctgctctcttctcagaccttgttttgtactttcttcttcttcttcttcttcttcttgtttgcgaactccgatatcttcttcactacctttgactccatttctttttcttcttcaggtgaattctactttacttttcttcttaccccaaatttactcttttgggttttatgaaagttttgttttttattactcagatcttgtcctagttctcctccttgttctgttgtttttctgtttcgtttcgaattggttttgtttttcaagtttagggttttgtagatcagttcgtcgttactgtagattggaaatgaaaattatgattctttggatctgattatagcagttcaagtgtgaactctatctattacttgatttgctatctcacagtttttgaatttcttaatggtgttagctactcgacttttagagctcattttcttaactactgaacttgttcatttggaggtactaaccagatatatataaagttatgcttttctacctgcatcttgacatgttgc

SEQ ID NO: 51891 - DNA, 292 bp, Arabidopsis thaliana landsberg
attcatctacattttgctcattcattgttattctttcctcaaaccagcacaacactcaacactccccgttcgtctctcctaacacccacactgtctccagtcttgcataacggtggcactagactttgtggctcctgaaagcgtcgacgaatgccttcaggtaacacaggagtctccggagactgcctccagaccacagttctggcgaggatacactggaggtacactaccaatcataatattctgaatcatattggaacttactcgtcttgaatcataatactctagtttc

SEQ ID NO: 51892 - DNA, 599 bp, Arabidopsis thaliana landsberg
acggaggtgtgcggatccgcggcggtgttagatctcaggtgaggaattccggagccgccggtgtacgatcctcggtaattcagtcgcggttgccttcaacgtagccaaagggagcccctgggttccccaatccgagccgggtcgtcggcgagcccggatttgcccgcggcggtatctctcggcgaaccgattatggtggtggcggcggcggtggtcttcttttgcttgagctcacgggtggatggagggaaggggtcgcggacttacggcttttatgcaccacggtgaagtccgagcggagtgaaccaaacggcgatcacggcggcgtccgcgcggcgaaggatcacgcagcgttctgttgaagacggcacctgcgactgggtccaaccggtcagtggcggaggaacggggcgcgattctgggtccacgcgccagaatcggatcacaggcacgagcgcgaccgagaggccggttcggcgaggcccccgtgcggcaagtgatgggagcgtagcgcgacgctgaagggaggctgacgaggagggcccagaccgtagtcacagagaaggggcacgcaggtccgggcttgagagactgaagtg

SEQ ID NO: 51893 - DNA, 845 bp, Arabidopsis thaliana landsberg
gatatatcataaaaaaaaaataacttgtgaaatgattaattgtgaagttaaaaatccttaaacttcagaattcgttattgatatttgtggaaggtatccatgtcgtcggttgtttcattctcgtcaaacattatagggaactttgaaaagtaacgtgatgcaaaaacaagacacccagctagtggatttcagaataccgacgaggtgatcccaatcgatggagaagcagttcaatagaatcatgtttgttgtcttagaccatatttgagttgcatgtgagtagcaaagtatccatgatatctggtgtcttgtgggcagagagccacatgacacagtccaaagaaccaccatgaccacatttgccataagcgaagttatagaaattcgatcatgcataaccaaccacgagtgaaagacgtacttgggtgtagctttgatagtctattacttttacaatttcccgtttgtttctgaagaattagtagacttacaaaagatgttaacgatctatgttatgtgtaaaaagcttcgaactattctcaagtaaaatttgttttcattaacatatttcacccgattatattatactactaaaaaaaatctcactgctttcacaaatactctatcacgttcgattacaccaaaattaatctaaactatatctcgtacaatttcaccaacagagaaaggaagataaacagaattcatacccaattagacataggaatcatattacacagattctctatcgacaaacaacataaacagggttaaactatttactctttggttgtttgctaggacaaactgagcagaactttagctgtgcctgactgacggttatg

SEQ ID NO: 51894 - DNA, 817 bp, Arabidopsis thaliana landsberg
tataactctcttgcaaattttcatttattattagtttgacgaggcatttatgtaaactaatttatttatataggatattgatatattgatatcaattgatatatctgatggatattattttgtttgttagtttttatacgatttaacaagaattccggaagcagaggtggataattgcaatcaattttaataataaaaatataaaaatcaattttaattaataattttttagtactcataatatttcaacagtttttttatcagtagcagttgagtcaataaaaaatgtaaaatatacatattttctgtattcaataatcaatgcatataaaatgagaaccaatgttattaagtagaaaacagaaataatttatataaattacttttaacaaacaaaaaattgagaaagtaatgttatgtttgattagtaatcacatcacacgcctaaaatattttatgtcgaatgtgctgagaactatgtctgttggcgtgtggatgcataaataagtccctttctatgcttcttctaagtgacgaatggatgacaaattattaacgcatttattctcttcaataagataattaattaggtatgtaagagctatggtctaatttggttgaggttttaccactttgtgttttgctgtacatttgtaagtttttagtcatgggtgtggaatcttaattctatttggttccctaaataaaaggtgtgactaagcagatttcgtttctgctaagattgttttttgtcctgcattatattgtgagactcctagtaccgctaaccatttacaaatatctacatgctgatgat

SEQ ID NO: 51895 - DNA, 1046 bp, Arabidopsis thaliana landsberg
tctcttttgactaaaaaaagacagaaagatatactatctttatgaattgtattgatcaagacatatgctgagggtttcggaaaatcatttacggacttaatgggtgaaagaattagttgaatgcatcattcatgtataacttagaacatatctattttggttcggttgagatgtaaataaaaaatgttagttaagaattagttgatgattttgggttagtttgtaagtttaagcgatatcaatgggaattgtaatggtgtcccacatctacacttaaaatgtttggtgtttcttgttaaaatttgtaatcattaattgagagttacacaaatttatcataatcaactaacgtaactacatttgttaaatgattactcttaacagtctgacttgtgttagttgttacttgttagctacaattatgtgtgctgcgactcttacaagggaagaaataataacgtcgcatatcatatgctgatttgcatgagatggatctatagtataactacattaaatgaatataaactaaacattttgtttatgtcattaaaacagatttaggtatatgtcaagaaaagttaattactaacagtcgtttcattagccatatcattcgaatatgtagtaggttttctttttcttttcaatttgaaaattatttagttagagtaataaatttaaaaacgtgcttaaactagtaagccttgtgatggtgaataatccgttgaatattgaacttttgccatcaaaaatataatgaagaattaagtcatggtatattgttgacaagtcttctgaaactttgtagattagctaagtgatagtgatgaccttgtacgagaatgactgaatgagattcatatgcctataattagacctagagagataaccgacaaaatcagtcaaagcatcatattttcatattgaattaattaacatccaaaacattttataactttaggcttcacataactctatgtttctcgtagttgtagcatttattttggaatttaatgaagcaccatattataattgtagctatatgt

SEQ ID NO: 51896 - DNA, 962 bp, Arabidopsis thaliana landsberg
agcacgaccgcgcgatactgtttcttaagtatggtgacgtacgtaattgattacttgatggttctactacatagaatggaaaacaaaaaataaatataaatgggttgtttcataaaatctcaaaccaaaccaaaacctaacttaaatggagctgagttatcatataccatatggtataaattttggaatgactttgtagttatttattgtaatttagaatgttataattactgatcataatattaagtcaaaaacatcgaatcaataaaaagcgacatagattcttagtaattataccggccaaataatactattaaacaaaagttacaaaaaaggatccgtatatcgtgaaaatcaatcacatgcatcaaacgatagaatgaattaattcacgccggaacatctacttggtttgattttaaaactaaaccgaaccaaacatattaaaaatcgaaataaaccgaccaaaaaccaaaaccttaattatccctaaataatttcaccaaaataaatatattcaaagcaacatgcttgtgtttagtagcttttgaaactccatattgttccatttacactacgttatgatattaacaagacgatatatgggttccagttccacttacaagtacaaaaaagagttgtagaagcatcaaatctatgacaactccccttcaaagttcaaagttcaaagttatgaatgattaaattgatcaagtttcacgtggagtggtggatatactcaccatttaatatctcaactctatatatatttcttatttaaaaaaaaaaaaaagaatttaaacgcatattaaaaagcatcgcaagagctttttgcttggatggttgttggggatttcaacgcaaccatctcgctatcagatgcttccactccaaatgtcacgcattactctccagccacggaaatatctttcacttgtgctttttgaatagtgatttattta

SEQ ID NO: 51897 - DNA, 3101 bp, Arabidopsis thaliana landsberg
tcgaatcttatgatcattggactcggaaagatatgatctttgatttgggtttcgtaaagtttcagtctttgtatcttttgatgttctgattttgtttttttttgttcaggatccgaaaattagtggatcacttggatctcgaatccttccggctactcaaaggtgagtttttttttctctttctgaaatttgattcgaaatttagaatcatgagtgtaagaaaatgtttgaaattttctgttatagtgatgatgatatgataatgatatgatgatgactgatgagggtaaaaggataatgatgaatatgctgttgatgatgtgatgtgatgttgatatgttgttgatgattcagggtttaaggatgaggttctatgtcttgattgttgtttattgatatacccgttggccgttgctttgaactttagaccgcatttgtgaccccttgaactttgaacatggtgattactggctttaagaaaaagacagtggtggagaattgttttgaaatattaaagatttggactttattgatatttatgtttttcagactttttcgatttgttaggttatttatttgactggattcgtgatggagctgtcccaattctttagagtaacctgtttcaggcttgtttgtgtcttccttgattagtgttggtaactttgtttgaagttaaaaggtttagtctttgagacttcacatttcacaataagttttagttcatctttcgcttttcccccataggtgactcataagtatttcttttctatttgagttcttacagattttggattactttttggtttatcattggatttatttggtgtttagtcaacagaggaaattcatttaacagtctaatagtcttaccgaatttaccaaagtatttttaacataagttaaaacatttgtgattttgcttgtttgttatgacttcttataagttctaattgtatgtatattagatcatccccatcggagaatcttctcctccataggaaaatgtcgtctaattccctgaggcatgtcgagtccatgtcccagctaccctcaggtgccggaaagatctctcaattaaacgccgtcgtgttaggagaatcccttgcatcggaggagaatgatctcgtctttcccagcaaggaattttccggccaggctcttgtttcctcccctcaacaggtctctctatataccttgtaatatcaaatgagtcctacatcagcagacctcatcttctctgcttgcttttatgacctgtaaatcatctctcgtcttgttatttttatgcagtacatggaaatgcataagaggtcgatggatgaccctgctgctttttggtctgatattgcgtctgagttttactggaagcagaaatggggtgaccaagtgttttccgagaatctcgatgtcaggaagggtcctattagcatcgaggtggatatttttcttcttctttttctttgttctaattcctgtatctcctattagaaaatgtttcgtcgtgatgacatgtctgggatcatgtatgaccagtggtttaaagggggaatcaccaatatttgctacaactgtttggacaaaaacgttgaagctggtttgggtgataaaacagccatacactgggaaggaaatgaacttggggtagatgcttccttaacttattctgagttgctccaacgagtttgccaggtataaacactgtttttcgtcctctccaaccacctctagagctcttctttctcattatttttctggcactgcattttccttgtccttgtgctgcagcttgctaattacttgaaagataatggagtgaagaagggtgatgctgttgtaatttatttacctatgttgatggaacttcccatcgctatgcttgcatgtgcaaggatcggagctgttcattcggtaacttgtgattttcgtacatttttctacaatacaacatatacctaattcattaacacaaaaccagtttcgaagctaattcaattctcccacaggtcgtttttgctggattttctgcggactctcttgcccaaagaatcgttgattgcaagccaaatgtaatactgacttgcaatgctgttaaaagaggccctaagaccataaaccttaaagctattgttgatgctgcacttgaccaatcttctaaagatggagtctctgtaggtttgttcattcaccagaatctgaatttgagtggttgttggtttgatggatatataactgatgattttctgtgttttacttctctacaaccaggcatatgcttgacctatgacaacgcattagcgacaacaagggaaaacactaaatggcagaatggaagagatgtgtggtggcaggtaactgcagagcaacttaataattgtcaaaattccttcattgtttttttttttcgaatggttctaaaagtcttctgtgggtggtggtgatcactttaggatgttatttctcaatatccaacatcgtgtgaggtggaatgggttgatgcagaagatcccctgtttttgctctacaccagtggaagtaccgggaagccaaaggtaactttggtccttggttagattaaatctttagcgtagatttttgatatgtttctctattaaatattggtttttgaagggtgtcctacacacaactggagggtatatgatctacactgctacaacgttcaaatatgcatttgactacaaatcaacagatgtatactggtatgcaaagacacttgtcttgactgttaaacttccttaccaaaagctatgctatatagtgctaatctctttgcttttctaacataaggtgtacagcagattgtggttggataactggccatagctatgttacttatggaccaatgcttaatggagccactgttgttgtctttgagggggtaatctatttgaatatatggttttctatcaggtaatgtcttaaatcaataattaagctctaggtccctctcccatagtaatacattaaagagctagcagcatttaagcgcaaattggatctactgttcatatcttccatatggattttgatatcataaactgggtatgaacaggctccaaactaccctgaccctggacgct

SEQ ID NO: 51898 - DNA, 814 bp, Arabidopsis thaliana landsberg
  unsure (1)..(814): unsure at all n locations
ctttaagttttttctgttaattgaaagagagaggtgtgtcattggattcaattgatacatgtgtgggtatattttctctatgatgagtaaactcaagaaggtaattctgtatagatcttcattcactatacaattctaatgcattcaataatcaatttcatatctatcgattataatttttgataatgtgaaaattataccgtgaaaaatcgttatctaatacaagatagatcataagttagctagatttttggcgcgaaaaaccgttatgtgaaataagaaaagtatttcacaaatctcttagttgatgaactctaacatatatatctttcaccaaacgttgtgtagaacatttcttctaccacaacttcaaaagtactaaatgatctatccaaacatcagtttattggtagacctatttaaaatgtagaaaatcttcagaaagaaaaggattaaaatgaaaccttataagagaaagggcttgtgaanaaaagaagtgacataacaaaccttcgtcattgattcagcaaagcggaaagataattcatgaacatagctggtcgggtttgttctcataatatttctcatgtccacgcagagatgtggtatgcgcttccactgatccacccatcttttcgacaaggtgcttgttatcacggcatctttagttgatagtgtcgaaaggatcttttgtaacatttcatccggaagcatgcttatccgatcgaccggatatttgatcccttttccttttcctttagatgatgctcctgtccttaaaactttgcatcttgcatttgatgctaatagtggt

SEQ ID NO: 51899 - DNA, 557 bp, Arabidopsis thaliana landsberg
actaaaacagaaacaatggttagagattaggatggtttgaatatgaatatattaactaaaactgaatattttttgaatttaattaaccaaacaaattttcaaaagtttagctcctaattaagaaaagagatggcgaaagaaacattaaacatatagattctgtaatcttgtgagatgaaacttgtcaggaaaagtgatgctgtgttcatgaaagatcaaatgattaaggatataaaaaaactatggaagactcatagatatgaaaatttgatcaattcaaaagttatactattcatgctttactaaaactttatactgaactattgtgtcatggtacatcctcaatcatgaacaacattttgagcatatacagcaacgatctctgagcactttatttgattttttcctaataacaagtttgtatggtttacactttccttctcttgtggcttaagatgaaatcatcatcatcatcgtcatcatcatcgacgactttcttcttctttctcgcatctaaaccgttgttcttggatgcagatgttttttgagaactctcc

SEQ ID NO: 51900 - DNA, 842 bp, Arabidopsis thaliana landsberg
ttctgagtaagttattctttgttaaaggtttgattaatataaaaagaatatagagataaaaagctaattattagaaaacatatataaacatgtaattctaaatcatataatattttgattatatattttgaaaatttatataatttcatatttatcaattaaaacaaccaaataaaagagtatggtaatgcgaatttttgtttttccctattttccttgaggaattttatattagcatcaaccttaagcattattaattcttcacgtttgtcttttgataacatttctcatgtatcatagggtttacgaacctcttggtaaatgaaattacttagcatatttagtcaagtttatataccattcttaaaactaactaacaccatgttattgtttgcttggatttaaaataaagtgtgccatgctaatgcattacatttatgtcatttttatgtcattttgtttatagcttagaactggattcctttaaagttcttgcttatctacaccctagaaataacatttaagcatttgtttttgttacttattgaaaaaagaaactaacatctacttactttatatatagtttatctagttagtgtaacatattcgtattactgctgagggcaagattatatacattatgtgaaatgcatgtatgtgtacatatataagcgtgtgtaaataatgttgccaatgcaggaaagtctatattgcacaaatttctaggctatgagctttttctttacgtatgaaagctttttaatggagtacttggaaaaacttcacgatcgaaaattaatatcttgtacgtaatttactctaagagatgatatgatatgagt

SEQ ID NO: 51901 - DNA, 944 bp, Arabidopsis thaliana landsberg
tccaacatgagcattgcgttacttttctatccacttgcattttcttatgaacactcgttttcttttactatataaactatttaatatgaagttgtaacttctgatatgttcctaattatgaaaaatatcgatacgtgtaatcatcacaaagatggaatcaaattttaataatcattcgtatcaaagaatttaaataatcactattccctcaataatgtatatctccttccaaagccatggacggtttgacggtctgccctatcctttcctttcattcccatatattatgattgcttatattttacagatttaacatatcacatgttaaatttatctcatatatatatatattacttagctgcaaattgactatttgaactcaatttaagatgaccatcattcgctctataattaataattttgtttcatactgttcttctatatgaacttactcatggttctacctgaaggaaaaaatttcaaaaaactatatcaaaaagaaagaaaaaaatcataaactatattccgtgtatttcataagagacgccaacagaatcagaaacaagaaaactactcaatcatggctaaaaaaacatcaacgtaaaagaaacgaattgtagaaatatatatcgaaaaaagtatgaagaaagtacacaagcaggtttagagattacttctcaataacagatacaaagatgtaagatcttatcccttgaaagtaaaagcaaagtgaaaaagaaatctaaagcttggaggctagttgctttgtttggagacgtccctaaggaggctctttggttgctgctttctatctcttctggttgctggattcgttcttccttagaaagttcgtttaaaacgagtatatataggcttcgggcgtcggtattaggtttaggttactcaaatgccaaaacacaacacttacgttttactttaatgaa

SEQ ID NO: 51902 - DNA, 564 bp, Arabidopsis thaliana landsberg
  unsure (1)..(564): unsure at all n locations
tgccaccagtggtcaccatgacttgaatcttcaaattgctacttagctctttacagacctgtgatgtgggaaggggtaactctcgagtcggaacaattataacagctgcgtacaagaaaggtattgacggtaaactaagttagaaaggaagcagtaaacctttaagaaacatattaggctactgatagaagcaatgggtttagaggctcaaaggattcattacgatttacattcactaagttttatacagtaactagtgtttattgtggatcaataatctatttacgacgccagctttggtattctgttcttattagctatgaaaaatcactagctagacgatgtcaaaacttcagattctttaatagcattgcaccacgtgaaagaatcaactaacaacatggtccagtacacagttacccngaataacgttgttatcttggtcaattttttccaagacaggaatacaaaaggcggcggtctttccagtcccgttctttgctctggcaaggatatctttaccaggtaaggcaattggaatactctctttctgaataggagaag

SEQ ID NO: 51903 - DNA, 520 bp, Arabidopsis thaliana landsberg
ctcggagaatagtgtattcaagcaatgaattttctgtctttcttcaacgaaagcatagaattgggtaattccctttttcgtaagttcatccatgagattgatgacgtaaggattcgtcagaaacctatccttaaaatccttgacagtgacagggaaggtggctgagaacatcaaaatctgacgactttctggaagaaagctaatcaaatgttccactgaaggttggaactcttgagacaaaagcttgtcagcctgatgaatgatccataattaaattaaattgggagtaacatgaacaattttgctacaggttgcaaatagtgaaaaaagatagatagaaagaaatttcaaagaaaaaaaaatacaaagtaagcattcaacatttacctcatccataacaagcaccgaacaatcttttaaaacacagacacctttcttcgtaagatccagaattctcccaggagttcctaccagtaaatgaacaggctgatacaaacgcatgatatcgtctttcagactg

SEQ ID NO: 51904 - DNA, 618 bp, Arabidopsis thaliana landsberg
  unsure (1)..(618): unsure at all n locations
cgaacatcaaactcttggtcagcactgtgcggagtacaacctcaacctcgaggagatcctggaccatacttgctaaatgttctcgtaccaacaaatggttgtttgcaattattatctttaatggtaagtgtatgaatgaactttcctcagtgacatggccttattagctcaatagtatcgtggtttatgtaatctatcttgtggaactagctaatgtcacttgtatcatttggagaaccttatgtattatgaactggccaatggctatgttgatgaattgatgtgtcttttgattttcttagttatattgtacttctgttgtgaacgatggggtgtactgtactggcttgtagtgatgcttatgttttacggttttatgaactgaccaatggattgcattatgaactgaccaatggactgcattacagttagactacattatgttttcaggatttgaaacctgaaaccatggacaccaaagtagcgatgatgtgttgaagtttgactanaatgcagtctgacaaaagaccaaggcaaattgtggtgaaccaaactatgttgctaaattgtattgctaagttgttttatcgacataganaagataaaggagtgaattgt

SEQ ID NO: 51905 - DNA, 790 bp, Arabidopsis thaliana landsberg
ttttcagcttcacttgtgtcctgcagcaggaccttcaaagttcaaaacgcatgcaaaccaaaccatctatcatcagtcatctaaagctgtgttgaagactcaagtgtgtcctatttctaaaaccgataggtagttcagttcaacagcaccttgtgctacactattaccataaatgtaaagattaaccaggaaaaagggatagcatgtacctgtcaatcgtcttgaagttccgttgccatttatggaaaagttcacaggctgcctttcttgtcctatcgatagaacccaactagagttcaatctccgagcaaaatcctctacctctctgtattaacatattaacataaggttcaataatttaatttagtttcacttaatggccgcacaattcgatgtagatcttcatatttagtctagaagccgaggtttgtagaaggtatatttggagaggtgactgctatcaattattatttcagcccaaaacgaatacttcaggtaggagtttgaaaaagaaccacttacctatcaagcagttccttcaaagctggatcaatttcatcatctatataaccatcttcaaactcagtctttggcgtaaaaatgtcatcttccatactaggtaagttagacacatctcccaagcaggacgcagtattgtcaacaatctcagcactttgtgatttggaatcaagattatgtaaatcctaagaagaaggaacggactcagtaaattgattactaccaaccagaagcaatcagagagaaactagtttaaacctttccaagctta

SEQ ID NO: 51906 - DNA, 908 bp, Arabidopsis thaliana landsberg
tccctcccttttcattacatctaaactctcccctcataaataactacccaaaataaagcaccaaacttaaactaaatcccttatactcaaagcaaacaaaatcagcaaaaaagttaggtggattggagcaagtgacagctgaccaataaaaatttgcaagtagccgagaatattcgtcactctaggacactgaagagaaacatcttcactgatgtttttctcccgttcgatcaaaatcagacttaaacgaaaataatcataatcaaattctctaaagttcaagggatcgatccaaattacctggtaattcgacagagaagacgaaatgggatactacagatctctctgttgctctttcctttcgtttgctatgtcattttgccagaaagcactctctcgagcaccaaagagatcgacagaaactgtttgggagatgaagtcgaatttatttttcatgttgtttttccttccaagtttcattatggaaaccatttgttacgaagaacaacccaacccaactgttaaaagcactaaaagcccaataagctttgaagctcatttaacggcccatatactaggaagtagaactagaaaccaaccattgtttcggcctttgcagcaattaacatgatctcatattcgactttctttacccacaaattgtttttctttttcctaataaacgggtgggtcccgcaaaagaaaaattgtaagtgaagaacagagccggtcaatgcggagctaagactcgtcagggtttcagactgatgcaatccagaccaactctctgttactcctgtcctatttttttaagtttacgtcactcacacttctcactcgccaccctttggtgtattcatcaaacgattatgctccttcttcctggcttgactatgggtttgtatgcc

SEQ ID NO: 51907 - DNA, 889 bp, Arabidopsis thaliana landsberg
attgttatttgtcagagtcactttgcctatattgttacaagagatacaaaaaggatacaaactaattatgtcttgttttgcaatgttgtcagctctagtgttgtttatggaaggagaatttcaacacaaacaagaacatatatatatttaaaaaaattgatagactctttaacttgataacagcaaattcgtccttattagtagtatactaatgttttgctattgcttttgctttggccaaatgggccagcagttcaaatgcggcatcaacaaacgggacgtagactaccactaaccactttaccttcttcatcttcgtcttctacaaggagtccccgagaaatatcttcttcttcggaagatgacgaaggcccacaacacattccaccccattgtggaaagtaaattgatgtaacagaaagagcaaacacaaaagtcatcaaacccataagtgaaatgcttctctgttttcgaacatcatcaccggaaaacaacagaaactgcgtcaccaccgcaccaaccgtaccgccgcttcccgtaattcccgccaccactcctaacgatctgtcattataaacaaaaccaaattaaaaccaaaccgaaattattagcaaaaaccggattggtagactttaaactaaccgcgtggagacgaaagggaccacgccaaatacaaggccagaagcagcttgaacgaaaacagagaagacccacatgacgaggattgatccccagagcgagttgactcgtccgagtaacacgcacaacaacccagccaccgattgcacgatccatagcccccacagcctccctctcataccgaatctcttccccagcgcatccgatatcatccctcccgccggtcgcgacgcaatgttcgatatcccga

SEQ ID NO: 51908 - DNA, 1369 bp, Arabidopsis thaliana landsberg
gcgaaagataagtaaacgtgtttggcttacaatccctttgagccatgtgctcatatactagcaatgcaactttcgattttcttgatttttcgcaagcgcttatcactagattatatgatgaagttgaaactgttaaacccgaaccttccatttcatacaaaagcttcacagctttctcccaataaccaagcctttggcatgacaccatagctgtgttgtacaaatattcatttagacaacacaggttttcgcttcttatcatatcaaacagctgaagaacatcttcatatcggtttgctttgtataaagccgtgagcagcgcattccacgtgtactcgtctggtttatgccccaaggattttaaaacactgtaaaccttaaacaccaatccgactttacccgcctttcccagcgagtttatcaaagtattgcaagctacaagattaggcttcatccctttctttaacatactctgaaatatctttaaggccaaatcccatttttcctcctttgtacacgcacttatcatcgcatacattgcatcctctctcagagatatcttgttgttaaccatctcatcatacacatcaagggccaattcacttctcccacaccgaacaaaaatgctaacaagcagagaatatgtaatctctgttccaatatgaccatcacctttcataactctccatattctctctgtctcatacacattatttatccgtccacatagagaaatcgcagtattatatagaaccacatcaaaacaactcctatgtttcggctccctttctagttctctaaacattcttaatgcagactcgcaacccttaacttctgcaacagctttcaacatcaaactatacgtgtgccctgtaacattctcctttttcctcatgaactcaaagacggtaaaagctttctgaatatctccattcctcaagaggcacgagagaaaagagttacaggcatgagcattaggttgtaaacccaagaatctcatagaatcaaacaactccaatgcgcttctgactttatccaacctgctaagtttccgaagcctcttcgataaagtttcttcgttccgctcctctagaaaatgtatcctattcctatcccctgcagtcttctcctctagttccaaaccacaaaccacattttcaccgttgaaagaactgtctaattcactactcaccttcctgaaacacatgtttggtgttgccaaagaaaaagactccatttttacacctagacgccttcgtttaggcttcatggtcaatgtaaagttcaatgagtgactcaaagaccaatgaaaagttctcagaacacaagagctctgctcaattaaataacatccacaaaccaattgaga

SEQ ID NO: 51909 - DNA, 848 bp, Arabidopsis thaliana landsberg
agaatttcaatttaataaggtacatagtatttcaaactcatatattaattaacttatttaaatttacttatataaatcagtgataaacttatgcataaacataaaatcaatagaattttaatgagattttaaattttattacagtataagaattaaataatatgatataagaatttatttcatgtttttatatagtatataggattagtgacaatgaatattagttgaatttacagtttattttaaggtaaatatatcaaatcaatactactttttcgtttatttaaaaaataacaatttttttcttaaaggtaaataattgtaaataagttttaaacaatgtaactaagaaaaaaatagaatgaatcatactataaaattacaaaagaaatgtggcactatatatagtagaggttcctaactctatcattctgtatcatcttcatcacaaaagaatctaaagaaaacgaaaccacatcgtgagaatcatgagtcttcgtaggttactgtgcacgagtaggaaagttcctcctccagttgtagctgcgagaagcaccttggatctggctccagttaatcctacgggaagcgacctagatccgcacgacgacaagtgtgatccaatcaccccaattgatgacccagaactttatatttattacaagagttacaattctgcgagggacaagtgtctcaacgacactttttacaaaggagggacaaccgaaccggatgtttagaggtttgctcataaattgcgtccacatacacgacgctgttgagatactgacactgagaatatgaggatagccacaatggagccgttctgacaagacaattcagttttt

SEQ ID NO: 51910 - DNA, 843 bp, Arabidopsis thaliana landsberg
ttttcgctttagccgtcttctccaacttggagctctcagcttcttcacttgtcagtggcaagatctcttgccttgactgccaccgcgatttcgacttctcaggtctactcttttaactagtttcatcacttggattttagtgtatgtcatggaagtttctaacttatgaatttcattttgcaaatcaatcacaccactaatcacatttttatgtagctttatttaaaaagggttataacaaagggagaaatgatatctagttagactatagttttcttgatatctaagacattagtattgcacaatttatttttcaggcattaaggtcctccttaaatgcgacggagagaagaaacaaataaccgcgatggcagctgcagacggatctttccggtcagtgcttgcaacggctgacaaaaaaggctccataaattgtcttgcaaagctcttgggaggccctgagcaactctatgctcacaaacacaacttggtctctgaattggtcaagtctaaacacgattccaaagttttaactacctcaaacccacttgccttctctctctcctgccccaaaccatcccgagatgatatcgggagtatgatcggagattccaagactattaattttccgggggcaggaggttttggattcccacctgccagcttctttcccttcttaccaatcattggtatcccatgatttaaataggtgttacttttaagtccttaaagacatatggatacatatggtttgttgtttacgtgaatgaagccagcccaggccaggccccaatatttagcccactaccttactttggttagttagaaataaggtttggttaa

SEQ ID NO: 51911 - DNA, 1848 bp, Arabidopsis thaliana landsberg
aagcactgcttggagttgcagcattccagttctgtccttatgactgttactgtagccgagacttgtttctcaggtgagcgggtaagactaccgttttgattgcaagcagtcgttgctgcactgtttccatctgactgaccagcactccatcttttatgtggtggcagagagcagtttgagtttctaggtaatgtatccagcgagagtgaacagcttattgggctttgtacaagcaaagaactttcaacttttcttttgtcccagagagagataaaacccacagtatccctttcattagaaagagaaaaatccaatggcacggcgtggctacaattgtttccgcttttgttactcacatccgagctccttgtgatgacactgttactgctagaaataacactctggtcagtgcacactgagttggggctgaagtcaagtattctactctctattttaggaacagccacagacctgttttgatcgttagctatagtagctgtcacttcctgcttggggatagaatgattctgtaataaccctgttttatggaactgcccatttaatgcgtcagtcaaaagtatggagctgtgttgctgttcacccaacctccatattctcagctctggtgggaaatgcccgcttgaattccattgtcgcaggttatataacgaaaatggtccatgaatcttcccatctggatctccatataaccataccatatttgtatccaaaccatcaattggcttattggacagagtggcacttgtgtcaggttttacaactgcatggtttctgctatcagaactggaaggtctaacttgaatactgtgcccgttcaattgctgtgattccccttcttgatgctgttcagatgtatttaacctatcacagcttctgcccgcattaacctggtaagacatagtttcagtgactccttcggctgaattatctgtgactggagacctaacttgatcgatgaagtgagaatcaagaagctttaacatttccaagttgtccactcgctcctttccaaacaatctcataagcttggagtcacacattatttcagaattctgaggagagttttgtagattattccgtctcacatactctagcacgagagtttggacatcatactttgataagacagaaatatcaccgtttttcatataccccacaaagtccaaaagctcattggttgcccaagtagcagcactagtcaattgtggaagtctgtcacccaaagaacagtttgaatccaaagaaggacccaaattactcacagaaacagcatccattttccttactttagcacgacgtattttcataaccccaggagaatttccatcatccttttcatgaacccgactagtagttcttcgcttagcggcagtagaagaagaagatttccatggattttttgctttggtaagatcatctaacgataaacctagcttttctttaagagaaacccagtaaatcttaaaaagatactcccagctgccttgatcatcaaaatcaacctgaacctagaaaatgtacatgtaatacatttagctagaagaaagaatccacattaaaaaaacaaagcgacattacaagaacagacctcaagttccacaaataaccttgtagtactgcgagtaagagaaagtaacaaaatgtagacaggattctcataccttttctttgttagcttcagctgcattctcaataagcattatagtcttcatacaaattccacagaatcctttgttctcccttacaactacatactctgagcttttaacacacctcttacaaactgaatacggacaagttaacacatgtagaacgaatcctcttgac

SEQ ID NO: 51912 - DNA, 285 bp, Arabidopsis thaliana landsberg
aaacgcgagaaaggccctagtgaaggaaacaagagaaagacacaatcaggtccacttagataaaataatagctcactgcgaacagatatcagccctatagcgtttcatgagacagaaacatagaggtggaggatgaaaagacagagaaagcggagaagaaagagaagcgaaagaaagctaagaaacaaacacatgttgggacacagagataccaactaagaaatcgggtgaaacaacacaaacgaaaaaaagaaaaataaaagtagaaagcaggaagactaaaaa

SEQ ID NO: 51913 - DNA, 897 bp, Arabidopsis thaliana landsberg
ctaagcccggtacttctagtgggtctatagccacgttttcgtagatcctgttatttcgtacttttgcaaatcgcttttaaaatgaaaatattttttccacatacaaatctctttgacagatagttaactataccaaatggtgtcgaatcatacactttaatacttccaccaaaaacttattattaccctttttgtcataaaatattaatactatataattcaatcattgaatttcaatctaataatacaaacctgcaacatctcagctaaattatagcatggtttacgtggtaaaggtcacaatacatcaagcacatagtggttttctatctctttaacaaacacgtgcattacgattaatggatatatatctgagttattggttgattgtacctgcctccacttccatttctacctgataattgaatattagtggattcttttgaaaattcagtgatacgcatagggtaggaaaccaatcaaagtcatcttttgctagagtgttccgtgttagctagagtcttaacacgagatatacttatcatcaactatttttaagaatcaaataaacatgttatttcatagttgaatattgtgaagatatccaacccggattttggttgggtttggattcacattttcgagttttaggacttgttggtttatgtataaaagtatccaatacaaaacgtacttaaatatgcatgttttggtataatgtcggttttatttcatagttgagagttcttcgtcaaatttatcgatagttcatatttggcatgtatctttagattggtattctcctcacacttggaacaaataaataattaccgttgcaagacttttaacacattttgaatcatgtttatcaaaatcttaattcaaaacatatgacac

SEQ ID NO: 51914 - DNA, 1008 bp, Arabidopsis thaliana landsberg
  unsure (1)..(1008): unsure at all n locations
cgcatttttatggttcttgtaactaaaataaattatagctattaaattagtaactttatgattaacttgtgtttttctaaattatgatcgtactttttcaaaattttcctatcttatagaatttgttagattgagaattagtcgttgataactgtatatctaaatggatccacaaaaatcaaacaacaataacgattatgatggtggattcatagagtggagaattcttcatggttcatccttttttcatgcgtacatttatttattttctttctttctagtctttggtatcaacaagtctaataattttcactaaagctactgctgtgttactatttgaacacaacttgaattatgtgtggatttgtgttatagacaaaagtatacgtaaaattgcgtgggcatttttaattgtataataggattttatgctataatggaataatgttatagtccaccgaattgtatcgaaagaaagtgcatatgaacggaacattcattagatcaatggtcaatatattcctttatgtaggtacatagtaatgtatgcggcaggtgtactattatcatcatatgttcaaactctaacgcatatactatataccatttcgtaagagattaacagagttttaatgttattcgttttaaccatcaaattccttcgaaataaatagctatatatacctaagtttgtagagaatctgaagatactcatagtcgcagccagcgaaagaaagaatactaaaacacttttagaaacaaatatctagattgagttaagccgacaaagtagtagatagaattataaatacatatatattatttaacagcaacatgaatctctctaccaacacaataatttctgaagcttaaaataatatcttgcaaaagcttaaatagcattcattttaaaatatcgctcctcttggtcatttgtatcggagtatggnctatcatatcatcatacgattatatacgtttacagaccctgaaaactttttctctttt

SEQ ID NO: 51915 - DNA, 941 bp, Arabidopsis thaliana landsberg
tttagtagcagccgctgacaattttcttttcctcaaaacagaatgagtgagccaaaattttagaaaagaccggtttttagtgaaaatattctctgatttatatatgtatgttcaggtattcgtagagtagttttactgatgttactcagagggatagaatttccacccggtaagaaacattaaacctagaaagataaaattttcattttgtagttgttgttacaaatatgtcagtttttttttttcctgatattagcaaaaatctggagtaagaatactattgaggctgatatgagcaaaatctagaataagagtttcattgtcagacatacaacctacctgaccatgcatatcattggtggtgctataacctaccttaccatgcatatcattggtggtgctattgatgcttgtggttagatactacaacatccgaagactggagtcttgaccaacggaaatcaaccggctagaatttgctgcatcaattgctgctttgtatacttttctctgagtgcccttgaatgtcctggacagttgttgctagttttttatcgatatgttgcagcattatttatgcgaagagttgacgacccttctcatcagtctcttaaccctccttatcactactctctatttcttactgtcgaagggacaaatgaaggttcttcttattattctttttcatattcctcttcttattcttattctttttcatattcttattctgtatggcaaatcttttagccaacttcttaagattcctaaccgcctatgggcattattagagtcactaattacatatttgggtcatactagagagactttgaattatttgagtcttattaaaaaacaaatgttcttagcattttgaacattcgactatgtgcaaagactgaacaagccactaaccatcaaaactaaccaccacaattactggt

SEQ ID NO: 51916 - DNA, 1079 bp, Arabidopsis thaliana landsberg
ggttttgaaaatgtgttttgaaattggatttcatgaaaatactactcaatggaaaaaaatatgaacttggtttttagagcaaaagggtgaatgatcaaagactgattgtgtttctcctgattaatcttgtctcttaatgttttatcagatacttcgtcacaaaccaaatatcatatagagaacttgaacagaaagcttatattatatcaaaggccaaaagattcgatttaagatgtttcttgattcttcaagaaagaaaaacaaaagagttatattgaggtctgaaatcttacactagagcttattgcaactggacagagaaaatgcaagataaagagaatttatatatataaaaacaaccataaagatagaacttgaaccaatcctatggtgttaagagcttaaaatcagatcaatggtgatgaaggtcgctgaagtagctgttatctttcacataggaaaagatgtttctgagatttcttcttgatggtttttatcaccaaaacattttttggaccaacctatgtgttgtttctttttcaagaacattgtttggttgtgttggtgaatggaaactggattcaggactgcatctagctcaccacaggatgctgctattagtcctggatatatacaagatttggggttggggtaaattgctgaatatctttattacatcatagttttgaggttttatttgaaatcatgacaagaactctgacctaagaacagaggagatactttcccgggtctcgatttgtactcgggatgaaattgatcaccgatgaagaaagggtggcttggaagttcaacaatctccatgcgctccccagtttcatcttttgcagcaaaagagagaccagcctgttcaaggcttgcaaccatatcaggattcacctgcaagaaaccagttagtagtatcaagaaatggccaagctctaagaaaccaaaatgtgtattcaaatatccctacctcatatctatggcgatgcctttcatcgacaaactctttgtatccatatctgtaaatatagtttacataagtagtctagcaatggcagagtgatttagatcaaaag

SEQ ID NO: 51917 - DNA, 1302 bp, Arabidopsis thaliana landsberg
gaatttatgtttgagataccatgcaatgcaattatttaatcatttggggtaagtatacagcaaagaaagcttatttaccccgaccatttgagaggaggaaccagcattggcatgtatggcatcactgcatatctcccctgcaccacaaagaaaaaagcgacattcacatttccaacaatatatagattagatgtctcagttataccttagtcttcaaatcccagaaatatttaatctaatttacaggggctacccaagtcaaaccctctttagatataacattcgacaaaatgaccataataaatgactccgagctctgaaaaagagtcaacactatttttgtcgattttgggttaaatttgttctgataacaaacaaaacgcgaatagatcacctacacttttttccaagcctttgcggaccaaagggtcacactcgattacaccatatttttctccagaattcctgttgtacaagaaagactggaatatgagcctatgacattcagggcaagaagataagcctagttgaaagtcatagaccgaaatttctcacatgcttcctttcgctaccttgaaggtatgcacaaatgcaggtcggacattaggcagaacattatcctgctgatcagctggagactgcatataaactggtcttaccaggaactctattaggcgactttcaacctgggatatatattagaaaatatcaaaatattagcaacttatgcagccaacataatctttctacctctccaacaattttgcagccaagcataaacagaccttagccctaacatctgcgatccatggtttcgtatagtcatgtgactgcaagatctttctaactgctgacaacttctgtttctttatcaactcattgaccttttttcttaacttatcttgttccttcatagaagtttcattttcaactcccccactctcctcattgtcatccccttttttcttcttatccaagaatgtgcatattcttatctatcaattcacatagagaaaaacaacaccattagaatacaaaccatccaaaacaccatagagaagatcaagacaatcaaggaaccctaaaggctaataatacaagagaaaatattacttcacacctccatataaaggttgtttttatatgattaattacaactgtaacatgctaaaatgaaggagttccattcacaaatagtgaatattttatcaatatcatgttccacatattaaagcaatcggttttgctttaagatcaggctaacagttccagtatccagctatggtatacatagagtttaat

SEQ ID NO: 51918 - DNA, 610 bp, Arabidopsis thaliana landsberg
aggcacaacaaaatggcgaaaacaccgatgttgttcctcctaacattgcctcaaatctcatcgctgtggtgactacaggcaatgcagctcttcttgatgagctacttaaggctaagttaagccctgacattacagattccaaaggaaaaactccattggtaacgttttgctttcaccataagccatttaaaacccttactcataatcatcatcacagccgttaattcgtcgtcttatattcatgtttcagcatgtagcagcttctagaggatatgaagattgtgttttagtactcttaaagcacggttgcaacatccacataagaggtaaacacatcatacttaagaaccgttatgttttatgttctactgatatgttttaagaacaagattttatcataatcttgcagatgtgaatggtaatagtgctctatgggaagcaataatatcgaagcattacgagatattcagaatcctttatcatttcgcagccatatcggatccacacatagctggagatcttttatgtgaagcagcgaaacagaacaatgtagaagtcatgaaggctcttttaaaacaggggcttaacgtcgacacagaggatcaccatg

SEQ ID NO: 51919 - DNA, 843 bp, Arabidopsis thaliana landsberg
tatatatatatcttagttaattagaggagaattgtagttgctcaagagaatatgtacgttttgtagaatcttttagtggcaagagataatttatcttaaaatgggataatatacatggtccatatgattataaacttctttttcatcaccggcatgcttcaagttaagagatgaagaaaaaaaaaaacaggcccactttatttcattttcacataattcactcacttaggcatgcaattctttttgttttatcctttttctttttcaatattttttcttttcccgcaaaaattattatgtatgctacattttttaatcatattttatgtaggccagtataaaaaccgtaataaaaaaatttcaaataaacattttaccaattctacatttatatcgacatggagatctatctgaacctcatttctcaatatagactgtataatatatatacagttttgctagatttttcacggtacgaaataattttgttttctagttatagttagttaattggagttgttgtaatttccatatagtctacatgtttagtttgatgtcgatataaatattaatgccttttatgtcatttcttgagtgttggatacaaataacgatcattctcctaactccaaacaagtaattaggagattaggttcgaaatatatgtattaggagattagtttagcacacatccctgacgatatatgtatttggaagcttgttaggaaccgacattctcatagcctatgctgagcatctgactaacccaaaatgatgaccacgtgagatatattcgtaagcaaattatgtggaggaccgggacataagcgcacaaagggaaca

SEQ ID NO: 51920 - DNA, 1136 bp, Arabidopsis thaliana landsberg
cactatccaaaaattcaagcggaggagcatttggctctatgagggaggcaactgaccacagggggtgagggatgttttgacccttaaaggaattgatcactctagatcgccctctttgacaactcagcaaagagttctggagcagaatgccgcatggaagcaaacgccccagcaatattagcaacattctgagaattgaactcacccacctttgatgtggcaacttctgcaaccctatccatctctgtcaaatatagcaattcacctccaattttggataatgcccaagaaatatttgagatgccttgagctgaacattctggtagacatgtcattgcaagagcaacaagcattgacatctctctttgccgagcaaatgcaagcctacgagttctcatcattgaaactttctccatattcttggcaattcggtgaagtgcagtagcaatatttaaaggagacaaaggcgatggacttaaacctttggcaacagccatgattgtctcagcagttacttccaatacctcttcagcagtctgtgcttctattatagctttgttcaggttgatttccttcatacgatcagaaggtcctgaaaactgggatagcctctgagctaattgctccttcatcttctccttcttttcctcaaacattccaccagctaatgagctaactctcttccgtagatcccccatcttatcctccacaaatccatcttcaaaatccaaatcttcgtcctcggtatcaaaatcatcttctggaatacttttacttttgaccttgtctttctttacaatgactttcttgctctttttctttttcttcttcttcaatggcatcacctccgccattctagaagataaccctcttgcctcaatcgatttaagtgcaattttccttgcccttacacaccaatccatcccttcagtgtcctcaagcgctttcgaattcttctgctttttcctcttcttcggaggttgaatatccaacggatcaatctccccgagaaactctgcttcccagtccccatcatcctcctcttcttccacttcttcctccgagttaccaatcacagacgcattctgaagcaagaccaagacaatatgtgaacactcaagcttagaattcacaga

SEQ ID NO: 51921 - DNA, 648 bp, Arabidopsis thaliana landsberg
atacctcatcataaatatcacattgtcagttactttaaatctatcaaaaaaaataattttaaaactgcatatctcacatgcaagaggcatgtgagacatactggtaaaaaagatgacacatacgtcaaaatagatgacacatacgttttgtcaacctatcattattttactttatttaaattaaattattttactctattatattttatttaaatacatatacttattactagtaacatataaaactaacaattaaacattatatgacaattaagtttaccaaagtaatatactaaaatgatttccaaattagccatgcaataattaatatttgttagattaataaatataaattttatgggtgacctataaaaactactcacttccttgttggatggaggcgggaacacggaagagacacgacagatgcctagatcgtgtagaaagacttgggcggagcgcgaacgatgagactctatatggtctgaccaagcgcacgggatgcaactttctcgtgtttggttgcttagtcacctcttcagcttggttcatggaatgcaaagatccctctaggcttggctttggagatacgcagaaaatgggcgtttctccagagccaggctctactggtgcaccattagtctttta

SEQ ID NO: 51922 - DNA, 665 bp, Arabidopsis thaliana landsberg
cttgagacagattcttttgaagtcataaaatctcccaatggcattcacctaccatcatatagtcaggaaggagagagctcaaataatcaaggatgcgatggtaaaaaaccgtctctgtccaagcagaatgatttgccaactcagttgggtggttatacgtataagtcccctagtacaactcatgtgtcaccacattgcaaaacacctcgaagaaatgcctttgacttccagaacctgagatctgaagacaaattcgaagttaatcagatatgggctatctatagcaatgacaatggaatgcccttagagtatgtgaagatcaagaaaattgaaaccaagcctaagtttgtgctacgtggaaccccgacagagctgtatccgccatctacagaacctgtgacccgcacagtgtcttgtggggaattcaagttgctcaaaggaagacccaaaatcattcctcatgcgagcttctcacatctggtcaaaccctttgacagtagtaagaggttcagattcaaagtatacccaaggaaaggtgagatatgggccctgtataagaactgtgatagcactgaagaacctgacattgtagaagtggtggaagataactgtgatggggagatcgtaaggggggggctttgactgctatgggctctagttttcag

SEQ ID NO: 51923 - DNA, 886 bp, Arabidopsis thaliana landsberg
aacgagcctcatctaatgcttttggaggttgaaaaagaatcgggcctatcaaattgcatacctctaattattggagatgcagctgttagttccgaaatgaaactaatagagcagaagttcaatgctacactctttccagagggacaagaagttactgcttgctcttctttgacttgctgttgcagggattttggggagagacagagcacctttagtggcctcttgttagatattgcatggtcggtgaaggtaccctctgcagaacgcactgagcaacctgtgaaccgatgtcagataaaaagatacaacagagtgttgaattatctgatacagaataactcagcgtcgatcttaggaaacgtactgcacaatttggaaactttggtgaagaaaatggagccagacagtcttgttcactgtacctgtgactgcgacgtgaggcttctacatgaaaatatggatttggcgagtgatattcacagaaagcatcaaagccctatagagtcaaaggtgaatcctccttcgtcaggttgctgttgtgtgagtagtcagaaggacataccatcaagaatattaaacttcaataaggtttttcactattatctgacttcccctattttcctgtttgatctatactggactctgcccacaatctatacttgtcttgcacatttggtttcttgctccactcctgagtgctgaacactaacttttgtgtgtttatggtatatttggttggcacattgtgacaaatattaccggagtctgcgcacaatattgtgtctgtttcttggtttatttgcacagtttcccttatttaatgtttgccatttattaagtttacaaaatcctgaagcaggattagattgtaaagagagaatacagg

SEQ ID NO: 51924 - DNA, 2006 bp, Arabidopsis thaliana landsberg
ggatttatgtatgtgatgggtcacgacttgggtccagatatcgttcatatctatgctatcatatgaaaactttaaagggctacagaaaatgtataatggtaaagagcaacttacagcaaggatactagctgcccgagcctcagcagtataagcatcaattgcatcaagccttttgtatattacttcaagcctttgagacataagatctccttcaactgtgtctttggtaggcattccatccttagctgtgggttcttccgtttctctcttcagataaccaaacaaaagtcaacattaccaccaaagacagattatacgaaaaggtaaaacacctgagtgagtaaatgctaatacatattagtaaagtagcttgtgtctaacctgctttgctagtatttgaatctcttcttccaacagtttggttctttcaatatcagtgttaagaacgcactgtaaggctgttgtcttgtcaccaacgacttcttgttcaacatgcaatatctggcaattagtaggaataccctctatagcatgcatagccatatacctcaaaaaagttgtttttccggtaccattacgtcctacaagacctgtaaagtcatccaaagagagcaaatacccatttgtaaggtagattttccataccgtctattccttggattaaacagacagctaaaacaaataaaaacgaagatcaaacccaccgtaatgacgtccaaaagagagggtgattgatccatcgacaatgagatcacggcctccaacagaaacattaaagttatccatatgaatatctctgatagcagagccaccaccagtgtcatgattgacactaacagtaggcatccctgctttagcggcttccatttcagcaacatgctgctgatattgtagctgcataaacaagaaaccagtaaataaacacaagataagaaacaaattctcagttcaaaaccggtaaaaaaactgccattactgtatacctctctttggcgatcatcctttttctttctcctttcaatcttagccaagtcacgttcagtgagcaaaggcccatccacaggctctggcttcttcttcttaacaggtccatcatccatcccatcgttcatccgcacaggcatagcaagactcctcacagtaggtgtaggcttcaccaatccatgctttccaaacttatccgacagtttgctacaaacctacacacaccacatccaattaaatatctcagctcattcaaaagcgagaccttattgaaaccatttcaacagtcacagaggccctaccgaaaaaatcccataaatacaaacaagcaaagataaaacgaatctagaattacgataattgaaatgaagaaagccaagcaacaagctgcgaatggttacttaccaaacggcactcttcgaaatcggaaacgcattcagcagcgacgaggagctcaccgacggcatcaaaggcgccttcaccttcctcaccgaagtcgaaatcctcatcagcgaggacattaatgatgtagtccataatcggctcgtccacatcctgagctctgcgtccgagcacttcatacaccactgagctcgcaacttcagtcatagccaacacagaagcgacgagattcaaaattccacaaaaactgatttgataactttcctccacacccgaaatgaaggcaaggagagaaggcgaaactttttagggctatttggaaccttctccctcaggcagagagagtatacagtacgttttctaagttactaaaccaaaccaaatattatgatttaatccggttaacgttgttccctcttaacatggctcaaggccattgtgaaatcaaaagtcctcaattttgtttttgttaacacatgtttgagagatgatagattagcaatttggattttaccaaaactagacctcttaattgtttcgccaaacagagaaaaactttaccaaattaaacaaaatgtcatatttttattactaacaaactcatattatctataacttgt

SEQ ID NO: 51925 - DNA, 606 bp, Arabidopsis thaliana landsberg
  unsure (1)..(606): unsure at all n locations
tcgggcgtcgtgcgagaaactgcacattttgcagggttcgcactgcctcggacggagcgctaggggagcacgcgataggagaggcatcagtaacggacaaggcagttaaccaccctatcacgctacctacgcacgatacgacaaataggtcgtttcgcgtcccatcaagctgcccatgccaagcggtgtcatgatgaccctctcttttaccacgtcgccacaataaccgcctcatgttaaccaaggtaaaaattgaaacttgccctgactcctcacgtagagcaaggggtggaccgagcaagctcacagcgagccgcaagctaggtggccggcccataggtcatttcctcatctccacatccaaggtcgtacctcacattctcccacggcaaacagactgacagggtggctatggggcccctttgatcggcgagacgaccaaagggacaatataagattcaataaggaaggnnnnnnnnnnnnnnnnnnnnaggtcgagccccctagtgggctactctcaagactcaatcttacggaggtggtcggatctcacttggaaccgcttgttgtcgatagctcatcccgtgctactaggtagagtaggtg

SEQ ID NO: 51926 - DNA, 1260 bp, Arabidopsis thaliana landsberg
gactcagaagtgaaattaattagacccaaataagattttacattttattattgctcgttaaaaaaaatgcatgcggcatcttatgaagttgtggatgtggtagtacaaaggtcatatgcacataataacttacatagatgggtcaataaatcatcgttagatagaataataatggtaatattcacttaatcaaatatactaacaacaagtcgttcaacatatataaatgatggttgatcaagggacatttgtacttaatgttgggagattgttgactgagatatctttgctagtcttatttgtttcattatgatccgatgtcgtaagcatactcttcatttccttgtttttagcccatagcacaatgtataatgctccaacgataatcactgtaccaattatgctgtaatgttttcaagtaaaaataaaccatattatatatacatacgtatatcaaatccatttccacaaaacaatacaatatacatgagtttgtacctccccaaatgaagtgtttcatctagcaaaaatgatccaacaagagctacgatcacaagtcctacagggctaaataccgatacaaataacggtcctctagactcaatgcaccatgcgttgactgctaccaccatcccggaaatcagaattgcctacaatggacaacataaagcacatatattcaaggccaacctaaatgaatcttcacacatgtatagacttgtatgaatttgtaattagacaacaagacatatatatatacttaataatggatggattgatatttaccgcataagcaatggttaatagtctgatattccatcctaatctccattcatctaaatcgtgttcccagcaaagagcgacaagcatagccactacgcctcccatcatgttcattagagtcgcgttccaataaggccctccaaattgtttgcttatcttaacctatgaacaaaacaaaaacaaaaaaaaacacgtacatgcctaatgccttaggacacaaaacaaacacaaaaataagaaatctgaaaaacaaacaaaaaacttgcctgcatttaaaaccaaagtgagatggaaatgtttcccccaaaaactagaagagccccaaggatggaaatatggtgagtggatgcatcacgtgaggagtcacgtggttggttcactaggttaacgtgagttgaccataggcggatctctattcctctatagaatataaagacaagagctccaccaacaccaaacaatgttccaaaaacctta

SEQ ID NO: 51927 - DNA, 475 bp, Arabidopsis thaliana landsberg
aaaaatactaccgcctcctaatatcattaaaatcttgaagcccatgtttgtaatatacaaatcttggatccagcccttttatatcatctgggagcaaggctatgggagttggaaacatgaccatataaatctccttttttttcccaacaattcacattcacgtgctcgcttctttgccaatacactctgttggtttgaaccatttacaatttaatattattgaaactttgcaaaacaaacaactttgatgcaactgtgacagtcaaaaatacaaaatcaatcctagtgttagttattggttattctataaacaatttttttttttttaagtttattaagacttgcgatatattatacacgcatttgtttcagcaatatatatagtatatatatataatcaccaccactgtatgcgaactttatttataaaacatgcactcttataatgagacaaagtatcgccaaaccaaaatcg

SEQ ID NO: 51928 - DNA, 1075 bp, Arabidopsis thaliana landsberg
tttgaatcaacctagaaaatcatgacaaatgaaaactttcatattagcagcagatttatgaatgatagggcaatgagattcatatacataaaacaaatcttggaaaaaagatatagctagttagttcaactaattaatagaaacataccacttcacagatcatcagatcatacaattattttgaccataggtgaatcatattatgatcaagtgaactctactcacaatcaaaacaatattttggaaacagttgtttagattgtgtaactacaatcagtaagtttgatatatttactaatattgtttcagctctgtttacctattgtgcactatttgaatgaatcttactgattatatacagactgattatataatatgaataattatgacaaaatacataagttaattctataataaagttattataatctgatacaaaatcagttgaatactactactaaaattatactataataaagagataaatgggtgtaaatgtgtggtcagcacgtgagagttacttttggcgcatgcgaaaagctgatggaaataccacatcgtcaaaacttttcattttatattattatactgaaatagtgaaatggtctcaaatgaaaaagtaaaataaaattgtgttcaaatgatcttaaaatgtattttctttcggcaagttgaaattcttattaccaaatcaacttgcttaaatagaaattgagtatggttgattaaaaaaaaaaatgtgtgagccaaaaacgagagagaatgaaattgtgtatttttatggttgaacaataaaaatgcgttaaatacatttaattttgttacaaattacatttttcttattaattttgggcttaaacatagtaattcttaataagtgacatttgatagatattacatacatgatctttcaaatttgtttttgctgtatcagttttatttgatttactggagtagttttgtttggtcttcttttttcacacagtttattttactggtattattcagagttttaagtatttaaatgcacaacatatgtatcaaatgaaatgaaagataaataaatttattctta

SEQ ID NO: 51929 - DNA, 1170 bp, Arabidopsis thaliana landsberg
tcctatactaagaatttcattgaaatttctctctcgggggataaaaaaaaaatattgggttgataaaaagatcctcggaatttttaatgaaagccaaaaaggatttgtctctgcttcgacgattgtattttaccgctaccggcgggagagatttataagaacgaggaaaaagatggttgtttcgtataaccagaacaaattaaatccgccatgaacttaagagactgtaattgcttatataagatgatgagatgactctgtgaagggaggagggagaattacgagaagggtctctcttcgacttttgacagaattattgcttctctaagagggtacttttggtatttccatattaaaacctgcgaaagaatatgcttgattttacacaaaagaaaacaaatatgctcaattaatatatttttgaccacaaaaattaagtttccaccttttttttgtttaaatctactttttaaaacaacgtttaaatctattatttttttcacttcttgatgataaatgataaaatagttttataaaaaattgaaatatagtcttggtaaagacataagtgaaattaatctattaaataaatgttcataaaatagagaaaaagaaaatgggatagtcgtggactcgtgggaatattagtgatccacacaatagcatatctggtatattctttgtctatacgcaaaatcaatttgtttatttagttagccaatttattgtgttcaatctctttataaaaatgtaaaaatttgaaaataagcatcgttcacaagtgtcctatgttgctacgttctcacctaactcgttttcttctaagtcaaaccattttccattaatgttaccgattcacgttggtcgttccgataaatttaatacgctaagccctttttcgcatataaaaatataacagcacagtcatattttaatatatgaacaggtttttgttttctcttaagcggaatattaaatggctacagatatgtgagagaagaagacaggtgacaccgcacgtgttacacattctcttaccaagtactgttaccaaaccgttctctttcatattaagttttgacttccaactctatcaaattaggcccaatgggctttgtttaaattcgagtcaaatcaaccattacgggctgcccgaattttccgtatgag

SEQ ID NO: 51930 - DNA, 1414 bp, Arabidopsis thaliana landsberg
gaaagaaagtaaaataagcatacctaagtagaccaattactggttgtaaggcaccagcacggataacctctttcttgatgtcaggagatgagtggacaagatttccaattgccccaatctgaaagtccatagtacattagaaagaactgaacaaatcaaaccaattgcaacgatctaaagcaagatgaagaactaaccgcttccccgtgaacggtagaatcttgtgattgaagcatcaatacaagtgtgggtaaagcattcaactccacaatctacatagttgcgcattatgtgagaatcatgcctttcataagcctaaacaaaacataatcatagtaaaaacatacttgactcttgttctcgtcgtttctaaatgaaactgttcgcaaggcccctgccgcagccctctgtactttaacatccggaaaattgagaagctcaacaagtggtgcaatgccaccttcaaccctgtaaagcatttttaaaaggtgtcaagtgaaaacagctagtcatcaccataaccagtaaggatcatgagatattagtaccttatatttgttttaatccttggattgtcatgagcaatgttagtaattatatcagcggctctcctaataacagcattagcaaacatgcattcaccacattccccacgtctcttcaacaacttcacggtgggaactatggctccagcatccacaataagctgctggtaaccaggctatttaacagagaaagctaatatcaatatacatcaatccaagctaagtacatctaagatagttgcaaatcgcccatttcaaaaattctaatgttaacttccaacagagattgaaattacacaacatctcatccacaatttcatcaaaaacagcgaaagaagggttacctgaatcgcagcaataagtccaagagcaagagcacaatctttctctagcttgtgctcgcaagatttgggaacattgccacaaactaccaaaggggattccagatatctcaccaaagcagggatcgctccattttccacgatgatttcaacattttcatctatataaacagatgagaaaatcaattaagccaaaaaaaaacacttctaggtctcgccttactgaaaatcaaagtactatgggcaagaacaaaacaatttctatgtagaatccaaaattagagtgaatccgttgtcgagaattgattcaaaattgagcaactcaaggacgaacaagcaaagagagtaacacgttttcagttttagccgccgattagaggtaaaatgaagaagtacggtaccgattttagccaaatcggcgatatcagcagcagcttctttgacagcttcgtgatcaacatcaggatctgagaagcttgagttaagaacctcgacgtgacggcgaatcgcgacgacgagatctatggg

SEQ ID NO: 51931 - DNA, 115 bp, Arabidopsis thaliana landsberg
tgatcatctgtcatgtgacaagtgtagagtgcgagagctcgagtccttagttgtaatccttcatgcacttcggatgactctggaatgttgcagtgagttagtccggattctatca

SEQ ID NO: 51932 - DNA, 1058 bp, Arabidopsis thaliana landsberg
ctttgataaatcttaatttaacctatctttgaggcaggaatttaaaatccatgaaatggttttcctggaggcccttttattggggttaggtcccacccatggaaaaggaagcacactactatgatttccatatagttaacagggcatcatacaaggttcctgtgctatattttcgcggatactgcagcggtatgtcacaatataacctgcttggacttttttggttggttctttggtttagttgagaaaatcatctttgttgacacttaggtggagaacctcttgctttggatgtcataaaaaaagatgtaccctcatgctctgttagtcttttgctggaatctaagtggacttttataactcaagaggtatcctctcaaaatcaatactacattacaatgtccgtttaaagtatattatatggttatttggtattgaatccctatgcaaacaatcaatcgcaggagcatccatatttgaacaggccatggttcaagctacatccctgtgggactgaggactggatcaagctgctttcccaaagtagcagctcttctggatgtcagatgccaattgtgttgtacttggtttcatggttctctgttgtcgggcaggtggttggtcttaggatccctcttgagatgctgaattagtagccattttctgttatcaaaatatataatgtatcagtggctccaaaccctcggcaacaacttttaaaggtacgcatttctgaataagaattttcagaagaaactagggactaaaaaacttgagtttcattaacatatgagtggcttcaattcatgagtctgcaaacatcgtaatcaaatctagctattatgttcttgaggtatttaagttgaattcgttttttccaacaaaccattttgcttacaccacttcgggtaattgttacataacggctgattctaaaaaaaaggcttactatttcagtatttctacgtaaagtttgtaatgcctctcattgcttagaaccaaccagtttatagcttgatcgagagtatgaaaataacagcttgtatcccaaatatttt

SEQ ID NO: 51933 - DNA, 1324 bp, Arabidopsis thaliana landsberg
  unsure (1)..(1324): unsure at all n locations
agaaattttcgatggaacatcaagaagttgttcttcgtgctgctgaagaacttaaacaagaaagatttgaggtacatgactgagattatatatgatgcaaaaacatgtttaggccctatctatatcacttttgtttttggctggcctctaacaatttgcttcttgcattacctcattgccttttaagtttgaaacttgttgaggttaaagcacaaaaccatttatgtgcttttcttaatcaagtgtattgtctgtttgtttacggatcatgaaacttagtgtatctcattgctcttggtgtaactaaaattaggccgctaaaaaagccaaagaagctaaagaaaaagagaaaaccaaacacgacccctgtaaaaaaagtaagtgttgtttaatttaaacgttgaaaatgtctagtttaaggtgcagttttgttttgtatacatatatatatatactcttattaagaaaaagcatgtgttccattttgcagagcattccagttactgtgataacgactttgaatttatattccaaaatttattcaaagaatctcgagattcctattattcaacacatagagagaaggaacataattggtggtatcactcttcatggtcttctaattactctagcaactcttggagatcgaaatataacttctatgaaggaggagaagaaaaagatgagaaagaagaagaaaacaaagaagatggctatggttcaagaaaatccagaggctcagtgtttgagtcaattgaataccaagcctctcatagacaaacacttggtctgagtccttggggtcccttaaaactcgaagatgtcaaaaaagcgtaagttattttactccaagttcaaacacacaacacatacattcatgaccaaacgtgttgtttattttcagatatcgaacttgtgcattacaatggcatccagatcgtcatgaggaatttaacaaggtaaaccaatatannnnnnnnnnnnnnnnnnnnttatatgtttttatctcttgtgttaatccttgactatataaactgacaggaggcagctgaagaaaagttcaagctctgcactgttgcttatcaatctttaatcgagaagttagcagtcaaataagatttttgtgtaacgcaagagagttagataggttttgattactcttataacaaagaatttcctacagaaatgtttttattatgacacctgatcaaccaatatacactacaatgtttaagcatttgctatatgtattgccctgtgattctttaatgcttgttttctctttagtttacaagtacatgtgactctataacactcactcagc

SEQ ID NO: 51934 - DNA, 1234 bp, Arabidopsis thaliana landsberg
aaaggaagtgtttcgttggaaacaaaacgaaagattgaattaatctctccattagaaggacaaattaatggatcatttggcattctcttaaaagaatagctaatttgctaattgatcatattgccaaataacactttttaaaaaagtgtcacataaatgtgcaaagataacttcaatcttcaacagaaaatttgccaggttgagttaacttcttttcgagttgctccactttgttgaatctaaaacctctgattcttatttcttctggaaccgatgtgtccttgtaatctacactctccatggtccaaccattgttctttatcaaacctccaagttttacctgttttcacaatgttaatatgatgataatcaaagagataacaatggaatatgatagctttcaaatacacatcacatacctctgcatcatcaatggaatctacaataagagcaccgtccaaggagagatcttcgataaatacattacgacccttgattgccattgtggatctctgagagacctcgcagttcccgctgactttctttttgatatcagagaagatcattccccatttgggtttccatgtgatacgagaccatacttcaacctcttggccattcaagacttgcttcacaggctcttccactttgacaccagcctaaagaattcgtaaaaccatagaaaatagatgtcgcttagataatcatggaaagaattgtctgattcgaaccgatttatttagaatcaagtttctctggagagtactaattaccttttgaagaatgaggctgttagcacgataaatcgccatttctccagaagtagcactatgatatgggtttccctttggtaccttcagtggataggggaaaacgtattatattagtcagaaaggaagcaccatcattcatatttggtattcctctcaaattcaggttacagtttaagacatgaaccttcttgatcagttattgtctctgtttattaagtattttaccttagcagcatcttcagggttattctttacgggtgcataagcaagccatatatccatcacctacatgaagaattactgtcacaacaagcatgcataaggaaagtactgttatattctacagataacaattaccgtgaatccaactcgtaccctagcaggcaatgtctttggataatcttgcataaaacaaactagacgagtcgaagatttaaacgctgttttggtgctatccgtgt

SEQ ID NO: 51935 - DNA, 1180 bp, Arabidopsis thaliana landsberg
aagaaaaagagaataaaaggttcgtgtaaagtcgtgtttctaagggctttgcttagattggattgttgaaaacgcgtaaaggtgaagatatgagtggaatggatttagtgtaaatattcgttggttactctcagcttttagtatggaggagtctcgagagatgaagagaaattagtcatttgtttcgtttgtcattttgttttaacttcttaaaatcttttgtgatataaataacttgtagatttggaaaaaagaaaagaaaagaaaagttagagagctttgtttcattttgttgtttcatatcatcacccgtcaatcgttctatatcatgccaatggctgcttctatcgagtacaccacatttagcttcactgtttgaatcgttcatcaaattgtgagggattcgtgacattattagtgtttgaagatttggttgccaagtagagctaattccgattgatcaagttgaagtacatatgtgatgatcatgttgtgcacatgtgttgaattaacattcctcttcccttgcatggatttatatgtacaaaaaagaagcagacaatagctacaaaagaagcagacagtagctattcattacacaacattgttgattcttactctcgactctttctccgggagctgtcaatatttcaaagacaaaatctgcttcctcctctgtttcgttttcactcttctgttcgaagttaataaaattctcgaccgcggcgcactatatcagcagctaaagctgagtacaaagtgaagaagaaacatctacggctccaccttcatgtcagctgtaagatcagataaacatgaaaagctttagcgagtttcaagtatctggttacaaaagtatgaaacttatagggcttttactttcacctgttgtatcttcatgatcaggtgcagtgccggtttcatggttcatgtggacaagattgtggtgatcactttcatatccatgtgtttcctgttcaaaactcactaacaatattagatgaatgcaagagaaagaaatgattctgcaaagatatgtttattgttggagtacaatgcgcaaccaaatatatgtacttgccgttttaatcctccactcaatagcgacattgaggaaatgttcggttgcatgaatcctgtttgagagagatacgatacaggaggataaagcatcgacatg

SEQ ID NO: 51936 - DNA, 419 bp, Arabidopsis thaliana landsberg
tggctgcctggaatcaacatttgaagcatgcccttttttgtttttctccctggctgcactgaaggatttccgaggttgctaggttttaaaagttatcttatctttttaaatgtagggagatgtttatcccgttgagccattttttgaccccaaggtacatcgtattctcgacgctcactggggacttctcactgacgaagatgtaagagagttctttgctatatatctaacttcgtgccatgaagttgctaaaaagcaatatgaaaaattcagatcgtggtttgcattacacgagttacacttgtttttccattcaagccgtctggcataatcaattctgttaatatagttacataaatgataaataattggagtgttagatttggagactggatgtatttacttacaaagcagacatt

SEQ ID NO: 51937 - DNA, 588 bp, Arabidopsis thaliana landsberg
ctatctacaaaaagcagtattaggttccgttgaatacattaccacatctaatcttgttttgatcattagcaaacaatctcactaattctccctgcataatcaaaagaacatcttttgagacaactgactcattaaagctatagatacccgagaaatcccggtattttacctgacgaccttgatcatccattggaatacactcaacagcaatcagtttatctacatcatccgcagttacaatatactctggatgggtggctcctgcatatgtttaaaccatagtccagtttttaaatagctgaaaaaagctggtaagacaaatatatcaaatcttaccctcgatgtattgtcttgtgccatcttcaagatgccgaacccacttttcaagaagaaacaacaaaccgggaatttttttaaatttttcatccactaagtttgttttcaaaaactcttactaccaaaagatttacaaagattatacctgaaacatacagagagtggttcctcgcactggaaacccacaccaagaactttttctccaggtatagcatctcccataatctgaaatccatcgattccaggtccctc

SEQ ID NO: 51938 - DNA, 1508 bp, Arabidopsis thaliana landsberg
cggggttgttccgtcattcttaaccactcttaagaaaatatttttatcatgaaaataaagtgaacatatggttgatggcgctgatgttgatgggtccattaaattgttttacacattatgactcgtttggtaaactatccaacaagagttgtgattttttgttcttatttcccctttaatgttttcacccttaaagtagtaggatggctaagtaggatgcttcaagtaaattatgttgtcaatcataaagtaggattcagtttgagataaattaaattaaattaaattaagctcttttgtatacaaacctccacatcctaaagaaactctttcggcaactaagacattttgagaacccaaaattttgaagacctttcgattttgtaacatctatgaggcgtcttgaggagtctaacaatcataccaaagtaaagtgttttggccattgtgaatcttaacacgagtgaagttgattactttgtctttaagtttctaaagcctacgcgataagcctattccaataacatttttgtatcttatcaaaatgtagttagctaataaaacaaaccccatttttctagtttacaggtttttatacaaaagagaaatgtatacacggaagtgaagtggagtgcataactatctctactctttgagtatatgcatgcactaagaaaaagtgtggaatacacaaatacgaactgtgccacgtttaagtttggtggataatggaccatatatgggcctcaagaaatcatttaaggcatagttaatggactttctacaaagcaaaccaaactacgctggtttatgtagaagtaacggcggtcgttggagccttggaagttatgagtctataaatataatttacttatggatatatggaatccaaatattaatcatcaatataatttggtagaaaatttcatctacaaaagcagtaagtacattgcataatttacttatggatgattgtaaacttttttttggttggttgttcattcaagtcagtgaccacgaaactacaagatgcctacaattagcttacccacgatagtcatgtattctttgtgtccaaccttctttctttggttttgcaatcggaaattgaaacatgcctcttaaatttacaagaagatttctaaactccattcatcacttcttacaccatacatattcatgaaaaagagagaactaactttagaactagatacgaaaatgaaacatatgagttatatgcgagatataaaatgtgatttattaatgatacacatattaatatttcttctcgatctggactagattataaggttgaacattatcaagttgacaaaaaagctcaagaattataagtattgacatgatatcatatatcgacaaaatacatcggggtttcccacgagcaatttccacgacaatattcatgcgctctaactagaccgttttttttttcgctgtttcatttgtcattatgcattaacattttctgactacaatatttctttctt

SEQ ID NO: 51939 - DNA, 1117 bp, Arabidopsis thaliana landsberg
tctcctagcatctttaaagtacgattacttcaatggatatattttgcttgtaatgttattaaattatcgtctcgcaggatcagataaaactcttatgacaccaagaacatcttacaaggttcatgactacatacccgtataaattttcatcactcaaaaaatacaacttattattgcacaccataaacaatgtgaaaactatatccatcacttaaacaagaaatggatatcttcattatgttggcttttgattctttttccttttccttacatatacgattaactctctggatgtactagaagtatcttccacttcaactatttctttaccatgtgacacattttgagtcttctccattttcttcaaaagaaccaacatcaatctcaatcaataccaacattatcatcttcaaaaaaaaaaactatctttatacaaaccttcttatttaagcgctgtctagacattaactcatagaatttccgcatcatcatctcttcttccacctataaacacaaatgtatgtaagattgatttcttgctcatattattcatatcaaaagtacacaaagtttcatcaaacaaacctcaagtgtttggagttcttgagtcatcgttttacgagtttctaaaagcaattcagtttgcttctccaaatggctgttgatgtgctaacaacggtaaatcattatacgcaatgcacacacgaaaaataagcgtaaaactgaaaacaaagacgcactttaataaatcgtcggtatattcaggatccatgctccacaaattgatcaacttcaactttatactgatcttgtgctgatcacaagtggatcaaaatgtcatgagaatataatagataaaaattacgtacaaagcacagtttgattaagaaaaaggagagtcttttatcattgattcattcacacacatatcactagagaagatatgattctaataatctaaagggtatgatcacaaattcgaacagttaacagcaaaaacataattaaagaaccaaaccaaaaaaaaaaagcagatttagagaaagaatatcttagttagacaattcgccgagcaactggtgtgcattagtctcgtgcctatcaaatctttcacaat

SEQ ID NO: 51940 - DNA, 515 bp, Arabidopsis thaliana landsberg
gagtcgacgccgcaatactacttggtaatctgataaagaatttcgcaactgtgcaactaatactacgggtaacaaagctttcttcaattgcgaaacatggaagactgggtgaatgctagaagtaggtggtaaatccaatttatatgccacatccccaacttttgctagcaccgagaaaggcccgaaaaatctgaaagctaacttttggttggcgcgaggagcaagcgacgactgcacatatggctgccatttcagaaaacccggtcacccatcacaaaactacgctccgaacatttcttgttagcttgacccttcatgcgacgtaagcccttgctaaatgttgttgtaccaactgtgtcataaccccttttcagacatccagtcctgaagggaaaccagtggacaggcagcttgcaagtcaacagctaaagtgtcgaggctggtatccatagtacacttgagaaggagacatgctgactgctgagtgccaactgacattataccacaattcagcc

SEQ ID NO: 51941 - DNA, 1082 bp, Arabidopsis thaliana landsberg
agacatatactaatctacactgaaatcactaaaaagttcaactacttcacatgctgatactacaacactagtcttttgttctttttagggcgcgaacactacactagtcttttttttattgtcgacgctacaatcttatcagttacagtatagatagatgtaaagggagtactaatatcagaagctgttatatagtgcaacgcatgaaaggtctacaaggtctataactaaacctaatttttataaaaattgaaatgctaatcattgatatgacaattggtttgcctaacacatacataattgataatgattttgtaggcatatgttatccattaatatataacaattagcagtggaggattagatgggcatgcaatgcaaaggtgttttagtgtcataattactagatatatatagacacatgaatattgggccaacactgtcttgagccactctttggcattatgacctttccactacaatatgacaaattatatatttagttcacatgaaagctttaaatgtacattcactcaaaataatcagttgaagtgctatcttttggatttttttttttttttttttttttggttggtattacattaatgtgagcaaagcttgtagacaaaaaaaatcagaaaaaaaacccttagaatttacagttgtttgtaaaatcttaataaccagttaaaagattgatatataacgtaacatcgatcatgacagtaatcactgaagtaacatcaaatctcaaagatgaaatgaatattagtgctcaaatcttagtacaacaaacgatgtacattagattgaagatttatacgagtttatgtaaaaataataatttataacattggaaatttgtttaaaactatacgaaagaataaagataatggaatgaaaaggtgacaacactattcctaaaaaaggaatataaaaagtacattctattatgaagcgagggcactatgtttacacaaagaacaatgcggtcaagttccactttttcttgggtcataaataaatttcttctttttctccttctataaagccaaaaggaatataggaaaatatttctaaca

SEQ ID NO: 51942 - DNA, 615 bp, Arabidopsis thaliana landsberg
  unsure (1)..(615): unsure at all n locations
accaattgcaagccatctattactcttttgaaacggttcatcatttgaatattaacccttgtgttgtttttgtcgctcatacggtaaattaaattgaagtcacctagaaggagccatttcgggtgtatgatctgtttaaggtgggtgatctcatcaagaaagagaatcttgtcctgatccgactatggaccgtagacccnnnnnnnnnnnnnnnnnnnnnnnnnnnnnnnnnnnnnnnnnnnnnnnnnnnnngtgtgatcagtggtatgcggggagtggagttggaaaatacggtcatgggctgctagcaaaatgcccccagaggtcccagtggctggtagcaccactgattgggcagcaagactcgaccccaaaatttgacaaagcagagtagtagtccaattagcgatcttagtttcttgcaggcaaacaattgttgcaccagatgagaaaatcatattgcgtacannnnnnnnnnnnnnnnnnnnnnnnnnnnnnctcattccagcatagcacattacaatttgattgtgacatttaaagaaaaaatcaactactagataattgttgcacatcaacaaggccaaagagactgacccaattcccatgaggttg

SEQ ID NO: 51943 - DNA, 442 bp, Arabidopsis thaliana landsberg
gggccccaggcaaaacaatatttcaagccactatgtaaccagagcctcaaatggcttgccacctttcctctcggccatctctttacttgtctacatcttattagtagatagggtgtggcggctcactataaatgaaacaattatgtcatactttagtgaaatccaatttaaattgcgcagatggtggatcccctgcctagcccgtcgccaaccgataaatagcaacgcccacaaaacggcctaaaacgcccataacgccggtcgcccaagtgtgctggccacacacattggccaccgcaacctaaaggaaatgaaagccaggagacctagcttccaccaaaagcaagacacttgggaactggccaacaagtatcctaaattaaaagaattgcactcatattctacttctgttctttctgataccgttttcccacttgtcttt

SEQ ID NO: 51944 - DNA, 1867 bp, Arabidopsis thaliana landsberg
acgttagaaacctttggtggatcacatattagtatcttatttgtcattctaatttgttatcctcaatacattactgtgtaactgctctccttttttatcgttctagtgtagtacaactagtaattaatgtatacttggtgccatgttttatcacttaactgtacttattctcaagcaggccatattagcttctactttcccgggtcagcgacaatattcacaggagacctgatatatagcttatcctgtggtaccctttcagaaggtacccctgagcaggtaacatcaatttcaaaaagcaatatttcaaccttctcgacccttgcactgttatgattattttcttgtggcaaaaattgtgccaagtgatttgtggttttctaaatcatgtttctttttcaaccttcatatctttttactgttatggttactttcttgtggcaaactgtgctgagtcaaatggtatagactttatggagagatcacttgggacttgggagtactctaataaccgtacattgtagtttctttcacagaagcaaacttattgtgctctgtcctttttaacgagaaaaccttttttgccttatgactcagatgctttcatcactccaaaagatcgtgtctctaccagacgatacaaatatatactgcggccgtgaaaacacagcagtaagttccacgcacataaatactcttaattcacattgttcaactctcttttatatctcctccatgatacagggcaatctcaagtttgctctatccgtagaaccaaagaatgaaactcttcagtcctatgcaactcgagtcgcccatcttcgcagccaggggctcccatcggtaaaacctcttatctcttccctatctcctctttctctctaaacctctttctagatttcatttacttacggatttgttgtctgtagattccaacgactgtcaaggttgagaaagcgtgtaacccattcctcagaatatcgagcaaagatatccgaaaatctttaagcattccagactcagcaaccgaagctgaagcattgcgtcgtatacagagagccagagatcgtttctgaaaacttgggtatattttcttatttgtatagaaaaatttgcaagtcaatcatcagctgcaaagatcaatattttatatgttttgggctttcttcagttatcatttgaagttgtgtattcaacacaaaaaaatctaaatatttagtttaaactcaattattaaattatgagattttcaagtgtaatgaatgcttcaacatacatacacaagtgtatagatagatacggtttagtttctctctacaaatgcttaccaaatttctaacaatggaaatcatatgtttggtggattgatggaattggctcaccaaacgtgaaaacgcaaccgtgcgtctacgatttaatattagctttactagatttgtttgtaaccaaggaataattatacagataatttacataaattaagtcaaatccatagatttatggcaaaaaagtgtgaatattaaattataattacacagccgaagaataaaggaaaacgctaaaaggttgcgcgagtggagagtctgcccgccaagcaacccctagtattcagctttttgtgcactgatccaactcgactcggcctttttctctgagttgactcgaccgagaaaaggcgatagagctggggtttaattcggcgataacaatggacgaagattccgtccatggcgattctcacctcaagacatgtgtcgtcctcggcggacgagggttcattggtcgatcgcttgtctccagattgcttcgtctcggaaactggacagtccgagtcgcagattccggtcacactctccatcttgatgaa

SEQ ID NO: 51945 - DNA, 539 bp, Arabidopsis thaliana landsberg
aggtcgtctctttataaactctagcaaatgggctaaaatggtttcatatcgaaaagcccaaaccattaagccaaaacgacgtcgtacgatatgacagcggcgattcctataaccaccaccagaggttaaaaagtctctctctttagctatcttttttgtgttaccggttcaaatggccgccgtcgcagattccgttgagaacaacggttccgtaaacctccctgagaatgaaaaccttataccggcgggattcagtgccgccgcattgcttgacgaaaactctggcgctttccctgaattgaatcagcccgatagcttagctgctgctgagactaccttccccgatacgaacgattccgcggaggagaggtggccaggttggcctggtgattgcgtgtttcgtatgatcgttccggtgactaaagtcggagctattattggacgcaaaggtgactttataaagaagatgtgtgaggagactcgtgctcgtatcaaagtccttgatggtcctgttaatactctcgatcgcatcgttagta

SEQ ID NO: 51946 - DNA, 554 bp, Arabidopsis thaliana landsberg
  unsure (1)..(554): unsure at all n locations
cggggacgactagtaacagacgcctgaaatgtatcttccaaagtagcaactctaaactatttgtcaggtgtgataattaggggtacccggattacacctctaaaaacgtgcttagaaaaaagttaaaggtccatacataatcctgaaggtaagaggccaagccacctcctcacccgaggcccaacgcaggggtcttccccataagcgtcgagacccctccccgagggtcttccgtcttagccaagtctccatctcactcgagcctatcgcatctcatgtcacccatttccacttcgcctgaagtcacctcgttctacaaaagccctatccgtctcgcccgagccggtcttaggcaaagaagacaaggtatacccaaaggccagcaggggacactcgcatttaatgcgcacacctaccccacgcagaggcacaggagaacagtggcaacaagacagtagtcgcatccannnnnnnnnnnnnnnnnnnnnnnnnnnnnnnnnnnncgcacgccacctgccatccccgatgggacacctaatacgatggaaaagcag

SEQ ID NO: 51947 - DNA, 622 bp, Arabidopsis thaliana landsberg
taatttatatcttcgatccattctatcctacaccacgatgaatacataaaatatttttaatatagacgaacccattagtcgacggcggaaactaccaagcatgctttacgcctcattaaatttgccgcacaaacacattattttacgatgaagcattttaacaataaattaatatatcggcgaactaccctcgcgacatgtaaatgaactatcatagtcacacatattcaacaccaatatacaccatatctatatgcatgccatcaaccgaatcacatcaatagtaaattataaatccatcaacctgtcatctcggattcgagtcgcgcatggtctcatggtttaggtgcttcaccgaatcatgcatcgcgcgacacgctacgacaacatctagatgcgattaacatcactcaatggttcaaaaaaatttatcaagcacttgagatccaaaaataatggcatactagcgaggggctcaccaaagatttttcacgacggctcgcaagcgctgcgtagatcgacgacgcggcacggggctgtctcaaacaccaacacgacgtcgtgggtcgggactgcgtacatcgagcgacgatgcaggtgcagaggggatcagaggctgctg

SEQ ID NO: 51948 - DNA, 131 bp, Arabidopsis thaliana landsberg
  unsure (1)..(131): unsure at all n locations
ccgcctccaccacactctcccaccaccacaccaccanccgcacgcccgccacacgccaccacacacgctcgccaccacgccgccgcgcgcgccgccaccacactccacgccgcacgcccacacctccacca

SEQ ID NO: 51949 - DNA, 1342 bp, Arabidopsis thaliana landsberg
acctggtttatgttggatagctcatcaaggtgatgtgcattacttcagtgtggggttatcagatcattcttatatgaagctcataaatggaatgttggaatggcttatcatgaaagcaactcgagctggttacgttcctgatcggaatgcggtcctgctcgatatggatgatgaagaaaaggataagagattgtgggttcatagcgagaggttggctttggcgtatgggcttgttcgaatgccatcatcaagaaatcgcatactgatcatgaagaatctaccgatatgttcagattgccacagtgctatgaaagtgatttcaagtatcgtacagcgagatctggttataagagatatgaaccggttccatcattatcatgcaggagtctgctcttgcggcgaccactggtgaatggtaactgactacgtacataaacacagaatctcaactttttgtctcttcagttgaatttaggtacattagattacgacaatgcctgataagtatttgcacatgacatagtacagagtattattagtagtcacgtcaactacacagataaaggaaagcgaagagcttaaccttggacttcgactcatacaagcctagagactagagatcacacatagtcacatagatacaggtttctacagaatatgtgactcagcataacgatacagagatcacatatccatgtcggcaaagatctcttcatcctattcatatggaggactgtcagtgagaaatgcatcatttgccaggttactgcaacaaaacatttttcgagttggaagtactttttaagaagaagacagtgagagagaaagacaacttggtaggatgacaatcatctaacctcgtgcaggagaaacgaaaacccgcaacgcgcttcagttttcggttgtagaataagaaacagaaagaccatctggatgtgaaccaaaagaaaaagaaagcagccttttagttgacagtcaggctaggatctctgaataggcgtttagaaaaaagaaagttgttgtaactcacattgctccttcctcgaggaaaggatcagcattaggatttggattgtaaacatatatctcacattcagctacttttacgacctgtatcacatttgcatgatttagttctttccattacacttgcccaggttctaagattccttattacagggaacttacctcatcaagagccttgtagatcacctcaagaagggaaccatcctcattcctctcagtccattcctatagagtaattagaagaatacatatattctacataagcttatgtgcatcacaatccattacattatcgtccttaaagaaacttatggaa

SEQ ID NO: 51950 - DNA, 687 bp, Arabidopsis thaliana landsberg
gtggtgtcagaaagaacaattgcgaatggtaacaactgtggaaggaaggtggttcgaatcggtgcatctgtcactcgatgacatttcagtcagtattgcctcgtgtcatgcttaaatcagaagcaatcaattgaaacagatctgtcctttatatcaaaaagaaaataataatacaaatgtcatattatccctttatttctctttagtatatccctatctatatattttcaatcaaaattaagagatgtaaatatcatttaaaaaaaatatatatatatatatcatttgccggtttcaaagtacatttacatatattatttgatactttgtacaacaagtattttgtaggcaatagttagttttcaatgttatatcctatatgttttttttcagaaaactgtaatattctttttacttatttctgctttacacgcaatatagcttagtcttttgtgaattgttggtaagctactttatatgtaggatgatcacaatgtatacatttttgtaaattttctagaatcagcaaacagaaattgaaactttgggcctcaggtgttataagctcggcctttctcggaattgggctttcagaaaatgttatttcagattgaaatgggcgatagtgttggtttcaaatgggcataaccagtaaccacatttgataacaaggttctttcgatgtat

SEQ ID NO: 51951 - DNA, 1245 bp, Arabidopsis thaliana landsberg
tttataaggaactagaaacttgaaccagtagttgtaatagaaccagaaattctgttggggaaatacaacgatctaaataactttttagaaagtggtaaaaagttttctcttcatctaaaacatcgtttatgtttttcatcacatcagtcagtaaataacctgtaaaattactatgctgaaagtttccagatttttataatgcaaacatccaaactttcaatctcatttcacatgaattttcttcttcttcttctttctcttgtccattaaacttcctttaaaagacgagaatctcggaagacaacgatggtgataattcagaggagatttaagattcttcttctcttttacagattcttcaatgactttgagctcacccgaattatcacatgatgattttttacttttttcactttggtattccgatgactcttctaaaattactgctcgttcttctcttatactatctctaaatagttcgcctagtttctttctccgcggtgcaggagaatgcgaaaacgatactcgaggtttctctccttcaaataaagggctgtgaatacgagggagcttctctgagatactacaccttggagtgtttccaactgatggagtgaaatctacagaaacaatctcaaatcttgagttgatcatcacataaaagttattaaccaaacttatatcagggtgtaataaaatctaacaaaccgccacggacgctatagaaatcgtcttcagaatcagattgttgccattgatgtgaatcaaaataggtttcatctttactacttcctgtcacattggaacaatattcacacatttcaggacttcatagaatcataaaaaagaaataaacacaactcaagtgtaagaaaccactctttaaatctctaacctcgaaacacaaatcttacttcactatgaactctccaattcaccgggcaataaaatttaagttttctagaactcataaattaaaaccggaatgaaacccaaataataaaattaaaaaagcaaaaaaaatatcactgttcttgagggtttgaatcattaattaagcagcgattgattagtggaagaaatctattttggaaaaagctaaatctctctattttgacgagaagaaaagccaatgattagataaatccagttaagacgatgatatgattatgattttaatataaagaaaattcgttcttcgaatctattaatgggaacaaaatcaatgacattaacgctaagaat

SEQ ID NO: 51952 - DNA, 351 bp, Arabidopsis thaliana landsberg
  unsure (1)..(351): unsure at all n locations
atggcgaatntnctaaagctttcgtttagctgatcctttttaggaacgatttttctattcaatttagtatcaggcaatgattagggattgataatgggttctgaatcgcttggattgtgattttactctgtaattaggtagtagaatggttttagaacaacaagttttaaactttttggttaagattcaatcaaaggaggaaaagggtacttctttgttactgggttttgagtaatggacgacggtgagcttgagtttttaaatttaaacatgggtggagaattacctatctgatcgaaggattcgtgcttcgatgagcttttgagagattataatgcttggacttatact

SEQ ID NO: 51953 - DNA, 507 bp, Arabidopsis thaliana landsberg
cttgattgtgagaccaaaattgtctgttgctgactgttgtacagactctggaactttcatcttttgcaactttacaatgttatcttcttcaatgtttcttgtgcatctaaaaggaacctttttgtagtttcctcgtgaaagatcttaaatggttttccaagaagtacgctggcgagtttctccagttctcgcctcggttccaatcttggcaagaacgagtcatgtggataattgaagctctcccttgcagcacaaagttccctgaatagaacaactcatgttttccattttgtggccatcttgtgtaatgttttctgcatttttagtttttgaaaccatgattccactatgtgttacggttcagtatatttttacattctccgagagtgtatccgctatatactatgagcgtgttattagtatacctaaaagaacgaaacatctttcacgtttctaaccctgaacattttactcgcacactattcagctaacttaccactcaaaagt

SEQ ID NO: 51954 - DNA, 533 bp, Arabidopsis thaliana landsberg
aatgtacagtctagccaaggtactagtgctgttttgctcttaaacttactgttttgttttttagattagtgattcttatgtgatctatcaccttcccgacgaaggtatccaacaaggacactgctgctccctttgtgctgtttaagttattgttttctggattctgatttcgtgtcaataatctttctcatgaaatcactgtctcatacatgcgtaagaacccggcggatacagcagcagcagatgtttgcacatgcagcagtgacactatgccaacaatttaatatagtttatcaactatttacttgtagtttgttaatatcttttatgttttgttttgagtttcttttaacttttgggctataattcatttataggacataatcaagcctttgtaccaacatgattattctaataacaattatgatttttttgctaatcaagaacaattatggatatattatgacccttagttttgggaatatgacatgaggatggttagactaagaagtggcaatgtacaaggaattttt

SEQ ID NO: 51955 - DNA, 1037 bp, Arabidopsis thaliana landsberg
tgataaacaaggggtataaatttgtaggactggacctgcaagaacgtttagggagatgaagattgcttataaactaaacaagaaaaatggagggaaaatcaaagaattccttctcgatagcagatagaatctgataccattagtcaagtacctctttaatggtgctcaacatgttatcaataacatttttctgggaggcaagactgaaccacatggatacttgccgaaatacctgtagaaagaagaattagttccaaacagtgttccgtaagtaatttaataatataatggaatacaccacgtttctgctaaaatctcaaacatgtttttaaaaggccagagaaaacgttaaatatctttctgagataatgtaagacaaaatttcccaaataaaaagtgtataacttatatgaaaataaagatcactctaccataacctggcatatataagtatgcgctagtcacaaactttaaactcctaagtacaggtcgaccattcacatggaattaaatgaatctatgtggtgctattatcaaatatacttcatcacgtacccaaaaaaaccaaagaaagattgatatgaccaataagtatacaaacacaaacacgactgagaaatgttgaaaagcagttagaaaccgccgcaacccaaaacaggaaaaatgaagaaaggttggactattgaagaccactaatatatccatagttactccttgatagatgcgaaggaatataatgaaacccaactctaattagttgtagagagagatgaagtcacaatagcaacacatagatctgcagattcattagatgttgtaaccttacaattaaaaccagtttcttaaggaattctatatttgactctaaaagccaacttaacacttcatgacatgtcataaaggatcaattccagacactgtttcacatcttacattatacacaaatctcacagaaatatagattaacgtaccactcgaacatcatacttgtcaccaatttccagacaacgtttataacccttcaatgcaagtttcag

SEQ ID NO: 51956 - DNA, 634 bp, Arabidopsis thaliana landsberg
aataagaaggatgagttggtgtgatggttcagatgataactacgatcgtaatcttgaaagagtatcgaacactgatcatgcatcggttcaactcaaagaccaatctcaatcatgtgtaacgagccgtccagattccaagattagcgctgaaactcccatcacgagttgtccttcttgcggacacaagctccatcatcaccaagacgaccaggttacatatgctaaccattaattcacctaaatgttctttagttatcaatatgattactttagattttgacataaaatgagatctgataaggttggtagcatcaaagatttaccaagcttaccggcaggagtcaaattcgatccgtcggataaagagatccttatgcatttggaggcgaaggtatcatccgataagcgaaaacttcatccgttgattgatgaatttatacctacgcttgaaggagagaatggaatttgttatacgcatcctgagaaacttcctggtatgtaaccctctcttttttttttttttttttgtattatcaatacagagctaagtataaattacagaaaaataaatgaatactattgacgatatttctttctcaattagcaccatgaaaacaaggagaattatccaaaa

SEQ ID NO: 51957 - DNA, 2149 bp, Arabidopsis thaliana landsberg
gacactgcccaggctaagccacttccagaactaaattaggtatacccgttgctgctataacgatatccgccttcctagtggtgtgggctggatcctttgtaaacgcatgcaccgtgcttactgtcgcgtcatgcctctatccgagaatttcagaaaacataaatgcatagttaattcccaaaccaaaatgtttaagcataagaatccacttgaactataaagaagaactaatacctgcaataataaagacattggtagtccaacgatgttgcttctgcctatgaccacagcattttttcctgctatttcaacacccgttcttatcaacaactccacacagcccttaggagtgcaagacacaaacaggggttccctccctcttattggcagaatccccacggttaatggatgaaacccataaacaatctttttccattctcaccatattcaagatttttgattcattaagatgctgcacaagatatcttccattaaatgattggactcatgagaaaaaaaaaaaaagggaaaggaaaccaacaaaatacaagaacgttctcctgaaaaagagctccacaagtaagatgctctatcgcataacctgtaaattaaatgctttacctaccaacgaaaaggaaaccttaaaggggaaaatgttatgcatgagtccatggtcgatgaaaatatatgaatcaagaatttctacatacaagtatgaaaacaaagtaaacgtaactacttgacctcctaacatagaactaatctttgacatcaacaacactaacatcccccatcacaacgtccaaagaaaaaaatgagaaacatacttggggtaaaggaagttgcacaagaattccgtgaatacacgtgtcttcattgaattttctcaatacactgataatctgtccatcagtacaatcctctggtaattcagccaaaacagatttaatgccagtttcttcacaagctttaattttgttgcgaacataagtttgcgagtctctttgttcaccaaccaaaacaacagcaagaccagggacttttccaacagcctttttcatcttccccacttcactaataatctttgttctgatttcctcagcgataacattaccatctaccaccacagtcttctgttcagtctctgtataaatgcatacacacagaaatcaactcatacaattagagaattttcttgtaacatatatatatagccatgaaaatgcaacaaagagtattaccaaaggaaacaggaggtggaggatcagagtaaggaatccaattttcaggcaagtcaagtgacacgagaggaggagacactaagatggaactaaagcaatgtacatcccttgttgccaaacgaaacgccttagtatgcgccgaggccaaagctttcctcgcgatcattaacatactcaaaactaaaagaacagtcactgattcaaatcaagcacaagaaaaaagtcaatgtaaaagtacagaccagacaagagaaccttagacaggtcagcctaagctagaataaaaccataatttgatccttttagctccatactcttcattacatccacacaaacaaataaagaggcgcataatacagtaaaaaacaaacttgcaccagattgaacctaaatggattaaagatttcacgagactatcataagctttcactcagctaaaattcatcttcttcactcagctaaattcatcatacatagaattcttaacaaagaagaaatcggaaaataggaaaaaacagaggagagatttaccagtggtatataaagcgtcgtcaatggcgttgaaaaatatcgctaggcataccggagtttaggattcaacgagtgacaatataaaacgatgatgattaacaaaaaaaagtaaaaagaattcaccaccgtgtgagaaaagacacgtgttatgatctggagatagatcttgcaagtgggttaaataataaacggcggagacatagccacacgtgtgaaaaaaaaagaggtgtgtgtgtgtgtgtgtatgtgtgtatgtgtgtgtatctctctctcttcctccaagtagcaaaaagcaaaggggaaagagacgatgcgatcgggctaagtgcagaaacacttatacttgtgcattctgcaacacaacacacacacagaga

SEQ ID NO: 51958 - DNA, 373 bp, Arabidopsis thaliana landsberg
gcagctacgttcttggaacaacgtgttcttatgtgctggagtgagaccgtgaaagctctttgtatctgcagcgataagattttggacaaactagctaatgttggactcatcgaagttttcttagattctcttatcgaaaaggctctcaacgatactaggttgctccaagatttgattacattaccacttcggttatatgaaccattgattctagaagtgagtaagcacaatgtctcgttagaaaaccttgtggcctctgtctgcaattacgcgaatagatgggttttcgagaaagattcgggagacggaagcgtttcaagaaacaagagagaaggaattgaagctgttgagaggcttttgcctcaccaaagag

SEQ ID NO: 51959 - DNA, 315 bp, Arabidopsis thaliana landsberg
gttcgagaaccaggatccacaaaaattcgcaaagttgaagatgcactcctcaagatattcgtcacgtgcattgagctgatgatcttaggataaactcgagtacgacatcgaggatacaggatcagatctctgctctattcgcggggtccgtgaaccagatgacacgagcgatttttgactcacatgtacaaaatcggctatatcgcgatgtttacctctggcccggtaaaaattcggatttattgctgaaatctaccatggaaatagaattcgagagggagagagatcgatgccggagaaccctgtttgtgaccg

SEQ ID NO: 51960 - DNA, 1511 bp, Arabidopsis thaliana landsberg
actcccttcgaaaaaatgttattatactttttcataaactttttatacattgtttgttttttttttctaatgtcttctatcattgatgttcccgcaaattatcgtgtgtttgtaattgtcatttcaagaatgctgaaaggtcttagaatttactagttactctattagttcatgtatcaatcttaacaagaagacaagaaaaaacaaaaaaaaatcaaagagaaaattgggagaaactagaagaagaaataaaaagacaaaaatggggaagaggtgggagatagaaagaaacagttgttaggtggtgttgaaaacgtgtgaagtcttctttggctataagggcacaactgtccactttgctgcgacacacgtcttctcttctctctctgaccaaaataatcacatgtcatgcggattagattcttcttcttcgtatcgtacgtactacatgatcagttgaagttccgacgttagctgatattacctaaacaccctccttcatcaccgcccccaacttgtgtgatgtgtgaaccagagaagactttttcttttttaagatgcaaaaatcagttactcttttcttcatttttctgtatactattcttaatatcattccattttcgtataaatttagaaaatctgatattaatatcatccacaagttttttgaaattgtaaagaacaatgtgattgatttgttgaaattccctactttaaattctgtatgtctttgataccactcgcaattgggatccatttcatagctaaagatctagttccatcaaatcttatgtgaaaacatacatcggtttaaactacacacaggtttagactaaatccgtttacctataacagctaaaaccggtttcataccaagactgagctacaatccaaaatcatagttatttatgctcattcatcggaagctgaggcagactgtttcagacaatcacgcatgatctcttcaagctttgaactagcatccaagcaaagctgcattgcctgcaatatttgaaatacaaatgtttggtaacatgtctgcacagctcctatgtcacaattatatgttaacaacatagaccctatggtatgaacagcttaaaaagaaaatgaagaacagtctaattaaccaatatccatgtgatttagacaaacaaagcagttgaataacatcaatattcaacactaagaaaagaaagaccttttgtctctaaccgtcatcggcaaattaaggacaagagatattattgaaaggcatacctcgttgatattaggtgttgtccattcaccagtgatggttagctgagtgatttcataacgagatggcatgcacgtcatcataaagctgccatcttcacatccttcctcctctgtaaccgggtctatcataaggcttttgcctatgcaagacttcgaaaattgcaggcataatttcagtgtatcaaaataaaaaattaacagatatctatacgttttacatgtctcagactatggtgcacgtgatatgcgta

SEQ ID NO: 51961 - DNA, 1315 bp, Arabidopsis thaliana landsberg
aggaaataaagtaaagaaactaacctcattagctgccgatgttaaacaacgattaaaagcacaaactgattaagcaaaagaaccattaaaccccaacaaagtaaactcttctactcccggggttccttcaagtttgccgcggactacttctccacagtctcttcctcttcaagttcttcttctctttctctttcatggctatctccatgagaaattcccgatgctgaaccacaactacgacagccactgaagcaagagcaacaccaatggttacaggagcagttaagagatcggcgatcttgaacaaatattgtttcatcatgactgagaagaaagagagatcggataagaagcaattttcttgattcaatacttttctcacaagtttttaagaatgaaagaaagtgtgtacaatatttatacaaaaccctaactaaacttggagctcacattctcgaatgataatttgacacttgtcttgtctgctaaacagaatttttgcttttcttgtcttccacgcaccagactctatacatgctttttaatcacgtgttttttttgttatggtctgggcttcatttaactaatgggcgttttccttgtatcttgggcttaatttgagatttcttattcatgaggttgaatcaaacaaactgtaaaatggtgtacattttgtagaacaaatttttttccttctaaaactcatttcctaaaaatatgcgaatggtgttgatttctttgagctttgcttcacattcctacttttcttaagaatacctattatatgtatattagatatcgaagttgtttgctaatagtatgaattatccgtatgatgcgagattacataataattccaccactccgcatatgtactaatttaagatttctacattaataataacctctaatgtgttttcgtatcctatatggcattggtcctaatctggtgcatacatgttttaaaaagcttttgtccaaggaatatatgccaatggcattttaattatttgtggaattttgaacaaaccgaaagttggtttttttggatgtatccacaaaaaaagttggttcttttgaatatattctaaccacattttcattttctgtcaacaacagtgttgcaagcaatttaaacattgacgttatctaacttgtgaattgtaaatgtatcacgcctcatgcatgttagattgttttatactcaattttgtttcaaattaagtgagatgcttttcttctatgatttcaatccactagcatctgactataaaaatcacaaccccttgtgatgtttattttcatagaaactcaa

SEQ ID NO: 51962 - DNA, 936 bp, Arabidopsis thaliana landsberg
  unsure (1)..(936): unsure at all n locations
gaatccggattcaaactttctaccaaaacataattataggtaaacaaaaaccgaggtgtataagtagttttacattaacatagagtggtcggacataaatatacacacgtactctattaagtaaagcagtgtgttaggtgaagtgcggtcccttctagtgctgctcccactaagctttgtctttacaatgaggaaatcgtctcaatgtggcattccatgcttatttattattatataaccaaagattcgtcttcacaattcactctcttcttctctctttaagacacttacaaaatggagataaaaccctctaggatattctccaccatcaccatcttctttctctgccttctactagcacacgtcacctccaaggcatcatcatcatctctgtgcaatggatctgtggcggagtgcagcagcatggtggagacagaggaaatgagtgtgataatggagtcttggtcaagccagaggttgacggaggagcaggcacataagctttcgtatggagctttgaggaggaatcagcctgcttgcgatggtggtaaacgaggcgagtcttactcaactcaatgtcttcctccaccgtctaacccttatagtagaggctgctctaagcattaccgatgcggccgtgactcttgaccattcaccatcatgaatctttatgttgtaaaacacctatgttctttattttgttggtgaatttgaattgttttggtttcaagtacaatctcttttgaatatctgtacactctttgagtttggggtttcatttgctagatttaaaaaaggaaaagatataccttctaatgtcggaaatttttgactttttgaccctgtcgacgccaacagctacgcctcttctctcnnntttaattggagacaaaaacataaacatcnaatcattaccatgtaagcctagtatgggct

SEQ ID NO: 51963 - DNA, 572 bp, Arabidopsis thaliana landsberg
atataacttttcaacaaacggactatcgaagccgcccaatactataaacacacgatataaacagacacatgtttattactttactttaattgagaaagtattatgcaagttgtgttttagtttgactcctctgcggagcaaaccataacaacgtcgctaagatacggaccgtaacacatactcacacttgatgtcacgatccttatccgcttatctggaaccacgtgtgtggtcaacactcgacgaccggtttgagccgggttaattcacttggctgctctttcgtactaaaagctacttcctgttgtggataattcgtggaacgacacactaataaataataatgcatggtacgataatgttttaaatcgaacctaatatatactgtacgtaggtccgtcgatcggtacggattatgaagatagagtttggtatatatcgactcattacttattttacggattatcttttatcgttttcctttgttggtttttgcatttcgaacacttggttctttttcattattgattcagataaaacgaaaaaaaaaacaaaaacaatcaagctcttta

SEQ ID NO: 51964 - DNA, 581 bp, Arabidopsis thaliana landsberg
  unsure (1)..(581): unsure at all n locations
tcaaacaactctttatgagtaaaagcgaagtaaccatttctctcactctcctttctcaattattataagccaatcaccatcaaaatatcatttgagaactctagaaannnnnnnnnnnnnnnnncgacaagcttccacttcttctctttctctccatactcctctgcctcaatcgccctgtacttagcgacaccggtaacttcctctctttcttccattgttttcttgttgaagtaaatctctgttcttgaaactctttctgtctctctttatagtgtttattcaggatctttagatctggtctgaaatctcttaggagttaggatctgttcacttcaattaaaagttcttccatagatctcaatcatgagaaagttgaacttatttgaaaaggttaatactttctcaagtgtataatttgcattccttctcttgataacaaataaagaacaaaaatttactttaactagagattgtgaatatgcttctgcaaatgatatagaccttaatcaagcgtcttctgagttacagatggagaggacattcttctcacaggaatcaacagctacagaacaacacag

SEQ ID NO: 51965 - DNA, 968 bp, Arabidopsis thaliana landsberg
gcctatactactcatgcaaattagtttatcatcattacactttttctcttctttccgttattattttttgtttttgggttttccaaaaaaataatttagtggttttcatgaaggttacgtatgataaaggacaaaacatttaaaataaaaataggatgacgtcatctaacattttatcaaaatactttgagattccactttgtttttttgggggggttgacaaagttggaatcttgtatagtattaagatatttcctagataatttcataattgtttcctcaaggtaacaacaattaaaccactgaatatgttagatttagagtttgttttcgataagtagttcgacaatcggcataagattatgttaaattagtgtttgtaaatctttatggggtcgacgagaaggataagatttcattaccttgccatacacttgcattgtgttggaatcgaatttttgattttgcacagattccattctttctgttgtgataatctttagtcaaatcgtttttttttttttttcgatttaactatacttaagtgttagaagaatcttaaagagttgtgacataaaataatgtgaatggttattagttgggttaaggttaggttgggttaaggttagctgattgagtaaaagctcaaaactcaattatttaggacaaaatttatattatagtaagaatcttgcgtacattattaccttgtttgactgagtaagattccaaagattccttgtcaccaattaatctattgtgtggctattggtttgacagatacaccctcctaaattagaatcttccctcaactagttggtccccatttgtctccctttcactatcaacaaaaataaaccatttaggttcaaaaatcaatcaaaatcattcattattttcttataagacccactagtttcattcaataggtggattataatctaagataacctagatatttattcatt

SEQ ID NO: 51966 - DNA, 888 bp, Arabidopsis thaliana landsberg
tgggttttatcggcctttgctgccagtgaaagtagtagaggtcttcatggttggatttttgggaaaatgaattaagggtcctggtccttaaccttccttccttaaaacctgggaaggtgaattaagggtcctggtccggggtaaccttaattccttccctacctttaagtaatcaattaccagatccaagtcctatagtaaaattccaatggattgatgccgaaaagggacccgatacctccccaataccacattggatcggccaaggaccctacggcaaagcctatcgctgcaagttcccagaaggtcacaaggtataaacccaaaagtcttgttctttttagttaacatccgaaactgaattactaaatttagcaactttggtgtaattaggttggagctgcaaagattcatagtaatggtatcacagatggtcttagtgagaccgtagcagagactacaacgttatatgcagctgatcacccaaatgtgattaaacttgtcggcaaatattatgggatggaaaaaagtgtcctagtctacgaattcatgcctaatggctctcttgaccaccatctctttggtaatcaattaaaacctaatcactctgttttagttctataccaattccagttttgttaactctttctctttctgtagctcacgcgaggcaggttcagggtcttactctgccaactagggttttggattggaacacgaggttgagaattgctgttggtgtagccgaaggtcttgtttatgtacaccaggggctttatgcgattcacagagatatcaaagtcgaaaacattttacttgacaaggattttgtgccgaagctgactgattttggatttgcgactaagatcgtttacaatagtgatggtg

SEQ ID NO: 51967 - DNA, 537 bp, Arabidopsis thaliana landsberg
  unsure (1)..(537): unsure at all n locations
gagctcactctgtgaagcctattggaggtgttaaggtaaactttttatatttatgtaatggaacttatctttgagctgatgtgtgcgctgagaaactattaaaacaaaaaagttttttttggtgtgagcagacatattttgtcgtcatgtcaaacatactgcagtcggatgtttttatgaacaaggtctatgatctaaagggttcatctcaaggtcggactaacaagaagatcaaagtgagagataaaaccatattgaaggatatcgaccttgatttttgtttctatgtggattctttggccagacaccgtctcattaagtcagnctttttctctctcttcttatattgattcttgtcgtagagaatgatttagatgtgaactttcaattgtgcaagcaaacgaagctagattgtgaacttttggaagatgaaggcatcatggattacagcttaatgcttggtttacaagtgaaaggctcgtgtcatggtgagtttaagcatctcatgtctcactattcttattagtgataataatc

SEQ ID NO: 51968 - DNA, 705 bp, Arabidopsis thaliana landsberg
attagtatctcgatcatcgctttccttgttccacaagttttcattttccttgttctggaagtcattccttgtgggttctctttctttggtctcccgtggagatgactgattcattgtctcgatcgttcccaatggccgagcgtttttcttgaagccgcaaaggccagtgaataaggcgatcaagggagccatcttgctcctacataaaaaatgttataatataatcaaaattgtgtgagagtaatggaatttaattttatggttcttaatctttttgtgtctctttgtgaagtctttttagctttgaaaggccagttaaattttctggaattaagggattttagtttctcaagtattaagatttgtttctaattatagtttgaagaaaagaaaaaaacaagaaactgtgagaagcaatttttgttagataaagatttttaccaatagagaattcaactttgggctatttttagctgcattttgacgacacaatgtaactttgactgaactgtttagggtctaatgtgttaccattgcgtttatttttaccaaggaagagtaatcttgcatatcaagtaatctaagggcataacgtgattataatcaactaactttggtattattcacgaacatataggtttatatgtttaataaccactgaagagtaaagacaaaagacataaaagtctccaagatgatgtttct

SEQ ID NO: 51969 - DNA, 500 bp, Arabidopsis thaliana landsberg
cggtctatggtgcctgatccccctccgccgtctcatcagatacctttatggatgagcaactattttcaacagacatcgaatccgcctcagctggttactcatttcttcccgccgtcaggtctcgctcctcctccgtcaaatctaactcctccgccggtgaagagaccagtaaccggttccgttcgtatttacagatcacgatcaaccgtaagtaagaaatccgatacgatttctccgccgtttccatgggcgactaatcgccgtggggagatacaaagccttgagtatctcgaatcgaatcagatcacaaccatcaccggagaggtacaatgtcgacactgcgagaaagtgtatcaggttagctacaatctaagggagagattcgctgaggttgtgaagttttatttgacggagaagaggaaaatgagggacagagctcataaggattgggcgtatccagagcaacggagatgtgagctttgtggccgtgaaaaagctgt

SEQ ID NO: 51970 - DNA, 136 bp, Arabidopsis thaliana landsberg
ctttttggtatgggaccctgaaggttggttggttccaatagggttgacccttctatgaactggtataaccgttttggtacccaaacttggaagatttcaccaactaaccggggttaccactggctcctttcaaaaa

SEQ ID NO: 51971 - DNA, 637 bp, Arabidopsis thaliana landsberg
  unsure (1)..(637): unsure at all n locations
atgacccaactacaagggtgtttcttttatggatcatgtttgactttacatgactgcaaaagataaagcgttggttttggcttagcaaaaaacaaaaagaacatgacttacgatctagtataaaagaaaatcaatgttgatcaagtcccacgaccaaaacaaaatggagaaagaagaattcatattcccttatcacgatttagatatttaggacacaatggtgaattccctttttgttatgtttagacacatactctttatcatatttctttcaacactcaacagaaaagaggaatattactaaacataacaaagaaccatgtaaaagaggaaaaaggaatctgtgtgttgtctgatgaagacgaggtcacattgcacagaagctgactgtgattttggggaaagtggaaaacatacgtgtcttcatataattggttaacaatgcacgtcagtgtacgatgatgtcgacacgccaatcgaagaacactattcttttagatgtattattattattattattatcccacccactctttgtgttctgtccaaattaaaaaacatataatcaccggtttcttagaaattatgccctgattatattcaattaacgtttcttnttagctaatcacttttttcc

SEQ ID NO: 51972 - DNA, 580 bp, Arabidopsis thaliana landsberg
agaaaaaaaagagaccgtacggataaatgtcgaagaatataaggacaagagttggacgttagctagtaggaagtgggcctcacttaccgctcgcaccgttagtcccgcaaacggcgccgttctctcgtttcgagccatcatcccacttgtttgttgtttcatgtgacttcttcgtctcgaggcaaacttgactcttcttcactttcgcttaattacccatttgtctgccaacatctcttttggctatatactcatgaaactttaaaaaatcttcttatttgtatgttcgaaactccctgaaagtttcagtcttcttatgtatgacaagaatcgcgagagactatgcaatgaacctaatcaaatataactcttctcaagaaatgatatgaaaaagattcatgaacataagagttggtccttggaaagcgacctcttcaagtcttcattaattagacattgattcaggtgcttaggagtttaggaccaatggtaaatttaaataaaaccacaaggggtggcggtgcttaaaggcggtccatgaacgttgtaagaaaggtattttttttttttcgtataaagc

SEQ ID NO: 51973 - DNA, 1335 bp, Arabidopsis thaliana landsberg
aattataaatattcaaaatgtgcaagttcatgattaatagaaaggaaataaggtataaatggctagaaaattttctcgtccaaaactcaacacaaaatagagtatttaatgtttttctcaattatctatgtggagatgattttgagactataaacaacaattgtgtaacggtcatggtttatatactcaaagataattaactttggatgtacattgtatttggggtaagagaataaagtaatagattttgtccgaccggttctctctcgtgcacaatgcactagtggaatgtaacatcacatgagatcacgcctcattttttttttcttctatgaccatgttggtaataaataagattagtgctatgaaagtagaaatggttccattaggaaaatatcacaatggcagcccattaaaactggcaatttttccccctcctctctttttttttctaaagaaaataaatgtgtttgaaatttcgtggatttcacaattaggtttgcattttaaataaaaatatgtacactccattaaagatttcgatttcattttcagtttctaaattagctaattaggctttcgatagaatgtaaacagaattttgccctttcagaatgcagtaagagtaaccaccttccacagataaaatgaaataaatcatattattgttaacacatgcatcaccttattatgcaggtaagcaatttggtttgtacatgatgatgcacggtttataaataaatactacatagtacaaaattaaaatcaataatcaaatacttaattagtgactccttagagataattggatgaagggagagttggagaggtaaccgcaaggtgggtccatttgtcaccctgaatttgacgcagacttttatcaaataccacgaattagccatcaattttagaggtccatttccgacattaacttctaaactacggtcaaaccgaaagtgtaaaacaataataattaatacttttgttgtgcaaacaattacatagatattttgaactaagtaaataccagaattagctctctttttagcggtttatctacaataataattacaaaatatattttttccatcattttataagtttataatccaccatgaataagtccatgtaatattttgaacagaataaacagtttttgtaaacaagtttataattttatatccgtaccacaaaaagctatgatacataaatgtattgattggagaataattttataaagggtttacaaaaatcatgattagagattgataattgattgaagaataatgaattcttaggttttgtaaccactgatcacctgcaaatgtctttcgt

SEQ ID NO: 51974 - DNA, 1062 bp, Arabidopsis thaliana landsberg
aaacctcaccgatccaacccaagaagaaatcaccgatcactataattcgagcttttcccttcttccttcaagatcttcgtggggaagtgtcgaaagggctcacgaagcgacctataagcttcaagaaggctgatgacgagagagtaaggaagagaatcgaaattctcgccgtcgtgaggaaggccatgatcagagctgttgaaaggtaactctatgagacttatggaggattcaggtggaagattggagcgtatcttggggatgttcgaaggagtattgatcatagagatggtggctttgttggctctgttcataatcataatcttctctaaacgaagggctaaagctacaaacgggatgatatggccttgtcccatgaaagggaacatcacgattctcagatttctgggtttagcttccgccattgccgaggaaaaaaaagatagatagagagagagatggatagatttggggttgtatttttgccgtatcgataacggttcagatttagacaagagaaaatgtgtgtttttggtctgacaataaagacttaaacagagtttcaagattgactacatttatttatcactttaaaagggaaggggctattggtaaaatcacttttcgtttcctctcattcgtcaattcttttttactttttccatgaaatattattattggtgtgtgaccttggcctttttttgttgctctctaattttttttcctcattcgtccatattgtgaaaaacgtgatgattttccacaaagttaggcatgtattcatgaatctacttataagagtatattcattgcatttgtatcaaatttatggtagaaacagcaaaatttaaactctttaatatatatattattattattttctatcttgaaaaaaatagcaactcattgaactgagcttatataaacgccaaacagttcaagaacttatgtacataccattaccaatagctagatgcagcagcagctaaaatgcgtatgggacatcgtcctgttactatagggggggagaggtcccgtaatataaattctcttgggcctgac

SEQ ID NO: 51975 - DNA, 2981 bp, Arabidopsis thaliana landsberg
aacatccaaaactctttcttctctcccaacagcaaaaactaatgcaaataaatgactataagagtagtatagacgatgacatttggcactgaaatgttccagaaatgagagaatgaacacagagatcagtttagatatattcttccctccaaaatcacaaatattactcccaaaaaggataaaacaaataaagaccaactagataagaaataacttataaaggaatgagaaccaaatcaaaaatttactgccattttgttgccaggaaaaaaaaaaggaggaggcaacagactctcagtacctgaaactgaccagcaagtcgtctatattgtccaaaaagatatcccatttcccgagtaccaacaccaacctcctctgacggaagatcctacagtataatagatttaaaaatcattgcagaaaggatgtacttgctaaagggtaaaaaacattctacttactttgtcaggacccatatatctgtacatctcattcatgaaactttggcaaaatctcataatctgcgatgttgcaaaacaacatatcagaacacctgtaagagatcacttgcagggaaaaatgcaaggggcgaagatatcacctcattgtcactttttcctttaggatcaaagtcgcttccaccagaagcccctcccagtttatatggtgacagagcattcttcaacgtctgcgaaagattaaaaacccattacaattctgaatcataagaacagttaaggtggcaaccgggaaaaagaagaaggaaaatgacaaacagtataaggtgaaaaataagagaaatcagaggaaatataatggaatataactgatggaaatcacagtacctgctgaaagccaagaaatttggcaatgcttaagttcatggatgggtgaaatcggatacctcccctacatggacccagagcttggttgaactgaactctaaagccacggtttacatgtgtttcaccacggtcatcaatccatggaactcgaaagactatcatacgttcaggttctagtagccgctccatgatattgacataactgaaattaatcagcatggaacagtgtgatttgaatgcggtttccagaaaactattttacaaagatgagaagaaaatcgtaacttactgagaattttttgcaatcacccgctctagagcatgcacagattcttgtacagattgaacaaactcaatttcattaggatctcgtttcagggcaccctcaacaattgaaccagcactctttgacatgagagcttcattgagaggaaaagtgcaaacagttaaaaaaacaataagcaggaaaaggcactaggagtaagcccaaaaacagaaaaccaaggagtcaacctttttctttcatattagaaacggaaaaagacaatttatcttttgatcacaaaaatattaaactccaaaagctatggaaagcagcataccaagaatgtacaacttgcgagttaaaaaaaaaaaaaaaaaactacaacttcctccctttcacaaaactaactgcatctaagcctctgttagtaaaatatttcctattaagagttgcttctttttcatcactcaagcctggaaagtttactaatataggatataaaattggagaaagctcaaagatatccaacataaatgcaaagcatatgttaacacactgttagctgaaaggttgttcagtgcaggttggtcagatgaaacaaaaggagttgcaaatgatcttgactcactacatataaaaagaaatcaatcacttgaaacaataatgtaaataacttactcttcacataaatgggcttgtcaacaacaatcttatctttggaagccgtttggagacgcagagcctctttgtgtagcaaactattgttgtgttcctctaaagcactcatctgcatgtttctacttccttcatttccgtaaggatttcttcgatgttttctaccatattctctgcaaatagagcagaatatcctagctgtaccatccttcatatcaacataagcccacttgtacgtgtcagcccattcctctctccaccgtttgacaacttttttctttctcttcgccggtgtaccctttgaaatatcctgatcctcactgggaaggtcagataccaaaaccatatgctttgtttcatcatgttccccagtggagggctcccgtggaggcccgccaatcaatgaattgttagcaaaagcagcatcatcctctccaggtccaatttccaaatcaatctcttccccaagattacttacaacaagctgatgcctttgtgcttgctggattaagttcatatcatccattgagggattcatccccaacccacctgttggtccaaacattcagcatcacagttttaactcccccttagcttcacttttgctgactaccagcaactgtatcttacacttggtacgatgctcgaaatgacaacctagtgcgcaacagatataaacggtccaccatcagaacaaagccaaaaattaatatagatacaaaaaaaacaccagccatatttcagtacttttcagcagatagcaatggcatactagacttcatctaccaagaaatgcacaatatagaggcatcaagcaaataacatgaatactacaaaggaaaatttcccagaaaatgatgtgaaatcaaatcagagaccaatgagttaaatcattttgagttaaatccaatgagttaaatcattttgatcatccatctaagcttgtgaacatatttgggggaaaattcgttccagacaatgaacttatcacttggagaatcatccaaacatcaagactcaaaaattcagaaccagctcgtaaagtatgaatctttgccacaagaaacaattcctaactcaaaaaaacttcaatcacaccaaaatttactgaatacctaacaagccgcagcacttgaaacatttgatcaaatctaacatctttcacaaaatcaataagctaactttggcatcgtaga

SEQ ID NO: 51976 - DNA, 536 bp, Arabidopsis thaliana landsberg
tgcaaaataacggaggtaataaagaaggatatataagtatagtgtgtacctcccgatgatcttttcccttccattgcgtctttcttatcttggcaacttgcacaaaggaatggaccatcccagggacgaagcttacggcaattatccgacccggcatggatcgagacaccttctccaggtttcacttctacttgacacacagcacacatgaacaacttaaacatattgcaaagcgggtactttgtgtctaatctgcaataaacagaagaaaaaaacgaaagaaaacttggttaagattagtagatcgaaatgaagctatcaagtatgaaaaatggtatatgcttaagcacatatattcagagaatcacacctctctgatagcatagcagagccctcttcaaagagttcttcaactacatcaggttctgcgtactctttctcgatattagaagaggagtcagatgttttccttttgaacatggactttaacattccttttccttgcttttttggaggcggcacggaagcagccggtt

SEQ ID NO: 51977 - DNA, 681 bp, Arabidopsis thaliana landsberg
taacgcctacatcctaagatcatgtatataattatacatttttacctaagatatattttaatctatccaaacatgcttaattctattgagaattgtgtgtaataattcagcatatgagaaagaactgatcctagcccaaaaaatgtctggacctaaaactcagtttgctgattataacaaaacaaaccctaaatatctatacactatacattgtcgaaatatatcatttgaatatcatacggtttgctaatatatcttatttgagaacaatacgtaaaaatcatgaatactactactgttgaaagttaggttaaatgaatatacgtaatctaggtaaaaattaaatgaatttaagtcattcaagtaacatataacaaatacaaacacgttgtatattatatatgtaaatgtatgtatgtatgtggtgatatatatatagccaatggcccaatgatgctgtgaacaaaaactcacaagaaaaaaaaaaaaactcacatttttgtgtttcagagatatttaaagaaaaaaagatggaaatcactaagttgcttgtggtgattatcgttggactaatgagtgccaatgttggcgcgaggcaactccaaggacttttcgaaaacacaaaattgttggatccaaaattcgatggtgagccaatttgtgccgctgggggaggtggag

SEQ ID NO: 51978 - DNA, 1082 bp, Arabidopsis thaliana landsberg
  unsure (1)..(1082): unsure at all n locations
gctgaagctgtggtctttcatcatctggtcatgattgatggatattttttggtggcacatatgttgctgctggtgtcgcattgggtcggtgtgtggaaggggcttacccaagccaatgatttcatttataggtccgcttacaagtaagaaaattattaaacgaaaaccaattagatactaagattgcagattagactttgacaagacataagtatgtgaaggttcccattaatatcctcataagtgattttacaacttgtggccaaaagagcaaaaattacacaaagcgggagaaagatagtttaagtctagaacaaatcgatcataactcttgaatcttgcggatcttcgtgaagaggtgagatcttgaaactgtcgggtcttggagatttctgttgatgcgtgtaatggaaagatggagaagaagaagatggtgtaagaattatggaggaagaagaagggaattcagagattgtagggtgaaggatttgtgtgagtagaagaacannnnnnnnnnnnnnnnnnnaacttcgaaaaagctttgtatatttagggttttggtgtagattttgttttctcatgtgattcttatctgccttttatatatagagagagaaaaagtgggcctgtggtattgtggatcgatgttgtgtgttttagaatccagtgggactcttaaatctttgggtagcaggcagcaagtggtttttgtctgacttttgtgtcgcatttatatctcgcccccaaaaccagctgttccacctggcttaggattcttcttctctgcttaattttggtattaactaacataacccataaaatttaatattcaaaatattaattttacttgaaatacgatcgacaaagacattaaattttatggagattcatgtattaatttttcgtatgcttattattagaaagcaaaagccatagtagtaacatattctttcatgcaataaagggtggccaacatagtggttctttgttgaaaatgagataaaatccaaacatcaagaaatgccatgggaattaatttaaattaggtagtagttgaaatcaaaaccatcaaatcacattaa

SEQ ID NO: 51979 - DNA, 1278 bp, Arabidopsis thaliana landsberg
ccgggttttttcgggaccgaatgaggtttccgggtttgtcgattttgcatttggctttcaacaacttagaagaagagttgcctatgagtttactgggctctcaggttcagtcattgtggctcaatgggtcaaaaactaaccggtgatattactgttcttcagaccatgattggtttaaaagaggtttggcttcactcgaacaagttttcgggtccttaaccggacttttcgggtcttaaggagcttgagagcttgagtttgagagataactcctttacaggtccagttcctgcgtctttgttaagtcttgagtcacttaaagttgtgaacttgtcgaataatcatctacaaggaccagtgcctgtgtttaagagctctgtttcagttgatttggataaagattctaacagcttttgcttgtctagtcctggtgagtgtgatcctagagtgaagtctttgcttttgatagctagttcattcgattatccgccccggctcgctgagagttggaaaggaaacgatccttgtactaactggattgggatagcttgtagcaatgggaacattactgttatcagtcttgagaaaatggaactaaccgggacgatttctcccgagtttggagcgatcaagtcgcttcaaagaatcattcttggtatcaacaatcttactggtatgattcctcaagagcttacaacgttacctaatctcaaaacactcgatgtttcgagtaacaagcttttcgggaaggtcccgggttttagaagcaatgttgttgtgaatactaatggtaatcctgacattggaaaggataaaagctctttgtcttctcctggttcttcttcgccttcaggtggttcgggttcaggtatcaacggtgataaagaccggagaggaatgaagtcttcgacttttattggaatcattgttggttcagttcttggaggtttgctatcaatcttcttgattggtttgttagttttctgttggtacaaaaagaggcagaagagattctcaggaagtgagagctcaaatgcagtagtggtgcatccgcgacattcggggtctgacaatgagagtgttaagattacagttgcgggttcaagcgtaagcgttggagggataagtgatacttatacgcttcctggtacaagtgaggttggagataatattcaaatggtggaagcaggaaacatgctgatatcaatccaagtgcttcgttctgtgactaacaacttcagttcagataacattcttggatcaggaggtttcggggtt

SEQ ID NO: 51980 - DNA, 2270 bp, Arabidopsis thaliana landsberg
ctaaatttagatggtgaattagatatcgtatttaagaaattgcattaatattaaataaatgttacaagcaatatgtaaaagtttttttaagcttttgagattggggtgatacattataacattatgtaacaaaatagaaagctgatacaaaagccacctccttcttacatccacaaaaagttgcagagggaagcaaaaggatacatcatgacatcccaaaataaacacaaattaaatagcaaatatagtaaacatagatacctagaatcggtagcattactttcattagttttttatttaaggttttatgaagggcaaatcttgtcataggaccgagaaactttttgtgaataataaccaccaatattactcttcctcaagcaatagccaatgctagaaggaaccaaaggcccttgtgttttgccatatgagttccaacacaaagcttgttgttgctgatgagtttgtaaccctctgattcctccagaaggtcgtagccttatatccataagatccacgtccatgcatggcacgttgttgctgcatgcaatacgtaccggttgcaccgtgaaactaccgacaatgttgttgtatttaacgccggaaatcgacactgcacgcgtctgattcttacacttggacttgtcgcagtaatattggtcgattactatcggtaccttcacgtcctttacttgaatgttcgaaaacgttaggttcttgacgacccctaatcctccctgcggatacatatatacacgtgattcacaagaaaaattacaatggacatcgaaaaataaatccgaactaaaccatacacaaacgtgattagtttatattataacaaaaaaaaattgaacataaagccagattaggcccctatacgtagaaagacttgcgtgttaagttttctcagaaattacaactattcatataaggtctcatttctatcttttagttttagttttatatatttcaataatatcatataatgtggtctctatatttacgtgggtcagaagtcacaaaatcatttatttatataaggtatgatgtggtatctatatatgtacctgccaagtcttgattcgaacaccagcaagagtgttttgtatagagatatcctctacaatgatatcagaaacacatgccacactcttatctttccctagtccacctatgctgtgatcacaaaccaaagcaaatatacaccaaacaaacaaaaaaaatcagtaaaaaattgaaaaagtaatagattgaaaattaattgaaaatttattattatgtatacatatacctaatgccatggccagggccacaattgatgtggtgaatatgtacattggaggagccggtttgaatggatacacagtcatctcctatatatatatatatatatatatatacgtaaaaagttgcttattaaagaaagattgaaatagaaattttagaattaagtcctgcccaaaatagatgaatagtttataacatattactgattattgaagtttataatatgatttttgtttagtatttaaacatttagaatctctggtccatgtaacttttcttaattgattaacaataaataaaagaaaagagagccttttcattctgcatgcttgcctattgtctgtataaaaagttagtttggtgacagatataccgatattaaatggtgttttttattaaaccaatgatgtcttttcttgtttaatgcctttattctataatactacttttacgaaagaaaaaaatacattatcttttcgtcctaacattttatttcactttggcgtgtacaacgagacaaccactatgttcaattatatacatgtaattgatagatatcaatttatgtatttcacattgcagaatgatagagtcgcgcataattagaacaatggaacggtcaaaattcattttgtaactgtatatatgtaataataatatattcttctttctttgttataatttctggttaaaatctttcttttttcctaagaaaagcgttttagtgttaaatgttaatgatctatggatcggaactatatagttaattaataaagaaaataaatgaaaatttattgtaagaaaatatgaattaccacaagcgatgttggagtgttgaatctcgacgttacgtgtgttctggaggtggatgccgtcggtgttagggctattctccggcgaagagatcgtaatgttgttgactttgactccatccgaatcatcgaacttcaaatgacataatggactgttcacgatgctta

SEQ ID NO: 51981 - DNA, 921 bp, Arabidopsis thaliana landsberg
ccccttcaatatccactatgtcaacggttccaacgagattattccccatactataatcttgagaaaaacttgttaccctagaaacaatttgctgagtttcttgtggtcctgcaaagactaacattcatcaccaagagaagcatatttcttaattatctgaatggttaccaaaagactattgctcttattacctgttggttgagtacatatgttggaccaaatattgtcaagtctcttcaaggcattataagagtaagcaccaccagcacctccagcttctccaccaactgaaatactctccattatcttctgcatatcgaaatgattgaactcatactcagctaaaaacaactcatcgtgaagttaaacatgcttatgcaatctcgcttaaaggctctcaagattcaaatactaaaacaactaagaaagaacaaaagcgatgaaaatttcttttcctgtgcaatgaaaatcaattatcagttatcaagagcaaactttcatcacaatgcagaccacaaaatcatctctaatcctgataaagttcgcaactttttctcatttccccccagaggatgcgtaattgagcagaaagcttgacctgtgtaagagagggagccaattgtgtttgaacgcacactgtcgtcgaagctctccttcttccttggtttgtctgagcccttgatacggaactaacgaacccattgaactgatgaatttgcagaaccaccatgacaatgagttccaaaacaaatgctataaaaccaagagcgaacttttgataaacagagataaaacttgtgaagagaaaactggaaagattgtgcaatgtgtcagagaatgtgacacgtttacagtcttacaaaacaaaaacattttgggttacattaactcaaaaaaacttctgttctaaattaaaacaac

SEQ ID NO: 51982 - DNA, 684 bp, Arabidopsis thaliana landsberg
tgcgcgatggcgtccgccacatcggcgccgcccgccacctccatgacgtggctgcgcacgcgattggggctgtcgcgcgtgaccaagatgggcggcttgggcttgttcttggaccccggccggcgcccgcggggccgccggcatgggcgccgccacctacggcgccaccgagacatcgttggtctcatcggctccgtggtcgcccggcgcgccgactgccgggctgctggtctccggatccttcatggacgggggctccgtcttggggttggggcctccggacgcgtgctccggcaggcccaagtgaccgggcacgctccaccatcggttcgccagcttgacgcgcctcttgtatgtagcaaccaacagggaggagctttatatatcttgtagcacgacacgatcgatcgacaagacaagaaacgaaacaaactaggtaccgatcgagcaacaaaagaaaagattttgatgtttatatctgagcagatctgatctggactggatgcagggataatttatagtaaatttacattcgctgagagaacttcttcttaattaacttggtatcggtcgagtactaatttgatctgatgagctagagaacatcatatctaatctacatagacacataagttctctctcaattcatgggggattctgtctactagtagtagtactaggagg

SEQ ID NO: 51983 - DNA, 607 bp, Arabidopsis thaliana landsberg
  unsure (1)..(607): unsure at all n locations
cccccccccctcctccccccccaccccctgttcccccccgcggcccacccccccccccccccccccccccccccctctaattgccgttccacccccccccccacccccctttacccccgcgncccccgcccccccccccccccccccccccccccccccccccccccttctccccccccgccggtgtaccccccccccaaccaccccccccccccccccccccccttcctccccccgccccccccccccccccccccccccccccccccccccccccccccccccccccccccccctccccccccccccccccccccccccccgccccccccctttttcttcccccccccgttgttggcccccccccccccccccccccccccccaaaaaatcccccccctccccccccccccccccccctcccccccccccccccccccccccccccccctcccctccccccccccccccccctccccccctccccctctccctccccccccccccctcccccccccccctcccccccccccctcccctccccccccctccccccccccccccccccccccccccccctcctccccccccccccccctctcccccc

SEQ ID NO: 51984 - DNA, 174 bp, Arabidopsis thaliana landsberg
gaatggagattacattatataacctatgcttttttaaatgagacatttcagatgaactggcagttgttagctttaacattatattagttagggcgatttgtaaataatccagagttcctcaatgagaaaagaagcccaaggctgtctctccgcttcgaatatacgttcatgccc

SEQ ID NO: 51985 - DNA, 1005 bp, Arabidopsis thaliana landsberg
aaaagggtaaagagaaaagcggcatctgattgatcaccttctaggcttctactgcttagcacgctttgcaagataacttgtagtgattttagagaaacgagtgattgtggagaacaattgccataaagagcgtcccttaacaataccttctctaaagctcctcgcttgtttagccaacattggttctgtttcatctgtcttgggttgacgcatcacctcctgcattgaagctactgatgaggtaaaaatggagttaaccatgaaagtccatagttcgaatagaagagttcagaagtgaaaggtcagacctggattcatgtttgttaaccgtcttagtctatcttcagctacacgaatagcccgtgtcgagcttttaacaccttgagtgataccttggctacacaaacactgaaagagttacaaaacagatatgaagaaattggtaatcatcatggtgggatgtgagacaaaccctaaatcactgagctccatagttaagtcactgatctccattcccgataaacgaacagcagccattgtatctggtagctcttctctagttacatccaaaagcttttcaagagactcagctgctttcttgaaagcctttctcaacattccaaagtaaaactcaaatcaaccttcaaaatccatcaaagggttgaagaaatctgtaaaagcaaaatgttggagaacgaaccagaagagtaggaatcgcagcaaagaagagccacgatgctgaaattgctgtctgcaacagaacccatgatgatgattgtttacaaagtgacataaagtccagatctttattgagcaatttgaatcaaaacctaaatccaagagaggcttaccacgcaagcgacgacattgagcaagacgaagtgcttctgtgtgaatgtccattgagagagttggagaggaggctgtcccacggacgatgtcaattgggaagagagcgatggctcctgaggattcgagtacaatgcagacggagtagaagatgcg

SEQ ID NO: 51986 - DNA, 1058 bp, Arabidopsis thaliana landsberg
gagcatccgtttatgcaatttttgggattttcatttgtaaaactttaaaagctgtggctaattatttgattccagagggggcatgaggagtttgatgacgatggtccctcatcccggaagcaaacctcgtggttcaaaaaacagtactccaaggaacccaaaggaaaccagaataacaaacacggcccctacacctggggtaaaagtaagtgaatgtcttagctctgtttctatttgacggctacactatgtaggaaaatctcttggcatgtaatttactcactgcttctacaataaaaaatttgtgtcctctttagattcttggccattaatgctaatgctataggatttgtgttattagtgggcttcaatctagttttgttgagcaactccctgattttccttaactcagactcatcccctgaaagaaagaccttgtgcttccagtactagcttacatacttatccaaattcctggctcatttgtggacttagttctttgacttctgtgctgttcctatattaagcatccaccatctataagtgcttcgccgttgaaattgtattattgtccttttgtataatcaacgggtgctactttgtttggttacatactcatatcaaccatttgttccgttgtgtagggaattttgatttttgcgaagttgatgaggactttgatgtcgactatgtattccgaactgcttttgcaggatcccgaggtttctctttttcattcactcatgaagaggatgaacctcgatggcggcatcactcttcaaggttttccaacaactctaacaggtcttggagatcgaaatatcggttagatgaagatgaaggagatgaagactatacttcagactccagtgactctgagtctgagccaaaccaagtttctcatagacaagcacttggcctgagtccctcatgtcccttaaaccttaaagatgtcaaacatgcgtaagtagtttcactgcatgtcaacacacaaaacctaacatatatctttcatcttctcaccacttaacatcaaactctcttttatttcgtatatc

SEQ ID NO: 51987 - DNA, 748 bp, Arabidopsis thaliana landsberg
atccaaaacatagatgggttaatgaattttcaaaagatagcagcccttatatggatctaacaataagtgtacgttttcagtaaccattattttcaaacgttacagcatcttttttgtatggtctgtttttaacatgttaatctagttctaaacttataactgatgaaactcgaaaattaaacgactaatttagctttgacaaaaaaaaagagcaactaatttagtgtgagttgacaatgtttatagcttaaacttatagtattagaagtctttgtctcaagttgtgttttcgtttgatttctcaccattattaaaccaaaacaaaagacaacttgttacaataccagaagtccagaaccaagaaattgacaattgaggtattgggggtattatagtaattttaaacgggtccacaaaagtgagcaatccaggggtagtgagagagaaggaagaagagacaggcgtctagagaagctcgctcaaaaacttttgcacgaacacctaaaagttcaatggtccaaaaggacggctctggtcgagagagagagagaagagaggaccgcttcagagaacttaatcacgaaagatcaaatcacaacccccttatcgtacgcctcttttccttcagtcctttttaacgtacgcatgctctcaatattttccaaagtacaatatagaaagagacggtaataataaaaagacttcatgactttaaagtacaaaatcctccttccctgccaaaaaatct

SEQ ID NO: 51988 - DNA, 569 bp, Arabidopsis thaliana landsberg
agaaaaaaaaaaaagactttgccctgtaattctaaaaagagaagttcctttaaaaaaaaataaaataaaaaaaccctagatacatacaaacgtaacagtaataatagacgagagaatatgtctaaaggtaacgagatgaaactgaaagttagaatcttatcatatttttgccaataaataaagacttgcattatcgtgtgattttttggtgatagttgacttcatcattatcatgtgctttaagagatcaaaatcagacaaaccttatcagccgttacttataggcttataactccactacacattcagtcggtacgttattacttattgattaattccatggaaacttatagtgtacgaagctattacaaaaggtgtaaaaaattgaaaattcagtgtagagtaatttcacattttaagagttttaactttgactttttttcattggtactccttttccctcgccgataatacctagtctcaaccccaaattaactcatctctcatgtcgttagactattgacatttattcttgaaactgaaataagaaatcgaactttgaatttggt

SEQ ID NO: 51989 - DNA, 1042 bp, Arabidopsis thaliana landsberg
gttgtttcttttttgaatcctttctaacgtcggcgactaaaaatgccaaaagattggtggatcgtatatgggtttcgagttgggtttcactttaattgtggtaaaactcaaagaaaacactacatggaaatctaatagaatccaaagggtaaactaaaaccacaaacctgttgaagtcaatataatttcaatgaaaggtatggttcctaaggtcttatgtcatgtacattgatatatagttttataccatatgtcatatggtatatttatttttccgagctgtagataattacacatataaaccagttaagccagatgggaagtcaaaacaaatataattctcttttttgttttttcgttgatggaggagaaagcaaaacacccacaccaatggtaagttaaaatggataataaaaatcttcttataaatctatattgtgttttgatgaggggttgggttttcttatgtagtagtgcttatgtataatactatatttactgataatgtttttaacaggctcacccaaataaaataaaaatgtgtaacgggtcatttgaagattaccaggatttaagaatgatatttggatcaaatgtggcaactagacagaatgttgtgggattaggcgattccaatgatgttgctgcttctcaagttgaagacgatgatgaaccacatgatttaagtcgtgttcacataatggatgatacatatggaatcacatacgatgaaacatctatgcatgacgttttctcatcattaaagaaaagcagggctgaaaagcttccttagagaaagaaagctagattcgatgcattaagttcgaacaaggtaatggatgaagtgcatacagtgacataattctgtattcaaatttttgatattatatagagaagatgagaaaaggaaattgaagaaaaaaaagttgaggacaaagctaataatgtgtaggatgctatcaaagaaattcttgatttggataaaaatttgcgttacgagaccattacatttgttcacagttttggtatgaaatatggattc

SEQ ID NO: 51990 - DNA, 991 bp, Arabidopsis thaliana landsberg
aaaactcacttgattcacaaaaaagtaaagcacatgacaaacttcacttcttaaaggatttagtaatcacagaccattaatcacataaacttgaaatcatttcattcccctaaacgaattctacaatccatcaacagatgcagccaagcttgacaatgtttcatttccgtaacaatccactatacattccaatacaatccattaagcacgaaacgtttcaagctatctccacacagatccatcataacattgataacaaacatccacacaaatctaaaaaacaaatgatcttatataaacagttacaatgcattgagtttctacaatccatcaccagtataatctccattcttaacacagatccaatcttacattggtaaaaaacatccacataaatctaaacaatgcgttagaggtttcaaaccaacatctgtatcaaattctaggttccatagacaaaagttacgagtagaaatagttcattgacagaaaccaccgcgaaaactaaccagattcacataaaaacttcacatctacacagtaacaacaaagcttgaaatcgtttcattgcacaaacgaatttacagattccaatacaatccatcaacaagaacatcaaaagtaactacatagcttgaaatcgtttcatttccctaacgaaatcagatttccacacaatccatcaacaagaacaatcgcatcatctaaccaacattgcgttgtataatcacacaaaaccaccggatcttagcgaaaatgtaaggcggatcaatcaaagcttaccttgagacgagtacagagagagaggaaatcaatggcggaagaagcggacgaagaagaaaaagaagagggaacagccgcgacattaggaggagaagagacggaaccatctccggattgaggggaatcggaagccatgcagtgaatagctcgattaggagaagaggcactcgccggggagtaagtgaattggagatgagaaccagtgaaa

SEQ ID NO: 51991 - DNA, 633 bp, Arabidopsis thaliana landsberg
ccattagacctgttgagaatggaaaccaaatttcagtttacttaattaaggatataattcaaatctcgtaatctctacaaacgtaaataataatataatcactgtttgacctacagggtggctagtgatgttgccggaccactcatctagtggttggaaggaaaactcgaatcagctcttttgcagtaacctttttcctacaagtagggcatttgccctggcgagatattgccatctttatacatcccttgcagaagatgtgaccgcacttggttgacatctcctccgtaaagggacacatgcagattgggcatgtgaattttggctcttctggtggaggagctggagcctttgatctagacactctctgcacaagataaaaaaaattcgtgagttcagactaaatagcataactgcacaatacgctttcataaatttgcatctctcttaccgaagacatgttgacttcatcatttacagaggcatgctcacagtcgatgacagattcactagaaggaatccttcctgcgtttgtgcttatgttggcaggcaatctagtcgtccctcctgcaacacaaagtaatatccaactatcaaactctctgtctcttcctactacttgagacatgacat

SEQ ID NO: 51992 - DNA, 1159 bp, Arabidopsis thaliana landsberg
ggtttcttcttacaatctttctggatcttgaatgcttctgatctgttttatccggatccctaataatttattctgcaccggaaatgccattgttttaatctcaatacattccttaaggcgatagaactagttctttgattgaaaaatctctgttttgttgccttagagatgaatgacgatttctaatgaatgtaaacccaatgcgttaaaaaaggaaagatgtttttttttcttcttttgctatgagtttggtgtatatggtttgaatctttctttcataacgtattgttttctgagaaatctggtatgttttgttttcttgaatcttctagggttttccacatagctgattgatgaaaatgtcaatgaggtaaattaaaccaaccctttcttgtaacagttttcatgatttttgaaatggggttttaattggtttcttgttgtttctttatagcagcttgtgtggaaacctttgatgtttttttgtatgtggatgtgaattggtatactcgggtttattcgtaaaggaatgatcattcgattgaataagaatggagctttatactgcaaattgtctgtccaccgaaaacaaacctactcttgagctttcaaaactagtcaaagacgagaaaagctcggtgaaaacgaacagcgaaaacacccttacacttgtgaatcatggtacattccacacctcagcttaagaagatgactaattcttattattgccacattgtgttaccttacctctgtttttgggtgacaccgccggatattttaacttgttggctctgtaatttgatatttgatgttcttgaacactatctataaggatctttcttgattacaggtgcaaagatgtggcaagagaacagggaaaaatgggtgggagatcaatctcgacaaagaaaaaacactgcaaaggatcagattataaggtattatgtgtttcatcaacctttaagttcatctgacaatctttttgcagtgtcaaagaatcaaagaaggcaatgttttctaagatgttcttgaatctcttgcagctggtctactacatatgaagatcttctctcaactcatgaacctttctctgagtcgattcctttacccgtaagctttaatctaatcccaatatctaccttgacttaaaaaagggaac

SEQ ID NO: 51993 - DNA, 729 bp, Arabidopsis thaliana landsberg
atttttttgctccttcagaggcatcttccatctcagaaaattgtccagatctaacttgctgctgctgaattactggaagtatatctatggctctatcctgtttcaaaggagcagagacacgggaggtttaaatgtccagttaaaaaaagccagtatcaagtaatattgtacattcaagtttcagaatactagacaatcctgcaagcatcaacaggttattaagcactaaaacgcaaatgtgaggatgtagcctttaacaaggaactatggaaggatccacttgtacatggaaagttggctgaaatacttacaactaactcttttctccaatgactctgtgatcgcattctgaacataacttcttccccaatttgattgtcggatacgaaagcctcttcgattttctgaagcctaagatcgacttggtatgcctggatgtaacggtagcgctgcagcaatgtgaacaaccagtaatttctagtcaaagaaagaccatatacaaaagataataactttccagaaaataagcatggtctatagtgatgcagtttccctggttgttcaaataatttcatgcttgttaaccaacatcccagactacaccaagctcgaattataaaagattgttgaagccacacatcccatacgagaacatataccagtctctatagaatgagctaattctatacagagccatcattgagatcccttattaaatttcaatatgag

SEQ ID NO: 51994 - DNA, 510 bp, Arabidopsis thaliana landsberg
ctatcatatatcaatctaaatccatcagtcctatttaagatttgtacatttagttacttactttttttttgttttaggttattttacattgttgttgtagacaacgaacgttaacgtcttaacgaatatgtgttttggggaatgtagtaatgagggaacttatctcacctttcgatgctgtcagaagactaaagaacttaattcgaacttttgttttatatgactcttaagtcaataatttgctagtcatacatgataccatttacattttcttctccacattggtttaatcacaagacgtactggtgtctaagcaataaaagttctaatcgttaaaagttaaaacacttttgtagagttcactaatttccaaactatatcaaattaacattaattttatgaactgataggtattttataattaacaagatcgtttaaattatattgctattcctacactaaaattctcgaaatgggactagttcaaaaactaaattcacgtgaggtttt

SEQ ID NO: 51995 - DNA, 809 bp, Arabidopsis thaliana landsberg
ataattacactctttttttttttgataaaacacataacacactactttaacataaatttttctttaaaccaaacatgtaattacactgcttttttactgtttatccaccatatacttatcaagaaaataactagtatacacattatttagcaattcgtgagaaaggttttttgttattttaatagtaataattttacgtatatcgataacccacgtaaattgttgtgctttttaatgcaaaagagaaagtccctaaaaaaacaaaaaggttaaagattgctaaaggctaagagaggtgatgatgtgagattcttctctctagggtcaaaaagtaatactcacactctttttgctcttctgtatttctctgtgtactggcgcgtgagatagaacagaaaataaagacatcaaatctttgctacatgtctttggtcgtatccgtatatatgttcttcttctaattattttagcagaaagaaaaaaactaatcgctttcataaactcagatttgttttttttttttcaatggtagaagaagacaagtgttcttggagtttagtttcttcttatgattcattcataaatccgaggaaatatatcaaatctgtttctttctttctctaagtcaaaacccaactaagagattcttcttcttctttctttgagatcagttacaaagtgagctttttttttaagttctaattgctaatttgctacacataagttctgtttagcttcttagagatgggatttgaagacaagaagatgctgagacagagacataagcgttctaacaggtttgtcaagtt

SEQ ID NO: 51996 - DNA, 1145 bp, Arabidopsis thaliana landsberg
tcaagaaaaaaaagaaagtattcgatcatgcaatgcaatcatgttttttcacgcattgcacgacttatattgggataatttataatttgatccatcatcaaataacgtttagatgctttatttccttactcacattgtttattgggtacttgcactaaatgatcattaacatttattaagttaggtaaataattgtgtactccttttatgtgcaaaaacacaaaatgggtactattttattactaacatgctttcttatcaaatagcagtaccctatgttgttctaaataacatgctaattcaattcagatttggcagacaaaataacatggtattttagagagagcgcgcacaagtgttttttttttaaaacaaatgaaaacatcataattacgtacctgattgacccttgtgtatatattcacgattagaaattgtagattaccaaaacactcgcacaaaatggttctatatatagacaatatatgattcttatcacatgttttgaatgaaaaaaaaagaattaagatggattttttttttgtaaagaaaaattgtactttgaaagagtcttatccaatcattaaaaaaaatgtcgaatccattatttattgatgtattctgaaagcatatattcttgcaaaggggcaaataaaagagatgtcgacaaagattggatacataagatattaataatttataaatgcaatggcatatatatatgatataatttgagctctaaatgccgaaatttgaaaaggagaatgtgtgtaatggttcttacaaataaaggagaccacaatacttctttgtgttatgcttttttcccatcttttattcttttgttcttttgtggggttaactctaccactacttattttctcgctctttttccatttattttccatatatttctaatttctaaattaattttactaatcttgaaatacaaaaaactattagacttagcttactaatttactacaccaccaacatacacactacgcaacatatcctaatatgtattaaaatgaaaagaacaaaaaatgagaaccggtattacaatttatcgtagtgtatgactagttatgagatgagaaggttcttaaaaaagaattaccacccgaataatgtgattaatgttt

SEQ ID NO: 51997 - DNA, 1056 bp, Arabidopsis thaliana landsberg
gtttcaaaccttatataaagctcttcgggtgtcaattggtgcagactgaatacatttgtctatcacagctggtaaagtagttgtgaagtcattgctgtatatctctggattaaagaacacctgtaacacacaaaatctcaacattactcatcggtaatagcagaacaaaaacgcaagaacaataaaggaaattatgttccactttccagttactctcttggtatagagatacaaaggagattagcttcctatgggtccagtagtgacagctgaattctaactagataagaattagttccagacttccagttaacataatcggactaagtaattacctaatttgagtttctgagagagcataattttatatcagtaccgttcagtaatcagaacagagtgctgaaaatatcttataatcgataacaaatcatgaacagctcactgacatactagaaactcatgcaccagtaaagatatccagtctccgattttggttatcttatcaacttacaactttttataacagatagatggtaacaaacctcgggtccaaggaatcgttcatatcccacgtcgcaagtgtatggtgcaccagtctttggctttacacctttccattgtttaatatactttgctggttctttgtcatgtttattaaactcctgcaaccatatgaatgttctttatcaatattcctatattcttttcaagcgatttcagcatacaggccagtaataaattttcagaagagtatatattaatattatctgacttgaatattcaccactaaggattacctttacgatgtcagaacaagtgtagcagtacatttccttcactttacgggctacatcgaatgaatcttctggtggtatattctcacctctttcctacagtaaacattgaaacgagaagttacatgaagttaatacattaatctaaaccagtaaacaccctctctaagcatatgagcacaacatcttaaacaaataaacaggaagcctagctaccatactgatacagcttggattaacacatttaacttctgtgccttta

SEQ ID NO: 51998 - DNA, 1089 bp, Arabidopsis thaliana landsberg
aaaacgaaatttatattttccttttaatcagttaaatccaatgagatgttcttggaattgaaaacaatgatgatatttaataaatgattcttgcaagtttcaatgagccgtacggattaaatagtaaagttagtaatgagtttggttttcttgaacaatttattaactcaaccctctggccaagagttgaatgttcctgcagtccttatttcctggctcttttttcacttttttaccgtaaagtaatttatatacagttaatgtaattattaatttccgtacaagtttttgacacttttatcgtcttgatttgattgattttgttggatggagtaaataatttactctatttacttacaaattatatcgagctcttttgtttagtgtcatatccttaaaacatgtataatgaatgactaatacatgtcaacaagggaaagcacaaataaccaatgacataagttcgtcatatttttcaatttttacgtcatacgaataacattgattggctagttcgattaaaactcaaaagcatggtaaagattttacagcggaaatacttgaatgtatatttttaccaatgttacctaatttctaaagaccttctcattgtcaactgttttaagcttaacataaaatatatataattatcgttacgttaaatacaattttgggaacatacatataacataatagataatcgtaagtcgtaactattcataactcgttctacagtctacaccatcgccgccttaacttttattgggctttaacgataagaaaaaattgtattgggctttattacccatttaatttcggcccactaataaatcttctctccatgttttgaacactgaaaaaagtcttatcctgatgatttctctccttcctcgaacagtcgccgaaacattttcgccggcgttacaccggagaattcatccttctttgtcttattactctactacccaatttcagtttaaactcactatcttcccaatttgatgattcagtgattcaaattcgaaacttcaagcaatgttatcgacattgcaaccgccgcgttctctatcactcctccctctacgccgg

SEQ ID NO: 51999 - DNA, 541 bp, Arabidopsis thaliana landsberg
aaatccgtcgaaatcacaaacattataatattacatagagataatcatctctctgtctctctgtctctctgtctctctgtctcacgcgagaactctggcttcgtctctatattattgacccttttgatctctctctgtctcgctttcttcctcgcgtggacctttttcgaaaaatatcaatcccagaatttcgcttcattttggattataaactcccagatctgctactctctatctccgattttgtgatttttcaaaccctagatttctccggaagagtttatttttttctctgtaactaaaccgagatttttttttcaaaattccgacattaccctaggttgtgtattaccgtagaaaaccctagttcctttttggtattcttggtgtacagatcccttccttagtcagagtttttggttattagtgtttagaggtttgtgatgaacaatcgaggaaggttccctcctggaattggcgctggccgtggagcctttaaccctaaccctaattaccaatcacggtcgggttatcatcaaca

SEQ ID NO: 52000 - DNA, 537 bp, Arabidopsis thaliana landsberg
ctgatatgtgtagttgctacctgagatgacttccagtaagctaaatcctgagaagttggccatactatgttggatcaattctaattgtccattttcccaggaagaacatattggatggtactgtggtgtttaccctttttttgggagcaagctgttcgaggactaatattagccatcttgcaatggcaacaatggcttcctctaagttgacaagtgataaggacaaccctaaaaagcttcaggataggctcaaggttagctgacatgaggaaaaaacaattacctctatatgtactaacgatatggcagcacttatataaaaagatgtgacggtgttggtttcactctatttatcgtgatcaagaatgtgcaaagggaaagacagtagaagctagctagattcctcaattaactcttctctcaatatgttcgtggagacaaagaaggatttgctaattgtgctgaagccgaggcaaagaggctctcaatgcacctgtctagcttctgatcattctaaatgatttcaatttatatatg

SEQ ID NO: 52001 - DNA, 473 bp, Arabidopsis thaliana landsberg
agacggcgagctaatacaacatttcgtaattaattattaaacttaattttaatccgcatgtgtttaagggtcttctataattagtctaagttagcaaaaattacatagtgatgatgatttgtaaggccaagtgaaactatatcatcaggatcgtgatcctataatggatgtttttcttaagtgattttatagcaaagccaaatgaaatcttaagttattctttttttacaaggttcagtgttttaggtcttatcttttgtgtaacacctactttcatataatgatatttatactcttagcgaacaaaaaaatgaaatcttgaacactaatcagtaaaaattgtcaaaaaaaaaaaaagaacactaatcagtaataacctattgagatgagtatcaagtcgacagcaggttcactttaccatttttctcacaatgttggggaataagaaatggagaattaaaaaagaattttta

SEQ ID NO: 52002 - DNA, 1093 bp, Arabidopsis thaliana landsberg
ttcttcttgtctctagttgcagagaagtaattgcacgcttgtttagggattcatggagaagtgttctagcattgggcaagttattgatgaagatataaattcaggtgcttttttctttttgtgatacttcctaagctggtttggatgtaattacatgttctaagttaaaggttgttccttttttttttttttattgattgattttatcagttgatacatctaagtggaagaaggtacgagcaagtgatgctggaattaaaaattcaatgatccctgaatcctctatgaatgttttgagactccttagacgtcaaggtttgtgttttcgtatgttttaggtttactgttagcattgatgtagaagtattagaggaagctgaactatttgtttttctggtcttaggtttcgatgcataccttgttggtggatgtgtaagggatttaatactgcatagagtgccaaaagactatgatgtgatcactacagctgatcttaagcaggtttagtggattgattttctgattatgttaccttgttcaagaccttatgttttgattattgcttcacgcatctcgtttgtttttatagatccggcggctgtttcatcgtgctcaggttattgggaaacggtttcctatttgtcacgtttggatgggaggttcgataattgaggtcagttttcttcctaatgttagagttgtgttatttgtcttctgttttaggcttgtatatggtttgggtatttcttgacactcctcttataggtgtccagttttgataccgtggcacacagtgacagtgatttggagaagtctaaagagaaatctggtgtcgcactggataccgaggcaaacaagaataacagcctcttcaaaatgtattctggttgggacataaaagactgcaatcgctggaggaatagcttgcagcgggatttcacaattaacaggtggagtttctggaaatatttacttgtaccaaaagggactattgtatgttttgactgcatcaatcacacccacttacttgtggtattaaatcttggtgcagtttgttctataatccttttgattttacaatgtatgactacga

SEQ ID NO: 52003 - DNA, 1112 bp, Arabidopsis thaliana landsberg
tgtgctctcagctcccttgttaagcacaacgaatcaacaaaacgccattaatcatctcttagctaaacaaatctcactagtgaatccaaaaaccctagaaacaaactatttctcatctggcgaaatagatttcaacaaatcgcgaaagttagatctggaatcggaacaatcggaactgaatagttcacaagtaatccccaaattcatcgaaagcagcattaaaacaacgagaaggagtgcgaggagagaatctacgaatcaatcggagaaagaagaaaatcgaagattctggaaaaatggagattgaaagacttacggatggtgaagaagaagaaggaattagcttcctcaaagagagacctctcgacgacgcagcgaaaaagaagcagatctggctttggctaaggaagagaagacgacgctcaatatcacaagaatccgttttttccctttttttttgttaattaaattaatttaaatgtttggttcaatgccttcaatgtaaccccacatcttagtttcgttttcatattcacccccttaactattattttgtcacttctaaaccctcaatctcacatttgattaactggaggtttgtttatggtttttgtattttaactgatttgaaaattcaatcaatatcattatgttggagtaccaaaatcttgttttatccattcaatgattttatataaatatgagttagtatgatgatatttagtatttgatttcaaattacattttaacaacaggttgattattgcttaagtatttagtttagaatgcggaagtgtgtgacacaatgacagaagatagtttgcttattttttgaataatattataaagagaatcagcaaagattcctaaatacaaaaggtgaaaagagagaaagactgctcggccggagcactgatcaatacttgactgtgtttcttattgttctctaaatctatatctctaaatttgagttcttctagttgtacatgcactgcaggaaagaaaagatcgaagctttctattttcattcaccggctagctaaaaagctttttaatctcagattggtgctcggtggacttactttcagctctccatcatattacagtccatc

SEQ ID NO: 52004 - DNA, 776 bp, Arabidopsis thaliana landsberg
ttaacgtctgcaagactccaatgtctagcttagtccaaattctccaactacattatgatattcatgtattagatattttcatgatttgtcttattacgctttctttttgttaaaaaaataattgctgtgaatttgtttctagaatacaaaattcgaaatttggtaatgacaaaaccaaaatccaaaattttgaaatatgataaatagtagtttctagagataaattgttctacaagtaatatataaatagaaacgcgtttccttttctcgatgggagaaggagacatgtaatgcactctataaatatcgaaaacgtctgtataattctctttctcttacaattgtctattcacaaaccctagagatccattcttcgaaagcctgagatcaaaatccaaattcttttttcctcttcttataattttccctttatccatcaagaaattatgtgtcccttgagatttgtattagtgttcttctcggcggtactcgcaggatatatcgcgtggaggacggtgaattctacgccggaactattctcagacgagttattacaagccgaagccaaggaaaaacaaggactcgatttcaagagaaagatggataatgggttatggacgttcgttgatatggctagcggaagatacctttggagaaatctcaaggagatgcgtcagagaagtcaatgaccgatataaacaaagtttcgcctgtttggcttctgatatgtagaaagttgagaacaagaaaaattgtttcttcgttttcgtaaatct

SEQ ID NO: 52005 - DNA, 695 bp, Arabidopsis thaliana landsberg
  unsure (1)..(695): unsure at all n locations
cccctccccccccccgccacccccccccccccccccccccccccccccccccgaattcactaggagaaaccggggcttcgccttcanaaaaancgcacacaacccccccccccccgacccaccccgcccacccccccccttccccccccccgntgtccccccccccccccaacaccccaccacccccnnccccccccccccccccccccccccccccgtccccccccccccccccccccccccccccccttctccccccccccccccccccccccccccccccactgccccccccccccctatcctccccccccccctccccgccccccccccccccccttctttcttccccccccgccgtttgttgcccccccccccccctccgccccccccccccccaaccccaccccaccccctccccccccccccccccccccccgccccccccccccccccctcccgcccccccccccccccccccccccccccccccccctaccccccccccccccccccccatccccccccccccccccccccccccccccccccccaccccccccccccccccccctcctcccctccccccccccactcccccccccccccccacccccccccctccccccccccccccccaccccccccccccccaccattccccctccccccccccctcctccctcctcaccccc

SEQ ID NO: 52006 - DNA, 605 bp, Arabidopsis thaliana landsberg
  unsure (1)..(605): unsure at all n locations
ggcccgcactgtacattataacctcagcggcatgtcttctgcatcacttttttaggacctcgtaccttagtttatctcgggcatgcagtatacttgaatacttactcttggttcctccatgtatcttcttattagtttatttcccaaccttttgacatttttttttatactgtaggannnnnnnnnnnnnnnnnnnnnnnnnnnnnnnnnnnnnnnnnnnnnnnnnnnnnnnnnnnnnnnnnnnnnnnnnnnnatccgtgctattccatggtcttctgagcaatcttacagcgacacgctgagcaaattcttcacaaactactactcgtccagctacgtgtcccaccaaatggtctaccataatggcatcattcaaagactgctggtacgtatatttcttggaacagtcatttttaactaaactattacgcaggccaccttccttttgctttactttgaaaaataaaaaccgtcacctagatttattttaaaaaactgtttttgctctttgtgaaatgatttgaactttaacactttgcagctataagcgtcctcttattgcgattcatttggtgataccttcgcagttgggaaattcatgttct

SEQ ID NO: 52007 - DNA, 606 bp, Arabidopsis thaliana landsberg
ccatgacgtggggggcctactgcccagattcttttctccgctcaagtgacgaacagcacggtctcctatcgtccctctactgtgctccgcgttttctccacttccacgtgggccacgattgtcagctcaatccctttcaagtggacttcgtcagaactgaacgcagagcaacgaactccgcctagctcgcggctcgcccgttagttgcgatcctagccaaccatgcagctatataaccgagcacccttccttggaaatatatgcatgctcgcacaccctgtaggccaataccgctagcatgtgcccaggttgaagacgctgtcgtcgcgccatgcgagcccatagagagaacaagagagaagaatgtggccgcgcgctcatatcatctgcattacctctgctggtcggagggtggtctagaagtctcatcgggtcgtgctatctccgggcaggcccggtggcatgggccatgtcgattgctcgtcggagtttggagttcatggtcgcgccacgctatgccatgaacaggcttctctacaacgtaatcaccggtaagatctacgttgatcacatcgcgcactctgtactacgtgtagacctgtatgt

SEQ ID NO: 52008 - DNA, 889 bp, Arabidopsis thaliana landsberg
ggtctgtgcactttctccccaaaccttttgttttaatcagtttcttcttcaataatagaagtggaagattcggtttactttgaccgaccaaattcggtttaagattcattgactttcttctattcataaccaattgttcataactggattgatctttataattgatttgagattcattaggcgtcccctccagacgatggttcttctagtcattcatgtcgagataatggatatatcatttttggtataaattgtgtttattatacgtatcaaaggttgattaatagtaacacaccaaacatactcagtttttgattgaaacaaaaccaatatgaacacacaaaaaaaactagcgtggagagatgggagatatgatactagagcaaatggatgataaacgaaaattcctctccctatggatttgcaatttcgggatatttactacccgtcgaacaccggtacttgcatcatcatcatcagccgccaaaagatcgaccacaacaacatctgaatccggtggctcgttcaccggaactctcccttcaagcatctcaataaccatagtcatatcaggccttttcttagacttctcttgtatacaccacaaagccacacacaccaatttcatcacttcctcttcatctacctcattaacttcaatcagcctttgatcaacaatctccattatctttctttctctcatcttttggttcacaatccttgggaaatactctaacttcttcttttttgtttccttaacttctacccttgaaatgcttctccgtcctccgatcatctctagtaacacaatcccgtagctataaacatcggatttctccgaaataccgtgttcaagaagccactcgggggctaaatacccccgagtccc

SEQ ID NO: 52009 - DNA, 1175 bp, Arabidopsis thaliana landsberg
  unsure (1)..(1175): unsure at all n locations
cggaggacattgctggagctattgcaactcctccttctttgatcaaacccggaagccattttccggcgtaatgcattattacagctccgagtagttcaaatctcatacctttcacctgtttcaatggatagaggattgagatatgtacaccaagtgtttgtgaaaatgcttgagagaaaaataacctatgtgtagtagtaccttgattgcagtgattacacgaacgaaatgatcgattcttaagatggagacatcttcgaaccaccaatctggaggaacaggctggctattagtgttcctactcggactacaatagaaacttgaatcttttgattcgttccatctcggactagaacccgcgaaatttgttgttgatggagatggagctttccctgtgtaagcccatctaataccttttggattactacaagctttccaagcgatagattcactacaccttctcacaatctgaagattctcagcccaaggtgagagcttttcacagctcttcaggaccaagatggagtctctccatgaagacagaaccacatagctgagaaaagcttctgtcttgaagattagattcccttcctcaagatcctctgtcatctcaagatactcagctgcacaacgtaatcctgatatgttagttgccgtgagatccacgggaactccatagcagaatttggatgcaagctcaaacgcttctggtcctccaggtagatcatcaagaataaggatcgtcgggtcaggatctcgtgactcatagatcaatctgttcatcttcccgctacgtgacagcaacggatactgaaaggaaagaaacacttttaaatccataaactttctctagttccagcttaaaaacattgactcaagaatatgaagttaccttgtgaaggtgaaagttcatgtcgccgatcttaaccagaagatcgctggggatatccgtagcaacaaacctaatcataggcaaaggtttttgatatgagtattaacttccttaccaaggaaacatgttctttgtgcagagactgtagagaaagtgtgaggatattacctagattggcctctaagctcatacccatcagtccttgacgccgccatgcttgttagaactcaaaactccatcaccatactgtgttgcttctncacctccaacttcaaccccaccg

SEQ ID NO: 52010 - DNA, 1256 bp, Arabidopsis thaliana landsberg
gtaattgcttgaataattttggatgggtacagaggaattaattaagttatgaaggtttggtggaattaagtgattaacgtggccaagagccaacaacaacaccaaacccaccaaacattaaaaaagtcaaaaagacgtaagtctttgacctcttccactctctttggtctttagtttggtgagttcgtgcactatgctcacacacactccttacgccttttggtgttttcggatgtgattagaaatgactttttaacagttttttttttttttctgtctctcattttaatgttatatttaaggattatatatttctgcttttttgtacacaaaatatgaaaatattccatggtatgacgtatggagtgactgcgtacttagtaaaacagcattattagtgagagttcatttttctcgtgttacactgtatctacatgatgatcacgggactatctattattcaaaagttggtaattatacactgagcctgattacagaagactcgcagacaaaaactaatataatcaattcctcctatgtataccttaagctaattcttaattaacaagttgcagatttacaatcttattttagtcaaaacactacctaatattttgccactttataactatatattcttactcctccaaagtatttttattaagaaatacataaaactcttatcattaccgctgtaaattcctaagaccatttcaattaacactcgtcgacatgtagtagtttcttacattagcgaaatttatttcagacaattttataagatatgtcaaatctgataatatttttaacacgagatgctagtttccattattacttgatgtcaaaaaagaagaaaatattatttaaggattttggtttctaaaacggaatgtgaaatattcatgcatcggtgttagaaggaaagataagttgcatgcatcataaggatgccacatgaagtaaaaatgagataatggaatcataccaaataatcaaccataccacagacagacaaccttttcccactcaacaaatctgatttgacatttatcaaagcctctgttgacatattcatcttgtctcatgtcaagatcacacactcttacctctcatatatataaaacagaaccaaattatctttggtaaaagtgaatctcatcaggaactgagtgatataaactcatatatccatagaggagagagggagtgagaaaaagtgaaagagagagaatggggaagggaacagcaccttgttg

SEQ ID NO: 52011 - DNA, 569 bp, Arabidopsis thaliana landsberg
  unsure (1)..(569): unsure at all n locations
attcttacacgaaaacagagaaacctttttaagatatttatctttacttagtgaacaaaactcgtagcctatgggaaaggggagacacacctttaacagtttgccagaggatttgcataactgaagaagaaaatcatgatcatcnnnnnnnnnnnnnnnnnnnnnnnnnnnnnnnnnnnnnnnacaaaaaagtagggacgactaagaaggtattgaaagtgaaaatttcccataccagtcctttattttatacgctctctgcaagtgctccttcttaacacgcctcagtacttctccaatgtgctcagatgcatcttccaggtttgtaactcttacctatatatccaataatatgaatctgtaatgataaattcactacttgtagagaaccaaacagagtgggcaattaatcaatgggttccaagtaaaagtgaaccaaaagttttccaggcatttaagtgtaatacgtgaaagataagactaattatacaagnnnnnnnnnnnnnnnnnnnnnnnnnnnnnnnnnnnnnnnnnnnnnnnctggtaaacaactccaggacaatcaatca

SEQ ID NO: 52012 - DNA, 959 bp, Arabidopsis thaliana landsberg
ttccttctggtgaaggaggagaagaagaagacgggtttagagaccttgtgaggcatactatgtttgtttaggtacagagcaagcgcatttggggtgagctttacaaagtcatagattcctctgatgtaattgttcaggtatgtttctattcacggttcaagttaatgaaagagatcttgtatttttctttctctggcttattgctattttgtgtgacaggttatagatgctagggatccacaaggtactaggtgtcatcatttagagaaaactttgaaagagcatcacaagcataaacatatgattctattgttgaacaaggtaagttcttttatctttggaaactcagctagtttaagttgactgagttgcttactaggtctcttaaagtgtcttttgcgtttgtgctttaaagtgtgatcttgtaccggcttgggccactaaaggatggttgagagtattatcaaaggaatatccaactctagcattccatgcaagtgttaacaagtctttcggaaaggtacttcattgataattcatcaccttaagatccactgatcattgacttcttttttatatcctatgttattttcttaatgtatgttcaccaaatgatggttaaattcaggggtcacttctctcagttttgaggcagtttgctcgcctaaagagtgacaagcaagccatatctgtgggatttgttggttatcccaatgttgggaaatcatctgttatcaacacgctacgtactaaaaatgtaataacttctttgctactttctactattgcgaaccagtgaatccctaattcccaatttactattgctcacatgtctgctccctctgtctcttatctaggtttgtaaggtcgctccaattccaggggagactaaggtctggcaatacatcacactcactaagaggattttcttgattgattgtcctggagttgtttaccag

SEQ ID NO: 52013 - DNA, 703 bp, Arabidopsis thaliana landsberg
gtatataattccatttagtgaaaaatctatagatatatttatataattaagttttttctcaacttatataattccatttagtgaaaaatctatagatatatttaaaaagtttactatttctttttggcggtttagagagcaattgttttttttaataattgagttagtatgtttgagtggtcgaactacgtattcactaattaaagacattttaatcttgacatagtcataccattttacataagtatggctaaatcaaaattaaaatgatcttaattagcgcagtgcctaactaaagttattttaattttgacatagtaaaagtctagtttataccatcgcctttatagtgtataatgtattaaataattctaatcaagcaagtgttttacgcaactgatgcttttgttgaaatacattattagaatttagattaatatataaaccgatgtgaacgttatgaatttaaaacggtgttggctagtgaatgttgtgaaataaatatcagtaaattatgcacaagtcacataactttcagagattgtgctacactgctacgcctatcattcagcaacatgattttttatctgtctagttatctcatgttatagcggtttagtcgaataatatatgattaatcaaaattttacacacaaaatatacgttcgttaattgtatcacatcatcaataataaaacaaaag

SEQ ID NO: 52014 - DNA, 783 bp, Arabidopsis thaliana landsberg
tggctaccaaagaacgacctcaagtgtaggggttcaaggacgctgtgtgaatatctgtaggccagtgcgtgttatagagaataagtcaagacggctgttggaaaacagcatgaaggagaactcaccaaatccaattgtctaataaaactcgaacataccatgacatgtccatgctcaacaaccaaacctagaagagctaataccataatagcagatataaagatctatcctaaaaggcgccacagagtagatatagcatcatagcttagtaatagcttctttctcttcagggtccagtttcacaccctgcagaaacgcaaacgaatatataccttatatcaaaatacttcaaatgttattcacatctacatagacaatgctgaagttgagtcatgcagattgagaaagtaaacctaaatccaagaagagaaaagaacttttacccattggcatatggcgaacgtcgaccatagggcgagtctctgcggcgaggagaatcacggcgtgaaccacgataaggaggggatctgctgtagctcctcccacggcgaggtggagtaacactgcgacgccttggaggagatcttcttccacgcgggcttatactcctgaacaaaatcaattccacaggaacaaaaatgtatgtcacaaagcgattataacatcaagaaaggtactatcaacattaacaactcagcccctatacatgattacaaagtgcaatttcaatggatatgttaacacaatggacatactaatgacatactatctcatctaagcagc

SEQ ID NO: 52015 - DNA, 957 bp, Arabidopsis thaliana landsberg
cccacgatgatcctccatcatccttattaccgtcatcctttttaccctacgagcctccgtcatcctttttacccgacgagcctccgtcatcctttttaccccacgatgccgctccgtcatcctttttaccccatgaagagccatcatttggttggccccagtcaggaactcccttactattggcattggaatcttctgctgacttgttccaaccagaagaaccatcttttttcttccctgaaccaaaatctccacattgattactccatgcagatcctcccttgctctcgtcagagcctttatcctgttgtccccaggaaactccatctttcttacttgcgctggaatttccatctttgtttccccaactagattctccatctgatccccctttcttaccccaagacgattcttctttcttctgacttgattcagaagcttcacatagtttaccccataccgagtcctcatcttgcttattaccaccagagcttgcaccatgcgtaccccaggaacctaaatctgcaacattggaagtagaagctccttgtttttcccacgaagaagcttcaacatttgaagcacttgtatctccccatccactaacagtgccagcttcagaagcaggtgttttaccccagggattccaaccaccaggttgatcactagccgaggcaggtttgttctcagctgctgcattggtccatgctgaagtattatcatctgcaactgttggctgcagagtagaaaccttgtgacattaagaaatctgcgagttccttgagccctttgacgctaaaagaggtgtaaatgtaaaagtaacgacataaaagtattaagttcaagacttaccgagacgtcagacgtaggctcactgccgccccatgggttcctgtaaggaggacaaaagataaaaattttgttacagcgatttaggcaataaatcagctcagggag

SEQ ID NO: 52016 - DNA, 1088 bp, Arabidopsis thaliana landsberg
tttcatttcctatgttgttgctaacaaatatgtgcccccacttgctctcataatcatgtgttccttattccgttccttattaatactcaaataaagagaagaaacagtgaaccaattttattcttttcttatcattactttgcgacaccgaaagttgtatctttggttactttatccttttctaaatgcacatttttaccttataataatgcaattattaccgcaacttttcaacaaggtaattccgcatccactgcaaataaatatacaaactttaataatgaaggtctaaaatatttttaaatattgctatagatagaggttgcaacaacataaatgtgaataataaacacaaaaggttggtgtgagattagtcaaaagtaagtcttatgagtttgtaacatatttgggtcctatatcaacttaaagtcaaatcaatcaatttgctatatttcctcaaaagtaaaagagaaactaaagagtattattctattactcgtttattatttacctttctttatttcaaattcggtattacatcaaactttcttgcttcaattcgctttgttatttcaataatgaagattgtttttctttttctttctaacggcaacaatgcaaatcgctttagcaagcaagagcgaagagcgaagagcgaagagctcaagtcaaacatggttaagacttaagagtgtagatctcattcatgttagacatttgtttttgtaggggtggctggcgtaacatattgagtggaggagttaccttcaataaaattcacatccatgtaaaacaaaaaaatgacaattttgatcaggtggttgaagttatagacgtgcaatcttctcggatggcatagtttgatcgatcatgtgttcgaccttatcaatatttcgtacgtatggaatcctagctaaaaatgttgtagttactgaacttgtggctatgtaatgagtatgaaatctattttttttcataatttcattcggtattgttgttttaactttttatgtatcataatttaacaactatgaactctgaaaatcaattgtacataaagtcagtctataataataacggcaaatata

SEQ ID NO: 52017 - DNA, 500 bp, Arabidopsis thaliana landsberg
tctagaggatcccctatgtcagtttttgtttataatttcaggtaccataacttgatcaagaaggctgttaaggagggcattgtcgtggagcgtaatacactctctgacttcttccttcagcctaaaaatgagtgcaaggccaatttttcagcagcatgcgtgccatattgcgaaaacgatttctggcctggagatgcagagaggctccttgagaaagacgataacactctgcagctatcaaaggcacaggtaggtagggtcttgcgtgttgccaaacgctacgacagcaaagggaaccctcaggatattttgcttgtgcacaaggttagatggctatactctatgatgcctttatctgtgccttcctcgcatttcagagcggaagatctgatcgtcctacttggcaatgtggccagcttcgcgactagtatgcgcaacacggatgtagcttgcggaatcgcctagtcatgctcaggggtgcattcgctgtcagaactcga

SEQ ID NO: 52018 - DNA, 1279 bp, Arabidopsis thaliana landsberg
  unsure (1)..(1279): unsure at all n locations
cctgcgctgagctagaggcaaagtattatcggcctgcattctgataagtgctagatcggctggactaccgacgcaagcaccaatagcaccagctgtcagaccacatagtgccttctgatacagcggtagaggctttccatcattagactcaattgcctttgcagtcagcaacctaataagattgacagaagagaggatgatttatccataaccataaggcaataaaaatctattcatctggatgggctcaagacgaaagacgaatgactaacttacttgaatgatccaagacgggctgtcgtgtaggttgcttgcctcagcaacccagcagataatccctattaaaaaaaattaacatcaaataagctcaggagacatcttcaatggggtataactaatgttgttgttggaaagactgttagataaggaaattaattctttgaatagctgagactcagatccggaaatgcagaaatcatatacattacaaatcaacaaaagtcatgaacatatcaatagaaaacatactacacaaaacgtacatcttcaagataagtaatgcatccagaaatgcaatttataccttgtagaaggcaccaacgccctcattcttaagcatgttggtggttatacttgctgcagatccctgaccaagttgaatcctcaccttcaccaaccagaaacaaaacaaagtattagttaattacattcacatcatttaaaaatcctatgaacacaggcgaagaatcacacattgtgatgaacctaagaacgttattctaatcaaaatccagatctgaactagaacatttcatctaaacatgtatcaatagcaacaattcacactcaaacgagtctgactatgttccgagcaatgaaatttgattataataagccaaaacaaaaactcagatctgagagataaaatctacagactcggatctgatgaacaacatttacggatttcgtaggtatcaataccagcaaatcaagcaagaattgttaatactaacgagcttagacatagagatgggtgatacagaaacgtgtatccggaaacatttgacagaaccttaatcatgtcgatcggctggataacgcaagtagcgagcataccagaggcaccgccattgacgaagggcttcacgggtagtccagacactgattggagctttcttctcttccgccatctctctcttttctttttgtntttcgtacggactcaaacgcaaccagaagaagaaagattccttccgcggagaaaaagagagagagaaag

SEQ ID NO: 52019 - DNA, 1150 bp, Arabidopsis thaliana landsberg
cactttgttgattggaaaatagatgcaacaaagtgataacaaggataagtcgacaagcaagccatgaaatctcgtagacaagagttgaagttgccactagccagaaaacggtgcgtcggattcacaaccatggaaactttgggacgtgagaagttagtcatagtgaatagacataatgacgttgaaaataattctaaaaccttaatattcgccaacacgagaagctctacacaaagtagtagaatggttaggagcattaggtgcttgcacggcttgaaagccgaaagccgaggacggtgaattggaattaggaggaatgggtaaaagatctctccataaaggaagaaggctggaacataggattctcaaagaacatgtaagacaggtaagtgaggctcttaaagtcgaataaattttggtttaaagctctataatatgattcaagataattttttgaacaaatgaatgtttctcaagggattttgagaatctgtaaggtatgggagattgggagaagctttagagagagatcaatggagttgttgcttggaattaagcaaccataccaacgccaactctccactaaagagataatatcaagtagcctagagctaagatacaaatatgaagaattcgatgatttgcttttgaccaaggttcgagaaatagtatcacgctcccattgcaaagatatcgacatagaacttgattggtgtcctcggtcaaacaatttcacatatcgaagtatcaaatttattgggctaagtaatatgtttgaaagatcagacttgggccaagcagattttggagttggctcgcaattttctgaaatgggccaagagatacaatgttgtgagcccaagtaaaattagcccaaacgccaaaaccctagatccttttgatttgaagaattatgtcgtgcgccgccgacaacaccaccagacgaggtgcaagagatggtccacgagccgtagctcctgccatcaacgaggtctggtgtgtggaatgttctaggagctcatgggcgtgtctagatccggcgttgccttcttctctttggtaatgttttttgaatctgtttcctgagattttgtgtgtttattggttgggtaaaccttcttcttgctcttcctccttcgagtagttgggg

SEQ ID NO: 52020 - DNA, 805 bp, Arabidopsis thaliana landsberg
tatagctctcttagttttccagagtcaccggatcttccacatgtctgagacttgttggctccttccgatggtaaggataaggccagcattcgctttagaaccatctgcaattgggccatgaatttggtgtatagcttcgggtcctcggttcttaaggattctgcatatgttttggagatgtgacggccttcgagtagacgagacaaagctgattcaagcatctgaaggaaaaaaatagaagtttagtgccagaccttgaaatcatagagaacgaatcaagctatagccaagaggggatcaagcacttacaaagtttaattgccagaagtttgaaacggttgaggaaagagctgatctctcaattaggatcgtaaggaacatcgaaggaagattctcaggaccgtagaaatccatcgatttctgccaattcctatctgccaacaaagcatactgtttggctctctgaatgacattactctcgggtttacgaggacttccttgacgctctgtctcaagaaatcccaagcagcagtctttgtgataccgtgctagttgaaggtaagcgaatgcagcttcttgtttgcgtatttctccgagagattcatatagagccaacgcctcttttatagcgtcactggctgataatacttcacgttttcttaagtcgctggattttccatcagaagaaaaatcatgagtgttttccaagatgttcttctgttcacgagctgtaccggttgtatcttcatttgctaaaagcattcctaatctgagataatgtattggcaatctgtgtgtcgacttc

SEQ ID NO: 52021 - DNA, 696 bp, Arabidopsis thaliana landsberg
ttaacactcttagacttgctattagcaatgctggacggctgtcatgtttagggttttacgcactaacgtttagtttatcataattagcaatctaaaatttaagctttggaagtagtactccgcacggctaattaaccctatcaaaaatttccagtttaggtgataaaactagataatatgaacatgactttatttcaaaaacttgtttgactgattagttaattttggatagcaatgtctaacgtctctttcttacataataaaagcatctacataagaaacacagaagttgcctcttctttttctcttatttgcttttgttttcacacatacaccattaagctgatgtgactacaaaatcgcgtatacgcataaagataacacaaaacaatgtcggtaaatacacatacacatcaacatcagaacataaaattgcattgtttacatcctctctaactcgatatcatagcttgacttctatgtcgagtatttgtagcattttaataagttgttcagaatcggaataaacggaacaaatacgtataagttatgtttttagattcacatgtcaaggtttaaaggtaaaatatatgtagtgacgattggtgtttggttgtttcttttcgaggtaatgatacagacaaataaaaaagtaagttataaaaagggtcacatatagtcgacaagaaaaaagtg

SEQ ID NO: 52022 - DNA, 1002 bp, Arabidopsis thaliana landsberg
taaatataatattaaatacttttgtttcaagacactcaaaaaagtggttcaccaatgatgtatgcttgtaagcctctgaatgtttatcaaacttccaaatgtaacattgctgtcttttcctcgtttcttggctatcatattggtaatttttgaagttttgttaaatttaagttaggtgtaaaataaatttatgaaaatgttgcatccattatgtcctgtaatcagaacgcagacaagctcctccatccaattatttttccttttaagattaaacagctacttttgtagatctgcaggttgacttgatcttcttacatgtcccttttcttttcccctaatttagtttaaataactatttttggtgtgggcagtttccgttaaagagaagtaacacacttgttacaagagagaggtaacaaagacagtagcttttaccatttttgttaaatcatgaagtctactaccttgttcatggtttcttgtgttctcatattttgtgttcttagtcacgtgagaggtacgtaatgtacactattgttctttcgatttagattagtatcctcggtttaaaagacaaaaaaaaacttactgcattatcaatttttatatattaaataatcattttatttacaattttgacattatttttgttgtgtgtatgtatgattgataaaaataaaaaacgaatagaggtgaaatcggtggagaataaggccaagagagtgaagaaggtgtgcgaaaaggcacaagtattcgaacaaaattgtgggtgggacggaaacaaaacttgcataagaggctttaataaaatcaaagaatacccttttcattgcgagtgtggcatttatcatgcacccaatagtagacgtatttgcaaatgtaaatttccatattctccttgctaaattctcatgtagtttttttttttaatgttacaattttttcatgtagttcgagaaccatagtttatctatctagaaattaattaataaaatgatattg

SEQ ID NO: 52023 - DNA, 610 bp, Arabidopsis thaliana landsberg
gggcagggagaagaattctagtgcaacatgttctcactgggatgtgtgtttatactgctatggctattgatttccctatgtgggtcattaaggaaattgataagataaggaaaggtttcttatggagaggcagaagagaggttaaaggagggcattgtatggtggcttggggcaaagtgtgtagacccttgaactttggaggtttgggaatttccagcctccctgaactctgttgggcacttcggatgagatggctatggctgcaaaggaccgaccctacccggccctggaataatcttcctgttcatgtccccagcaatgctaaagccctcttctcttctgtgcttgtcacagaaattggtaatggtgctaacaccttcttttggagtgacaagtggattaatgccagaagtgtttctgatattgctccaaggctcctcttgactgttccaaaaagaattgtttctaaaagaactgttcgcgaggctctaactaatagaagatgggtctctgatattaaaggtgccttgacctggggagttctggtagattactacagctctggaatgcaatatctgatgttgattgcaacctactctgaggataacat

SEQ ID NO: 52024 - DNA, 849 bp, Arabidopsis thaliana landsberg
ccttagaatatcgtcggtaaattctatcattaaagttctttggatgtgcaatttcattgaaccggatcaatgttgttacacaggttttggaatgccaaggacatccagtttttgagccttgtgaacctgcttgtagtttactcttctcataatatggaccaaatatcttctcatagtaagaccctcgcctactctcctaggctgatctgatacctagcctactagaacaagtgcaccatatccccaaaggtacccatattctaaaaagtgcacatgcttacgagtttggttccttgaaaactaatagcaaggattctttcatctcttctggtaaaaatattatgagtgtggagccagagaagaattatttcacctttgtttctccttgattttcaatttggtaaataaggaaatctctaaatatagcaaaacaaactggcatgaaagccaagggaaaacttgttcaagtatttcatcttgttcaaagtctgataataagtaagttttattctcttgtataagaacatgttcttgtttggggatttaatttgaattctcagtagaacaaactaaagttgcaatctatcaaatcggcttctttcgagagctttttgctctgtgtgaataaaacttatcatcaagtcaagtttaatatctttagaacacaagggtacaaaactttcaccatgttaatatagtcgaattgtttctgagtttttcaccattgcttctttccctttttctttttcttgctgctactactactagtgctactggcggttgctgaaaacgggttctctcttgcattatcaaacataccagattgaaccgcgttctgcaaccactcat

SEQ ID NO: 52025 - DNA, 580 bp, Arabidopsis thaliana landsberg
tctttctcgttgctttgcctttttcctgaaattattgtcgaaatttagcattaggcgaaaacaacaatcaggaaatatcaattatgaatatcaatcgaaacatattatacacttacaggttatacatgtcctgtgctgttacaggcacactctcaggaccaccgtgcatttctgatacataatccataatacaatgttgcgggattcgactctcttgcattgaacttatgaactccatgtattcaggatcatgcgtcttgttgcattgtaattgattcttttcgatatcctttttaaaaaattcatgattatgatccaagtgcaacagatcaatacgcactgatataactgtctcttttgcatcatcataaatcttttccagtttcaaaccggccttgcattgtgtcagcttcgaactggtactacgtacctttgggtttgatattcccttactgctcttttgccttcctcgagcaatcaaccacttacaattttcccgttctctatacttttccaatggaaaccaacttcatatgcatactactatacactcatatgcttcatcacccactgaatgcat

SEQ ID NO: 52026 - DNA, 404 bp, Arabidopsis thaliana landsberg
  unsure (1)..(404): unsure at all n locations
nnnnnnnnnnnnnnnnnnnnnnnnnnnnnnnnnnnnnnnnnnnnnnnnnnnnnnnnnnnnnnnnnnnnnnnnnnnnnnnnnnnnnnnnnnnnnnnnnnnnnnnnnnnnnnnnnnnnnnnnnnnnnnnnnnnnnnnnnnnnnnnnnnnnnnnnnnnnnnnnnnnnnnnnnnnnnnnnnnnnnnnnnnnnnnnnnnnnnnnnnnnnnnnnnnnnnnnnnnnnnnnnnnnnnnnnnnnnagtcgacaaaaagtcagtgtaccgagcccgaagtcgtgctcctggccacagctggctgccgtgtgacattgctgatccgctgacaattgcacagtactatgctcaccggctgcatgttgtgtagatcctgaggtgcctcctgagtgagctaggtcacatttattgcag

SEQ ID NO: 52027 - DNA, 1270 bp, Arabidopsis thaliana landsberg
aaatcaaaatcagttctgctatctcttaaatcggaattgaaatcttcgtaaattttgttgtgagcagcacacctttctcggtccatgatgatgcttacattttgaaactgatgcaagaacagaagcaagaacagaacagagtatcttcttcttcatctacacatcaccaatctcaacatagctccgctcattcttcatccagttcttgcattgcttctggaacctcaggcccggtttgctggaactcgggatccattgatactcgctgaccgagcttctattcccaaattcttcaagaagaagaagtaatgatctaattggtatactaaaaaattatacatctggtttagtgttcaattgagagagactgtaaaatcaattcataggccaacaaatgtttgtttatccaattttcctttttattcgaacttgatgcgatatttcaacggaaacagaaactattgttttaaaccaaaactaaccgtgttgaatctattggctattttccttctgtttgattggtctaacaaatttagtctccggttaggttggtttaccgaagctagttagattcaatttacgcgcttaaatggcgcgtgtgctaggaaagttcaaaatttgcaattcccatgcaaaaataatgttttttgtctggaaaaggaaaaaaagagacatcgcggcggttcgagggaaagaaaagcgaaattggttggggacacttcggaagaatgttggactgtttttcaattgccgtcaaaataaatactatatactattcttttcatcaacttaatctactcattctcaatacattttaaatcaatatcatctaatattatttagtaattagtgttggcccattttagtccaatctattagttacttgtttagttaaagttgaggtatatagacgtactaaaattcaagcacaaccaatttctcttctgtataattagatttgtagctgatatagtccacaaaagcagtagatatcatatcagccctaattttcttatagaacaactaagatatatcacaattgcagttttctcttgaataccactaagtactaacatcacctagatccaatcctaacgtttatcatcttttattttatttttcgattttttgcatgctaattaaaacgtttctaaatatcttgacgtacatcaatgttttctgatttttactgactttaaagtttaaaccatacaaccagtcaagctaagtgcttttttcttttattttctaaaactatgtatatgtataa

SEQ ID NO: 52028 - DNA, 997 bp, Arabidopsis thaliana landsberg
caaactcatatagatgaaaagtgaaggcaatatcaaaacagagaagataaagttgaagctttgaatatcatttcggcttgaggttttacaaagttcaagttttgatatttatacagagacaaaacagagtaaaactctaatgtgtcttaacaggtggcatcatccgcttgagtcttcttcatcaagggccaggaatcgattggtgagctttaccgtaaatgcagctgagttcgtacgggtctccgacgtcactgcatctcttttgccagctctggttttgtcttcacatgaagaagaagaccgtttaatccaagtgggctttgacataggcttcttcttcaaaggctcgcggcccatcttcaattctttagcaggctcttggcccaacatcgttttcttcagtgattgaagaccagaagcggtatcgttttgttttgctctgctgataaaaagatggttttacaaagttgttaaacccccgattggtttcttggcaaaaaaataaaacatgaaaccatatataattatatcgataaagtgacttatagttagctgaaactatgttttttgtcaagatataattagctgaaacaatatttgactaaaccattaaaaacgaacaaatagttttctaccccagaaatgtacatgtatcattaatgtatcaagcagtattaattaccaactatcaagatcattaaatttagtcagcaggacaagaagaatgtgtattgtccgagattattggacgtaaacaacatccttattccctctttgcgtttgaacgttgtcgccgacaacttcatggcgttggccctttttttatgtcaactcaattcatcaaaagacaatcccctctttgtgattgactaaacaaaatctttcttgacaaaaaaaattctatcatctatatagtggattgatcatgttatagtaattaaattttcttaaaagctatattccacctgaccgtaattaaggtggaagtgaaaacata

SEQ ID NO: 52029 - DNA, 991 bp, Arabidopsis thaliana landsberg
aagatgagcttttatgcattcgatttgcttccattgagagtaagtttatacttgtgaaattcgtatacttgtttttgattgagagtaacgtgggtacatttagtagtattcgatgtttaatttatgatagttgaatcagggaagatggtttggaaggtattctttataagactctagttgtgatgatttaagtctcccatgaattgtgattcatcaagtccatatagatagctcaagactgaaatggaatactgcttttgtagtggcaatacttataatgttgcctcattttataattttagggagacattgttgtcttgagaataaacatctcaggccattttccaagactctgttggtctctgcggttgtgggtcttatcactaaacaaatgaacaaaagggttccatgatccttaagttgtgctaaacaactaccataatcgtatctatgttaaattagacgctgacataatctatgagattaatatcctagggtctgcatctgtctttttggttttagattctcgagtggctaactgatagtgttgcatcaacagattgcaaaacatttatggagaagttcactgaaatagctgaaagccagcaagtagggaaagagagcacccagggcgacgaggctgctggtttaatagagaatctttcggttgaggaaaatataagtgaggagaaagccaaggaagcagaagagaaagagcctgcaaaggaagataaagaaacaaaaaaggagaaggtagaagaagagaagaaaacagaggcaagcacttaagtgatcaaattaaaattggttgttggcatcactaagtgtgctttgctttattttaatatattatacttggcactgaacatgatggtagcttcaaaagtttgagtctttgcgctgtgttagagaaagagaatcttaagatttttttttatgttgttgctgtgtaagtgtttgactattgtgtcgtctctttactgtgtcaatt

SEQ ID NO: 52030 - DNA, 634 bp, Arabidopsis thaliana landsberg
attgttaagataacaatggtaggttgtatgggaactcaacaaaactttattgggggtattgttgtgcatacacttacatggtatgaagtgtttgaaacatgggaccatttggccattgaatagaaaaatgaatttgtacacattatgctggcaaagatgatatgatatcgttaaacatttactatggtgaaggttagtatatatcggtgcaacgagaatgacatttgttgttgtattgcatgatatctctacgctcctatagtagggaagttctatggaattcaatgatttatttaaaaaataaattagttagcattagttatgttgcacgattattatatattcatacttcactcagtatagtttgtaacacattgatatggtcaatgtcagaggtaaactctagctggtggtggagagcaccgcctattcctaagaataaggagccacctagtgttaacctgagaagatgctagaacacaagaacacacaaatatttagagtggtccgggccatcggagcgtaaaccctacgtccacttgaaagttgtattgtcgatggcttgagtgaacttgagatagcatgtcctcttgtatcgtatgtgccctccttttatagcctagagggcatgtca

SEQ ID NO: 52031 - DNA, 1604 bp, Arabidopsis thaliana landsberg
tctgaaattgatacacaaacccccatttaagtatcaggagacaaaatagaattagaaaattgtaacttacaatttgagagtaggaagaaagtttggagcaatacttacaataactgtctaagcatatcgaatgcttcttgatcctctgaccttgcaggcttcttcttcttcaacagcctcctttcatgatctatgtcacgcgatggaggtctcttgagcgctggtttactcatcatctgtaaatattacttgacaaattagtgccttggctagaggaaggacaaaagagagagatgtgaaagatcatgatcatgatacctggtgtttcgaggtaggcgctgattgtttaggtatcattcggggtgtggccatgtcacgagaaacctttctctgttctactacccgttgcctaggatcagatgacattggtcttgatgaggacggtctctgagcgctttgaagagaactctttcccgccgagattgagggttttctttccaatgaactcttagaaggtaaaggtcttgcattggtcgctgaccgaccaggaccaactccattgctactgctcatctgtttcctatgatccactggcactttagcaggagctgatctttgggaatctgatctggaattcagttggccattccggttggctgattgaccattcattgtggaacctgaacctggtggcctcataggtgcttgacggtttgtcgacgaacctggcctttggctgcctgaggacgcaggcctttgctgcatttggctaccagcggaagctggtcttgaattttgcatcttgctgcctgaggaagcaggtcgccctgagcctgagacagctctcgactgcatttggctgccagagaaagctggtcttgaatttggcatttggctgcccgaggtagccggtcttgaatgattcattttactgccagaggaagacggtcttgaatgattcatttgactgcccgaggaagacggtcttgaatgtccattcgctgaaacaggtctcttctcctcacgatggggactgtgagcagttctaccattggtacctgatgattgtttgggcctcgatgataattgagcagatcgagcctcttgaacatcagcaaaaaacctgtataagttatcttcatgaaaatggtatgcttaaagatcacaaatagcgaaaaagatttttcaaaagacacaacataccagaattaggaaaagagccacttcgtgaaagagattccttcttcggaacaggaagctccgcgtcatcggaaaacaaaaacgaatagtctcttgtatccttaagagtctcaactttccttctcacctcattcacaactttaggtcgcttctcttgtgacacattcttagagcctgaaccattcgttggaactggtcttttcttctgcaccccaaaaaacaattccatcggcaaaaacatcttaaatgataaaaatacaaagagttacaaagatcaaatgcacatacagtttggcttgaattcgacattttacgtagcttcgtttttaaagcagggaattcgctttttctttgtattaaacccctttgagggataaataaaccagggctccgtaggaaaggga

SEQ ID NO: 52032 - DNA, 841 bp, Arabidopsis thaliana landsberg
taacagtcactgtttcagttttgtcttatgggttctactttaaaggtatctgattcgtttgaacagcccaccattgatgccattgtccgaagctctaagaatgttttattgggtccacttttcatcgctttctcaggacaatccacagagccaaaaatgtacaatgcaacgagttagagcattgctcttgcacaaaaacccaagaaaatggctttaacaagcttcatatttcactcgatagatccggtttgcgtctagtatcaaacatatgtataaccataaagacaagagcttaagagatcatgaacctaacctaactactatatgctgcgatccaatgtgcttagaatatggtatcaatggtaagctttcttttgggcggcgatttttctatgatctgtttctcgtgatccataaatgtagagcctttgttggcaaataatctcctgaggtttatcacagatagctcgtaaaagtttccaactgcaagatcagcctgaaccagatcatacctgcagatttgtttttgttaaagttagatgccagaaatgcttatggtttcctgaaagagggtaaaagagtatacttacgcccgatgagcaccgattaatccaactgccatcattgtacagttgtgagccgcggttatacccctaggatcatcctcaaacacaacacatttcgacggttttctatccaactgtgcaaaagttttaagacttctcagcaacatttctcagaaactgactaggatttgcatttgaatcgaaatggtaccttcacagccgcagaaagaaatctgtgagctattgatttcataccatcttccttggaaaccact

SEQ ID NO: 52033 - DNA, 691 bp, Arabidopsis thaliana landsberg
  unsure (1)..(691): unsure at all n locations
ccccccccccccccccctcccgtcaccccccccacccccccccacccagccccccccggaatttccgtttgagacacccacgggctttccccntaanagaaaaaaaaagaccaacccccccccccctcacaaaacacccccccacccgccctctcccccccccccctgttccaccgcccccccccccaccccccacaccccannccnnccccccctccccctctccccccctcccccccccttncctccccccccnncccccccccccccccccccnttcccccccccccccccctccccccccccctctccctttcctcnccctcccccccttccccgccccccccccccacantccaccccccccccccccccccctcttctcttcccccccccggattttgttcccccccccccaccncccccccccccccccccacccccctacccaaaccccccccccccccccccccccccccccccccccccccccccccgtcccccccccccccctcccccccccccccccccctccccccccccccccccccccccaccccccccaccccccccccccaccccctccccctcccccccccacctcacctcccccccccccccccacgtcccccccccccccaaccccgcgctcacccccccccccccccccccccccccacccacccccccc

SEQ ID NO: 52034 - DNA, 620 bp, Arabidopsis thaliana landsberg
tagttgaatgaactgtactggcaggaggccaagggccacgcagccgagcacgagccagaccatgcctgcgcgctcccagcggtcggcatcacgggcgtgagcgagtttgtcctcgcgcggctggccgaggaagatcacgccgaaaaacttgaccatcgtatagccagccagtgccgccaccagggcgatcagcgcggccaccaccggaatgagcatggtcagcagcggcaccggcagcccgggcgtgaacaggaagctctgcaacagcagccactccgacacgaaaccgcccagcggcggcaggcccgcactggccagtacgccgagcagcatgagccagccgacccagggcatggtcctgatcaggcccccaagcttgccaagatttctctccgaggttgcgtgcagcacgctgccggtgccgaggaagagcaggctcttgaagcaggcgtggctggcgacatggtagagcgtggccgtcagggccagtgcggcatcggtttatgccgtatcccgagaaattagcgtaggcccatgccgacaacaccagcccatgttctcgatcgacgaataggcagcagtcgcttcatgttcggtctgcacggcggcaaacaccacgc

SEQ ID NO: 52035 - DNA, 593 bp, Arabidopsis thaliana landsberg
  unsure (1)..(593): unsure at all n locations
atttttgtactatctaaaaatggtgatgatctgttcgaaaattcgaaacatgatcttatatattgaactagaaaaaatagatatatatgaattttagctgtaaaatttttgtacaataaggagaaaaagatttagaagagtcaataaaaagatgatgtttacaagtcgagaatatatatcttgttagtgttgtttatcaatttatgctcaaggtttcagctttataacattattaagtaaagcttatttagtttttgtgagaagtgacaaaaaaaggtccattgaaagcaaatttatgaacgaataaaagaatattcggagaaacttagctaaacttgtgacaattggccaccattcccacaattgtcacacagacacaaactcacactagtagtagtcgtagccatgtgcattaagcagtacacagtttttcttagaaaaatgtttaatctaaagaaagcaatatcttattgtcaacgatagttgaaaacgaaattaaaattgattgggtggtctgcgacatgcactatatttgcaagttaatgtatttgatcctcaggttattttgtatcagatgattatcgnagtactat

SEQ ID NO: 52036 - DNA, 721 bp, Arabidopsis thaliana landsberg
ccattctgtagagttccttcatagaagctgttggatggaaactcggacaaagctggatgcatacgatattgaacctgcaatcaagaatatgatatgacaacattaagtggacagtcctacacacagtgaaagggaatataagatattatcttccttattccctgagtgattaatgtagtacctgcaatctgattggtttaataccaagagtcacaagtcgttcaaagagagactgtgccaagccagcacgagctgcttttttgcacataatgacggggccaagctgacaatgatcaccaacaagaacaacctagagcaaaaaaacttctgtaagcaatcaatagcaaataacgaaaacaagtcagttcactgagagccctaatacctgttttactccaaggaccaaagggataaggcactcaggttctgttgcttgagtagactcatcaataagtacctataagagaggaagggcatgtcagctttcgacttccgtacaattagagatgctcaaaattaataagtaaatattgttaacctgtctaaatctaaagtttgacaaccgaagatcagcagcaccaacacatgtgcagcatatgacatcagcactctgggttatctcgcgttctgtcgctcttttcaaatttttgtatttcttttcatcactgcttgacagctcacctagtgacaataaaaagcaaatagagtaaaagctatggtc

SEQ ID NO: 52037 - DNA, 577 bp, Arabidopsis thaliana landsberg
  unsure (1)..(577): unsure at all n locations
cgatgagcaaacatccaatcagcatcccaacagcttaagtctgcaatgtaccgcatggtcagaccgaatactcgaaaccggtattctaggatttattggaaactgaaacaagaaccataccataagaagtggccttcttccaagccgatcaattagcaatgttgcgccgagtgctgtaagtacgacttgttcgatcgagtatagaatgcttccaagagttggggatgctcctggtactccaaaaatggaacaaaaaccgatgaatggtctagaaatggagtatgttagattttaacatttgctagatcattttcgaattataacctgctgatacgaatatttgttgtgcgtagaagataacaccattaattccaacgaattgttggaaaaacatcaaaccaactccaacctgaatagatagaaaaataagatttaaccaaatcaaaccgggaaatagttataatcggttgaatggaattagagattcttactatcacanatcgaatattctttttgtcaataaggtccatcaatgtggctttcgggaggtgagcaagactcgctaagtactcctata

SEQ ID NO: 52038 - DNA, 693 bp, Arabidopsis thaliana landsberg
tacgagtcaatctttaattttggcgattctttaagcgataccggaaactttttattatccggtgatgttgactctccgaacattggaagactaccgtacggacaaaccttttttaaccgttccaccggtcgttgctctgacggacgtctcatcatcgatttcatcggtttacttctcatcactctctctcaaaaaaattaaaatataatcacttttataagtagattattaaatataaaaattatggataaccgtaatttgatggagcaaaacattatattaaaaatcaatattttcacaaaatgaaacttatgagcacaaaatgtttataatttgtattttgtgacttattgcagctgaggctagtggactaccgtacattccaccgtatctccaaagcttacggacgaatgattcggtagatttcaagagaggtgcaaattttgcggtggctggagcaacagcgaacgaatttagcttctttaaaaacagaggtctttcagtaacattgttgacaaacaagacactggatattcaacttgattggttcaagatgttgaaaccttctctgtgtaaaaccaagccaggtaagagaatcaaagcccgtatcataattttattttgatatttgattgattttcaattattttatttacattaaacttcaaaagtttaaagcaaaaccttataata

SEQ ID NO: 52039 - DNA, 1594 bp, Arabidopsis thaliana landsberg
taaatccgatcaacgcagccatctgaggaatcagtgtctggttttgaaggtatgtgctacttcagcttatcgaatctatctactcccgtgggatcttatatgttgataccaattgaatttcctactaagtttttaattgccacctcaatgaagatgcaccaccacctgtgaagccaagtttcattgatggaagactcggtctactctctgacagagcaaagtctgagaactcttctgggtggcctggaagctccatttctagaaattcagaaaactctgcagcttcctcagcatcaaatcttccaatactgtcaccaagctcttcgggttctttatcatcagaaaaatccacactcaacccaaatgctaaggtttttttcttagtgcttaggttatcatctaatatctccttaatactataagctttttactaacgaaattaggtccgaccaggaatttaaactgaaccctaacgcaaagagtttcaaaccatctccatcagcaacacgtcctcaatctcctcaatctccagtctttgacggatcattctattatcctcctgttccacccatgccaggactacatattcgatacggagtaacttttctttattctttatctagtgatcaacgcctaaattactctttaagtctctgttattatgtttctgattcactaagttgaaaattgacagacgggagcagcattccctgggcaacaacacccaatgatgtataacaatacaacacagcttagtccgaatcaaacatattattctccaaatagtccacaggtttgtttattgctattaatagtcattactcttgaaaactctttaccttctctctattgtaagactgaattttggaatcaatgttaaaacagtacccacaaccgatgatggttactcagcagagaccaatcttgttcatgccgccaacgccataccaaccggtttactactttacttcaaaattcttgttttgtctagttacaaaaaaaaaatgatcaacagagttagattttgctgacatctttgattttattgcaggagatgccatacaaaggaagagactcttattagcttttggccaaaaccatgaatggtggtggcacaagagaaggtctcgagctgatggaattggtttcatttaatgtactttatttttatttatttccaaagcaccgaatcttttcatttttattctaaaatgaacacaattgatgtgatggtgatttagtttgtttaggtattagactagattttacattagattcgtgctgatctcatttctttattcacttctgttgtgtctccctattcaaactttaacgttaaatcttttagttgtatgacatattctgtgtggagtttgttttatttatataaaaaacagttaggtaggaaaaaaaactttttcatttgtgaaaaggaaaatcaacgattgtagttcaatcttacatatacgtgttaagacatggtagggaaaaagtggagtgcgtctatgattggatttgaaagcgtaatgtttaaaatttggaactattaagttaaatattgggtttagtcttggtcttgtccctaaaatgcata

SEQ ID NO: 52040 - DNA, 1315 bp, Arabidopsis thaliana landsberg
tcatgaataagaattggggaatgggtatttgtacatatattaattataataaaatggaaatagaatcgcatatatacattagacatggaaattgaagggcgactaagttcataaatatggatcaatgatgtagaataactaattaataagagtggtccgttattgatcaaacttcaattgcctagttaggtacgaactaatccaaatgcgacgtgatggaaaaaatgatagtggcccgtatccataaatttcgtttctaactttatatcctataatgttgtccacgaaaaatgccaagattataaataagttcgtaaactttttttctatttcaactaacacctaatgaacataatggcggtgcgaaaagaaatatattgatctctattcagatgataatgatactagggatctacttacttcataaagttatataactttatcaattttaaaataattatggtagaataaaatatacatcaaagatttaatcttaatcagtgtttaagttttgttatcatggaacaaaagtaccattccattttatcttgcatgccttcatcattctcggttacgttggtcctctacgaaaatgtattcttaaacactcttcaatggagtttattccaatcaatctcacacacacacaaaaaatttgatcgattgacgattctaggtgactcacttgtgctccaataaacctcttagctcgaaccttctgaatgaattggagtgtttgtcgtagctgattataacaaactttgaaatccgtttaaaggaaaacggaaaaaacaaagacaccacaatttaatgaaaatgtagtcaatggataatataaagataattcgtgacacaaaggaaaaaaaaatatagtcggatgaattcatgtttctgtcatatatttgtcttgctcttatcccgaatctcaactaaaaatcaaaatcagaccaaatgtttcattacttaacttcatgccgcttccagatgttggcaacatatttttagtcaacaagggtttttatggttatggttaaccactatgtatggtatatatttctgataaagtgtttatttgtatattgattatattttaaaatgtcatatactcatatggcctctataatatttggttagcaatatattattactgtttttataagtcaaatctcaatattataagcaacgatcttacacttgtgtgctgtcaatagaaagtggtaatttaataatttgatttttttaatttttttttaatttttcgtatagtacttaattacttagaggtctgggtcattagaaatatgtgacttacatg

SEQ ID NO: 52041 - DNA, 621 bp, Arabidopsis thaliana landsberg
agattcacatcttcctatagattactgtagccttttaggaagggaatttcaatttccaagaactaatgaaaaaaccgaatttagatttgaatcaattacgtcgccatgtttcttctaaaacccgaaggtcttcttcccaagcttgtttctccgcctgattgcgagcaacagtggagtcaagcttcacttcaagacttttgatctgctcgctggcatctttaagtgctccagctctgaaatatatatgaaacaaaaatagctcagacgaccaatatatgtctgaagaactccataaccagtcccctgagaacaccatttctcagttgttttctctggcaaattgaggagaatgagcagccaacctccggaatcaaacatgaaaaagattcagtgtcaatatatacctctcttcaagttctttctcaaggctagccaaagcactctgaagatcttgctgtgccttatccctctctgcagataccaaatatacttctttttcagcttcctaacaccacccaaaaagataattagttggtaagcaccttggcaaccatctaaaaatatctccatcttaagattctagataacttacctttagagcttcctcaagagatttaattg

SEQ ID NO: 52042 - DNA, 585 bp, Arabidopsis thaliana landsberg
  unsure (1)..(585): unsure at all n locations
taattcacttatattttattccaacacttctcttcacgtcgagcctctcttaggtcttagacgtggaataggagcgagcaacaattatttttaattgcactagtcaggattcgaactcaagagttctggctctgataccatattaagttgcatgcaccaaccaattcaactcaaaagcttaagctgatgggaagaggtggacaattcacttatattatattccagcactcatatcttatcataaacatgcacaacaagaataagagaaatcatgtcgaccacggtaacccatcgacacttggacaagcctatgggagttaattaggtcatgttagttagctcctaggtgatgggagttaatgtaatccctgttggttacactgtagccaatgagagttaattaattatcgtcgactcgacgtcctgccgatggggggttaaataactattttaattcccgtcgtctgccaacctggccgacgggagttgnnnnnnnnnnnnnnnnnnnnnnnnnnnnnnnnncccgacacattcaatagcgccttccagccatcgcgacctcatctaacttcgccgttggcaatg

SEQ ID NO: 52043 - DNA, 612 bp, Arabidopsis thaliana landsberg
tgaagtttattttgctggtctgatccttttgggtttgctctctgtaaataagcttagcttaaaaattgtggggctgttaagtcggagattagtggcgtttaacttctgctcttctcattctgatggttgaagttagttccactagttttctactttttggatgatgggaagtttctcaccgttctggcttgtaatgaactgttacctattttttaatgaaataggggctatgccttcgtaaaaaaaatagggtagtaggaggtattgctgtccacgtgtctatatcaattaatggagtaaaagcaagcaagaaatgatttcacacacacacacgcgaaacgaaggtttaaccacaacctgctgctcagcacagcagcgtaggactggtctcgtgctaaatctgcaaacatgaagaattatatgctgataatttagagtaattagactacgtgcaaatactactatatatcaacctcttacagctactccaaaagagcaggttcgttcaagctagctagctaccatccgcggaggtggtcaccagaccgtgataacaacagtgcacacggtagcaccaggatgactctcatgtcacaaatcgacgcacgctgt

SEQ ID NO: 52044 - DNA, 524 bp, Arabidopsis thaliana landsberg
ttgcaaatttcccgttccaacatggtttccgaatagtgtatttattgttcccatcacgattagaagaatggcagtcaattattaattgaattgacacggccatggtaagacttatcaatttatcattagttttagtctgctctacttaggctagccctgctaaatattcataacctttcacccacatttcaattatttttctatttgtgattcaggtattgcaaactagacagaagctatcgattattggccgcaaaatttctagaggtttatctgatgttgccattacaagtgatgaggattcgaggtttgtattcttccttgtgataaaaaaacatttatagcttcattttacctactttcttcagcgacttttctgcatttgtttttagcagaatattttctccagatacacttggtatggttcatgtgtgggatcgaagagcaggagtgtctccatgcattgaactttcaacagacagatatgattcgatcaagcgtattcaaatatatgtggataatca

SEQ ID NO: 52045 - DNA, 897 bp, Arabidopsis thaliana landsberg
  unsure (1)..(897): unsure at all n locations
cttgcgccacacccttgacaaacattatccaatttcatgccttttctgttcaaacgatcagctaccgggaggcaccggtcagagctttccagagaaagaccttgatcttagggtcagtttgaagtttccaggcctgatccttcagcgtgttgatagaaggaaaatttgaagcatctctcctaacctctgagtttnnnnnnnnnnnnnnnnnnnnnnaggcagatttcacagagaagtccccacttttgttatgtctccaaattagaaaatcttcttgagagacaagaggctttttcttccttatctttaagatatctcccgtaaaaaaatgctcttcaagcttatggatatcacagtctctatttctatagtcaatcaggtctttgactcttagctcaatgttgattatagggttcattatccaaggcattctgacagcaacatcttcaatccaaggatccatccacactctaattgaattgccattgcccactctttttagaagaccctttttcaggagctctctaccatgaaggatacttcgccaagcgaaggacggcctgcttcccagacctgcctccaagaaatcgaagagagggaaatacctggccttcataatagaagaaaaaagactatccgagaattgaatcaatctccaagcctgtttagcaagaagcgcctggttaaaaagctggatgtctttgaaaccaagacctcctaactccttcgacaaacacatcttctcccaactaacccaattaatctttctcccaccttcagttgagctccaccaaaaagacgacatggcactagagaggttttcacaagttgtcttaagcagcttaaagcaagacatagcgaagactggcatagcttaggcgacagctttaagaagaa

SEQ ID NO: 52046 - DNA, 267 bp, Arabidopsis thaliana landsberg
  unsure (1)..(267): unsure at all n locations
aaacaaanaatatattaacgatggataatagaatctattaaaacaaaaacagaacttaccactaataaactcataaaaaactaagacaataaataaaaactttcacaacctaatgcctaacctaagtaaattactataaaatggaacaaacactaccactatatatatatataaatcataagatcatcaaaatacactaataactccaagcaattctataaccatctctaccatgaaagatcacgtaactatacatccaatctaaat

SEQ ID NO: 52047 - DNA, 240 bp, Arabidopsis thaliana landsberg
ataataaaaaaacagaagctaactggcttcaaactgatgctttcactttggcatttacggtgagtgaatatgactgagcaaaacagattatactatatactatactactattaactttgatttatttattgattttttcttgccttgtagtgtatgacacatcatcaagaatgatgcgggcaagagagtcattccgtacacggaaaccagttgtcatagtttcctgctgaattagcgggt

SEQ ID NO: 52048 - DNA, 861 bp, Arabidopsis thaliana landsberg
taacttgcctgaaataatactctacttgttttaagactctatcccttaagtcgagtttttctggagatagtattggaggaccctggtttacagggtatggagcaaagcgtggaggataaggacctcttatagctccagggggtggacccggcaagtagtatacaggccctgtgtcaaatgaagaaacaaaaacagcactcatgcatcaaaaaccgacagttatcctttatcctaatgctaaatatattcaagagcaacagaattaaatttttatcaactactctcagccagtccctttaaacacattgacaaagaatcaatatcttaccaggaaagcctggacctggaccaaccaggaacccaggagctggacccataaacggaggtctcccgaaatttcttggtccagcaccttgtggcatgtttctggggtcaaaacccctctgatgcggccaaggctttccaggatccccttgaggagctggcaacacaggtggaagaggggaagcctgaacttgcttctcattgccagactcagtaacaggaggcacaggaaccgggtagggaggataaggtgcatatggaaaatctggaccagcagcatgtggcagaggcaccataggtggaaaaggaggtggatgatacggtacagcatgcacgagataaggaggaggaggaggaccattctggttgctcctcggacctggttttgaatgacggccagatggattcttgtgtccaggattagcctttccaccacccttagatttcgcttgaccagttacagcgtaaacaacaaaacaaaagagcttttatgagcaaagctaaggctacaaattcaatgctaaacaggagactttc

SEQ ID NO: 52049 - DNA, 474 bp, Arabidopsis thaliana landsberg
acgtacctaccaataaacaccttatactctatcacattttcaattttgagatgcacaatatacatccaacgtgatatgatcacatccaataccattcaaccactaccctatatgacaatcatcattaccacctctccaatacctatgacaactttcacatccttataactatttgacactacccactctctaaacattcatttttgattcttaacaaacattgactgacgtgtactaactctattcaatatgaacctttttcagtgcttccccaaacatactatacttatccttaccaaacataactgccttatgacttactcttctaactatgcacatatctgatcatctccccacacattctccatcagctctctgtaaacaactaatatcgttaactcacacttatcactattcacctctatcgagagcgaatctgacaaggacttcttacacttatcacaacactataca

SEQ ID NO: 52050 - DNA, 554 bp, Arabidopsis thaliana landsberg
cccaacaggccaagcgatcagtgaaaaataagggactgtgggcctgcaattgaattagagtggggggccaaattacatgcgctctagacacaataggcgattgctgaaaattgactggggaccacgagccccgctctgctgtacgtgcgtccgcccatgaccatgccctcagactctagccccaagatcacaacaaagtgttgttgttcacgtgttcaggtccaggtggacacccctccccagtccctagaccagtttcgttgaaccagtgtgtgtgcgagtccccttattggtgaccacacccaataggttactcaccctcactgcggccaggtaacttcaagggtttccaccctcgtgttgtgcatgatttgtgctctacataggatagtgatgataccgtgttggtcttccaactctaccgttgccagatgtccatatcgtcggcgcgccgctgcagactagagccgtgatcagcctccatgtcgaccgattgactctcgttttcccgaccattttcatgtgagcgtcgaggctttggtgagtcctgttgc

SEQ ID NO: 52051 - DNA, 577 bp, Arabidopsis thaliana landsberg
tgtgtgtcttattcataattttaatgtcccgccattttcaaataatacattcctatgtacatctccgttgttagcatgccattcatatttatttttttgacaatgcaagtcattcgtatttcaaactaaaaaattacattttttgatttttcatatacaatcaagtctactagtaactgcaagattttgccgaggtgtattttgataaatgtgcgataaaaattagacccttaaaaataaatgaatgtgttacttaattatatatatttaataacaattcaaatctaacaacatatctactaatgcactgtgttattatgttcttcagatttgatgcccattgttatgtgtttatttgtaacttaaattttgtctgtataaattaaaagggatattaacaaagaaactatattattattataatgcaagataaggatattcaaattaatgcatgcaattaaaagctttgaacccaaaaaaggtaaaaacagaagaatactaagaaaaccagttgtatcccgtcaagatctcaatctcttcgccgatgctcttcccaaacgcaatttcccgttaaaac

SEQ ID NO: 52052 - DNA, 532 bp, Arabidopsis thaliana landsberg
attgagacatatttgtatattgttaagttttctaatttcttcctaaaggtttttgtgacatcattcttgtatctatagtttggtcttttcatgtataaaaatcatcattttagcatatgaaagcccataagatatattttattgcatgttatgagagccatgagtaaatcttcttaccataagggaaaatattgtcaacatggtaagggaaatgttaaacggttttatgtatattagtaatataataaatggatacatgtgcagtcaacagaggccttacaagaatttaatatagaagaaaagtggaatacgaacaaaagcaagaaactaagttgaaaacagaacactagttgatagagtattataatgaacatgctagttcttctgttgtcggacgagaatctaaggtttcagtcttcagacatacatatattttaagaataattttaggtttataaaaatgtttgatcattagttggcaccaattttaaaaatacagtcaaaaatcgaccaacatatgttagttttcaag

SEQ ID NO: 52053 - DNA, 774 bp, Arabidopsis thaliana landsberg
agtttcaacaaaattaaactctcctacgcagttgaaaataaattgtgagaaagacttctataaacgcaatctcaataaacaaaaaagtcacaagccatgtctcggaacaacgaagtcctgaacataaagatcaagcatctggtcacaaatctcccacaattgacgtttcgtgacatcaaactctcgccaccacgctttatctccatcacacggtaacgtcatcttacacatgctcaaaccgatatatatagcagccgatgcgatctgactaggcccaaactgcaagcaaagcgacgtcctcagactgtcattaacgaaattaaatgcagcctgacataaccgcctaccatcctcggtcttaaccgatctcttaacccaatccatcactagtttataagggtgttcgatttcaagatcacattctaaagtagagagcacaagcttctcaccggttaacacagtcatcttcaatctctcgaacacgtctctcaacggctccttattgaataaaaccctgtacgagacaaagaggacgtcaccggccggccttggagacccttcgacttttccggctataaacatacagatgatggcgactgttttcgggtcgttctttgtgagtgattgacgagtgaagaatcgttgacacaagacaatcgcagtggctatagttttttgaggattgtttagtctctggccaagctcttgtaggaatgaagtgtaagaccaacgttggaacgtctcttcctttaagttgataccgtcaagtccgat

SEQ ID NO: 52054 - DNA, 978 bp, Arabidopsis thaliana landsberg
tgtataaatcattagtcacgaggctaaattcatgatgtctttgtagttttgagtgttgtccacttaactccatgttttggattccaaatttccaattgtgtagtttcaagttctctaatatctccgtccaaaaatattccaaattaaagccgatttagatggagttatacttttacccattttaattataaataacggtaaatgaagaccttttttttataaacttaattaaaagtgtttatttaaatcaattcataaatagataaaaatcaacataaattaaaaagatcgaccggtgtgttgcctaaaatgtctaatgtaattaggacgagccttggatcagcaacaaacacacaattaatgcagataataaatgagttgtatacttgtattagcttttttaggtatatgaccgttcgacagaaatagtagtcgtgtgaatgcaacaatcgaatgagttatagacacacaaaaagacctaacgtattcagattctataaaaagatacctacctggtggtagtaataaatgacattctatcaattatacgatctggataagatttggtataggagctatatattaatggaattactaagttttctgaaactacatgtcagaaccatttcatgcaaagaaagttgattacgaaaaaataaagttttatatggttaagaaaattaatactttgtaaaaaaaaatgttaaatatggatttgtggtcttcctcacaccagaccaaacatcatgtccctatctctggcaaaatacctgacgctcgagctcgacaagtaaaagaagactcatatacatggaagacacgtggtgactatattgtccgtccatattgcaattaacatctgacggttgtggacacatttcaactaacccgactcgttcgttctcaccaactctttgcgtctgtctatttaaaacctccgatgtcgctcacctttctctcagggaaatttatttgcta

SEQ ID NO: 52055 - DNA, 940 bp, Arabidopsis thaliana landsberg
actgcctcacattatcctttctccatcacgagctgttctgcggcttgacggaacatttttgcttttaatggatccctcctttgtatggtatgagagacaccttgccacttgagaaaaaggttcacactcacttgatccctgcaaccaattatataggcatgtctgcataaggttgaagttatcccagaaaattttggtatatcatattagcagcgcacataccttccgctcctttgcttttctttctagatcaagttcagactgtgcaatgtctctctgacgctttagctctttcatttcggattccatctgccattagttaaacatgaatgaataattgcaagtcataaaaaattcaagttgtttttgttaataaacttaagttcacgtcccatatggtttacctagtctgtggactccacatttaaaatattcagaagagataattcaagatgtgaattctagttcttaaagtctaagtcatacctgttggattttcatctctttctcaattaacagagactttaagcaggtggatgaactgggctccgggcttcttaactctgactcgagtttagctactttttgctgcagatgtttcagcagctttttttctgagacaacctacaacagaaaatcaactaaattcacatccctaaattgaataccagtagaggggtaaactttctatcaagaacaagcaaaaccgttttgttattcatcaaacacaaagaagattgaagcaaaaggagtaatgttagtgggagagcgacaaagaaggctttgaattatatcttactacatcattacaggtaacgcgatgcattttgtatccttaattcatgggaagagcagaatagctatgcaggcagataattgcatatgatatgctcactataggatgatgattgctactcacaaacaaaccacattttcaatg

SEQ ID NO: 52056 - DNA, 863 bp, Arabidopsis thaliana landsberg
ttactagttaaaatatttagttttaggtattgtttacactgttttttttatcaaacatcattacaaaggataaaagggaaaataattacaaaatatatatatgtttattgaagatgcacacaatttagtttaacatctatacgaataaatcaaaattagcctatgtcaaaattgattaagacacgagtacttacctgctctatgaatttgttggggatgaataagattattggttaagttggttttttgtttatgaattggtacttgtccctttggacattcttctgaccccttcaaatcaatctctctgagtatgttaccattggacgtagagagtattgataaaagctcacgacttggtctagtctacagtaacatttaggtttattccaacatatttctttataaaacataattagtatgtttaattatggcaaatgaacaatacctgtatgcgatgattcttcattagaggatgttgtagtgcagattgtttgtctatagagacacattcgaattcgctttcttgatgctgcaataatacaaatccagcaatagcaatatgagaatttcattaatgagtttagtataccaaattacttgttaaggaacataccggagttgatttagcgataacattgaggtatattagacttatggagattaacttcagccaaagagaagccattttttgtttcctttttctatagagcttctgtttacttctctcctttttttttttttttttctttgcctttgattaaaaaggctctgcattcgttacaaaaataggaaatgcccgtcatttcgggctaaacaaactatgaaacaaatttaaaccatatgtaggtaggtgcgggtct

SEQ ID NO: 52057 - DNA, 425 bp, Arabidopsis thaliana landsberg
  unsure (1)..(425): unsure at all n locations
gcactgctagtgaaaacagtgatttagtttcaccactgactgcattatcaacatagactgtggtggccctttttggcgaattatcctttgaggattgagtggtggtggtaggatcgccatccatgtttagtgagagatacacgccgtgaatagcgcccttgatattcccgtgattactaattgtgccggagggagtgtatgcattcataccaataagaatattatcatctccatcggtgaaagtggatgctctgggaccaattccaatattatgatctcccgaggataaggaaccaatgcagtccattccaaaaccactgttagtcccaccagacgcaagattggccatggcgtagtatcctatgcccatgttttcgagtacggtcggcgtgcctgtcacaannnnnnnnnnnnnnnnnnnnnnn

SEQ ID NO: 52058 - DNA, 518 bp, Arabidopsis thaliana landsberg
  unsure (1)..(518): unsure at all n locations
ccccagcccccccccgcacccccctctttttccccccngttgttcccccccccccccccacccccccccccncncccccccccccccccccccccccttcttttccccccccccccccccccccccccccctcccccctcccccctctttcccccccccctccttccccccccccccccccccccccccccccccccccccccccccctttttttttcccccccccctttgtttcccccccccccccccccgcccccccaaacccaccccaccccccctcccccccccccccccctgcccccccccctctccccccccccccccccccccccccccccccccctgtccccccccccccccctctccccccccccccccccctcccccccccccccccccccccccccccccccccctcccccccccccccccgtctccccccccccccccccctccccccccccccccccctccccccccccccgtttccccctccccctccctcccccctccccccc

SEQ ID NO: 52059 - DNA, 1352 bp, Arabidopsis thaliana landsberg
taatactattgtgcaataacatatactacaactgaacataaattttaatttttgtgtcaaagcatataccatcaacgccgttggttttacttttgttgtaacgacgtcgttggctggttaatgaatatgaagcttttccgtaattataccatcaacgccgttggttttacttttgttgaaataatccaatcatattactagaaaaaaacaaaattgccacatgggtgtgttttcactttttactttttactttttacagttgaattttatattaaggaaaaagtcgaaatgaaatagtaaatcgaaaacaaaatcagagttaaaagagtaaattcaggtgagagaaatcagcttcaagcttaagagagcttcgaaagcgaaagcgacgatttcttctccatcgtgagagcaaatctccagagccgttttctcttcttcttcttcctcctcgcgccgtctctgaaactccatcatcgtatcaatcaaattgcttcctcctccaaagtaagcttcttttcgattctcaaccaatcatagtagtagtgtgcttctctcttatcctctgttttctaagttttgtatcaatctccacatagcttttctcgttctattatcgtagaaactcttaaactatagattagatcactcacgattcaatcataatcaatctggatctgaatctaattacgcatcgtgattcaaaatttgtgtttttttgtgtgtgtgtgacagttgaaaaacaatggaattggattcggagaacaaattgttgaagacgggtttggttatagtggcgacacttgttatagccaaactcatcttctctttcttcacttctgattctaagaagaagcgtcttcctcctactcttaaagcttggcctccattggttggaagtcttatcaaattcttgaaaggacctattattatgcttagagaggaataccctaagcttggaagtgtgtttactgttaatcttgttcacaaaaagattacttttcttattggtcctgaagtctctgctcattttttcaaagcttctgaatctgatcttagtcagcaggaagtgtatcagttcaatgtccctacttttggtcctggagttgttttcgatgttgattattctgttcgtcaggagcagtttcggttcttcactgaggcacttagagttaacaagttgaagggttatgtggatatgatggttactgaagctgaggtaaagaaatttggactttttagcttgtacttgtgatgtatgagtttaggttcacttttcatgcttctgcttcgttatactcacatacaacatatactctgattgatctttaacggtataatcttccagtgagtag

SEQ ID NO: 52060 - DNA, 624 bp, Arabidopsis thaliana landsberg
tgaaaatatcacaagggttcatacatagcttgaccggtaacttccgatacaccagatccagtacttttccaattatcgatcaaattgaaataaattgaacaaaagtggatatgagaaacggagcagcttatcatgttccaatcaaataataaacagatctttctttctatagaaatccaaagacctgaaagtaaaatcaaatgaattccaaggactttgattgcttcattgggttctcgaaaaaacgtacctggaagttagagagaagagaggaatcgtggagattggtcgttgcgtcgatggaaactggtttgaattctctgctctcttttctcttttgcagagacgcttcagatcagccgcgtgtttatccgacggctacgagtccacctcaccaatatccgacgaatattattccacaaacaaaactacaaaagttgatcatttttgaaaaatcgtatagttcggtctggttttctcatgaaattatctggttatctatttgacccaagaaaatgattctaaattcaaaagaaagtaattttactatggtctagtggttatcacgttaatcatacggtttcgccctaattgtcctggtttgatcttcgctgcacatttgat

SEQ ID NO: 52061 - DNA, 1231 bp, Arabidopsis thaliana landsberg
  unsure (1)..(1231): unsure at all n locations
gcgtttcggcggccatttgaatacaagggaacggcataactattgctttttattcttctttgtagttgaccaataaaaaagtttacaccggttcaaatgaaacaaatacaagtcctaaattcaaccaaattctgagttcatcaacatcagttgctttaacaaaagcaaagatttcaaaacttcagaatcagcaggaagtaggaaatatttgtcgacccatgaatgcaactggttcacggctgaacactgaaactatgaagatcccttatttcctttgagattgatgaccgagagttcttgttcaacatactctcctgcgggtatcgccggatatttacttgccaaagatgattctgcgaaatgtcccaaaggtttcagctccgcatcagaggcaatgtgggcaaacaactgcaagacaggcaaaaacaaatctttcagataagccaaaagagttgagcttgtcaggaaacttatcaagagactggctaagacttacagtcgaggaaactctccataggcttcggttttgttcctttgctaatgtgatggcatccttcgtcttgctcgtaacaaccacttcatgcattccagcaatgcattctccagcagttaaccattctatctgcacacatgaacaccaacattttagcaccgtttcttcgattacataaatcgagatatttggctgttcatagatgcttcaagtaaacaaaaatgcagtaacatctccctacctgctttccagcttgaatcaagagacagcctaccggaactttaaccgcaaccttctctccattccttaaccaaatatatagaccagggaatctacttcttccatgaatcgttagaaaattaagatcatagtgatatcctgcaaatatcgtcccttcctcgttgtaacagctnnnnnnnnnnnnnnnnngagcaagaagatgaggaccctaagattcacaagaacgacactcttgaagttgaagaaatcacaatccatgcaatgactgttctgaacaacattacaacagctaagaacttacctgcttcatgagtgatgtaaatgcatccttaggcaaaccaaacccaattgctgccatttcagcaacaacctgaacagtattaacataatattcatcaccacatagttaaaaaaactaaacaagcatcagattccaactctgcagcaacgcctcacctcaaccgcggatatcatcttgttaccccatgagtccattac

SEQ ID NO: 52062 - DNA, 1036 bp, Arabidopsis thaliana landsberg
gttctctgttcaactctgctcttttgaggtatgcatcacctatggatcttgtgatctgtttaaaggtcataacacatttgctagtcaggtttacatccttacacaagatatggcttcaatatatgattttcttaagcttttgtatttcatagaaactgatgaagcaaaactctgtgcaggttatcagatgcgttatcatgtatgaatgtttacctggataacgcctttcacacgccacaagcggtgcttcatcacaagaatggtggggtcattaggatgcaatgaccatagctcttgcctcgcagactcaagattggcattgtgctctacagataactgaacagctctcactccacctctctcagatctgcccaacacagctctggaatctcccgtgtttgcaatatacaccaatccgttgcatatcactcctgccaagcaacatgaccccactgatgccatctgtgggttcgtaggccattgcttcttcactgtcttgagaaaatctttgtctgtctcggcaaatgctttgctgatcacctgctctgaaatctccctaccctcggacgcaaactttgttcatgtgagaccagtgttagtgtgcctggcagattcaacaataaaggaaataaaaaaattcggtgtcttactctttaacttggggaagatgttgtctgcaatgaatctggaagcctctggacctccatggccatcgtaaactccaacaaatgtgccttgaactgtcggattgttgaatgtaagcggccctgattcgatctggcactgatcctccatcacactgttggcttggatcattgccatggaaaactctccaaaggtgtgaagaccaagatctttgtaccatgtcaaaccatcaacctttgtgggattgatcttacttctctccataccggcacctattctccaacagggtttaaccatctttctcaggtatgtaatcttcgagcaatatcgtaatataaacagagaaaaactctatatagaataaattggtggaataatgaataactagtag

SEQ ID NO: 52063 - DNA, 415 bp, Arabidopsis thaliana landsberg
  unsure (1)..(415): unsure at all n locations
tatttcacgcgcgaaaattgctggtgagtctcatctcctatagacctaaaaggttccgtatacgtagtaatgtagctaattccgtagactnnnnnnnnnnnnnnnnnnnnnnnnnnnnnnnnnnnnnnnnnnnnnnnnnnnnnnnnnnnnnnnnnnnnnnnnnnnnnnnnnnnnnnnnnnnnnnnnnnnnnnnnnnnnnnnnnnnnnnnnnnnnnnnnnnnnnnnnnnnnnnnatacacgtcagctgcagacaggcacttcagctgatttcagtatatctggacagctaccataaacccgattctagtcccccgacaactaggactgacgacgctgtgattcacttctgacgatcagttgcttacatgggctagtatgcagcgcacaagtgcagaacggatagtgtgtctttgaa

SEQ ID NO: 52064 - DNA, 522 bp, Arabidopsis thaliana landsberg
  unsure (1)..(522): unsure at all n locations
ttcaccataaatccctaaaacatcgtataacgctttgaaaatggattcccaaaatcaataaaagagtaaagaacagcatctgtttttcgttacctgataagcagacgataacggcaagagattccgattagacgcaattaaaacacccataaacggaaacaatttcatgattctattatcgggattttataatttttagtatcttctttttctgtttgtgggaatcgagaataatatgagcgaatttgaagaacacgtgtttggagaagaagaaacaattcgtgttatttctcttcgagattataatgatggccagtgttaactatataacaaattagcccactttttgatcttaaaaactaattaaaagatctccaatttcaagtgtattcccgagaattaaatattttaatcaacagntttttctgctaatgtaaaaaaaaacacttatgattcccctttttatatcttcatttttcataaatctaagcaccaatgatgccaaaactgaaggaaaagctc

SEQ ID NO: 52065 - DNA, 587 bp, Arabidopsis thaliana landsberg
tattttttactttaattgtttatgaacatttattgcttttcatttatgttatttgggttttaatccttcaagggcaatcatattttctgatatttatatcaaaaaagctatctccttttatatcccaacttccataacgtgaaaacaaacaatcaaacacacatcattatcattttttttctttttaaaaaatcctaacaataataatcaaaaacttttgaattcactcgagtagttttaaagttttgtgggaagataaaggttgaagctttaatatttactctgtttttttgggtagaacaactcgtgcaatgggggtctgtgatgaaagtgacaaatagctaaatattttctcatgcatttattgagtctctctttggacccgatcccattcaactcatcttcacagatgtctcaagcagctctctctctttctctctctctctctctcttctttctctgatcacaagggttatctgtctgaatctcattctattgagtcattattgacctctgcagacatccggacaaagctttgaaaccgaccacacgttcaagaatcatcgatcatacaacaatgtctggag

SEQ ID NO: 52066 - DNA, 1369 bp, Arabidopsis thaliana landsberg
aatttggttcttatggaatgaatgtttattttaccttcttcttgtattgcaggtatgatattagagtcgaatgtggaatgccaattaatcgtcacaaatccaacgctccagatgcatgttttttctttgcggataatgttgtcgccattgatcatcaacttgatgacgtttatgtattatcgctttacgaagagggaacaacagaaacctctttcctgaatgatactgaagagaagctcattagcctgatgggttcgtccacaagaaaattcatggatcaaactcttccagttatagattcatctcaatccaaagcaagttttgttcctgacaaatccagagagcagtatatcaacgatgttcagagctgtatgaagtatatcaaagacggggagagctacgagctttgcctcactactcagaacagaaggaaaataggaaatgctgatcctttgggactttatctccacctgagagagaggaatccagcaccatatgcagcatttctcaacttctctaatgcaaatttgtctttatgctcgtcgtcccctgaaaggtttcttaagctggacagaaatggaatgctagaagcaaagccgattaagggtactatagctcgtggctccacgcctgaagaagatgaatttcttaaattgcaattgaaactcaggtacaccaaacacgttgttctagaatcatcgaatgtttcttaatatttcacatcaatgctactttatcattgtttttttcccccatgtcttataacagtgagaagaatcaagccgagaatctgatgattgttgaccttctaaggaatgatctcggtcgtgtctgtgagcctggctcagtccatgtacctaacctcatggatgtagaatcatacacaacagtacatacaatggtgagcacgatccgtcggctgaaaaaaacagatattagtccagtggaatgtgtaagggcagctttccctgtcggttcaatgaccggtgccccaaaactaagatccgttgagatactcgattctctgtagaactgttcgagaggcctttactctggctcaatcgggtatttctcatataacggtacgtttgatctgaatattgtgataagaacagtagtgatacatgaagatgaagctaccattggagcaggaggagcaatagttgcattatcaagtccagaagatgagtttgaggaaatgattcttaagactagagctcctgctaatgcagtcatggagttttgtagtgatcagaggagacaatagttttgtctcttcaaagttgaatgttttggcccctgtgggtttaaaacagttatctattttaaaaatttgattcacattttttttataggaaaagagtgcttt

SEQ ID NO: 52067 - DNA, 860 bp, Arabidopsis thaliana landsberg
taattaatacacttttatgaaatatcttagggtagttattaacataacactgggtcatggtttgggttatggagaaggttaatgggccataagatccataatattcgacattcgcctcaagtcaacacaataatgactcgacttgaatcatttttttttgttaaaactgaaaacagtaatagaatcatctagagttaaaaaaacaaacctaatagaatcatcgatcatatgacattatatttcagatgagaaagaatacaatatctttacagaaaaatgaaattgcataaatgattgtaatacataaaattatacaatagtttctataatgtaacaaacaatatttattctttgtaatagacgaatcaattgcgttgtatatacaactttgcatcataccatatattcactagagaccagaagtgaacggcacgctagatggaatccaagagccaccggcgaggaaagtaccaacagtaaacttggaagcctctgaagcagaaccaaggacccgaaaccctggccatgtgacccgacccgaagttgaagcacccggacccgtattttgaaactcagcatagaacaaagtcttcaaagcgaaattaccatcccactcgagccagccacgtggatcaatcaaactatcaagagaagtcttcataaaaaccgtcctagaatattgtctccaaggtctacccaaataagtctttgtggatcccaaaacgggtcgaagatccgaagcggccgtgacccgagagttgtggataataatccccgtgttttgatacgggtcggatcttacttgagctgtgattgtgttggtcttactacgaggacgacgtgcgaaaatgctgcatttt

SEQ ID NO: 52068 - DNA, 127 bp, Arabidopsis thaliana landsberg
tttgcccatcggctatatatacaagaacaacccaactatgactgatgcttcaattgcatcaatataaatatgtcacactgaataatgactgactgagtaagaatctgacaatgtctcaattgtgctc

SEQ ID NO: 52069 - DNA, 450 bp, Arabidopsis thaliana landsberg
tgagatgtggctgtgattttaagtacacagtggcataaacaaattacttgacaacttaagttctaagcatgaaacatatttagccacttaccacattactctgatgtattctacccattcgtccttttatgaacacataagtgcatttaattgctaggcaatgcaagacagccgaaccataaaacaaataagtgcacacaattgacacgtaatacaagaaggcagaaccagaatactaacctactaccttgccggcagaacccccggacagtgttcccgaccacggcggtgctagccttagcctgcatctcgcaaaccttgtgtcggcggtggtaatccttttctgcagccagatccgctccgcagtcctcatcctggcacgccggaccacttgagcagcctccttgttcctgaccttctttccatttctctcattatcctcgtttacat

SEQ ID NO: 52070 - DNA, 736 bp, Arabidopsis thaliana landsberg
aaaccaccagcttagtttttatacttgacgcattcaattatgttgatatgtttctcattagtgtcggagtgtaaaattggtgttgcaaaatagttaaaatcattctttgagtgagtttcacggtttaaattcggaatattgaacatagaaacgattggtcaagaggaccccaaaactttcggaaagatattaaaatgaacctttgtgacaagtaagtccgtaaaagtagtttatatcacattttagaaattttatcaattgccaattttttttttgaataactttcaaaaagataaacagacatttgttctttttttttgtaatagaaatactacttttaaaaagaaattactatttgagatagagctacgatttttttattctttcgatcaacacttttttatttattttaaattaaatttatcaactagttctgagggtaaatttatatatttgaacctaaaatagagatattcttggaaaaaataacatataagtgtagtagttctacaaattatacacaaataagtgattgtttttgtaactcacagcaccatcttttttgtttcactcgaggcctcgaccaaaaaaatttggtttaactttgattggggcgaactaatatatatctctcaccggtccatagcaataacaacatcaaaaagcaatatattgacgatgattctatattcaaagatgttgggttaaaacctgcgggcctaaatgggccaaacat

SEQ ID NO: 52071 - DNA, 1166 bp, Arabidopsis thaliana landsberg
cacgagcacgacatctcttcttcttcttcttgacctacgtggactcttacaagattcaatttaagaggattcttcttctttttttaatctttccttttcagctttattaattaatgactctattttcaagatttatgactcttaatacctatcccaaattttattctgcttttggattacaataaacaaccctataataatatatatatatatatatatttatatttctattattttatgtataaaaataaatctattctttttaatgtttaaaaattagttaattatattaaataaatgttttatttctattatggatgattacattggttttttagaaagtgagattacatgaccaaatagtagtataagtttacattaaaaccaaaaaattgcattaaacaatgataactactagactatgcaagtatgaagtctactcactaaatatctaagttaaaaatagtattgacttaaacggcacaatttgcggctgatttgataacataatgagttagtttattcgactgacttaagatatttggtagataattaaatatgcaatgctatttttcgtttgtaacacgttatattgacctaccttgctacttattagacatgatttagttaaacaccccatctttgtttttctactcaattataacaataccgagtcaaatttcttttgtgggcctaccgccacgtaactcatatcagaaaatggagtcttaactaagtgcatgatcatctctttggatcccaatatcactaaattatcaatcgtactactaatttttcttggcaattttatcattttattggtaatatttccctttcaagaaatcaatatgatcaaccactaacttttctttgaaaaccgcaaatttagaaaaatatatacacatgaaaatccgtatattttgattgccctattgaaatttagtacaagtaatatataaactagctacataacctcgacaataacgaacacttatcagatttagaagacaaaactaacagcaatcttgctatatcggtttgaattttatttttttgtttattgatatgaatttgatcttagtggacgcactaggaacattttatggtcaaggttttataccaatataaatcttttaaataaaccttcagcaatcaaagcaccagtg

SEQ ID NO: 52072 - DNA, 960 bp, Arabidopsis thaliana landsberg
aaaaacactagatggaaactggaaaaatagttatttattaaaccaaattttcacaaatcttgctgctatgtatcgaccagactcttaaagaaattcaattactgtactcatgaaacaatatacgttcaaaacttcacaagaggcaaggtaaaaaaaaagctcgtagttgttacaaatcaatcaactatctacaatttttgtagtctatatgcaaaaagaatccattttgtgcaattgttattgttttccttcctctgttttcgttagagtttcttgatgcttgcttctgtttcagctgaagtcgcaagagggttaccattttcatgttcctgcaacaattcatgtgcttgcagttgtaggcttgtagctgaacttgctatgatggttcttgctctccttgttcatcctgcagtaactgctcctctttctccttctcgccttgccaaacccaaacaatatctgccaaagcaggcctaagatcctcctccactaacttctgatactccattgtatctccattacatttcttcacttccaccaggtgaaacgtcggcgtcacttggaatatctctgcatccatcgtcaaaattccgttttttccttcctttactctttccagtttgaacaagcctgcgccttgctttcttatcttcagcttcaggcacttggcaacctctactagcttagaaatgatctctgaagcaggtttttgcgacgcgaacctagattctcgcttgtcatatacatccccaaaaagtcctgccagaccaaaccccgtagacaaggcgatgatatcgaaagcattcaaggtagcaagtcgaggcggctcgtggatttctccgttttcattttgacctgaacctccagcttccatgggattagtagcctctctgactcggtgattctccatcttttccatctttatttgcttcaagtgtaaaccctctctgaaccaagaac

SEQ ID NO: 52073 - DNA, 799 bp, Arabidopsis thaliana landsberg
caatttgatgttgggatagtaaaaaactcctgtgacaatttgaaatgccataagccagaaataatataaattatattctcgcgaattacacggggtcaacaattaataaccaaataaagaaagactccatcctagatcttagactagattagaacgacgacttttggggaatcataaatgaaaaaaggtggagatggtcccaagaaaacccactttgcttaatccttaacagagttttaaaatattccgacgaattcgtgacatttgaggggattctgatcctattcatcaactgggtgctgtttctgtataggtttgtcttgctgaattgaagccgcgagcatcagacggagatgtcgattgattcagacgtggatccgtcagaggtttccacggctaaaagaaaaccatcacggagttggctcctcatagacgctgcagggaatagtacaatgctcaatgtagacagttacgcgatcatacgccgtgtccatatctacgctcgtgacctcagggtcttcgagtcaagcatttcttcccctttaagcattcgaacccgagagggagccattgtgctgaacttagaggttgcctatttttgtttctgagttttttctttatacgttattgggttttttcaaacgtgttaatcatttttggtattgcgctgtggtccgatgaagcatattaaggtgatcatcactgccgacgaggtcagcttactttctactcgctgccttccatttttactagactactttgtagtaggtaggttcgactttgattatatattcgcatg

SEQ ID NO: 52074 - DNA, 1486 bp, Arabidopsis thaliana landsberg
  unsure (1)..(1486): unsure at all n locations
aaagagtgtggtcaaatgaattagtgaattcctttgtatgagtatagaataatatattagtttcatacacgcatgctccattcatgcatatatggtggtaatatcttttaaaccgtgttatattttgcgtcggtggcattagttgttgaagctccacactgctgatcacttgcagttttgcacccatgcatatccctgatgtgatacgttttgccattgatcgatctctactaaactaattcctttatcaaaatttcatcccaatgtatgtaacatcatcatacctcattaattacctcctaagaaaatgactgctcctaagagaaatccgtttcttgtcgtttttttcataagtttttttatatgttgatggtatacttctacaaattttctattgatagataattctgaagtagatgttattgacatgttacgttgagaattggaaatttttgagtgggagtcgagtaatatgtatgatttgattaattaatcatacaatttttactaaagcatgagtaaattcctgtcagaaactcaataatacgagacgcgatttaacaatgatcgatacacaaattatatttttacgtcaaatttatatatgaagaagatgtttctcataataatcaaatatattccagtttttaagactttgacttttagatagagagccattgacaattatatcatgcatgattcacgtcgtcaaagtaagtatgaaaaaccacgaaaaacgatttaacgaaatgtcaatattcaaacaattgtagaagagcctagaaaaaagttgaacataattatatagttcgtttgggtccaagaggaccgttaatggcatttaattaggttttgtcggtaacaaaagaagaaataatcaaaagagaacaacgttttttaatttaattagaagtaagaggctacccataacttataactgcgatcgtggaaaatgtaaacgaagtataggatgatgaaattgaaaatttgggtcacccacccatatcgcaggggcaaagaagaagaactttaaaaagatgcttcgtcatcaagtcaaactaataagtttaaccgagaaaaatgtgaagaatcaaatcctgatagccggttgttccgtcgtcggtcgaatgatctaaataatgtaattgtctaacagagattgattttatcgtgtcggcatgctcagttctgcctaaaacacaagagcattaatgcattttattatacgaaacaaaggcaagcaaaataatgtcaaaacaaatattaaagactgttgattataagaatatatccgaataacgacttattttgaagcgttggttccagataactcttactctactctttatatcaattgtcaatacaaagcaatgaaaaaactatttaggcaacgaagcagacgactaataacaaaagagttctaatcaaacaaaaaataaactcaaaagccaaccagagagagcagtatagcaatgtanaacataaa

SEQ ID NO: 52075 - DNA, 695 bp, Arabidopsis thaliana landsberg
acttacgattctaagaattagctgccttttgtgctcacttagctgatgtatcaagcaacggcccacgttacagctggtgaaatgtatattaatacactaaagttatgaaaactatattgtaaacgatggagaagagaaataaataacaaattcggtaatatatattaaaaaatagaataaaagacagatgcctatacgggtggggtatttagttaatttattttatcaagttgaacgttttactaaattatgtaaatgtttcaaatatttataaccaataaaaataatatcgaaagtgtgtaaaaaataaatcatttgttaatctaaatataaccaatcaaacttctttttttcaattcacaaccagaattgtacatcaataacaataaaaaatatacaaactaaaatttatagccaaaaacctagacttactagagctaatgactttttgtcgttgattgattttcttccatcatattcttttatacccatactgttgtcatattatcactggatacccattcagaatttcagatattcatcattgccataatctataatcttttttaaagaaaagtgatactcataaccaggtgtgacttgtgagccacataagccaaagaaacatagacttagagcttaaaatgttcatatatttcaaccactaatattatcaaaagtatctgtagctaagt

SEQ ID NO: 52076 - DNA, 1415 bp, Arabidopsis thaliana landsberg
ggaagttacctcatcaaaatcattagccccaaatggagccgacaatgcttcttttatctgtttcatgttctcagtttgttcattgatctcatccattgtcttgtcaacatcatcaatgtttctgcaaaacaaatgtgtttagctgcacactaagtggccacttaaattatagtcttatttaacccgatagtacaatggttaggaaagtaaacacatacgttgctttctgcatagctttcattgcagaagctccagtcctcaaagcatctacagtctctgttgttgctttagcaccttctaacataatcatctgtttacacaatagtgacatattcaattatcgttcatattagcaaatatcgtaaaacacttgaacaattgaaaaacaaagaaaaaaaactgacttgatcatgaatacggagctggaaattcccgagctgttcaacttgttgctcatataaccttttccttttcaaacattgtatagccgctgcacaatgacaatacacacgtaagtaatctatgtatctagtaacacattcattgatttctatgcatgggatgtattgtatatcagagcaaagattggccataccgcgtttgttcttcgcccgggagaattccttagctttctcaacctctccagtagctttcttgagaagaacattctccttcttctctaacatctcaagagtctgaaccaaaagaagcatcaaaagaagaataaacccaaaagtgaaccttcttaacacacacgagagtaccaaattttggcctaacaatgcagacagtatctatctagtaaaacacagttcaaataaacagcccaagaaagtatgcattagagccaaaaacggatacataatcagaatctctaatcttgttaaaaatccaatttttgacattgatgttgagatagtcaaatccaaaacagatggaaacagagaatacctcattgagcttgtctaacgtttggagagtactagtctcctgtttgggtttcccgaatagccgattcataaacatggtggcagatgattgtttgcctagaaaatcaaactgagatcgagaaacaaagaatcaaagatcaattctttaaccctaaacaggaatctatcaatcgaaatttagggttccgttcacaacaaaattcgattctcaaatctaaaattagatcccaaagacaggtaaaggtgaagactttacaaatacaaagagaagaattttaagattttggaaatcgattgataaatacaaacctgagggatttgagatgggaagcttttggttgattgagagatgagattaatggaagaagaaacggcgttgaaagttttttttggtttgggtttcttcgaaagccttgtcctacctgtacttacttattattggtactcattttgaatgatattttg

SEQ ID NO: 52077 - DNA, 590 bp, Arabidopsis thaliana landsberg
gtcatttttaatattcattcacatatttgctttaattttatcaaattgatgagttttgaataaaatttggattgtgccatgtcgtgagtctgtgatcagctccatttgggtgaggcttgttatttaaatttgggcatattcacatgaatcaaagtcatataaagttttcttatttatttcccaaacaatgaatcaacagagaaatgtttttaaattacataggattaaacgatgccattcgctggtgggctgtcgtgtgcctcttcctctatgacttggcccactatcgtttatggattctactgtcgcctccattccaaaatacatttcggctatcacaaaaagattttgtacgtagtgagaaatatacaattaattataatattcatatgctaccttcaaattaaagttgaaaaagaagagatgaacccattgtatagattggggatactttaaatctttgatagaaaaaaatataaattgtgttttgaataataacataagcattaataataagaaaatgtgaattaggttcttatgaggtaagatcgtattaccaggggaaatacggctaggcacagtatatgaaa

SEQ ID NO: 52078 - DNA, 397 bp, Arabidopsis thaliana landsberg
tgaatgttttttcaaagatacatcctataaattgaggttcacggcagaagataggtttgtttcatcctcatcgggatgattcttcgacattggtggagcagcagagaacgaagacgatgagaaatttgtaaaaagttgtgagacggacgcggtgaggttttagtttcgtgactttgaagtttcaaggagggagaccttgattttaattttgaagcgtactatgggccatggaggtgtcttttttcccaacgagtacgaggttttgatattttaggtgtattaactgtaaagtattatgaaactaacaagtgattactatttcagtaacaaccagttatgggttctccctggttaagcaataaacgattagtataggaaatgtagattttttgcccct

SEQ ID NO: 52079 - DNA, 606 bp, Arabidopsis thaliana landsberg
  unsure (1)..(606): unsure at all n locations
ccacatcgcttccgtgtgacgcaagtcctagagtgcgtagataaaaatacgagcaaacacgtttgcttatatatatagangggnnacactcagatggaaccatattatttgcatattcctttcggtaaattgcatatggaaaattattcatatctgtagtttaaagcaaaattttgtcgttctttagcatcctaatcttgatttagattcggtataatatcctgtatatctccatatgaatcaataatacaatttcctaaactctttaacgtgtacataaacacctaacaccttgtaactgaagcttgtagacttgtcacatatatattaagagacttggctgcaactttaatcatttggtcttaaattagtactagaatttattgaatatcccatttgcattactcaattattttgtaacccatttgccgtatatttagttttaagaatagctgactttggtagataaacttaaatcgaataaagctgcatgtgaagggcagatcgatactatataactagctatgcatgtatatataaactttttttttctttcggccaacattaattaaattaataaccggaaaaaaaaacaatcttttagat

SEQ ID NO: 52080 - DNA, 1016 bp, Arabidopsis thaliana landsberg
tagggcttttggtgtataaaaactgttacttttggcacatcacctgtgaaatcaatttaaaaacccattgaggttctgatctatatctgattctcacttatgtcttgatttcaccatctgatatttatccgtttatctggaactgatgttgtaaaccatgtcttgtctgtgaaaaaacaagctctgtgttatgtatctaaatgtttcagaatgtcataattcttgttttgttgcctttatgctattaggtgttagcgtctgagttcaacgatcattgtatccctcttatgatgtgagactgattccaattttgattttggtttctctctagaatttctttggttgggttccaaagccaaaacgagagattacaatggcaccatcacgtaacatcgctgtagccaccggattggttctcttcgcatctgcaggcttagcattccccttttacatggcctaagcaccctattctatctctcaaatgttatttgctcatcttgtggtatgacatttgttgtttactctgtctcatttgggttgcagatcttcgaaacaaccagttatcgatccaacaaaaccattacctcctcaagcaacttttagaggaccttacataaacacaggctcacgcgatgttggacctgatcatcgaacttacccaaagaaatgaaccaatcaagtcaaaacaattacgcaggagttttcattgtgagctttgtattcataagataatatcgttttgtagtttgttctccaatccatgtaagtcgttgtgcttcatgtaacaccagtctaacttacccattgaatgtaactgaagaaacagatttattcctgcacaagaacttgatttttgattgtctaaaaagttttgagactcaaaatcacataacttggacattacttctcaaatcaaaactgatatcaaagcttagatatatatgcaaagagaatcactgtttcaattttttttatctcagttaaagtagaactctttatattctaatcaaaattaa

SEQ ID NO: 52081 - DNA, 596 bp, Arabidopsis thaliana landsberg
gctggtgtccggcacgacggtgagctcaacggaccgcctgtccaccgccccgggcgcggctctcgagacggtgaggggcacctccctgctggggctggccttgatgaggtcgacgaggacggggacggacgggtccggcgcggccccgggcacagcgaggatgatgtccccggggaggaggcccgcgcgcgcgccgcggagcccagggagaacctcgggcacgagaaccccggggagctgcgcctgcacggggacgccgacggtgagcgcctgcgcgtagacgatgaggaaggcgaaggcgaggttggcggcgaccgtgcggagacgacgagcaggcggtccgggacggggcggttgcggaggaggtcggggtcgtcgggcgcgaagcggactccgggtcgtcgtcggggaagcctacgtagccgcccagctggatggcgcgcagtagcatccacaggggccgaggcggaacgaggcgagcgccgggccgaagccgatggagaactgggagacgtggatccccgggacgcgcggccaggaagtcccggactcgtggacgacacgatggcggcaggacggagccgcggagcgacgga

SEQ ID NO: 52082 - DNA, 665 bp, Arabidopsis thaliana landsberg
aaccatttttcatcaatattgtacatatcaagaaattttggttcatgagtcagagaatcattttccaacatggacacgcaaaactttagccttcctttcatattctcatcatttagacttggtgtaatagcattagtatggcgtcgaagtgtaccttccttaagacgcttatgtaaggacgaaagaccaatacctaaacacattgatagcgatcatagtgtcgttctcttgtgggatctttaatttgatccaaatcaagtgagattctcttgcgaccacaacgtccgatttttttgggatacattgacttctccaccattagaagtttcttttgcttgtttccaaatatgttgcaccgtttgaatagataccaaaaataattcagaaacttcgcgtgtagtttttttctctaacttcccatcacgacttctctctagtaaagcataatatattttccatcttttcttgttcaagatatttatctctgcatattaacataaataatcaaaatcaagtgaaatcaaccatcttcaacatacgaacggcaaaagtcttaaaacattaactaatttacaaatattcctaagctatggccgcgttaattaaaagaaaaaaacagtatttgttgattattctactaagaaaagaatggaaaaaataaaaaa

SEQ ID NO: 52083 - DNA, 526 bp, Arabidopsis thaliana landsberg
  unsure (1)..(526): unsure at all n locations
ctcgtgtatgattgcttacacgttggaacccccaatctctaaacccagaatatcatctagaaacctgagcagagaagcataccgtgtgcagaccttggagaggccggcgcgtngtgaggtagagggaaggtggtagcggccgtgggatgtagagggaggtgaccgagagatggaagctggccgcgtccaatggagagggaagcagcttccgcggttgtgaggaggcggcggtcggcggaggggggcgcgagacgcaactcgcgagaggaagacctgggggtgattggaggggaaaacctgggagatgaagatgaggacgttgcctgtccaataaggtacgggtgggtgctatacttctttagttgtttacctttgataggctatttgacttgggtcgatcattcttgttaattttggggcgtaattgagaaaatatgtagtttgatttagttctagtaagtgtacaaaatactgtgtatttctaattatttctctactatgattttgtgcgtgaagaccaaatgcc

SEQ ID NO: 52084 - DNA, 507 bp, Arabidopsis thaliana landsberg
cagtctttggatcagtagtagcatcggattcagatccaacttttcccttatcagtaaatatgccactaccagtcatctcttttaacttgtaccctgaacaattctttctgtaccaaaaagcgccatattagagaccggtaaagacctttacatgtaatgatgaagtcacttaatgaaacaatcaaaaataacaaagaagacaaagatctcctcattagataatgaacagtagtagtttgacatgtaaatggtgtggggctttgatgaacaaagaatgtaataaaatactattaacactaaaacttctcagaaaagccataaagcatttgaccaatccctttcataaaaatttatcagtaagaaaaagaagtgacttcatcattcagagaaaccattttggtgaatccaagatcaaagctttaaactttaagtttccgttgtaatacagaaacaaatccaggtatcattattagatctggtagtcaatgggagatagaattaaatgaa

SEQ ID NO: 52085 - DNA, 753 bp, Arabidopsis thaliana landsberg
ttattatggttcctgcattcggaaaatgtttcatgttctgctgcgctaaaacctccccggtaagtcccagctacatctcaaatttgcttatgagaaaaatactcaagctatttttgaaacttcaagaggattattagattatagtatgtatataaagtgacgaaatgtatatagagaaagtaataattaagtaaactggtgacgcgtagatgccaactggcaagtccgttaaaaacatgaccgtgtcagcctgtaaggcttgccttggttgacttatcctgctttgtcattggccaccggcctatcggaaaagacgcagaccaatttgccttcaccaaaataaaaattactacttactaccatatgctttttgccctgcgtttacttttcaagtcgagatcatttatttggtcaaatgaggtagaaaaaaactattctagtcaatgtagacattcgaatgaaatttgcatttataaaaaaaatgtacttggaaattcaaatgggtttataatttcattttaatcagtaccgagacatacagccacatgcttaattattcctcctcaatcaaaaccatttcaccccaaaattttaaaatagttttatcaaatcaccatcccacaaaaagattttttaatataatataaaccttcccatttttgtggagtttcttttttttttcccttgtaaaaaagaaaatgtaagagtagaaccaaatggcataatagagctctaggcctataaataccaata

SEQ ID NO: 52086 - DNA, 459 bp, Arabidopsis thaliana landsberg
aagcatacaaagcagaagtcatcttcttcccccgtcactctctctctctctctccagggtttgaggattcaggagagatcgaagaggaagagaagaggacgatggtggctcagcgttgcagaagccaagagaagagagttaattgagttatcggtggtggggcgttgaatctgagtgggtccttctctccttttcttatttgacttttattttacctttgtcaataagtaaatcacattaatccaattttttactaaacttgaatttagtgtacataatatgagttcctcaattaatttactaatcatcgagtacataaaaaccatatattaaaattttaaaaaaatcaacaaaagatttgggacagtaaaaggggaatgctaagctactttacacatgcaatcaggagctggataagtgtaaatagactgtttctgtttgcgtagacgaagctggcct

SEQ ID NO: 52087 - DNA, 104 bp, Arabidopsis thaliana landsberg
ctcttatggctaaggacgaggatgatgatttggatttgggatccgggaagactagagtctctatcttcttcggtacgcagactggaacagctgagggatttgct

SEQ ID NO: 52088 - DNA, 1326 bp, Arabidopsis thaliana landsberg
ggtttattatggttagtgagattattactgaataagggcagaaagtttgataacggctggttagagttaagggaaatcagatgaagttatttttttattttttatcgggtataaattacatgattgctatatcattttactaaattaagaaaaaaaaattccggttgttggacataactaggttttggttcttcttcttcgtttttttcatgttaaagtgtttaattaggttttggttcatttggagatttatgaaccttttatagtctggttaagtctgggtttggtagagattcaataagatttcttgattctctttcaggttatggtctggttcagtctagtttagttcaatattggtttccttgaaggttgtgtaaacgttgtctatatttaagttaatcaccttttaaccaaaaaaaaaagtttatggaccgattagttttttttttttttttttttgctatggttaggtttggatccgaccggctcagttccaactccaagtgtttagaagtagcgctacttttacatgctatatataggttagattataaattataaactggtaaaagattatagatactgcttccaaacttaaaagcttaaacataaagaacacacaaattatgagaaacataaccttctgtagtgttttttaatggttgttatttggtggtgtgaaaaagatattccttggatagaagacaaaaagagaaagtgaatagtgattttgacctatgattatcgtacagatggagaataatcatcatgtgggagcagaagctgagatggagatgtcacctgctggacaaatctccgacaatcttccggtgactctcccactacttaattagccaccttaaatcggcggttgaaatcaaaatccaaaacatatataattatgaagaagaaaaaaaaataagatatgtaattattccgctgataagggcgagcgtttgtatatcttaatactctctctttggccaagagactttgtgtgtgatacttaagtagacggaactaagtcaatactatctgttttaagacaaaaggttgatgaactttgtaccttattcgtgtgagaattgcatcgagatcttgagtgtatgtgttcttctcttctgtcaaaaacttgtgtttgcttcacagtgaagaagcctacggcttattttgcaacagggacgtggctctctctctctctctctgcgcgttttttctctcgtcgtaattaatttgtttttatcctaaacgcgtatggttggcatgggttttttgggcctatgtcggtcacattcggcccaataagcttagttcttaaagtca

SEQ ID NO: 52089 - DNA, 2309 bp, Arabidopsis thaliana landsberg
  unsure (1)..(2309): unsure at all n locations
tacgcatccctaaatgcagttggtcaagtcgtcaagtgaggtctaaacacaatcgctctctcgacccactcataaaagtgattcacactactcagatcccaaacaagccccgaattatcaaacaactgtttatcggctcggctatagaatccagcattgatcgcactacttcctccaagaacacgacctctagcgttaggagctccgtcctcatagatgaaagtctgagccggcgagtcgaaattgttgacgtcagtgagagtggtcaaaaaaccgtcgtgtgacatcacgttaggtctgttgtagggaacgccaccgcgttctagcaggagaactcggaaagattacgaaagtgtgtcggctagtggacatcccgccgttcctcctccaacgatcatgcaatcgtagtaatcctccgacgcaaaatcagttgcgttcgatatgaatcgcatgaaaccgggagctgcaacgaaggttccaacagtaagaaacaacaatgaaagagaagaatctcaaaatcaaattagggataagctaaacatcgatcatcgttttcttgctattactcaaaagcgatacaaggaaatcaaagaaacctcatcaaaaacttcttcgtcgccaaagattatgatgtttcaagcattaacatgagattctacagaaattttctcggaaacttacgtcgattaacgcgtggccttgcattagagcgatgaactactccaagaagaagaagcactacgagcgccgtgtagagaagagaagaatcaatccgtttcgtcattctcgttcttctgttgaagattttctcggagctgatagaaaattaaattttctcgggaaagtgagaagtttctcagttagagagagaaacagagtaaaagtagttaaaaaagaagactcaaattaaatggcgcttggattctgttatagagagagtttctcagctctggaactctgatataaaagtaatcacagccgtcgatgaggtttagaccaagttgagatcagcggttgtcaagagaagtagtcctgagctctaccgcagtggataatagcatgcaatatatttgacgccgttagcaaccgtctctggaccctttaacgtcgtcgtcttgttgtaaaagtaccgatttgataactgccaatcaaattccggttcaatccggttaagggaagataacaggatttagccacgtgtcatgaggttgtgcagattagactgtagccagtgttatcactaccgtctaaacacagacagagagagagagcaaaaatggctatggcgattgcgatgttaccggagctcttctcttctccttcgattctaaccagcagaatcagatgcggagccaccgcaaacagcggcggcgcaatctcatctacttcttctaattccgatcctaggagaggtgttcccttgtataagcccaaatcatacgaggttctagcctctgacgccgccaattctctagctttcgctctccaggattcaanaatctcgtttaggaaatcgattttccgtaatctccctgctcttactctatctcaattatctgaattttgagctctgggttcgtgattctaatggcttctttggctctctctgttcatgtgtagacctttacccaggagcattcttctacaagtaagctttgttaactgttaccattgtgacttagtttttagcgaattttaactgtgttgttttgcaaacattgtataggttcttcagacgactttattgatgctaatatacaactggccgtgactgttgttcgcaaacttcaggagaaaatcgagaccagagcatgcattgtaatctttctccttcattactctatatattactcatcctttttatttggttcttctgacctatgaatgatcaaacatgttccaggtttttcctgacaagcctgagaagcgcagggcttcgcaacgcttcaaagcggcatttgattcggtacaaatagaacttccactttgctgcaagtttttgcacatgttaggaataagatattgaacacttggatcttaacaacggcttatttgtgagtgtctcatcaggttgatggcataagtattggctctctagatgatatacctggtacttctgtcaccaatttctttaggtccataaggagtaccctggactttgattttgaagatgaaaacgaaggtatagctaaaactgtcctttttacttattttccccgatggattattgcattttagtcatgagaaaatgtgttcctacaggaacttgggagcccaaggagcccccgagcctttatatactttatcaa

SEQ ID NO: 52090 - DNA, 591 bp, Arabidopsis thaliana landsberg
actagtttcacgtgttacaaaccattcccgatctaaaaatagtattaagtttacgaaaaaattctatatattgaccaaaaagaaaaggattgtagcggaggcttgcctacatcataaggtggagccactaggaggaccacaaaaggagtccaaatgacttttgataagtggatgtcacctccaattcgaaccacaacttgatttctataatcattcttacattgaatatttcccctttctctttaatcgctaacatgcgcccgcaagtctcactttcctataccattgttttgttagttggaactccacaaaacccaatttcattgtacttctttaattcactcgtttgatacttttcactatacgacatgttatcattatgttttgttaaaatgattagtaataacgcattaccttatagtcttatagataaattcactggcctagagatttgcattacaataccctcatttgtttgcatttacttaagtttcctgatttttgtggttttgaattgttgctcaaagcttatgaagcagaaactgaatttacatatgccacttcaaattatgcttaggtgtcggttaatct

SEQ ID NO: 52091 - DNA, 322 bp, Arabidopsis thaliana landsberg
cggaagcgccggagacaatgaggaagacagagccaagccaaagggccagcaggcagcccaggtaggattctaccagacaagaaccagggaccaggggggggcgggggaaaaagcaacaagacccgagagaaccccggagacgacggatgggacaccgcaggacgagcagcggagcccgagacacacgcacggaaccgggagcgagaacggagccacagcagggggccgaggcacggagcccagacgcagcgaggagccagaagcaggggcgaggaacagaaggcaaggccggagaggcgagcggcccaggggggcaagaaca

SEQ ID NO: 52092 - DNA, 1142 bp, Arabidopsis thaliana landsberg
  unsure (1)..(1142): unsure at all n locations
atgctcgagtttatgtgtctctaaagactagttatcacacaataattttagcactactttcaattcatccaaaataaaaatcgtaactaaggtgtgtcttaaaatttacgattaagaaatcaggaccctagctagagtcaagactatagtatatatgtaccaacttcttttaatttttgtcgatcatcattaggcatgacggattaacaaattaaatcagtagttttaagtcttcactattcatggatagataatttgacgactaaagtaatcagttatcgaacctctggagtctggatagatgactacataaggagtaatggagcaattgttgcaatgtccacatattgaggtatacttaattggttatttgtcttaatgaaaaacaaattcagaataatagtttatactagtaaaattaaaatattgcctcaactaataagttgttatgtgcaattatatgtggttgttgtacatgtgaccttaactaatattaagtgaaacatatacatttaaagataacgcctaaaatttaaatccttttttttttcttaagtccttcaaaacattctcaatcatatgaaagtcttgtcaatcaataaaagtccaaaatatatattttagacccaagtggttttagagaaaccccgttttaaataattactatttcattaaatttacttttacatttctttcagaatcgaaatcgccaagaatatgaaatcaaaatagattacgatgaacattaattacaattctactattatcgacttagctggatcaaattttcagcatgtcatatacattgtaatataaattattaaatttacaacatggcaaggaatgttacaaagtcgctcgcacgcctttgcaaacgtttctaagcttaatatctaaacaaataatataacctttgactttcgcatgtattcggcatgtatgtgaggtgtattatctttttaggctctaaattatatttcgacgggtggctatatatatatatataccgcatggtcgatcttaaatgactcacaaccctttccacaagaagttataaaccaatacatagaagaaaacttccaaccccaaaaaatgatgaagggtgccacgtntcatctcttcttgcgcttatctttatcttc

SEQ ID NO: 52093 - DNA, 134 bp, Arabidopsis thaliana landsberg
  unsure (1)..(134): unsure at all n locations
gaaacacattaacagtccagaactagatagtatgccactaaaatcttgttatacaatatttcatannccaagctgatatccaacagtgaggagtccatcaggtgttcactgccacagtccctcgtcctcttggc

SEQ ID NO: 52094 - DNA, 596 bp, Arabidopsis thaliana landsberg
ggcagcgagattacggtttacggggggtccaaacacaaaagaggacgcgaatgaatgaatgaatggatggatgggaaaaggatatatggcaatgtgagcaacagagcagagtaggtgtggctcgctaaagaacgaaggagcatgcatggcgatggcatggagaagtgtgagcttggggccaaaggaaaggggggtggctctgacagcacccaccagatgcttcggtttgagcactgcatttagtagtggagaaaggcaccggtgggcgaggcgacgcccatgaatgaatgatttcatgagagctggtgaaagcgcgcattaccagcactaagcatgagcctgcctgactgtacagctcggcagcctttgccctgttcatgcgagtgtgtatccgattccggtcctcaattgacatcctccccctcccctaagaatttccatcccaaacgccagcgacaataatgctcgccggttcggttcggttcggttgggtggagtggagttgtctctgaaagcggggctgcatgagaggaagaaagaggacggacggccttcgatcggcggcacaaccagccagccctgcctgcttgccagtt

SEQ ID NO: 52095 - DNA, 418 bp, Arabidopsis thaliana landsberg
  unsure (1)..(418): unsure at all n locations
gataccgaccgtataatagggtataccgtccacattaaaacgaccggctggagaggtcctgcgcgacatccatatactgcgctgctacagtcggactagcggtaaacgtctgggcaaaccagataagtacgggtagagccgtaacgaaacgccggccaggcaaacgccccgtagcatgatgagctgcgnnnnnnnnnnnnnnnnnnnnnnnnnnnnnnnnnnnnnnnnnnnnnnnnnnnnnnnnnnnnnnnnncgctactcccctggggtcgatcccgcacctggtagtagaactagtaaaaggaaataatagagcgatacccgtacacttcgacgccgnagcatataggagatgaaaagcgagagtcttgctgcgacctaaaataataggagctaatcataccgtgactactgagca

SEQ ID NO: 52096 - DNA, 580 bp, Arabidopsis thaliana landsberg
tgcaggctcacatggaactcctccatcacacacgcttccttcttctaactgtggaagtccagcttacgacccttctccttcaactccttctcacccttcacctccatcacatactccaactccttccactccatcacacactccaactccacacactccatcacacacgccaactccacacacccctccttgtaactgtggaagtccaccttcccacccttccacgccttcacacccttccactccttcgcacccaacgccatcacaccctccttctggtggatattactcatctcctccaccaagaactccggttgttgtgactccaccatcacccattgttgatccaggcacacccatcattggaggaagcccaccaactcctatcattgacccaggcactcctggaactcctttcattcctgctcctttcccaccaatcactggaacatgcgagtaagtgtcaaaacattcgctcttatacaaacatcataagacagatgatgatatcaattatcacacttcatgtgctttgtttatctcttgagtagtactggagcaaacacctacattgatatgg

SEQ ID NO: 52097 - DNA, 577 bp, Arabidopsis thaliana landsberg
ggggaggggggtttttgttaagtcatcggttattagagtttcatgtgaaaaaaccgtgaagtggatgtttgaggggggtgcatacaaatttttaacctatttgacctatttttactctttctttttttaacctagaaaaaaactatttcattaaaattaaaaatagtttagacttacgatgtgaatattatacacaaatgatctcatgacaaaaaagttaaaaaaaaaaaaaaaaaaaactaaaacaatcattcataaaaaaaattattccctatttttacttttcaagcaccaaggatgtagaatataatttacatcaaaagtttgaacccgaaattattcccatttgcgatctgaacaactagtgaagcccaattttagtaaaattgattgaattatttttaggtattcgtttcttttagcgatctattagacttaaacaagctaaacaaaaaacaatagagataacataaaaatactaaaagaagaagtcaacattaattaggatatctggtaataattaagaaccgtaaattattattggaaaacgttagtaaagattctctgtctactaata

SEQ ID NO: 52098 - DNA, 973 bp, Arabidopsis thaliana landsberg
  unsure (1)..(973): unsure at all n locations
cacagcgacagtctgtcagacccaaataacagaagttgatatcagctataagaacacataaaagaattgacatttacatgtataacaaagatcacaatggtatataactactgaagcacattattgcaaagagatcttcagataaaagaatgagtggagagtttgtaaccggagaagagagcatagagagctaaagcaatgaatgcgaagatagccatacttatagcagaagcagcagaatcagtgaaaatgttatcttgaccttctctgaatatgtttgtcaatggaattgcagatgatgcagctgatataagcaaatacgccacaatctgcaaatttcacttttttgcataaaaatcataactttacatatataaatctgagaattgataatcagtttgtggcattacctggtcgccggagaaatcgaccaaaatagaagtccggcgatcgaaaatttccctttttgagaaatgtgcaaatgtttgccacgcagtgtataatgttgaaataatcgaaatcgccaatacatatctgaagcaatataagaaatttcaaaactttgatcgatattacgcaaacccaatttcaaattccagtatcaaaaaacggaaatcgaacctgtactcttcgtagtcattgaagtttctaccgtaaccatgtttattagagaccataattaagaaagcaataagagagaacaaaagacagattcctctcgtaatcggagatgctttctttatcaaatcctctcttttccatctctgagtaatcgtcgacgttccagatgccggcgtcggtccgacgtcttctccgccgcagattccacgtcagtagcttcaaccgggtttcatgttatcgggattcgtcatattacagatctcaaaactttggtcggaattggttctgtttttaatgcgaagattcgggacgaggaatacaaacttggaagnaaagaaaactggttagtttt

SEQ ID NO: 52099 - DNA, 449 bp, Arabidopsis thaliana landsberg
attacatatgctatgtcaaggacttccgtggaaactggtatagaatagacgattctgaggtaagaatcatcttctgccaccgttttggttgactattatggatgttgacataaaccggatgtggttacgagaaaacaagaattttcagagatcttcttctgatcccgtctaaaaatactcgcaggtggaaaaggttgaactagaagatgtcctttctcaacgagcatacatgctcctctacagcaggtagagcctttcatttttcttgacaagaagaatatatatcctattgcagagtttgtgaattttctaggactgtattaagcgaaggagctttaacagattacgatatctggtattggtgcagggttcagcccagaccatcaaatcttagatccgaagaaagtcaagatgagaagaaaacagatacattgaacacagaatctaac

SEQ ID NO: 52100 - DNA, 1071 bp, Arabidopsis thaliana landsberg
ataatatatcctaaaagatttggatgagtatggggattatattctttgttttgttaactagtcaaatcaattaatgttaattaaatacgtatatactaaatcatatattcaaaaacatcggagctagatcaggttacaccagactctgatctcgactctagaacttatttcatatgtaaactatagccatgaaaagattttaacattttaccggcatattaacattttttcatttgtcaaaaacagagctcgtaaaagttaagagaaataagttaatacttttatatgttcttaaatcttacgttatttacgcattttagtctctttctcttatgattataacccagcttttcatttgtacaaacataaaccaataataatgttcattacagtttttggatcaaagttgacactccctgcaatttaaattagtatctagagtaccatccaaaattagtctatccatcagcccaagcctagcccaacatttcgggccgtttagtccgattaagatgcgagccttatctcttgaaagggagcaatgaagcgacattatatgtttccgaaatattcatcaataaaaaattgttgtaaagaaagaagaagaaagattcatcaatctaaactgtcattttgtgttaatattatataatgcatgttccttctcgtaacacttttttttttctttccaaaatttagaatttgcgtgattgcattgctgcaagctggctgtaatatctcttttaggtaaaagttaaactgttggaattgatcactactaaatcaaaccttttctgctatattattttgtgaatttacttctaacttcttcgtagatctatttaaaatactaatgacaataaattcaaaataaaataaaataaaataaatactaatgacaatgcaattggtggatataagaagctattggaatctgagtatgtgtgcatcaacttatcttactaatggcaaatgactcatagagcgaagccgatgacaagacttaattagatagatataatattggagttaatattagcctatttgggaatgatttctattatttctaac

SEQ ID NO: 52101 - DNA, 934 bp, Arabidopsis thaliana landsberg
aagattacaaggtgtaatataccttaacaaagggaatgactcgcaaaacagcagatgtagcctgtagcatttcaatgctgtcacctccaatgcataaatcatgggtctctgccagggtttcgatctctttttcactgaaaacaaaaacgaggtcatcctttctcaggtcagaagcaggagaatgaaagaaaccatgcaagtgtcagatctttgccacttgagcaatcattacatgtagagcaaaatattgtaagtcaaagttaaaacaccacaccaaggggagcacacacttcaaagacagttaaaaacagtagcatggagaaagagagacacaatactgctgctatcatgtgactacctaagattataaaacatgagaatgctttaattctagagtaactgtcctaaaaatatgactgcacctgtaggggatgatctccttctcatcaggtgacacccacttgtattcgttaccactccctgatcgtccaagaattaaaactgggtttgatacaatatgcacttggcctgcaacatgacaagctgtcaaagcttgatcacctgttatcatcacctggaatcatgaaagaaggataagacatcctgtgtatttaataatataagattgaatgagcatcctgcaaaacaatgagatgaagacagaaagcggaaatgaaagatccaaaatatatatatgtctatatcaatactcaattatagttctttaatggagtaatgacaaagctgctttacgggtaattctgtactgagtagaaaaggaactgaatgaaccactggtagtgataggaggtccaataatctatgagtgtgtgcgcattacaagatacacggtatgaattaccaaatcatgggatgaattcttcaactccaagagaacgggggctgagtatggtctaatggggcagttgaagac

SEQ ID NO: 52102 - DNA, 537 bp, Arabidopsis thaliana landsberg
  unsure (1)..(537): unsure at all n locations
tgacctttttaatttcttgaagaataatctgtactgctatggtttttttgcctcatatacagtaggaggttcgtgtaacagcgggggcttctttttttccttttcctgtttgtattttaccgcttttgccatttccgtcttttgtcacccaaatatacgacttttgtcctgtttccctcccatccaccccttctttttcctccatcaccacaaatttaccccctcttccctgtcccttcatcaaccctaaaaaaatctcggcttttcctcagtacttctacctaattccacccagttaaaaaacggtatatcacgccgtttcccctctttccacccaatcctcctcaataatcccataacattataccttcctctccacaccccttatccatgcaatccgcactcaaatccgcgcaatcagcactccctttggcactatctttaataaagaatagctntgcctccgtcaacctgcaatatgaaaggaacttatagccaggccagggccatggcggccatcaccaaaggaagccttcg

SEQ ID NO: 52103 - DNA, 592 bp, Arabidopsis thaliana landsberg
  unsure (1)..(592): unsure at all n locations
ccagacaggacaagggctgctggggccaagagggaaaagggccatcaagccacataggggggtgggagnataagcaataagcccagagcccaacacaccaacaggggggccggggggaaaaagaacaagggccccccccccacccggaggcgggcggagagcaccctaacccccccaaagccacagcgccggaggcacaacccggccaagcaagaccaggagcacagcccccaccgaagggacaagccgaccaaggcacaccaaaggcggcccggccgacccaacccaaggaccaacgaccagcacggcaacggcaacacccgaaagacacgccaccggagccggaacgaccgcggcagccggcaccagacaggccccccaacggacccccgccaccggacacagaagggacccaccccacggaccagacacgaaagacccccggacagcacagacggacaccaccgccccgcggcaagactgcgcaagaccgccccccggccgccaccccggcgacggggacgcccggggcacaggcaccccgcccccggaaacgaccccccaaaccgagccggcacccccgcacccaccc

SEQ ID NO: 52104 - DNA, 1302 bp, Arabidopsis thaliana landsberg
attgcttgaaatagatgttgactatcataatatctttaaatgaccattctttcggaaatatataaatgatggagccatttttataacttttctgtaatgattttcttagttaataatttaatatacgaagaggaatagtcgtccttaacatttaaaaaaaaaagagagagagatgaaatagtcatgaaaattaggattctatatcatatgcataattatcatacacctttgtacttcaaaaaaaaaatatatatatatatatatacggtcaacaaaaaggttttgtgattctgtccttatttgccttgtgaaggaatacgacaaaatagttggcatgtgtgctatcgtcttccacacgtgtgaatcattttttgtctccaaactccatcatgttctctttttttcttaccttttgctgtctcactatctttttcacttcccacttacaaaacactcgtgtgacttctttaaccttttagagtttgataatgcaaaactgattctccatttttcacttaagaaaaatgatttatattcttttgatccaaatgggtaatttgttcttcatatgcaccgttgggaagtttatgattgtgtcttcttctgctatccatctgcatatcataatcaccaacatattttcaaataagtctctgtatatcgtttaagagttaagtccaacttgtcaaaaagagattagacatttagatttatttggtccgaacgtaccattttgtctaaagtgtagagcactaattaccacaccctcttgtttgttttgaaatttaaagattacaacaaatattaaataattttgtatccatgtaactgatagttacctgaagcgagtgacaagatggtgaagaaaaactgaagtttcaagacgagccaaatcgagaccagggcacaatctctgaccacctccaaaaggactgaaactactcgtgttcatgtccctttcctattttgtgaagaaatgaattaaatatataattcgtattaagtaaaagattatatgttaaatatattttggtgatcttacgtacttgccatctccagggattaaatttgtagggagactcataataaagcttatcaagatgaactgatctgagataggccaagaaacaccatccttttggtatcacatatccttttatttcaacatctttcatcgcctttctcatcactccaattataacatttcccattctcagtgtctctgtaatcacctgatgataattaaaaatttaattaatcaccttgttgagtattaactaatgaatagggaaaagaaggaat

SEQ ID NO: 52105 - DNA, 546 bp, Arabidopsis thaliana landsberg
gggagccggtagccacaggcgagacgcgaaggataaggtgggtaaacatggcgcgcgccaagatggtgttgatgggccagctcggacatcggctggggaattaatgagcagcagccgcaagcctccaatcgctgccatgctccgaggagttaccagcgcggccagtgacaagatttttccgccgagggtctgtgtcgctgtttgggctgcaccctcttttcccctggtttttttttttttttttttttttttttttttttttggactggcgtattccaactccctcactacgtagtctcagtaacaataactcaaatcttttcaatgttcaaccgctccgtgtggccgttccagctggataccacgttggctacattgaaactggagcttcgctcggcccttttgtgcgatgcgccttctgccagtctttgtcgtttcaacctgggacatcgagtcacttattatcgccagcttgccaagagcactatgttagttgaagtaagcacacaaaacggtcacaagggagacccgacgtgcattccaccc

SEQ ID NO: 52106 - DNA, 658 bp, Arabidopsis thaliana landsberg
aaaatttctgtaagttttttatttttcgaaaaagcatcatttttattttgaaggactataggctgatcaaatacagcaatgaggtggttattcatacattcaaatttatttatacactttgtatataagtgaattcactatagtctaggttatttattgtaacataatttgatttttcttctacatattcaattttgaagttcaaaactacaaatttataacatcccaaacattaattttatttagattaaattggtgtaactcatatttattaaaaacaaattaaaaattaaaaaaaaaactctttatatattaataaatattaatttatagtaaaccaacatactataaagtaacaaaatattatagtctcacactattaatttctagagattttactatatacttctccaattgtgttagtttacaaaaatgcatgcatgtgctatttaatttacttttgattataaaaattttataaggcagaggagaataagaaaacgtacggtaagtacaatataatgttttttttaggtttttttttgataaaaatgtaagtaattataataaggacattgttaagagcatgaatggtaacaaatcaatatgtattcatgttagattacaaaatcaatgctcacccagttgtcatcaacac

SEQ ID NO: 52107 - DNA, 586 bp, Arabidopsis thaliana landsberg
aaaaacaagaaatggtgaggcatgagttatattcaaacttctgattccatatcaacactcagagactactttacttacatcttgatgcggccgctccccagttactaattcaaggaaaacacacaaaataataagcgagaagaaacggtagaaggcaatgaataaagcaataccataacatcaacatacatacctgtataaactcgcctatcaacaacatcgcgatactcttgttgaatgttctctcgtagaacctagaacaagtcacaatcttagtttagaataacagtttccataaacttttgaatagttaatctattccttcctacctgaaactcggccatcttgtctttcaacttcttctttaaggaactgttgcacagaatgaaagctcataaaggtcataccaaataatatatatatatatatacattatcggtttaccaagttaacagcatttgaatgaacaacagctgaaccctaccctaaaaacaaaggtgtcagaataaattatcttattgaaaaataagaatgctcacagtgttgttgctgttctagatcgatccacaccagatccttttgcaca

SEQ ID NO: 52108 - DNA, 539 bp, Arabidopsis thaliana landsberg
  unsure (1)..(539): unsure at all n locations
cccccccccccccccccccccccccccccccccccccccccccccncccccccccccgcccccccccccccccccccccccccccccgcctcccccccccccccccccccccngnggcncccccccctccccccacagtccgnnnncccccggggggncccacctatcccccccaaaanncgccccccnnccnnccccccccnccccccccccccccccccctccncctcctttccnccccccccccccccccccccccccccccccccccccccaccccccccccccccccccccgcccccccccccccccctcccccccccccccccccccccccccccccccctccccctccccccgcccccccgctccctctcttccccccccccgtcccccccccccccccccccccccctcccctctccccctcccccccccccctccccccccccccccccctccccctcccccccctcccccccccccccccccccccccccccccccccccccccccccccccccccccccccccccccg

SEQ ID NO: 52109 - DNA, 892 bp, Arabidopsis thaliana landsberg
ccggattacataagtggagagttttttcttcttcttttataatttttttagctttagctgaaagaaaatgaagtgattgcctttttgtatgcaacaaagcaattagcttttacctttcaagattttcatatcacaagaaaagctaaaagtgaagtccaccctgtagtttttgataagtacattttatcgtcacgtccatgcacttgcactatcatataaaaaataaaataaaagtaaaagaatgatttgtcttttcttaggcttcaattattggataatttatttcatcaaaaacttttcttttcttttcttttcgttgataataccctctttttccatgaagcttcgaacgctttgttgactagtaaaatgtgaagactccagattcgaaataattcattgaccaaacaaagattcgtcgattgatagttacggtacggttaaaattatcaataaagatcaatctcttaatatatagtttcacatcatgcaatcaaattttctttcaccgtggactcgtgagacagagtgaaaaaaagttgtggttacttatttgtactgtctaaatcttttttcatatatacaacaaaatgatccatgcgtacgttaaaatttgtttaaaaaaaattgaaatgaaaattgtcataatcttttatttatttatttatatagatcatttgtgatcgcgccttatcgttggtaaatacacgttctatttattttttgctttaagtctgcagccctaagattttcaggataatataaaccaagatgattagagccacgtgagaaaactgctctggcttaatttgtttctttatatcactgaactaagtttggggtgggtaattcattggaaaaaatttcatatctcttcgaattgttatcatgg

SEQ ID NO: 52110 - DNA, 1001 bp, Arabidopsis thaliana landsberg
tttggattcttttccttttcctctttcatttaatttaacctttgaatgtatgtttgtgttgggatgggtataatcatcgtaagtgctagaatcagtcgtaagaaaatttaagagactatatttgacatggctatcaccaagaaatgttttgccgcatttgtactcatcctcctctttgacatgcctttcgtttattgctcggaattagataacacttctggtactatcttattatgaatcaaccacttttttcttatgagtttatatatatattgatctcttgattattactataatataggttttgaaataaagcaagaagataaatgctacggcccagaaccgtgtaaaaatggttacgaaggatgcttgttcttttgtgtaagaatagcctattacttatatggggaatgtactatgaagcctgatcatcaaaagcattgttgttgtgtgacaaaataatctaataaaatgttgatatttactaaaagcaacataactagttttcatacgactttgaatattcaaaagatcgagagtgaaatgcacaaagcataccataattgaagttggtttgatttgacacaatcgatgtttctcttttgcatcttttcaaatgaaggaattgcaacatttattcatttttcgctcaatttggatgaaatacaaacgttgcaatatcttggtgaaccatttgagatttattttagaaaatctcgaacttgggtcctaataataattaaaaatttagtctttttcactctagaaaagtcataagtaagaaaaattagcgatgaaacaattatttgcaaaactcatcacaaaagacagcttgtcttaggaatgttcatgatctccgatgtcgctaagtcatggctcgctgatcttgaaaaactctgaacccatgatgttttagttcaattttgtcgtcatccttaatttttccggtggtgatcaattgttcacaaccattgaataccttaaaccataaaacaaatttt

SEQ ID NO: 52111 - DNA, 623 bp, Arabidopsis thaliana landsberg
tataacatggtagtacagtcgtgtttggactcacattcattctttgttttgtgttctgtgatggaataattatattgcagcttgacataagaggagatccatacgggtttctagcggcgcatccattggcaccgcttgtatcgttgcatcaccttgtttacttagacccaatgttccctaacaaaaacccgatcgagtcgttacagaccctaatgaaaccttataccttagacccgaatcgaatactccaacagattaattgtcatgatcgcaaacgtcaatggtctatatccatctcttggggatacaccattcagatatacacttacttcttgactgctacggagctgactacgccgttgcagaccttcaaaacttggcggtcttccagcgatggacctttcgtgtttaacactcggcccttgaaacctgacccctgtgagcgtccggtcacttatttcatggatggtgccgaggatgtacgggatagtgggacgaaaacttggtatagcataggggataagaactatggtcattgcggaaagattgagcatactcgattaactaaagtgaagaggatattggtgacttcaatgaagacggatcctgagtattggaacaag

SEQ ID NO: 52112 - DNA, 495 bp, Arabidopsis thaliana landsberg
gaaacaatatcacacacattatcaaaaccaatatagcaaactactcagacccatatagcaaaccaaagtaaagaattgagcataccaagttgatccaattcaacaaccagtggctcaacttgaagactcttgaacaaggacttcacttgagacgagtatcttcaccaccaaaaagaacaaacccagtaaaagtatcaatattgacaaactagatcataaattaacaaaacccattcctctaattgaaccaaaaagtatagtgaacctacgagcaccaggttttggagtaaacaacgacagggttctctgccacagtcgttttaacagtctccttcaatgtcgatccagacgaagacgatgatgaagacatagccttaacagaagaacaacggagtggcggccacgacgcgattccgataactgtcggctttagacatctcctgaaaggtaacatgcccaagtttctgattccgcttaacatggagaaagagattg

SEQ ID NO: 52113 - DNA, 943 bp, Arabidopsis thaliana landsberg
catgacttccaagaggacaattcattctccaacttttccatgcttagctgcaagtcatgaaattttgataactctgactctgccctctccctacggctttgttcttctaataagttcacattcaacaactccgcatctaaatgccgtgattttaactttctagcttctcgcacttcagcttcctgatacaattatcaagaatcaaaatcgacaagaaaaacaaaaactaaatagatattacatggaaagtatagaagtcgaaaatagaatctacaaatagtacatgtcttcaaatgatgaaaagtatgtgagtcgaatttacgatcaaattaaaatttgacttgcataactagtgttacatgaaaaatacatcattctatattacctcacttttcttgaaaagtaaactcttttacttatgaattgtcttagatagcctaagtaaataagacgaccattttaagaaaaaaaatttaacgagtgttttgagtaaatttcaagtgtttaaaaacttgcataatctctctccgtgatttgctgcttatgagagtaatcaacagaaaatagaaatcattgattctgggtatgtaatgcaaagtttctcatggtaatcaagaacgagtacagcttctattggtgaataaaacagagagttatgatcaatgtcctgaccactttcatactcattttcaataaatgattcatcttatgtaacaactttgtaaaatcattactcgggtagactaagaactggtaaaacttacatagcgtttaagttctttctgaagatgtttaaccaatacactgttatctgaagaagatgctgcctccgaagtgaatgacgatagcttcttgtctacttcagtctttttttgcaaacacttgcttaaaagaattatatgagaaagctaaataattaccaaagcaatgatgactattgact

SEQ ID NO: 52114 - DNA, 1248 bp, Arabidopsis thaliana landsberg
aggcacaatgcattgacatagtagcaccgaacagttgttcatgttacccttttttaagggggtgatgacataacgatgtcgtttagctgagtgtacaccgcatccacaaaacgatgcgtttcggtaagaggcttctccattgcttccttgagctcccgtagagtcgagcaatacgcttcctattatgtgaatcaatttacaagtataagtgctactgtttttttcttggcaaaataaacttagaatacttgaaagtcaaattaatttgcaaaggaaaaaataaaagaacgtgaaaagttgttttttgttgtgtaaatatgttttggcagggagaaaaaaaaaaaagaaccatgaattgatcaagttctgaagaggtagcttcggaggaagagtcagggtggagagagagtttggatagggcaagatcatcagccgtgttcatgatctccggtgagtcaaagtcgccggaacacacctggtcgtggttgggtccaaatacataagagataaacatttatactcatacatcactttaataaaaaagagagagagggaagcattaagaggggtacctttaaacaattgagatgtgagtgaagaagaagcccatacaaagggtggcttgagattctcttctttagaatctcttcttcttcttgtgcttcttcttttagactatgattaatctcttgtttcatgttttctaagatactgttctcatctttcttcacatccatgtttaacactagtaaatttcactgtctcacatgctctacaagtatgtgtgtatatatacacacatgtatagaaacatatctaagtgtgaagctagggttttaagattactttctggtcttgttgtcggtctacgagacattactgtacaaaaaataattgaatcatacgataacattagtcattggtcaaactctggtcgacatgtcacgtatcatatttcataactattaattaagatgctaacaatattcagctaaataaaaacaaatttatgggttttataatctattagaaatgaatttgtctcataatcaattgtcattgatttacacataaaaacacaataaatgtgatacagaataagtaaaagttaaggagatgaaaaaggatgagaaataagcaaaaggagatagagatgaagtgaaaggagaagagaggaggaacagtggaattaagaagaaaagagtgaagcattgtatcattgcttacgaaagcactttgagtcagact

SEQ ID NO: 52115 - DNA, 1065 bp, Arabidopsis thaliana landsberg
  unsure (1)..(1065): unsure at all n locations
atcgaaccaagatctcaagtgcattgtgctttaaacaaggtttccttttccactcaaaagaagacactggcttatcgggatataggtaataaaagttcatgaatctgtctccataaagaaagagtagatatctattgagaattgtattaatcattctgggccgttggatcgttttgaagattaggctgagcaagctggagattgtaagtaggatcaatctcagaagggagtgtagcaagctgaagaacgctgtttggttgttgtnnnnnnnnnnnnnnnnnnnnnnnntactcccctggtttatagcactgaagctgctctataaactgttgatactcccctggtttggtatctatcccagcttgttgaaactccatcgctgcacgatgctcatgaagctgcaagaaacatcggtttatgtagaaatatgttattccaacgtaaatgtgaaaacatattgacattggctagtaaccaaactcacccaacggtacatgttgttgttatcttcttctagcatcctcctctgatcatatgcataacacggtaatgattattaaacaagcggtataataagattattagaggaaattagagtttaaaaagagtgatttgagagtgacctttctgcttagattctccaactgttgctgcattaactcattcttcaatatattaatagcagagatcaaacaaaagtgtaaccaatatagttttaagagagtatatatattgatatggacatatatttgcattaccttacgctcacggactttgaggacagaatgttcaagttgtctctcgagtccgtcaagctcattaggaggaatggaggctaagtcatgtccatggaatggacgcagacgaagctcaaggttacatgtctctcttcttagtagttccatctcatggtgcaattgctcctatacacaaaaatacaaatgaatatatcatatgtttgttaagaaaatgtgtgatttccttcgttgtcaattggtaacacaaaggaaaaagtatgcgtgcatatatatacctggtcgtcatgatgatcaggaagtcgcaatc

SEQ ID NO: 52116 - DNA, 1071 bp, Arabidopsis thaliana landsberg
aattgtgaacaaactcccttgttgataaggctttgtgtaggtcaagtgatcagacttacaaacactcgagcttacaaaggatgttgatgcagaagtttccttgatttgtaacaacattaacagaccaaacaaagcagtaatcaccaatcttgtgaagctcaaatcatctccacccatggttttggttttatcaacaaaatacacaacttcaattatccatttataaactcagttatgagaatcttttgagttcagaagattttctctaaacctgtagaaacaaaaactcagctttagaaagcttccaacattagggttccatttcaatactatagcaaagatccagtaagagatttcctaaaccctaaaaaaaactctcaatttcggaattaaaaggtttccaagaaaagaaagaaaacgagaaatcaattaagcgaaatcaaaacagaaaattttttgattcgaacttttgtagaagagaccaatttagagaaaacccaggagagttaaggaagagaagaccaaaacctggaacacgatcttgtagctttgacttgactgtacagtatttgaatcagtttgaccgaatacaaaagatttattctgttttcagagaagtatggcaaaagaaagaagaataactaaagtacttttgtctgaaggagaagagttagggacgtggtaacgatcttatggaagacatcgtgtggaaaactttgaaaattcgtgttctgtttttttgttttccgtctcaggaaagttcgtgttgttttctctgttagatgatgggaatggaaaaaaaaaaatatatatatcaaaaaatcaaattgaaaatagtttttgtaaattcgaagcaaaccggcggttgaaccagaccacaaaccacaatgattgatagtcggcaaataattattgaaaactagattttaccgcgaaataatttatattttaaagttaccatatataaaaattttaaaattgtatctattatagtttacgattgttaacgacaaaaaaaaaatagtttacgattattattaaattaaataatgatatatcacgagtggacaa

SEQ ID NO: 52117 - DNA, 516 bp, Arabidopsis thaliana landsberg
aaagtaagaacttttaagctctttttaaattttgataatttaggctctctctaatcagcaaacggttattgaggtgattactgaacggtaatgagttaatgacgattcttgtcttggaaatgaggtcccgcgagatcatagaccatttaaatacggcgtcgttaagactgcacagtctcacacttgaccaaatcgaatcttcattatttacttattgttctgcttcaagaatctaacacgtaccatatgaaccatgaagagaagcttttttgtcactttcttcttttactttttttttttttcggtttatcgattactttccagcacttaataaccgtcattaatcatccgtcatgtgtctatctcaagtccattaccattaattaaaaaatcaataccttttatttaaatttttttgtaaaaatgcatggttagaaatattttagtagttaaaaactgacttttggatcttaatttcctaacatacatacgatttttcatgttacttaataaaac

SEQ ID NO: 52118 - DNA, 440 bp, Arabidopsis thaliana landsberg
  unsure (1)..(440): unsure at all n locations
cactttattcccctagtgagnnnnnnnnnnnnnnnnnnnttcgatatagagttgtccagacactgttaagggtcgtatggacgcgcgttaagataggatccataggggtcccctctggacctcccggagtccttgagggaagagaaagtaggaaccacacttggatgcacctgaatcgcctcatctatccccttgaggagaagtttgtgtcatatcccggtccgaacatgatgatgacgccttgcctatgtgctctggaggagccacacctcaggggcatgcgcttacgtgcacagtgaaccatcctagggcacctgagctcgaagtcgcaatctacggtcagagccgattcccgtgcgaatatgttacctgctcacaagctactcaacatacgagctctggaatgcatatagcgcaaagcccgggtcgctctaacgagt

SEQ ID NO: 52119 - DNA, 689 bp, Arabidopsis thaliana landsberg
  unsure (1)..(689): unsure at all n locations
atttaccccaaaaaataatgtttggtagagagaaaatcacatgaatttttttattacgttatgggatccaatacttttcagtgactgatagaaagaaaatcacatgaaaattgttattacgttatgggatccaatacttttctagtgactgatattatatcttacatttatgaccaatttttgtttacatgttttcccggtattaaatttcatgtgcaatactactacttttataatgatattttcagcttttttttttttgatgaaaatatattttttatctaaaaatgtgatattttataatactgtataacataattatacgaaaaaagcaaattgcattttggtcaatgtatttagtttggtcacttggtaattaatttaaaagtcttaaacaacagagaatatatgcaataggcttattaaccctccattttgacatctatcccttaattattactactatattgaaaagagattccggaaagataagaagcaaactttctcatactcaaaaacaaaagtcgaaggctcaaacaaaactctacattttgaactcaagtggtcaagaaaatcaaacttcctaagatagctggaagtcattaaaatgaatatgtaagttaggaaaattgcttaatccaactataagctncgataaaaatggaaattaggtaccaaaatggaatgct

SEQ ID NO: 52120 - DNA, 1039 bp, Arabidopsis thaliana landsberg
  unsure (1)..(1039): unsure at all n locations
tatatatgagtattaataaatggactatacttagtaccgtatgatttgttgcctcgttgaaataaggattaatagtagtactagaagcagaaactgaagctgctctagcgattctatgatcataaaggaaaccttggctcctctgatgatgatctgattgaagaagatactgatcgtagccgttcatcggaggaggaatcattgtgtatttcgaaaatccaccaccgttggatcgaactacattattctgatcaccatccaaacgtttcttctgcagttttttacataaataaaaatcaaaactttttcaagtgcaaaaactatatatatatcaatcatgttgatgaaaacgattaaaaaacaaacaaaccttgaagcaagtgtcacagcgattattggaagaagcgttaaacatttgaggatttgagattgaagagagctcatgagtagtggaggaggtctcaacaaaaccccatggagaaataaccgggtcgatcataacctgacccgacccgactccaccacaatagatcctgttgctcccgagtgagcttgggaagccttgtagcacaacacccgggtctaccggtacgggtaaacgggtagcgttgttagagatcgatgctactgatgacgtgtctccgactgtggcggcggcgagttgcttcttttcttcttcgattctctgacgctcgagctttgctacacccattcctctcaacgttggtttcttctgtttttgctgacctgtcttcgatcctggtttccgaccacgactcttcagtgtctctgtccggatctcgccggagctattgacgacaagacgggtgtttctcagaagatcgtttgggtttccgacggagttttgatctgttgacatgaagaagagagaagtcgccattgatgatgatcttcttctcggaactctttttagatagagagagagaagggaagaggtaaagacgaaagcnttaagtgtgtgtgttttggttctgctctctttttgngtggtgtatctctttatcggtcatatactagc

SEQ ID NO: 52121 - DNA, 548 bp, Arabidopsis thaliana landsberg
gcggtcaggtcggcggcgggctcgccatctttttgccgttttcacgttgagatagacgtcggcggcgccgtgggcgatttccgcccgcgcatccagcacggggagaatcatggccaggcgttcggtgtcccagcccaccaccgcccggcgtggcgtgccataggacgaggccgagaccagcgcctggatctcgcacagcaggggccgcgtgccttccagccccgcgaacaccgacgtgcccggcgcggcggaggtgcgatcccctaggaacagcgccgaaggattggtgactttcgccagccccgcgcccgtcatctcgaagacgccgatctcgtcggtggcgccgaagcggttcttcaccgcccgcagcacacgaaaatgatggccgcgctcgcccttgaaatagagcacggcattgaccagatgctcgatggctttcgggcccgcgatctggccgttcttggtcacatgccccaccagcagcagcgccgagcacgacgccttggcgtaacgaacaagatcgaagctggcggtgcgcaactgcgccc

SEQ ID NO: 52122 - DNA, 658 bp, Arabidopsis thaliana landsberg
attgaaacctgtaacgagaaataaagatgactatctcaatgctctcacctttagtaagaaacaccactacccaagaatcatatttcaaaatggccataagtaaactatttttcagtaattactcccgcaagatgctttgtctagatctacacacctatgatccacatacacatttctaggctatatagtacatagacgattgtgagaccaagagagtgagcgagaagaacgaggggcaataaatgttgcataggccaacataacaggtccctaatatggacatttcttgatcaaattcaccaggtaaaagctgatcttaaggagctatgttttcattgacaatccaataacacataaatatcaactcagaagatgcataaactgttgaagagagcgagggtgtagattataccagatgcaatcccagaagccgcaccagctgcggtgagagctattcttctttctctgttgttttccatcatgagtgcataaccgttggcacatgattttccaatgtcaacgctaggtccctcaggacccagtgaacatcctgtaccaacgatcacagcagcttgcattgcctttatcactggataaattccagcaagaaaatctagtccttgtctttgagaagaattagattgccttatttgttcta

SEQ ID NO: 52123 - DNA, 580 bp, Arabidopsis thaliana landsberg
ctggcgttatatgtttctgcactctgcatgtatctacattctttgaccagaaataaaaccaaagaatactaaattaactgcgtgaaatgaaaaagtattcatactaacaaatgttataaataagaatgtaccatttgcgtcatcatgttgatggtttgtgtgtctttcagctggagtgtgtcttttagttgacacatgtctctttcatgtaccatcgcattctctttgaatgcagtctccatctgaaatataaccataaatactaaacaaaatcatggagataagaataagaattgacgtctacaagtttatgaacacgaattaaccatttgtttcaccatgttcatggtttgtgtgtctttcaataggagtgtgtctttaagctggctcatctctctttcatgtgccatagcactttgttttaaagcattctccacctatatggaagccagagaataagaaattaattgaatgttggaaaaatagtattcaagttttcaaagtttatgaattcaagtttaccatacgtaccatcattttcatggtttgtgtgtcttcgatatgactcatcttttttcat

SEQ ID NO: 52124 - DNA, 663 bp, Arabidopsis thaliana landsberg
gacacttgaactgttccattttgagactgattgctccaaaatctttaagataacaaagcatctagaggactgacctgatttttccatgccattagatgacgtttttttttcttaagttagaaatagatttcttagttttaatgtatatctcacagtctcacattctatatggtttaataaacttttcatatgaagtatcaagagttcaaggaaatatcaagttcagttgatcaaaaatatcaatcaaaaagatcaagaaaattttgtcataaccacgtggttatggtctgttggttttatgtattcatcaatgaaaaagatcaaccagatggtatctaaatttggttaaaacagtaacactagtacgctacaatcataactagtaattacgatatgcatataacaatagtccaaacttcaagcgttaactaaaccttgttttggtgtttctaaagagagaaaattagcaaatgtagtcaaggtcaacctacaagaaaaggctatggatatgttccagctatagccaaccacatatatggtttatgcaaatcattgtaatcctttagtgggaaataaacacgcttattagctgatcaataaaataatagagattagaaaaagcgtaaagaagtgataataaaagtgaaaaaagttttatattgg

SEQ ID NO: 52125 - DNA, 411 bp, Arabidopsis thaliana landsberg
gctcgttatttctaatgttttagaaacaatattttaactttatataaaattctattagtattatatatatatatatatatatataaatagttgttagctttatttacgatccatatatattaaaaacgtctcattgttctattcgcggtagtttagtcctcagaatctctaggaatggtcatgaagcgagagtatataacagacgacgaggtacgtatccaatattgataatgcatttagcaggttcatgtgtgttaagaaaaataaaataaaaaataacatattctaatccctaggaattttagctagaaaaataaaataaagtataagatgataaaactaaactgaaaaagaaataattacactacagaaattggatgttctctaactatctattagaatactatagct

SEQ ID NO: 52126 - DNA, 732 bp, Arabidopsis thaliana landsberg
aaggtttataaacatatagatgagatgtgaaatctaaaaaaaaaaatgaatttagagtttagggtttaggtcggatgaataaaaataaattaaactgaaacaacttttgtcaaagcaaaatgaaaagaggaccataattaccttatttccttgttccaacccataccctctatatccttctacggtcgataggccatgtgcgaactgaataatcaaagttcaagacacatgttactaattaatgactactaaggattatttcttgtcttccaaaaaaaaatttagaaaattctcttttacatatttttccttgtttaattagtaacttaattaccaagtgatagtttcattctaaaagaaaaattcactaccttcacatatataagaaaataccggaaaagcactatacattaatcaaagtagttaacacaaccaaagtatatgaaagtcagataaacatgcactataaagacacaatggacaataacaaaaacatagatatatgagaaagaaacacatgtcttcccttgatgcaccagagcaattataaaaactataattgaactagagatattacttactaaaataataatatatatacataatgaaccatagtatacaaattgacaaaggattaacatgatttttttggttatccaccgaaaaagaaaatactcgagaagctttcatatcatccaattataacatacgtacagatgctcatacacaaac

SEQ ID NO: 52127 - DNA, 949 bp, Arabidopsis thaliana landsberg
tatatctccaatattggaaattgcttaagggatgacattatcatgttttgggacaagtattatcctcagatctctagtctttgtatttgccccatcttggtctgtttcttcaatcattcgaattttataacctcaaggtctgtacatttctaatcattagtgttttcaatgcagctgactctgctgacgattctaatgattctgatgatgagttccagatatgtcagatatgcagtggggaagatgtactttacttttaactctgatagcttgattaccgttgagggttacgagattttaataacttgtctggtgatgaaactaggaaaggaagaagttgctccattgttctgaatgtgacaagctttttcatccggactgtgtggttcctccagttatagacttaccatctgaagcgtggatttgcttttcttgtaaggaaaagacagaggagtacattcaagcaagacgtctttacattgccgaattgcagaaaaggtctatacactgaaatagcaacttgtgtctggtacagaagcaaagtattagattctttttaagagtggttatccattttgtttctttttaggtatgaagcagcgcttgaacgaaaatcaaagatcatagagatcatccgttctctgaatcttccaaacaatcctttggatgacatcgtcgatcaggtaactatcatttacgtctctgttttttctcaggtatgaagcagctcatggttatacatgagtctcctttctttttagggtataacgctagtggtatctatgaatcatttattcaagttttggcatttagtatccaaaggctaattgtgtggttaaattaacttctgaaaactttagcccgtctctccattgctgtgctttatatgtactaaagcagctaaaaggccctgaaaaagttgcagaaatgacgggcaggcggggtttgc

SEQ ID NO: 52128 - DNA, 443 bp, Arabidopsis thaliana landsberg
aaagcaatctctgaattcttataagccttggacttaataaactcatcttttgtttttatcttgcattttaggcataatttgaaagtacgttcaaggcatttggaaggttcagtctgagaataaccaaagttgcgctttgacatgagaagtgaacaagatgggttaggacattacattttgtccaaaacgtggatcttgtccattttttctttcttgattataagagtcatttgatgatatcagcaatatcgtgagaatattttaagagaataactaattctaaatcctaaaaactttgggtttgaaaacgtaggttaaagacgaatgtgttaaacattttgatcaaagttaaagagttaaaaatttatgtatcttggccatattaaagaaaaatagaaacttggatgaaggcctaaaattaggggtaataactaagggtaaaa

SEQ ID NO: 52129 - DNA, 1019 bp, Arabidopsis thaliana landsberg
gcaaagaaccctctccaggatattgggaagtgaagtctatcaaataaacagacggtagtgtcatgaatctaaacattctgttagaaatctaaaaaaaacaaaacacttccaaaacagtgctaaaagcgaaaacctgaattaagttatgtcaagactctcgtttcatggattgaaacaagagaatatacagttggaataaaagatataaattacaaatatcattaaaagtctgaagacataattaagcagaaccaaaaaaaacatagcatttagaggtaaacataacacaaattaaactactaaacacacactaagcaactcttttagtcagtaaaagtcgcaacatatatttgtctacttgtccatctcaacattattaatttcaaggcacatgtgttgtggtcttccatccctcgtttgccttattatgtatgcgcactcgacacctccactagtcgtgaaggttatatagaagatagcattgctcgacttcaacttcaaatttgactctatgtcgtcttccattgtttgtaccactactttctttatctccaatgggaaatgtttaacctgcaaaacaaaagcttgtgtatgagagaagagtgcatgacgaccccaaaacaaatgagtatactgatagctaggctcaccatgccaagatcccacttagagtatgctccaacttgagcatatagatgaagccatttattctcttgcaaatcggaatcattaacctacatttgaaactttttttaacattaggggaacaaggcgtgatctgtgtctgtgtgtttagatatagcaaacaccacacacctcatagtagtgtagcttcttgcttcctgaaagggcaccatcatctagccacttaggcatcacaccagtatagagcacgtctacaccattaggatcccatagggaacctttatctccagaccctacaacaaatatttaatagtaattggtggatgatggaaggaaactagcatagccggcaaaaacaccttaaacagacaaaa

SEQ ID NO: 52130 - DNA, 904 bp, Arabidopsis thaliana landsberg
aagtgattcctgaatgacaaaatacctatatgttagcttcatcttcaaaaatcctaacacctgcggacaatatgcggaaaaatagatcattgaaggttatgtatcaaagagtaggcaaagcataagaacaatctcaatgtgtttaggccttaaattctccaaattttgaacgtttaagtactactatctttccaaacaaccttcagattcatagagatgaaaaccacgtcaatctaaaaaaaactggacaattatgtccgcatcttttgggtgattatgagtcttctacaattacctctttataactgatagagaagtataaatagccaaaaggaaacaccacaataatgcattttgatgcatgttttcgagatataagtaagtggggatgtaccattgattgtacgaacacatttccattcgtgtgcctcgattgcatctccattgtcaccaccctcatagaaaccatcacccctgacatcattaaccagggtagatgattgcctcaaaagagactctggacctggcatttaagaacattatcatacatatttgctttgaaagaaaagtaactttcaggtgaaccttatgtcttgaatcatgaataaccactagattaaacgttaagaaatcaaattaactatggaaccagacctatcaatgcataataaagtcaagggctgtaggattataaatttcgaactacagtttcactaatacacagaacattaatttaaatctggtgtcgatcaatttaaatgtagacataatcagaatcttcaggaccacttttcccagttatgttatttagcatgtgcccaacccaaagataggggtaacaaggaaaataggcaaatgagttctaatgtttttttccaatgtaagatttggagatgaactacga

SEQ ID NO: 52131 - DNA, 493 bp, Arabidopsis thaliana landsberg
  unsure (1)..(493): unsure at all n locations
tcccctttccacctccgcgtgctcccgctcgggctacagtgtccgtgaaatgggatacccctaaatgatctcgctccgctgaaggaagcgtgccccgagcccctccacctagtagatggtcaaaggcctgccccgcgttagggttcaatagtcgcctcagagcatctctggcacctctcccacgacgagtcatgagggcgatttccggccccgcgaatatggttcatcggccacctcagtgtcactcgtgctccgtgctcacctccgatcatggtctcgtaggccggccctcgaaggtacgatagccgccgtcttcgctagtacgagtgacgtaccccggtgtatgttcgatacagattcatggctcgggccatgcactccgatggaccctatgcatctatgccncgttccccngcaaaaggggaccgggctcgcaaatcacttcattaccntcggagcgccccctgtgcagtagccgactcgtacaaattgg

SEQ ID NO: 52132 - DNA, 698 bp, Arabidopsis thaliana landsberg
  unsure (1)..(698): unsure at all n locations
atgttccaaatttctccgcttctttcttcaattccagattcacgtccttcctcccatgctgtgaaatgcacatcacggagaaaaaaaataaaaaaaatctgttcaggtaacagttgcattttgatgattctcaaatcaaactttgtctctgtactattaagccctcatgacttttctttttcagttttttctaaacaagccttcatgccttaagacttgataaacatgtaaaaatccagcttaccagcgccacaaagaaacgagcaacaacttttgcagatgtaataagaacatgctgcatccaggatttcctcacagccatccgctcagagaaatgattgcctgcggaaagaatgcctataaagatctccacaggcccatcgggaactacaggagcctgccatctctttgacaattcgagatgcctttggggagcaaaactaggatgtgatgttggcagagaggcaacaaaaacagaatggacatcaatgtctccgtttactgttagccctgttgcatcctcaagggtgaaaccctattatatataacagagaattactaaccaactcgttctacgctctgaactattatggattgcatgaataaaccatntatctgaacacacaatcatgtagaaaaggagtagaatatatactcacagtgcgataagggaaagaagtacatgctntccatcaaca

SEQ ID NO: 52133 - DNA, 260 bp, Arabidopsis thaliana landsberg
gggggaaaccaaaaaacggaccccccccacccaaaggggcgcgacccacacaggccgcgaagaagacaaaagaaacgcgcaccacaaaacaggacaagagagagagccgagaacagcagccaacaagcagcaccacgagaggaacggaagagacagacgcgagagcaaggagaagaccggagaggagcaaacaccaccaaaaccaaggagcagaaacaagaagaacgaaaagcccggaccaccccgagcagggaagaaga

SEQ ID NO: 52134 - DNA, 790 bp, Arabidopsis thaliana landsberg
ataaaaaaatctctaggtcatgtgctttcatagtagtatggactaatagtcttagtctttaagtcctccctaacccatttccatactatatcaaagttccccatatattcataccttataagtattacattacaactttaatactaccgatagggacactgccaaaaaagaagcaaacaaaaactaccgaacgttatattattacaagaacacacctacacaagtaaacctaattctctgctttctctccatctatcgacttcagctactgagtgcaaaatctttttggggtcttcttagttacgtttgcaaggcgcgaggcaacaacaagtgggtttctcaaaaaaaaatagattttcgttttgatgttattcttctagtcacatgaatagaacataaatttgatcagataataatagatataaagacatgtccttaaggagcttaacagtgaagttactcgtgccggtgtgtgagaaaaacaattagtcatctaatactgccaacaaaatatcatccctcaacgaatcgagaacccctaaactatactactattttggtgtcatccgatttcacttgcttgcttcttaagaaatcagtaggcttacacacagtttcgaatacgaagaagaaacaaaatttaacagtaatttgaatatttgaatattgaactaaacgtcacacgattttcgtataaaggatacaaatcttgatatatttttattcagagaaatgaaattgtcgttttaaaaaaacagtaatctttatatcagtatatcactaagaattc

SEQ ID NO: 52135 - DNA, 923 bp, Arabidopsis thaliana landsberg
ctttctttgactcagtttcaactaaattatcgcctgattcttccattgatggatccacaatttcactatctgaaacacctgagaatacaaaaaacagtccattttgaaaagcttgccgttaactggcatttgactatcgtaagtctggtacagtgaactttgctttagccaagagtcaaaaaattactaaccttcaccttcatcatattcttctacaggttcttctttcactttgctgaggacagcaagggattccatggtcttggttttctctctatgaacctcggcatttcttgcggtttcttcttgttctttcttctccatgtggaacttgttgatcttctcttcaaactcttcgatacacgctttcagttctggcttcgcaaacttctttccctgttcagattcacaaccagatgtcaaactaacatatagcattaaaaatgactagggtgacgaaaaccagagaaaccagaccttattgattatgcttctaaagttctcggtcaccaaatcctctgctaaagcgtgctcgtaagacttgaatgactcaataagctttttgattcccttttctgtgaatgtcagcagcgaaagagaatacgaaatgtattcccactgttttccatctgcaagtttaggtgtagatgtcaaagggatatacttcttattaaacccaaaacaggtgtaaggatatatcatcaatacaagcatacctgtgactccgctaaacctattgcaaagcttctcaactagagcctccatctgtttgtcctggagattgatgaggatgcagatgagtgattagataagaataaatacaggtcatactaacttcaatattgaaaagctgtatacctttttgatggagccgatcaagaaatgcatgacattacagaatgactccctctctaaattccggt

SEQ ID NO: 52136 - DNA, 491 bp, Arabidopsis thaliana landsberg
atcgggccgagccgggccagccgcttgaggattatgaactttttaaaacgcagatcgatgtcgggcgcggtgagctcggcttccatcgcgcggacgatctcggagcggaccaggccgagtagcacgccgaggctctcggcggggcccttgaggatgggagtagtgggggtgttcatggacgcgcattctattgccgcaggtttatttgtcaaggcaaatatctcagcaacagcatttgcagcggcaaaactcccgcggcgccggacccacccctcgcgaggtgcggctgctggcgtgacaaacgccgcggagccaggcagactccggaaatacttatttcaatgaaatatgaataacgatcccctccccaccgcgctcctgcaccagcgcgcgcaagacacggcccgcctgctgcaggcgctggcccaccccacgcgcctgctggtgctgtgccgcctgttccgtcagggcgaggccagtgcgggcgaact

SEQ ID NO: 52137 - DNA, 560 bp, Arabidopsis thaliana landsberg
aacagacagttttagatcgagcagctctgattggatggtggagctgctccacaaaacgatgaatcggtggtggatctacgagggactagggggctccagcctcccccccatgtcgtcatacatgtaggagagaggaaaggagacgaagcaagaagaggaggaaggaagaagaggggaaagaaagaggaaggaagaagaaggtgaagagaaaaaaaagaggaagaatatgagaaaaaagaagataactagcttccagctcctccttgccatggatcctcgattcgcctctgcgattaatccatccccaaattcacaaaattggtagagcaacttagggagtgctccaataaatccaaacttggtggagtttactactgtgacatccattacctataagaaacaatttgttttatgttcatctcgtcgctctacgcaattaccgcaacctcgccatcggacaaagcgaccacgccccatctgtcccgtgctcgaccatgcccgcgcccactagggtcgtgccacgccgtggcgaacccaatcattagagcttgtagtagcac

SEQ ID NO: 52138 - DNA, 589 bp, Arabidopsis thaliana landsberg
aacaaactggcttaatgtgttcttacccaacatcatcaaaaataaattaaaaattttcgacaaaaaaaaatgaaaaagaggaacccggcatcatcaatacattttccattaattataacttcttttttaacttattgcaagttgctttcaagaaaagttctggacattaaatagctacattattatgtgtatgaatggtaacatgtcatagatatgatagttggtttcacattagtacgttgtcattaattacaaaaaaaagtagggtctgattgataatttcatggaatagtcgaaaaattatgtaattctacgattttgttattttactgatcatgatgacattcgacaaatttgctatttacaacctaaggacaaaaatagaataaagtatatcattctgagttttccagccacacaaatttcccctctaataatttaaccttctatgtatcacataaagtatatatttctatcactttcataatcttgtactttgataatcaaaaccgcaattttgtatattttcattaacacatttcccatttcttttataaaactcgaacatacattttcaaaaattaacttc

SEQ ID NO: 52139 - DNA, 766 bp, Arabidopsis thaliana landsberg
tcccatttcttcttataaaactcgaaacatacattttcaaaaatttaacttcataatttggactttaaaacaatgtgggatttgtcaaagtatgaattatgtttctaatgatatatatatagcagaatgtcatgagtcggccaatagcctacaaaatagagttttaacatttggttatcagtcgccagattggcaccagaccagtagaaacaaaatccaagtaacattataagccgcttatttcaaatctgtcactatataggaaaaaaatttctctgattccttctacgcatatgatatagaccacatatgatatgatgatttaagttttttcatttgggagttgagttatggttaaaacataaaaagagtgtgcaaggacccacacgcgtgggacgcggatgatatcctcaactaaatattgctgtgtgtcatgcttttaggctccttgcaataattgaagtcatgcatactcttatcattgtgattattagtatttactatctcaagtttttttggcatctcaatctttctctcaattatttctctcctctctgtcctactacattcattattgcacattctgttttctttttggttagatattacttatatgaatatgcaccatatatttttgaattccaatatgttgtgtgtgcagtgtatacacaattaaacaccggccggccgatgttgttcaatagatttatggcatttttagagtttcctatgtacatatcattaaatagtcttgactaaacattaa

SEQ ID NO: 52140 - DNA, 792 bp, Arabidopsis thaliana landsberg
gcattacatagtcaacaatccaaatgcgaattgtcctgtagcaggtaaaatagttcttgcttaaaaacatttttagacaccattactttgttctttcatgctgatttgtcatttgtatgacctcttgaaatcctcagggtgccgaggtaaactgcagaatagcaaagtgatttgtgatgcaatgttgaagtttgaaatagaggagatgcgctcgttgaacaaacaatctaatagggctgaagtgattgaagacttcacagaagatgtggatgaagattagagatcagacatttcttggaccgggttttaagcgctgcaatgaaacaagttgaagccatatgtttcacaactttttgctattcttagtccgttcggtatattttatcaaacgtgaaatttgataccaattgtttccactttatggaggatgtaaatagtcgatctcttccgattctgaattcaactgctgttttttttgccaagtttacgttcatttcctgaggctagtcaaagcttaatttcatttcttgtagtcagaattttcgatttagtaccattattaggtctactcggtttattagtttttcatggtatggtttggcattggttaagagtttgtgtggatataaatccagtttggttttcaaattcaatttttggttcgatttgaattggttactaaaacaaactaaaggcttttagcttcccagttcccagtccctgtactcgaaaggaagatcttcatcttcaatcttcatgctaatcgacgaaaatggcgtccgcattctctgc

SEQ ID NO: 52141 - DNA, 896 bp, Arabidopsis thaliana landsberg
gccttgtctatgcttgggtctgtattctttggtagtagaacttgagcctatggcttcatccggtcaagccccgggagaatccagtttccaagattccgaccaatatccatgtctctctgttgtatgttcttgtggaccctaagtgccatatcaaagatttgataagtcctcctgcataaaaggaaggaaagagagagaaagttaacacaccaatcgtctcagtcggtaatggaaatctcaaatacacaactcaagactcgtttaacagtagcattatctatacgactgtatgaccttagcatcaacaaatatatttcctagcgacaactacacttacaaatcccaaacgggcacaatataagacttcaatccaggaaacaccagatgttctatctctccctctatgaataaatgcatcatagcttcgtgtcactctactcttgaatctcacatcgaatggttcaagagcaatgtatagaattacgaaatcacataagtaagttcaacgaatcaaaaccgtggaaataggactagcctacctcttgattttacttaaatccaaccacttgcattgcattgcattgcttaaatcacatttttatagcgatacgggagtcagaacaaaactaactggacagtagaaaatcgaaatcaacctaaacacaataaacaatcagaacgatacatcaataacaaagcagtttcatcaattgaagaggccaattcatatacaaagaaacgtatttccagtcaaacctaaatcagaaacaaccaaatcgcaaaatccacaaaaagaaaagcgtaaagatgaaagaaacttcaccgatgcataaaatctcgaatccttggatgcttagggctaacaagccgacgctgggtcttcaatgcgagccggt

SEQ ID NO: 52142 - DNA, 462 bp, Arabidopsis thaliana landsberg
cgtccgaactccgaactcgccaacaccccggcccgcgccgctccccccgcgcttgaggccgtcaagcccagcggcagggcaacgccaatttccaaatcccaaaacctccagcctcccacctccagcattccaaacctcagatcccccgcacgccgcgcctccgaaattccgaaacccaaatcagagcgccgcccccggcccccgctgcacgcaccgggcgggggccatgcggcgcgcggctccgcgccgcgccacaccgttggaaccgagcgggccgctagatgcctgagcccggcggccgctgcctcggcgacctcggcggtcacgccaggtgctcaagggctggcctgacctgtggctggtgggggacaagccggcctccgcgcgctctccaccgcggccatggcgcgcgccccagccgccgccgctcgaggccgaccaaaccctagcgctcccggacgt

SEQ ID NO: 52143 - DNA, 1043 bp, Arabidopsis thaliana landsberg
ttgtaacttctccaattagtttaacaattttgtttctatgtattattagaaaaacaaacaaaatttactttagagagtagataaaatactgattgatgaaaatgttttttttttttttttgcacttttgtttagaaatttagtcttttgcatatcaaagattcaaagtgctctcattgagacaaagttgggccaactcaatagcaagcaaaacatcttaatcttattcttcaacattttttgtttgacatttttgtagcagaaaccatgcaaatagatatatagtatcacattgcgtacacaatctctccgctactgtcgatgtcaagatcatcaaggtcgctctctaagtcttcctccatatcgtcatctatgtccaagcttcctgtttatccagtaatgataagtttttcaaacattgagaagcattaaaaaagacaagaaagcgaaaagtttatgttttgtgttgtctcacctgtgaggtaatggttcagattctgagtgcctgcaggaggaacagttgcttctgcaatgatctgcataatttcttctatgctttggcccggttgatccgattcatcaaactgagtggtcatcgtgttatcgttcattagatctgccggtagattctttagaaaccattcatggttccttatttctggaattgatatcctctgccaagaaaccaaccaagagggccaaaatgcaaagttctcttttcagtcatactataaagaaaattcacaaataaatcaacaaatgcagctttcatgatccttcctttacctttgcagggtcagcaacaaatattctggagatcaaatggcgacattcaggagatatgtgaacataatccggaatagcatactgaacattcaggattctctgagcaaatattttcacaagagaacagattgtttagctagcaagtaataaaatccataattaccattttcaactattgaagcatgaagaaagtgaaaggctcacatgtatagttttcctggaaatctttggttcctcgggatcttcgaaggatatgct

SEQ ID NO: 52144 - DNA, 145 bp, Arabidopsis thaliana landsberg
gctctctataaagaagagcacaaacaggcatttgtgttccaaaatatgagtctcagaaatcggaggggaggggggacttcaaagaacggaagaacgaaaagagccctccacccgtatggtccctcttggaccccggagaacccca

SEQ ID NO: 52145 - DNA, 629 bp, Arabidopsis thaliana landsberg
cctggttcgaacttagagacagcggagaggataatacttctgtgggactcatcagcgactgatggagcaagagggaagatgattttccaaagcgatcgtgatgaggtggatcggtttcttcgagccgttgatgaaatccaacggtccttatcttctgtctctttctcttcttcttcctcctccgccgccacctccgccgccaccgtagtcgatgaacacgaggtcaaagccaactcagctattcaaatcgctatggctagactcgaagacgagttccgtaacattcttctctcccacacaactactttcgagcctgattcacttttcctcgaggaaccatcagtctctccgtctttaaccgtcgaagttggagaagataccaccgtaactcccgaagaagaagaattaaattctccaggtggttccggttcaagccggttaactcgtagaagaagcagttacagatccactagcagtatacgagaaatggatctgatttcgccggaagcagtttctgatctaagatcgattgttcaacgaatggtcgccgccggttactctcgtgaatgtatccaagtctatggaactgttcgcaaatcagccatggaagcaatatttaagcagcttgg

SEQ ID NO: 52146 - DNA, 1190 bp, Arabidopsis thaliana landsberg
aagttgagtttctggagaactagtcgaatttttaggcttcacagacccaacctaagaagagaacatcagagcttcagatttagatcaaaacgcacaaattacacatatagataagaaaaatagaagattaacaacacacccgaagagaaacaacagtagcgcactcagtctcaagcttgttcttaagaacacgacgataatcatcggaatcaacaatcaccgtcttcgtcgtcatgggagcagcacaatccaaatttcccgaatcgcgatcacgaaatcgactatcatcctcgaaatcattctgtccggaaacagaaggaagagattgcgccgaagaaacaccgacgatcgcgttgttgttgttaccaagtggctcagagctcaccgccgacgaagaaatctcttcgagaaacatctcgaaagtccattccggttgactctggctaacttcatccgccgtaacaggcttagaagagtcaggattgagaggaatcggaggagtttcccagaaaggatcggagaaatcgtcaatggagaagatactgttcatcgctcgctctctttttcactttctgattcttctttttttgtcggtactttgcctatttgcatttaggtccacccacgcaagtatattctctttttttattacgtacaataaaataaacattttttttttacacatttctgttttatttctttacaatattctttgaatagtttttataatttaaatatctattgtataacgtccactaatgtttacatgaaaaaacgtaacagtttttgcaaacattgttatttaattattcttcaaagtttgatttattcaatgaacaacgaagttgacataaaacattagattatattttaatttataaaaaaatactatattatactggtcattaaaaatttataaaatatcaccagaagctaaacaaataaatcactaagctatattacaaatttacaatagacaagcctaaattaaaaaaaaaaaaacaatatggagtttttaaaaaatctaaatttacaataatctacaaaaagcttctaaaaataattaacgaactagatcattttttcgcgccatatgtaaatttaaacagtcattttcaattttcatatatatggaatttactctctatttctttttgaccttaacatagtgtcaccaataccacaaatca

SEQ ID NO: 52147 - DNA, 835 bp, Arabidopsis thaliana landsberg
ctcatgagttatgcccttttgctggtggtgactgtgtgtactctctatagccccctcaaattccttggttatacccttgcagtattcatcttgagaacttaaaaccgcggtttcagaaactctcaagaaacattgacaggtaaatgatattttagattctaaatcagaactccaagttttctaaaacaatctttaaacattacatccttttcgtgtatcttgcaggttttttcacagattcttgcgtattgggttacacactcgttagatgctacatgattcaacatccttcgagggaaggaggagagattaaaagactttgtcaagattcaaatgaaggacaaagcctgatttattactctctcttaatcctcagggaacatataggaacctgtaaatttgtaatcaatttgtaaaacttgaagctacgacgtttcgttaaactttagacgtgtacctaaaggaaaccaatgcgtgtttgtgctcaatgatatctccagtgtttgtttgtctctcagatatttgttttggaacaaaacattctttgtcctctttcacttacttggcaagtcatttgttccaatcattgtcttactttcttttaaaatgcgcattatagttgacgtctcaatttctttcatcactacttcaaatcttagtgtcacagcccaaaagtaccaatttaggtcaattctaagctaagtaaaaaatcttaatattaagtcgtatcatatagacatatgatcatggtccaaaagatttatgaagaaagaaaaatgtcaaataatttaaagaataaagaagtctctggacaaaagaaaggtgcatgtcacag

SEQ ID NO: 52148 - DNA, 1092 bp, Arabidopsis thaliana landsberg
cttttatacatgattttgtactaacgttaaagacttttttgtttccttttgtttgttaaaagccatcgccatgttgattaaatctttgtcgacatgatgtcattgatcttccttttcttacgtgctgtcgcaataatttgttaatagaaaggcaaagacattttagaatgaatagtgttttgtaccttatccacgattttgttccgtagtcccgttaaacgttaaagactttttgttttctttttggtaaaagacatcgacatgttggttaaattcttgtcgacatgatgtcatttgatcttccttttcttacgtgctgacgaaagaatttgttaaaagaaaggaaaaaacatattaaaatgatcaactaaaatagccaaatgaaaagtgtgaccaaatatttgacttatcgtcgctcgttaaatgtgatgatgtagagacctttgcagagggttatgaaataggagtcaactcagactgccggttgtgtattaagtcaggaggtttgtgcgggtataatcacatatagacatcaagcgggttcctgtgatatcgcatagaggaaccgcatggccatacttgtagttcaagaaaaaatgtataaaataccacctatatcttcatcattatcctttttttacctatcaacaagagagaatatgcatatgtgatatgtaattaatttaacttgaaatgaaaccttaacgagtcttaaacatggagaaaattcacttataaaactttgtctaagacaaaaaaaaaaaaaaaaaaaaggatgagaaaaaatagtgatgtgtttagttaccattatcgatttactctcatgtatcctctgttttaactgtaatgaattcatcgttttagtattctaaaatacactatacgctagagtctggacatatggtagagtactatagcatctaaacgtttatacgggaactatacgatggatatatcttttattttttacagctataggtagatattttatgtttaaaaaagatatgatttaaaattggaaattgctatttattacaaatgaatacataaattgatgaatatctgagaatctatcatgatcaaataaaacta

SEQ ID NO: 52149 - DNA, 249 bp, Arabidopsis thaliana landsberg
  unsure (1)..(249): unsure at all n locations
cccccccccccccccccccccctctctctcnctctttgcngcgtccttttctcccctcccccccccccccccccccccgccccctggtgggttgccccccggccccccctcccccctccccccctccccctctccccctccccccccccccctccccccctctccccccctcctctccctccccccccccccgccctccccccccccccccccttcctcccccccctcccccccccctccccccccccc

SEQ ID NO: 52150 - DNA, 1510 bp, Arabidopsis thaliana landsberg
caagactattatgaatttggtgcaatcaaaaaagatggaactttagttttgtggttcatgtacctaagtaaggggttatgaaagcattcttaaattaaaataatgaatcgtacctaaaaaagctggaacctaagtaaggtaggttcatgtacaaatctcatgtaaagctacatatgactgtttaaagtcaagaaaccataaacttaactccctttgatagaaagtctcactatttccacaaattaaaaaactttagttacagtagttacaagtgtgaggtttcgagcgctaactctcaatgctcccaagtcacgtgacaatgatacaatgaatggaatatcattgtgaatagtataaactatttgatggctagaacaatagtataccggatttgcattatggcaaaataattatgtgattttgcagattattgccaaagacattccaataaaatgcacaaatgtttttagttgaatcaatattttcttaaaaatggttgggtcgtctgccacattttcccccacaatttcgttaaaatccaatagatatagttagattatataactatcaatgtataggtataatgtcaatttgtcaattccctcttggagccaaacgcaatacttaaatttacgtgagccagactcaatttacgtgaatatgatctctcattcttgaaattggaggaggaggccccaaatcaacaattccaaaagaggaggaaaaaagttatacatgcactattgatattttttttttttatccccacactcatcattcttatacactataaagtactctcaaactttattatcatgatcatcatattaactacctataaatattaataaattcgttttacgtactacacaaatcattttatcatggtgatggcaaagaaccttaccaagttctacgtagtgtttctcgttgttctgatgatggtggtatcgctattgctagccattgaaggacgaccggtcaaggatagttcgagatcgttgacccaaatgagagattcatctatgttcaatggaagcgttataatgtcctcatttaaaccagttgagtcttctgtaaaagatttatcgtggttagccacagtgaaacagtccgggccaagcccaggggttggacatcatcgagccaaggggtacaaaatgtttggacgagccaatgattctggtcctagtcctggtgttggacactagatataacaaattaatctcatgaactgaaattatagataatgcagatacaactttaccacatgttcaatagcctctaagatgtaatcttctttccattggttatgtttatcttctttacttctaccaactttacaatcacatgtttacataataatcagttaatcaaagtctggcttgatctttttaaggtttaggtgttggtttgtgcttagtttggttcagctatgtgtttatttcggaagtacagcatttgggcctttttggctggagaaatctgcttttcctttgatgggcctgtt

SEQ ID NO: 52151 - DNA, 382 bp, Arabidopsis thaliana landsberg
accaataccaaatcactaaggtggggtaaagtttacaggtattatatctactaaccattgtcaaacaaatttatacattaaatcaaaactatagtatacgtgagagtatgatccattctctgatgcataaactatatcaagacaggacatttttgagagctcaggtggtaacgctcaaaaacgaactatccaagctcacttgatactgtgaacacaataagaaaatataatactaaatagagtcgtacacaaaaaccattcgaaacaataagatgaaatatcgatcctaaagctccaagaacacctcttatgctgatagctgagacataagtcatgagcgataccgcctttgttaaacattgcgacagacccacaaatgacc

SEQ ID NO: 52152 - DNA, 1036 bp, Arabidopsis thaliana landsberg
aatcagacaataaataaaacgaaaaggggaagaaatcaagaaggagaaagttgagttatatatagtgtgattaacaaattaagtgataaattgtgggatcttctcattttctaaactttttttagtaattctgaattttgttttattggcgactaagaaaattttggacctaaacccataatttcctcataccaaatattaaaaatgattaaactcgtaattttgaactttttttttgtgagtgatataataaactattacactggttgagatgcggataaataagagtcttaccattccttttcacttttgtttttcactttctttagaagatatagctggcacaaagtagtacattaactttgaatagaattttccgattgtaaagtaactataaaacctatgtgtaactgtattataatgaagaattatattctagctccatctttcacaccaaaagaaaatgaagatttatattgtctttctattgataaggttaactaagttgatgacaatctacaaaaccattcaatatgtatatatattgtctatcgataagtttagcaatatttactttttgtcggaatcgcggactaggaaaaatcacatgtcggcaaaaacgagaacacgatgaccagtgtggtgggttggtaatttggtatatttggttggtccatgatatcggttgaatctatttagaatttgcaaaaatagttccgatatgactactgatatgaatttacccccggacattaattagtaacgacataatattcaaacgtatatggtactttttgatatataaaattagggctcattatagtcaacatagaagatccgttattcgtatttcataggcttacttcttcttttcctaccatatgacgtagttattcacgctttaggcctttttattcatttttgattttttgtctctctctaatcactgataggggtcatggtgaccgctccttaagtattggataattataaggtgcactttatggtatatagaacttattaaccttttacattt

SEQ ID NO: 52153 - DNA, 843 bp, Arabidopsis thaliana landsberg
ctaatatgtggaaacttctcaattacctgaaatcaagccttcaactttgaaacttcttcctaaactccctaaaaaatatgtactcttatgaagcaaacacatggcagagagtgcacaacttacatctgcaggaagtgaaccggattcagcttcaagcttgattcttaaatcataacctgaaagccaatgaacttggtttaaaataaataaatcaaaccatcacagagacttagagatacgattaagcaccatcgattccatcttcgctgaatgataaaccagcacttttgctcgcgtaaaagtaacaagacccttcaccaacatccacattccatgcaatcacgccttgggtaacccaatacgctcttgaatagatcaaacaatcaagaaactgaccaaaattttgacacaaaacgttaaaaagagcaaaaccagtaacatgatcgatctaccttctagctcgaaaattaagaggggtaaacctgagaattgggactggagacttcgagcgacataggagatgaagcggaagacgaagaacagagacagtgaagcgaagttttcgaaggaagtctgagacggaagttagaaattgacgtaacaggccgacgtcgccaccgcgatcgaagattaaaatcagcggcgaagatccgaggacgcgcgacggatatggaactgagaagatgaacggaacttgttggtgtcagtgtcagtgccattcttcttcttctccgattgatgatagtttcagatgttcttccgaccgtttgttcttcaaaatatctatatttttgctctttagtccctcaaatttcttatatctttcacctatttatataacta

SEQ ID NO: 52154 - DNA, 625 bp, Arabidopsis thaliana landsberg
  unsure (1)..(625): unsure at all n locations
gaaagtngtttatttttaatacactgtgttaaaataggttttaagtgagaatttttttaacttgtggagtgttgagtgtagagtgtagatgtacattacctatgtatttatccaattctgtgtaataaagatgttggggcggcgcctgctgccacatacacattggattagaagggcaaaagaagttctaataaggagcaaactaatagccatgaaaattatgaatttaccatactgaaaacaaaggaattaaggttttgaattcaatacttgttttgttatatatgatgttgatgtgacgtatttgtgtgtttctcatagtgactttgaaaggaaggctaaacgaatttgcagtaaaagtaacagaagaaacacttcaaaattgaattaaaatgaagaaaaaaaagaatgagaaaaagcgagaagtggtggttgtctggtattaagggtacttacttttctccttttcaacacagcccgacacacatgtctctcttttttttttcataccacacatttctatttatttagtttcctaaaataaaaattataaaaccagagagcccaccccacccttaactaaagcttttttttctcatcccactacaaatctaattacaagttt

SEQ ID NO: 52155 - DNA, 531 bp, Arabidopsis thaliana landsberg
atccaatcatcaaataagacaagttcagaacactccaaaaactaacttaagatccaaatttcccatcatgcaagtgataacaacctcactacagatatgtcttcatcaaccgagattccattcatacttcattttcaaaccgagaatgacagaagaaatcaatcagagttctcgaaagagtataagcaaaaccttgattactataacatgacccacgttttgaagcagaagcagcacccaaagttttcgtctttttcgagcaaacctcactcttcatttcaaaagcaccaacatttccagatcgcatagagatctcacatcccccactagtctttttcttcttcttcttcatcaatccacgaaccctaactctacatttcacccctgaactcttcctaaacccaggagaagacccggatcctgatcctgagttaacggtagacccggaactagaaaatcggaaaacgccattggttttgtcgcaaggagaatcgagaaatccaatgctcacaggaggcaggactggttcct

SEQ ID NO: 52156 - DNA, 531 bp, Arabidopsis thaliana landsberg
ggaaggaggagagaacagagagaagcgagagcagcggcggcgcgtgagcggccaccgccgaggccgtggcaggtacagacggggaaacgcaccccacggccctgggggcgaagcaaaagagacaagcgaccgccggcagagacacaccaaaacagaaggcacgacatcaagacgaaacccgggccacaacagcccacggagcacacacacagcagcgagacccacaagacaaagacgagggggaccacgccgaccaacccccaaaaaaccaaaaaaaagaggaagagagaaacagatccaaagaggagacgaacgaaagacggagaagagccagagcaagcaagaaccaaaggaacagcgccagcgcccggagaggaccaagcaacagcagcagggggggccaaaacaagcgcccccagcggaagccaaacaccaacacagaagaaccaaaaagcccggggacgggagagggaacagcagaggcggaagccgagagcaaagagcaaaacgaaaacaaaccaggaacccggg

SEQ ID NO: 52157 - DNA, 1016 bp, Arabidopsis thaliana landsberg
taactggcatagtaaaccaaacaaaaaatatattttttttttgaatttggtataaaagctggcggggggggggtatagttgaaaatttgaaattatgttttctgacatataacatgtttgaaatgaccaaccacgaaatagaatctcactcataagtttagttattttgttcaaaaatttaaagcccgttcgttagcttcaaaattaaatttcaaatatttttctactaacaatttcgaattatatatatcaaatgaacaaggtcaatctgatgaaaactgttgcgtaaaacattctcaaaactaaactaatatgtgtttcttataaatctaatcggaccatatagtagatcaaattaggcggatattagagaaggtatcaatcactaaacatgccatatgattatggttcatgtatcattatcaaatgattaaatggatggaagcaacgtgccacattcaaatcttgtttttatttttataacgaatttatggtgttttaaaaagtaaagtttttgtgacaactgtaaaacaaagaagcagactcaaagagcagttttcaattccggtgaccaaaaacattaattaccgttttatttttctaatcggcgggaggagcaaagcatttgattggaggacgagtgtgttattgacgcgtggcggcagatggattgatgaaacacgtgattgacggtgggattcttcttgcacaacagctgttgaaccatggtgaaaagtcactttataaattctttaaactcttgcccaacaaaacaaattctataaaaatatttgtccgtgattcattatagttgttttgttattcgctagttaataatttattcatggaaattttagtttcgtaggattagctcaccttcacataagccaaaattatctgacactacgatgatccaaacatttttgagctactgtaaaaacacaaaatcaaaataggcaactaatcaaaaaggtatattgttgaatctataaaccatatgttacattctcggtgaa

SEQ ID NO: 52158 - DNA, 512 bp, Arabidopsis thaliana landsberg
  unsure (1)..(512): unsure at all n locations
tcttatcctaagttcatgaaataaaaaaatatagctacaaataactggatattatgctgggagngactatgatctgtttacatgagtttacaaattttttattaattaaaagataactcatttattgattgtcaatatattaaaaatgagtttataaataaaattttagaaagtaataaaagagaaaagcaagctaaataatccatcctaaaattacaaaaacgagaaatataaaaagtcaagaaaccgaaaaataacacacgaaacactcaagtttttttacaactagtattatcatatttatgattttattcaaaataattatcttgtgtcattccttgtcatggaaaccaagcatgaagccatccattatctatatgctaataaaataaaatttcattatcaaatccattctttggtttaaacgcgttaatattagtcgaaagggaaaatgtaatagtcataaacagtgtatgaatcaaagaaaaaaacaataaaattaaaggaaaatg

SEQ ID NO: 52159 - DNA, 488 bp, Arabidopsis thaliana landsberg
gatgattcccactataaggtcggaatcagccacccaattttcgttttcatcgaacttcaccaatggaagttttcccttgggactaatagccaagaaccaatccggtttgagagaaacgtcgatgagatgagttttgtaaggaagtttcttctcctcgagagtgagaagtatcctttgaccgaaagggcagtcaccgagaacatcaggtgcacctgatgcggccttcacgcagacttcgatgcccatttctgttgtttttgttttccacataaattgccataacgactatatatcatttttatagaggaaatgcataacgtgcatacgacaacattttatgtatgagcttataaataattcaatctctagtttacgtgcctcccaacattcttgattttttttttcactttttctttttactatatgtgccctaatagaggtatttactcctaattgagggtttattcctgatttatttatttttagat

SEQ ID NO: 52160 - DNA, 611 bp, Arabidopsis thaliana landsberg
ccaatgccagctcggagtagaagaatgccatgttctcaagctgcaccaaaagcaccgaagaaaatttcaatatctaaatgtgtggtgtggtgctaaaacaacattacttggacaactatacctctgtgtcacacattgcggctttcaggtacctaacaatgaacatgtacattgttggaaccgttaggttcaatggagcctgtccaggatggccttttccttggtcagaacctggtctctggtaaatgcgttgtcacagaggcacatcaagtccttaacctgtaaaatatcgctgcttgttgtgaaagctaatcgaagaatggactatagcatgttttagacacaaaatcagccagcctaccagtggagcccatatctcttcgtacttgcttgctatcagcatggcacttatgccgacgagctgtagctcctttcttggtacactctccatagataagtactggtcgatgatgtagacggtcaagtaaagtgtctctggcattagagtaagcctgtactgtacctcgataatccagtcgataaggatagcgtctcatctctcactgatttcagcctgtgagctcatgtagctgctgagaggacggcaggtg

SEQ ID NO: 52161 - DNA, 995 bp, Arabidopsis thaliana landsberg
cctttccatatggtttgcgactgaagaaatagaccaaaccaaattcttttacaaacactctacataccactaaggcactaagcgaaagactgtttatgatgaaccatttttttttggttaacgacgcttgagtacgtcactcgtgagtacggatatcccacaagaccacaacagcaaacgaatccaaaatccgtgtattcgaaatgcataacgtacttacctttttggacgaatctaaaacgtgtctagcttgagattgcatgactcatatcgttgttgtacatgcatgtacatcatttatataaaatacaataacttttaattatatacgtatatataatcatttttaaaatgtctattgtagcttcaattcaaatggttcgggagaaaaaatactctctaaacccatattaaaacttgcaaataattaatttagtatcttttaataataattaaatatatatacatcaaaactatcatttttatctggtaatgtttttcttatctggtaactatgattaaaagttatcgaacaaactttcaaaatcattaatttttaatttataaattagaataaataaggataaatattttatatgatattctatcatctccatttagagctatgtgaatagctgttgcgcatttgtgaccaaaaggcgagagagctaaagatctcgttatggccatctattggtttactaaacgctaacattatctatgatttttttttcctttgtaaacaatatatcaaactttttttgttgtgaaaattcaggaggtggctcgtattattatattttaataaatctattctattttttctcataaactaggtagacttttgttatttttattattattttctctatcattttcaattatatttaatattattgcgagctagaccctaccatttcgtgtcttattggttcaatactttagaaatattatattaacaatatgtccacgggtttttgtaaggaccagttaaa

SEQ ID NO: 52162 - DNA, 783 bp, Arabidopsis thaliana landsberg
actgcagattgccaaccatgctggccattccgctgttggtgcttgaatgcaccacagttctgggccttgtgtcccgttggacctacgtgaacctctggacagtacccacagaccctaaccctgtacatcctcatcagctttttggctcctgctctcatttcttcccaggcctgtaatgtttcttcggctaaggagactgtttcttcttcgctagatgggggagtgatctctgagacaggtaactcagttaacaatggcactggaggaggctgaggctctggatcaggcaattcagtttcatctgcatcaacaaactcgcttttgccaatgcggataatcggttttcttctcctttttgctggaaattcgggtatttcaacgccgccctgaatgcagagctcaactacagcaggaactcggggaatcgagaatctttcatcatgacggatacgcttgccaaggcggtcaaaaaggtgataggcttcaagaggaacaataacgtcctcaataaccgagttagtccattcatgaagacctttcctttgggaagtattgggacctttacacgacttaaatggatgcccataaggtccaacatgaatctcattgcaccacctaagagaccaatcatacaacatcaaaaaaggccatactcaaaacagaccaaaaatgaaacaagaagaagaagagaatttttacccacaagcattaacacgaacaactttcataagccggtggagaatgttgatcaatctgattcttgctttgtatactttataagca

SEQ ID NO: 52163 - DNA, 1094 bp, Arabidopsis thaliana landsberg
tatcatgtttacactatgtcggacgctctcagatctcctccgtttcatttttatacaacacggtagaagggagctggggctaggtcgactttagatcggtctcttcttgcaatgactacaataaacaaaaaggtttcgacaccaagagcttgaagagctctaatcttgttgtgcccttgacggattcgcactctgctgttgtttcttctcagccaagaaaccgtggaggtagagtaatgtcttggttattccctaagttaaagaagaaacaaaagagtaattcgatctttaattcacctagtataactgagaagtcagaggaagtttctgaggtgttgaaggattctggttctggtgttgagaagttgaagagagaattgatggaagcaaacaaaagtagggatgctgcgttaacacaagtctcaaagatgaaatcttcattgggagagttaagtgagaagcttcagtacttggaaagttactgtgacaatttaaagaaagctttgagagaagcaacagaagtagtgtcacaggagaatagtggtggaagaagctcagggaaaaagaactcagagatgccagtgagtgaagaagtgatggttgaagggttcttgcagattgtatcagaagcaagattatcgataaagcagttcttgaaaacattagtttcagagattgatgaagaagactcgactctaattggtaacatcaacactctccttcaacctcacaacttatcattcacttctaagtactccaagatcattcagtaccacttagaagcaatcataagccaatcagtataccaagactttgagaactgcgtattccagaagaacggtaagccgaaactgcttgatccggaacaagatcgacaagcgaacttctcgtcctttgcttccttgagaaacttgagctggaacgaggtattgaaaaagggtacaaaatactacagtgatgagttcagtagattctgcgatgagaagatgagtttgatcattacaacattgaattggacaagaccttggtcagaacaaatgcttcaagcattctttgtggctgccaaatgtgtatggttgcttcatttgcttgcc

SEQ ID NO: 52164 - DNA, 1425 bp, Arabidopsis thaliana landsberg
attttcaccagcgggaatattatgacattataaaattatccattagcttttgataatattgataaaaaaaaaaattaatcatattttacatgaacaaattattcatacatttgggcttaagagcacaatggttagcatttagcagcatctgactgatgtcgtcatggatttggtctatatctagtatttaacatgtcctctaagacccaacgaaatacacaagtatgcatacatcaagacatatattgcatacataaattaacacataagtttgagcatatctcttactaactttgatcacagtggaggtctctccaacgaaacatacccgaatttgcctttgcgaaaatccgttagtattctaaatgcagcttgatgactatctccaccaaacaaattaagaccaagcgtcttcacaaatctgcaaaagagagagcagagattcaataagaatccatgaacaatggtttgccaaaagaaatgagctctctttgaggaagtttcattactttttcccgcagttgccttctagctggatcttgtatcggttgtaaagagcctttgcgcctttttgttataaaggagagaatatcaagtttcatttttagcgcaggaaaataagagaaagagtaaatcgcaaaaatggtaatgttcagaaacttacctacttctggaatccgtgctaacatctgcacaaggattccagcaacatcagtgaagtcataagctttctctccaatgtcatcacaaattgcaagctttatagcagctgcttgatcatcgatacgcatagggagcattccaggtgaatctaacagatcaagatctttcccaagcttgacccatctgtttacagtaagataagaaaaatgatcagtgccagagactaagataaggatcttgaatgttttggaaaactgagtttcaagagattaaaaggctttcttacttcatttctctagttacacccggtctcggagctgctgcgcaaatttttcgtttcaatagacgattgatcaaagatgatttcccaacattagggtatccaattattccagctctaacctgcatcatttgaaatgaacttataatttcaatcatatatgttgcaacagagaatgatggatcatgatacgctttacttactgatctagggagcagtcctttttctcgccgtttcccatttacgtcacctgctaaacttttggctaaccgacctagcttcatagctccctgtaaccatctctcaggttaaacttatagaaagaaaaaaaccattcccaaagcaaagattaaacttgaagaaacccttccatcccaaggtttgccattagtgaaaatgacctttattccttgctttgcaaagtatctcgcccaatcattccgatcatcgttcgagaatcatatcttctctatttaatacca

SEQ ID NO: 52165 - DNA, 321 bp, Arabidopsis thaliana landsberg
cccccccccccccccccctcctccccccccccccccctttttttttccccccccctcccccccgcccccccccccctcccccccctcctctcccccccccccccccggcgccccgcccccccccccctccctcccctccccctccccgcccccctcccccccccctctcccccccccccccccccccctcccccccccctccccctccccccccccctctccctccctcccctcctccccccccccctcccccccccccccccctcccccccctctccccccccccccccctccccccccccccccccccccccccccccc

SEQ ID NO: 52166 - DNA, 1356 bp, Arabidopsis thaliana landsberg
gaactagttctcatgcaagactcatcatttatagggggtggcttcggatcaatatcaaaatcctaaataataaattatctacgggtttgttcaaatacaagtctagaatcctaaaatagacgaactaaagaaatttttgtaaatatccaaagaaggaggaatgggatattagttactttaagtcttccagaaagtttaggaaggttaaaagaaatttgcttatacgtagaaagtagaaacacttcaaaggccaaattaatagattatcagccaaatttgtctccaaaatagaaaagtaggctttgatgaaatttattgctctcgtctacatacatatgttaagtaatgtttccaactcttcatagtataaacgaggatttcattagatggtccgttgcaaatatactttggaatttaactatataccatatatgccaaacttgaaacggattctaaaggtcgataatatcgatcccaaagatggtatcaccttcttatggatggtggaatttataatttactcgaggtctaattgataaaaaaaggagtattcaactgtgatcatgatactccgatccctctcgatttaaaatgatatttggattttgggggaaacctttagacaagcgctgccattatgctcggtagaacatttcatccaaaccacaaccaaatgatggaaaatgtaacttatacttacgatctaactcttgttcttgtatttgttctgtttgtcacataatatcgcacttgttcttagacttttcaaaacattcatttttccggataaaatttggagttttaagaaacatgtgtacgtaaattttaaattatttttgtccattatgtttatgacatcaagaggattgcgcaacatattccactacgtgcccatgttggaagcttactcggaagtgtactcgaagagttgagaagcaaagtctttgcttcctttggttggccaaaatttacataactttccagtttccacaaccaaagtggatatgtaatattttatgaacccacttgtagctgcatatccatcattgcgtctcatttattataaactagctagagtcacacccctgtttgaatttgtagtttagtaacaagcttgtactatagtatcgtcgttgagttataacttaggtcaaagttagaaataattaattacaattagataacagtattgcggtagaaagtagcaaaacattttgtcgtttcaaaatttatatctataacaaaagtactgaaatttctataaatttttgtgaaccattactatgaatttgtagcaaacgatatacatgtgcagtttgttaaaaaaactgatgatacgaattttttttttttttt

SEQ ID NO: 52167 - DNA, 651 bp, Arabidopsis thaliana landsberg
catgaacatgaagtttacgcgctttgaatattaaattatagtctatagattcactattcttgtttttctttacttcgtaaagaacaaaaatttagttttgtatagagttaaaaaagacaaatacaatactagttcttacaattcactgtaatatgaatatgtaacaaattgtccgtcataagattataataatataattttattagaatgtatttttttttaaaaacataaaccgtgttatagtgatatttttgatactcgttacactgatttacgatattatttctttatataatgatatttattacgtaaactgtataatgtatttaatttttggtgaatttattttacaattagttcaaaattttaaatgagttggaaaacaaatatgaaaataagggtttgattagtttttttaattatgattatttaagattagaaaaagtgttttttaacgaatcacatcgagaatgtctttctcattatccagtttcgattttgtcccacacaaaaaagtaaattaaatggtaaggttcttttttgggttcaactattaaataagttattaactgcgaaatacaactatactcataaatacataagtgaaaaaaaaaatcacactaccgaacgtattttattatattaaaatgc

SEQ ID NO: 52168 - DNA, 566 bp, Arabidopsis thaliana landsberg
  unsure (1)..(566): unsure at all n locations
ctnnnnnnnnnnnnnnnnnnnnnnnnnnnnnnnnnnnnnnnnnnnnnnttaagcgcaatatttacagtcagacataggaaagtcccatagtataaaaacatcaagcataccttttccagtttgaagaatttctttggttcccgtcatcaaatgagctagaaaattagagcgtgtagcatcatttgtgaacagagagcgccttacagaagccaatcgcaccaagcactcaagtgcctagaagttaaaacagagaaacattaaaaaataacaaattgtaagtcatctataatacctactgagtcccaactgtacatgaaataaatcacgtcnnnnnnnnnnnnnnnnnaattgaatcatttgtcctcataatgagagtgaataaaaaattcacaaaaaaaaggtagtcaaaatctatctttgatgcaaaagatgccattttgtttcttctagtcaagcacggaaaaaaacaaataacaataaagacatacctctttcgaaagaggggactctgtactaccataataatcgaaaaatatctggagcggggaagaatcctncaatactga

SEQ ID NO: 52169 - DNA, 493 bp, Arabidopsis thaliana landsberg
atatgtgtacgtcagtactagaccaaacgccaccatggtaatattctgtaatacactaattcacagctagtattagtatatattgaaaaatatgagagtttcaagtttcacatctagttgttctcttgttgttacatatggattatctgcagtacatcgaatttagtttatttgattagttcaaccggcgaagttggaacgggactaactaaagcttgtcagattacagttcaagttgacaatacgttcgtggaggagactcatttgtcaaaaaaaaatatttctctcgtcgctgacctaaaagatataaagtccaaatatacatacaaatggatatattaacgtttgtagagaaaaaatctcatccatcagaaatccacacaataaaaaaaaagaaaaagaagcattatcgcattaattatcttggattggaaacaactacaaaatctgctcctacaatacgatataataaatttgtctcgtaccagccaaa

SEQ ID NO: 52170 - DNA, 1423 bp, Arabidopsis thaliana landsberg
cttgctaacagttttaaccgcgatgttcatccacccgaggttattaatgagatgcttctccacttctctgctggcattcaggtttgatactttcttcatgttttgaacatcctaagttaggcttctttagtgtatatatatgttcaagctcataagaactgtttgcgtgtgcttattttgtttgttcttcagactgttgcagcttttccggttgttcctcacggtgttgttcagctcggttcctctctgcctgtaagttcaagttacattgttatgtgaagtgagattcttgttcttgatttatactgtgaattgttttttgtgtgttcagattatggagaacttggggtttgtgaatgacgtgaagggtcttatcctgcagctcggatgtgttccgggggctctcttatctgaaaactacagaacatatgaacctgctgctgattttattggagtgccagtgtctcggataataccttctcaaggacataagatcctccaatcttcggctttcgtagctgaaactagcaaacaacatttcaactccactggatcatcagatcatcaaatggttgaagaatctccctgtaatcttgtggatgaacatgaaggaggatggcaaagcacaacaggattttctaacagctggagaagttgcagtaccttcaaatccagatgcgtggctgaatcaaaacttctcttgtatgtctaatgtgaatgcagcagagcagcagcaaatcccatgtgaagacatcagttcgaaacgctcgcttggaagcgacgacttgtttgatatgttgggtttggatgataacaacaaaggttgtgacaacagttggggagaaactcagataagaacagaagtactcactagagagttatccgactttcggatcattcaagaaatggaccctgagttcggttcttcggggtatgaactttcaggaacagatcatctgttagatgccgtggtctcgggtgcttgctcctccacaaagcagatctcagacgaaacttccgagtcctgcaaaaccaccttgactaaagttagtaattcttcggttaccacgccgtctcacagtagccctcaaggtagccagttatttgagaagaaacatgggcaaccattggggccatcatcggtctacgggtctcagataagttcttgggttgaacaagcgcacagcttgaagcgtgagggcagtccaaggatggtgaacaagaatgaaactgcaaaaccggctaataaccgtaaaaggcttaaaccaggagagaacccaagaccaaggcctaaagatcgccaaatgatccaagatcgtgtcaaagagctgcgtgaaataataccaaacggtgcaaaagtaagtgaaaaacttatctgttcttggcaaattaaacaatccctaagaaaggttattactaacaa

SEQ ID NO: 52171 - DNA, 1211 bp, Arabidopsis thaliana landsberg
gagcgacaaatatttctgaaaacatatatgagttattcaggtgattattttatcacactttcttgctatgagcttcagcaataaatcactgtacagccataattctctatttgtatttgttcttgtgagtccaggtgaaaagcccagcgatactatggtcaaaaaactcctagaagacgttgagaaatatacacttgctagtcatctaatttggggtttatggggaattatatcggtaatttctacaatactcttctatcatacctgcattttgtgaaccatatatagattctcgattttcattttgtaaatctttacaggaacatgtaaatgaaatcgactttgactacatggagtacgcaagacaaaggttcgaacagtattggttaacaaagccgaggctccttgaggcttcggaacacaagtaaatttctatggaccaaacccaagaagagtatttttacggtggtaaagaggtatatatacacacaaaaaggtgcctggttacaatggtatttaccagcttcaaaaaataagaaaatgtaacgttttctgttttaccctttttacaaggcaaaatggaatggtcagtagtttatcatcaacagttgaatttgtttcagataaaatgtagttctcgcaaagaaatcgttttaatttgtcgattatgatttgaaaatgaaagaactttaaatttaacgctcttgggatcattttagttggttcacttctcagtaactacagatcaccatcatgaaaaagaagatggtcctaactttgtattatacaattgtatatcttaaaacataactctgtttctacaactggactcgaaagaaagcataaagctgtcgaaatatatgcctacagataaatattctaggaactgagctctatacattattacctctgaatcaaatatgtgaataggctctcaaaaagtgtaccttcatagtataacttaagaataaatcaattacaaaattaacaacaaaagaatgctttatggccttttcttggagctcttttctccttgttggtttgtgattagagtcacttcccctgtttcttatctgcaagttcaaaggaccaacatacttgttaatggagggctgaatccaaaatctttttttgtttgtcttggattttgttgagaaagatgaattcatttatactcaaccagtttgcctacttgggcggagaaaaatcgc

SEQ ID NO: 52172 - DNA, 738 bp, Arabidopsis thaliana landsberg
tattttttgttgggttttgggacccgaattaaggcttaattagaaagaaaaaaaaaaagaggaatcagtgctgcttttggcttgattgtgattgtgccactcaaattattggccaatattaagccaagttttgtgtttgcatgaatgtattatgtgtttattttagcatatttgtgtgttactagaagattaaactaattaagtgtaatcaaaaccaattttaatcattttccgagctccgaacactctcaagcacctatgctcttacctccctctaaaatcccaccaggattctcttcctcgatcaataaaggtcggcgatgtttttcgatttgttttctaaacattgttcttccacttctatttgtccatgtatttatataaataataattaagatgatttcgtgaattgaattatttagatgaaaaaataataattactatagtaagtcactaaaaataaaatgaaatcgcataaaagtatctaaagttaactcttgagatatctatcatagactcccgcaagtatgaaggtcttctcaatgatggcttcgagcaagaagcatcccctattaaagatatattctctcttagtaaaaaaaaacagaaggaggacatattctctccttattcttttgttttttcacaatttttcctttgaattgcttgtcgataattgttttttttgttaatcgaataaattttagattttgaagaaaggaaaatcgttgcagacca

SEQ ID NO: 52173 - DNA, 689 bp, Arabidopsis thaliana landsberg
tcatattttccatcacgaacttaatcgtataacctatgataatgtgcatagccagggaaaagtggcccatgaggttataattggatacaaattaatacagtttccagatcaagagcctgtttttgggaccctcttaaaaatgtctatattatatgtgtgttttcatattcttgaatcttggtgtatgtattcttttgtgatagacataaaatttcatgtggttttacaggattcacaatttagggtaagcctttgatagaaaagtatagtaacactcacatgagatccaatgacaagaaccacaggtgtgtgttagtctagtgattctttatctattcgtttaggtcgatgcattattcaattattttagcaacaaaaaaaaacatttgatatttgaatacaaacaaaagatggtaagaaaaatgagtaccggagtgattttgaagcaagttgaagtgtcaaatgctccagttaaagaaacattgcaaaaacatatccaactttcagattttgaaagtgcaattataaccaaaatgcagaatatgcttgcaactactataactcaaattatttgaggctactatggtcggtaaagaaagaagcttttaaaaagaataaaagaagcaaacattaaatctgtttgacctttcgaagttagggatcaaaaagattgaggaaaaatcataaat

SEQ ID NO: 52174 - DNA, 617 bp, Arabidopsis thaliana landsberg
  unsure (1)..(617): unsure at all n locations
cccccccccccccccccccccccccccccccccccccccccccccccccccccattataaggaaaccccgcgacctttcaaaanaacacccccccccccccccccccccccccccccccctttcccccccccatgtccccgccccccacacccaaacccccccccccctcccccccccccctttcccccccccccccccccccccccccccccccccccccccctccccccccccccctccctccccccccccccccttctccccccccccccccccccccccccnnccccccttcttctctccccccccgtttgtcccccancccccccccccgcccccggccccccacaaaacacccccccccccccccccccccccccccccccccccctctcccccccaccccccccacccccccccccccccccccccccccccccccccccccacccccccccccccctcccccctcccccctcccccccccctctccccccccccctccctccccccccccccccctcctctccccccccccccctcccccccctcccccccctcccccccccccaccccccccccttcctctccccccccccctccctcctcccccccc

SEQ ID NO: 52175 - DNA, 872 bp, Arabidopsis thaliana landsberg
agagaattctcatatagtatatgtgggtttgtattttattgttgacacaacgccgattctaacacagaggagggggatacatcatacatgttttggtcgaatataacacaaaccattaggacacaacaatagtttaaacacaagtcattagccatgatgtaatataatttaggcaaaacttttcaataagtgtcagtttcattcttataattataatccggtatatgtatattcaaggattgatctcttcatacatagcttaaatcaattaataaatgcggctacaagccaatcatttaaccatttagaagttaaattaaatggagtaaaataatcaaataatcatcttgagaaataattttttcaaaaacaaaattccaaattgcgtaaagctcttctctatataaaccctttctcctcaatccatctatcatcattacatcttttcttgccctaaaagtaagtataaatacactaaaaagctcccaataagatgtgtaataacaataacacaagttgtgtcaacatctcaagtatgcttcagcctgaggacattttctcccgtcgttgtatctgggtgaatgggcctgtcatcgacggtgctggcccatcaggcctagctgtcgccgtcgacctgaaacgccaagaagttccgtttgtaattcttgagcgagctaactgcatagcttctctgtggcaaaacataacctatgatcgtcttacgcttcatcttccaaagcaattctgtcaattacccaatttacccttccccgcagatatcccggagtatccaacgaaataccagtctattgagtacctcgagttctacgctacccactttgatctccgccccagttcaatgagactgtcca

SEQ ID NO: 52176 - DNA, 605 bp, Arabidopsis thaliana landsberg
  unsure (1)..(605): unsure at all n locations
ctcccaccatctgctagatcttgttcttggttctgttggctactctctggtggggcccacctatgttgtcccagtgtgtnnnnnnnnnnnnnnnnnnnnnnnnnngcaataatacatgagggccgatgtaattgcatcatactcaagaggatgaggaggtcatctaaaccctaatacctaagtaggataagacaatctcttttatccctaagcaattttattgatagaatatagcctggtaagcactaaccttgtcagcaagctgaataacctatccctaataagctagccctagtgagttcttgaaagtaaggcagtagtctctaaggacgagctttgaccagtagtgaaagtgaaaagcgaataagaattgatttcttaacttatcttttttcaagtaagagtctactctactctacatagtaggctagaactagggctctacggctggcgtccacttgcaaaggaccaattcgactctgagttgtcgtaaagaaaatcctttggcactttcatgcgtgatgggttgaagcactccatataaaagccgtgtcaagtaggcaaggtgtggaaagtaagctgcttcttctatcaaagagataata

SEQ ID NO: 52177 - DNA, 674 bp, Arabidopsis thaliana landsberg
  unsure (1)..(674): unsure at all n locations
tgtgacacggcgaaaatgcgtgcgtgctcatcgttccggacacgccgcacgaggttggccgggtggtggtggactggtggcgagtccagggcggcggttcccgtgaacgtgccaggccggagtgagccgctctgaaatcgtgctgtgcccggacactggtatggcatgggggtgacgacggcgacggggattggtgtggtggtggccagccagctcgcgtcttggtcattatggtcagatttttctccgggaacaggttttcgccggagggtccatggcctcgctgtctgcttgtgtcggcggtcactgcactctggtagaagcggtaggaggaggatcttctcagctgagcccctcgcgcccccatgggccggccattcattgattgagaagtacatgcgcttgttgcgtgactcgcagtgctgttttggccagcggacgtcattaaggacacatcacaaggcagatgcagctttgcccttcttggtatctacccttcgaaaatcaagtcttaagacttaacacttggccgctaaaattagatgcacacttccacaaaacgtcccagttagccaccttttccacctatctttttcactcggtaagaagaattacgactcagacacaatagggatcaactatgcgagaagatctaanggcatgtacagtggaga

SEQ ID NO: 52178 - DNA, 725 bp, Arabidopsis thaliana landsberg
atgatcaccgcttgaaatacgactgtttggataccatatatatatatatctcttaattcatgtcaacttctaaacaacacataaatagtggcatgtaccttacgatataccttgtaaattaatcaatgtcaatttgttgttcttgctctctttttaatagattttctgtataatctttgtaacttctgtcatatatcatatcatcctcgcagtaacgtacatatgagagacaagaagaggtgtgtgtgtgtgtttctcggaaagatgagaattgaggacgcggttgtacggtaactagagagaaatgtttggaagcaaaaatcagaagaaaacaaggaaaggagaaagtgatatgatgcgagacttttgatacatttccacacggtttcttcttagaacacacaacacctcttcacaagttgttttccactaaatttctctcgcatattcatcctccagtagagaaacatgtatatagcataatatctatacaagatcattagtataaaccctttgattgttgaagtttactacacctaattaagagttctacaagcatcttattcttaccctgataatataataagatcatatttagctttttaaacatgtttacttaattatattcgatccataaatgtattcccgaatcaataattcaatacttttgacgaataagagatttgaatgattggttcttttactatagtaagcaggaaggagga

SEQ ID NO: 52179 - DNA, 797 bp, Arabidopsis thaliana landsberg
  unsure (1)..(797): unsure at all n locations
tggccgcaaaccaatcggttaagtcttataatcgatcggttatgttttgtaaaactttatttttcgtacttttagggttgtgtttcaaaaattatagatactctttattttgtagtcgtagagacatacattttatatgtgaattttagttttagagtgttttctgttcttgttcttcactagtttactctaaaaagataatcaaaaccctatggtaatccttttaacttgttgatcattcttctacaatgattacatgtacattagtcatatgtgagtagtcttatcatagacttttgggatttctaaggagatgtttgtagaaaaacctatatgtatttcttctctatgagattgatgatttgttttccatctttaactgttttacatgttattagttaagttagcccaacatgcttcattagttaactatccagtcgatttcatcaagctacaaaatgtggtgtagaattgatgaatccattatttcattggtagagcttccttatccaacctcatcacaagttgatgttatggggctctgtgaagttataatttttttaaagcttattagaattgattgaaataaatcttaccaaaagtttagtcttcaaacaatatctttcatagatatgtttactacggcattagtaggataatttacataagtaatctaaatttaagaaccgtcattatcataatcaatcttgcatgctttttataagtctctgatggtatctttaggtctatgattntttatatattccctatttaatttaatttattttttgaaataa

SEQ ID NO: 52180 - DNA, 576 bp, Arabidopsis thaliana landsberg
agacggttaattacactctgatctgatgtgtggagccttaaagtctctgacttttgtttcattaataagccggatagatagtatatgctgaagaaggtttagtggttgttaaagagcgtaaatgatcttaaagtgcttacctttttgttttcttttttgtcttttggctgtgttaggaatggcatcaagctcttgtctcaagcaagggtcagtgccaatgaacaatgtttgtgttacccctgaagcaacgtatgaggctgtggttgcagaccctaggcttttcatgacttccttggaaaggctgcactctctcttgggtactaaattcatgtaagcttctttcttcccttatcatatcttacttagtagagtaagttcagttgttatctgctctgacagaaatttgtgttcagaaagtctctatctttgagatttaagctcttatgttgacgatgaatcatgctttgtctttcacctacaaaaattttaccagttacaatgcatgagattctctgtctatattatggattcctcttttgtgtgtatagtctgactaaaagaaatgatcttttttga

SEQ ID NO: 52181 - DNA, 472 bp, Arabidopsis thaliana landsberg
ttgccccattttctcttttgttgagttagattttggataatttgtttgttttcatgaattttaaccagtttgaagaagttttaaaaaataaaaattaaaaaaaagaataataaatagccgaggaaaaaagggactgagagtgtgtgtttgtgcgataaaagggagagatgaagagatgtggacacatcggtttcatgcttgtgctccattgactctcatgccagttttgccttttccgagctcttttaaaatatttgttatcaaaattctagtctaggcttataggattactaaatatacttgaagcattcaatatatttgatactagaagtaggtaaaacatgtatttcttttaccttatattgggttgtgcagtttaaccccacttacccaaaccaagcaaagctagcgcaacttactgctcaatgtacaaacttttgtaattcatatatatatatatatatatatatat

SEQ ID NO: 52182 - DNA, 1452 bp, Arabidopsis thaliana landsberg
aaaaaaaaaaagaagaattaaaactagtgaaatactatcattaaaaatttaaccttttttaggacaaaaattcaaaaaagatttaaggaaacttacttaaagtttgcttttagagaatcagagacaccaatgattctatatatctccgccaaatggtgtttaaacatcaaaccaaagtgattcataatctggcaacaattgttgaggatgagaaaaactttgaaaaacatatgaagcctagctataaatatctccaaagacatacacaaagataagtaataagtattttgtgatcctccccaagtttaactagattgattcaaaataatgaatcttgtatttagctttctgttttttatatttgttttgtgttgtgtgtccaaagaagataaatgtcataaaaacactgtagcttttcaaaacaacctttttcaaagtcatagtattctaaaagtccattgcaaatccagaagcgacgatttgggcgaacattttgtgaaatttcaagatactgcctacaattttagttttcatgataatctccttttcacgacgatattcaaatgtaacttgtggaagggagctaggatggagtatcataggaatattacagcatatgaaggtgatcttctttatagatgtggtgcattgtactcatgggatataagagatgatgctatttacttgtcagaaaacgataacccggagaaactcatgtatagttggattaaaggttgatgttcgaaaagctaaattctcatttcatcttatgaaataattatgtttcctttttgtgtgttagaattgacaacagaataatggatctatctatgttttcttttgatttcggtttatgagtcatatctacattttcaatttgatctcatcgaccaagatttacacagtttgtgtctaacatgtggtgacgaaattaaagcagcataaattctgatttgttttttgtttcttgtttctttcaaacatgggctacagtgaggtttttctttttgttatgatttacaaatacacactcttctaatatatatgattcataaatcgaaaccaaatacaataattgcccgacatatttatagatcatgaatttctcaaaaagaatgtaaacacagtaatagttgccccgtatcctcgctaagtaaatgttggcccagttgtcaacaactcaagatggattcctaaagtacttcaaatggttttaaacttttaatgcacactattttactggtttaaattcttcttttgtatttatttttttctttttttctaacggttaaagcattgaaattttggtcattataagtttacaaatctcaccttttctatatctattaaaaaattgaaacgaaattaaaaattatgcaaaaatttaatagggatattttgtgtgaaattgataaaggaagctaaagatatggagaatggtaggattggttt

SEQ ID NO: 52183 - DNA, 1021 bp, Arabidopsis thaliana landsberg
catgtctctgctcagccccccttgactccatccaatccgtcctccatttccttcaatcaatttgaatctatccaaatgacctcccaagaatcttggggatgtgtcctaagatcctcacttccgacgtcagaacagaactgtaccctgttttcatgttcctgtcgaatgatctccatgtccctgagaatgcgttcagaagagtgatcaagaaatgtccaaggctccttattagcagtgtagaagaccagctcaaacctgctctcttctacttgcagagacttggtctcaaggatcttgaagctcttgcttaccaagatcctatcttgttggtgtctagtgttgaacacactctcatcccaaagcttaggtaaaattttagccgttttcttcaatgttactagtgattagattagagaatctgcctttagtgttgttactaaggacatttctttttgttggtcagattcttggagagtatagggttctcaagaccagaagcgattggaatgatcctaagatgtccagcattattcacattcagcatagagaacaacttcaaaccaaaactggattacttcatgagtgagatcaaaggagaaactagagaatctaaaggagtttccacagtattttgccttcagtctagagaaaaggataaagccaagacacttagaatcaatggagagaggattagagttgccactgtcattgatgcttaagagcactgatgaagagttcgagcagttgctcacaaacccctcttcagtggcaaacgtgtaacatttattgtatagtggtgaatgttattgattgtgttcatagctttgttgtgtacttgtgtaaaaaataaaaaatcaatttggtgaaatattcgtttgtttcaactttcaaacgtgggctaaggtgtgtattattgggcttaaagtgggcctcttgctaggaattttatgatttcgcggttttacgaaattaatataaaattaaaaatagcattaaacctcaggactcaggagaagcccta

SEQ ID NO: 52184 - DNA, 562 bp, Arabidopsis thaliana landsberg
aaaagttgcatatttgtctatatccgcaataatttattatgtttttattatatacatggccatggaaagggagaggtatattatactgtgaaaatcttgtctttcttgaatctacattgtttctgttcatgatgataaataggagtttctgttctggatagcccagcataaaatgatttcagctaaataataagatacgtatgatttgattggattttatttctcgtgattgtttaaagctatgattttttttattttttttatttggtttgggtgccaatcaatgatatgattagggtaacaaatgtattggtgtatatatgttgtcgacaaaaaatgctttagtgttgattttctccttgcaataaaaactcaaattttaatgatacaacgtggagatatattatgtttcagattatacgacaaagccaaattatggttaatttgtagcattagcacaatagtatatcatatttcagcataatagcggatggtactttataacgtggcagaaataatagcgtgagaaaattgtcactatgtcattggtggacctgactag

SEQ ID NO: 52185 - DNA, 1082 bp, Arabidopsis thaliana landsberg
tatattttttttaaaaagataaaacgtctgttttatcaaattaggaatcaaatctgaactgtttttgataattgttaacaatgaatcccaaacaaaaacaaatggcccaatacaaagctaggtctatgataatgatataggttctttttcctaaacttttaaacctaatttgcgatcgctttgcaatctcgctctcccccgcgacatggtacatatacttatattttgatgtatgtgatgtatgcttcgtgagacattaaaaatggtaatactacattaccattgtttcgatctctagatgtaataattttctctcaattgttttttttcttagaaccgaacattctctagtttaagttttgtaattttgttgcaaagaatgtgtagcaagtggttatattttatattatacaataataaccattatagtatatgtggggtgattgtgtgaattgtttttttctttttgcagtagaaatgttcatgaacccatctaattttgaattttccacatattgttcttccttttttttctttttatatcaaaccatctttgtttttatatttatgttatgattaaaaatgttcgttattaatcttctaattttaaatatattgcatatgcacatagataaatattgcatatacttataaataaatattttaatgtttagtatacttacaaattataaaacatgaaagttcatataacaaagaaaattagaaacaaaaaaacattataactattaacattgtaatatttctcataaacaaaaagggcttaaggaatctagttatcaaaacatgtgtgttgatgaatgaaatgggtgttctcaacatttgttgggtagaaatcattaattaggaaatcaataaaatgtgaaaatctttgggaattatttatgaaaaatagaaatggattgatttaaaaatattttaaattattttgcgaatttgtatttggaagaagattatgaaaaccaacaattaaaaccaaaaaacttagggaagaggataattagattagggaacatattttgattttgttttgattaaaaaatattcacctttgttttaatgag

SEQ ID NO: 52186 - DNA, 494 bp, Arabidopsis thaliana landsberg
  unsure (1)..(494): unsure at all n locations
agttagttcttatttttgcgtnnatgaaataacctcatatatatnnnttttaacagggtttttaatttttggttgaccnttttttggatcatttatgatggagaccaaacacatnnntgggcttaacccatacanagatgattaccagaaatcagacatttcaaagaatttttttagaaaaagggcccaaacaccaaggggataccaaaagcaaaactcgtaagagagggtccgtaaaccaaaatcagaaagaaagaaagncccaaaaacatacanaattataatcttgaaaaagacagatccgtataaatatacttatgtaatatggtactatgactcattattggnttatatttttaaatggaaagcatatnattttataactataacactctactgaaatctttaattccacaaccataaaatgattttctatttttgccaaatctttttatttgatttagagaaaggataatggattataaatatgcttt

SEQ ID NO: 52187 - DNA, 223 bp, Arabidopsis thaliana landsberg
aagccttagattgttatcttttggcaattgtcattcaggcagtaaacagaatatctgccatgacttcctttcgatctgattggtgcatctcaagacaaaggacatggggtgtccctattcctgctttttatcatgttaagacaaaagaaccactcatgaatgaagagacaatcaaccatgttaaatgtaagggcctataagagagtatggtgtgttttattgg

SEQ ID NO: 52188 - DNA, 582 bp, Arabidopsis thaliana landsberg
cataagccgcataatcttattatatatctatttgtgtataactctatttgaacttgaagtatatctctggttattgcttgatgatgttctactatattaaatctaaataacttctccatcgaaaacatatgtagctgttagttataacttaattaagactggtgaagcccatgggccagcaataatacataaacttaatagtaagaaagtttcaagcaagaagaatcaagctaaaaggtgcaaaggccaaaacatagacataggttagaaacatatgagacatagagctcaatatatagatggtttaggttttgaaccagtccatatacagttaaaacgaaataaaaaatgcgactttttctgaactagaaatttaaaatggttataaaacaatttagtcgtgtttctcaagtctcaataccggccaatgttttatggaggtaatattcctattgaacagaaaaataaaatataaacttattaaatattttcaaatgatgcattcgaaatttgaaatggtatgtgaagaatatgcactatgtctaatgatatcatatcattttcctcaacttgtaatttata

SEQ ID NO: 52189 - DNA, 459 bp, Arabidopsis thaliana landsberg
atggggacatggtgcacaggacataaaaacacattagacaaccggagacacaggccaagcacatccggggttctcaagctaatgggcacttggactgcttgacggagtgcagcctctataaggtgtcgagtatcgctcgaggcgttgctgaacaactacaaaggctgcggctgatcacacataggactgtcccgctggagcagggctggaattcacaatgagacgggataacgcagggcataaagggatgagctcatgctgttgacatactcgacatcatcggaccataggaacacatggccgaaaaacattacattagagaaagggttaaacttggaatcacatatgtttgctggagtgatgccattgcgactattgtgacttacagtggataacaactgcggcaggaagacgaatgagatttctgctgccatgaagtcaacatgtaagatgcttatt

SEQ ID NO: 52190 - DNA, 1297 bp, Arabidopsis thaliana landsberg
aaaattttttaaaggggatttaaacaatttacctttcttaagttaaaataaaaaacccaatacaatatggaaaccagttaagatatcctacttaccgtttttaataatggttaaacaaaaaccgggacattgtacgtggaaaaaaaacatacttaagcagttttgtttatgattaaacaaagaccatgcattttcaaagtggttatgtagacaaaaaccttttcgagtttcattccatatgtttgattaaacagcctgtttaacacaactttattattatatctaacgtaaatcataaactttccacaaagtgaaaatttcacacttgtacaaattgtcattcaaaattcctacctatataaataaattatagcacaacattgacaaaagagaagaaattaaagtagtctcgtgtctcttcttcttccttttcttccggcctcgtgaaaaccaaattgatttcatcctttttacttgttgacatttacatacatacacatgttcacataaatagatatagttgtatatgacttgtgtctatcaatccaaaatcttcattatctactataccaaattctcatacaaatatctcttaatctcttttcaccacctacgatattgacatatataacgtacaattaatttcatcaaaacttaatgtggctgtatgacttgtgtctatcaaatccaaaaatcttcattatcttgtataccaaattctcatacaaatatctctatatttcttttcaccacctacgataacgacatatgtaacgtacaattaattccatctaaaactatgtttactataaactcaaattgtggtccattaacactaatcgcgaaccttacccgaataaaacgttcaacatcatgtattcatatatgtttatgtaacgtaatacatataaacgcatataaatctatatatggagaagtcgctaacatcatgaatgacgtagaccatcatgtagtttgacaatggccaaagacccactggttcaatccaaaacagcaattttttcttttcttctatatcttaaaaaaaaaaactattcgttttgataaaaaaaacaaccaaaacagcaaatcatgacgcagagaaaatctcgttcgtcaaaagaccctttcattaatttctattattaacaaagcctatgcaatacacataaatgcaatagccactattcaattcttaaaattatccgagcaataaatcaaaagtgagagaggggagatatcatatcatatatcattatcatgttatcatgcatgtccccataattctttatttttt

SEQ ID NO: 52191 - DNA, 896 bp, Arabidopsis thaliana landsberg
attgatactgaaactcagaatgaatccgaaatggtggtatacatttctgtccacctacttttatgacttacaaaacagtacttgtagcttcattgcattttttgttctcgtcgactatcttggtaatgttataagccaacttgctcattgttcaggacgatgaagacttgacagaagaacaaattaaggatgaaatcaagaaaatcaaagaggcatatgctgatgacgaaggttggtgtttatttcctctgtgtggagttatgttctgtatgagtcattgtgtgtctgtgtgtataaatgcaaatattcattttagtccttgtagagtttctgtatctctcatgtgctaattgattttgtcttttctgtttttactcattaaaattttcttttatgttttgtcagaatttccagatgaagtagagactcccattgatgttcctgcaagaagacgttttgcaaagtacaggggtcttaaatccttcagaacctcctcgtgggatccaaatgtaataacactgtcttgatgtgaatttcattatatttttcacagttaagtgttgctaattttttataatttattggcaaatgcaggagtctttacctcaggactatgctagaatttttgcttttgataatgtcgcaaggactcaaaagcttgtgctcaagcaagccctgaagatggaagaagaagacagagatgattgtgtaccaattgggtcatatgtacggctgcatattaaagaagtgcctcttggtgctgcctctaaactatcttctcttgtgaacacaacgaaaccaattataggatttgggattctccagcatgcatcaagatgtcggttctgcatataaggtaaacactcttaagatatctgtttgttcagaccttgagt

SEQ ID NO: 52192 - DNA, 630 bp, Arabidopsis thaliana landsberg
cggatatgggcgatgatgttgagctatcataatatcaatttgacagattttacagttctgaatcatattaatcggatgatactctaccatcaacagaatcaaacacacatctgaaaacttcaacagcagcaaataataactcaaagaagcgagaaaacaatatcttataaaaggaaaaggctaaacaaacgatagacgtaaccctaaaatcaaaggaaaaccacatggaacactattattcttcctggtttcaaaatcaattggctaaaaccaacacaagcacactgaaattgaagactttactatcggccgattcatatcctagatcagtccatctaaccatacaaatccaaaatctcagagatctaaacaaagaaacgagtccatctacagatctaatcatatctaactctgggcgagaacttaaatcggaagaattgaaaatccaagatgaaatggaactcgaatcgagaagcaaaggtcaaatcaagccatagagaacaaagaaagagaactattttagagagaaaaattagacttgagctcaccatgggtgaatcaaagctaggctcagagaaaattattggagagaccaagaagcaggagaataatggaggcttggggggtttc

SEQ ID NO: 52193 - DNA, 840 bp, Arabidopsis thaliana landsberg
gatttttctgtgttacttaaattgaatgtgctatgaaaaaataacatcatgtatccggtttagtcgtcgtttccggtttagatttctcactttttcgaccacttataaagtagagagacgtgtcccaaataaaaagatctgtcacttattcgtatatcacagctgtgtcactattacccaaaaatatcactcccttctagatttcgcacgttggtattaattattatatagatttttttttcccagaaacaaatctcatcctttctctctcttcccctcttctctctatttccagatcgaaacatctctcttcacaaaatgcctttgtcacggtccctcctttcgcggaggatctcgaactcttttaggtttcatcagggagagacaacgacggcaccggaatccgaatcgattcctccgccgtcgaatatggccggttcttcgtcatggtcggcgatgctccctgaattattaggcgagatcattcgtcgcgtggaggagactgaggaccgttggcctcaacgtcgtgatgtagttacttgcgcttgcgtttctaagaaatggagagaaatcactcacgatttcgctagatcctctcttaactctggcaaaattactttcccttcttgcctcaaattggtacgccttttgtattgattttaccatttcattgatttttgtttcgtcaaattaggtttcgtgttctctgatttaggaatcgatttaggtgaatctgtgagttttgttatctctttcacattatagagacactgttgaattacctaaatcaagcttcttataagaatattctgtcaagttgatggcgtttgatcatgtctt

SEQ ID NO: 52194 - DNA, 141 bp, Arabidopsis thaliana landsberg
  unsure (1)..(141): unsure at all n locations
ggtcagcaggtggcactggactaacggatgtannnnnnnnnnnnnnnnnnnnnnnnnnnnnnnnnnnnnnnnnnattaagggaaacagacactatttactggcgacaggagcagcagactgtcgagtgtgctgacttacat

SEQ ID NO: 52195 - DNA, 869 bp, Arabidopsis thaliana landsberg
agtttctaccatatacgaataaaaggagaatttgttcacgttgaataaagcaaatggtgtcacatccacaatcaatcacaacatataggggatttgttgggccacgacttaaatcaaaacaaaacaaatgttcctatcgatttaaacataccacaaattcataaagctctcactctttgtggtttctattgacttaattaaaactcagtactcgttcaagactaccacaattttgttttcttttgctaccggtatttattatatataactcgtatgatatagtatctgcttaacattttgcgtggtttgttgtttatggtttgataagtgattgaaatttttcacgtaccgcaggaaaaaaacaagaaggatgattttagtggttgactagacgtacaattagagaaataatggattgatgtttaataatatatggaattagtaatgttttggtcgatattataaaaactataggttagatgttaattagaacgattttaaggaaaatgaaattatgaaagtcatagcttcaaaagcgattttcgagaatatatatttctgtctttattgatattgaacttgcatattaatctataaaacctaaaggcaattgaggatatatatataggaaatatctttgtccaaattgaaatattattacataagcaggcatgtggcatgtgatgtaagtgaaaaactagagatgagtggatttgtggaccagttaaagtcgtagacttgtcaaatatgcatctagacaaactaaattaaaaagagttcttataatttgttttctatgtggaattcgacatcacaccaattaggtaaatcatgtaataaatttgaacatcatcatggtgaacaaatga

SEQ ID NO: 52196 - DNA, 1117 bp, Arabidopsis thaliana landsberg
tcataaataaaattttcattatttagaataataaaactaatcacaagattatttacttttacattcatactttgtacaaaaatataataactccaactaatcatcctcagtcaagcacttagctgaatttaatcacacaattcaatttttataattcttcttttgtatcatattttacaatctccagatattttggtttaactgccgaagatatttggagtgggagagaaaaaaggagaaaagaaaaaggaggacacgtagggcaaaaggaagcagacagatgttgtgagtgtgacgtaaggcaactgagtttacgtgaaaccaatgtcggtaagagagaattcaaaaacaaatcttcacgtctctctctaaacccaactctcatatatgtcttcttccactaactacttcctcaacctctcccttataaataaacctcttgacttcactcttcatctttaagatcacatcaatcacaactaacacttttacatgaagagacagagaaaagatatggaggaagaagggactgctgatgatcactcattggctgctgcagcgatggcggttgctgttgccgccgcagcagcaacagcagcggaagaggaggagcaatgttggggcggcggagtagtggaggagataacgtggagctctgtgtggttgcctttttgggacgttgagtttgtaggaagaaactatggtgtcttgttcaatgatgttgtttgggacgatgatatttggaacatccacaatttaactcattcctcatagtcatagtccttaacctttgtttccttatgaaaaaataatcggatcatagttccctttctagataattttcctctttcatccaatgggttaattttaaaatcacttgtctagatttttatgagatagtccgtttataaactatgttcatattttaataatactgttaaatgcatatattttatagacgccgtgcctcggcttgtctcaagactcgagagtgattcacaccagtttccaattggtggccatacctacacattaccggctccattaatattagggattatatatgtacttaaaacgtttgacaaaatagaataaaaaatatatgtactttaatcta

SEQ ID NO: 52197 - DNA, 1319 bp, Arabidopsis thaliana landsberg
  unsure (1)..(1319): unsure at all n locations
gtagtatgatagctagagatcgacatgcaagcttttgccagaaagtatgatgatattcgacagagtcacagagcattggatcggtagccttttactcaaatcaatcaaagatcgtacacacaacattatttagaagcttttgtctctatcacccctataataatttaactaatttttcttctttcttcatttattaattcttccttttttacctcctactataaatattaacatagcatgtacatatgtaatttgcattttagcctaactctttcattggtgaacatgcatgtgatcactattcactactacacattattatcgagaccatttagcctagctacacatcttaatttttatatgggaatggcttctttgcatcttgatagtttacttactatgctaataagattttaaaatgggcacttgtatgtataataaccattcatgatgaatttctatttgataatgggttcaatatatatctgcttcacatgacatagtaatgttaggtttgtttgggttttgtggaatctccacttatatcatcatctaataatctatctagctacggtcacattgagttctatagttgcattgtaccgtgcatccaatagaaacataatacctcgataacagatcagtataaattattagattcaatttcatattattacgttacctattgatgaatctgattttttttttttgctaaatatttgatgaatctgaatgtaatttagcttctcatctcaaagtgcatacattactatcagatacttataatacatttcatgtatgtttgtgtgtattcagatcctatgaggaagctatatatatatatatacatgagaaagtttcaaaacacatgctaatacacaagtaaattaataaatcaattataacattaatttgtctattaaaaaatatatcagcaaaacatagtacaatagtaattaccttatattttgttttgtgtccccttatttctgaacacatcaaacaacaattatatcgtttcaataatctaacttcacatatggtgatcacttcctctacttgtacaacgctccgagcctagatgcctcgacatgttagccgttgtagtgctattagttcggttgaattggaccgacgacatccgattatcaatgtctctaccaccattgntgctactactaccatgtaacaacgaatataatgtcgaaatgttttgggaagacgaagatgaagaattacccattaatggcatttgaaaatggcttaccaatttgctcggatctaatgtcttcataagccctgaaccagctgacgatgat

SEQ ID NO: 52198 - DNA, 1137 bp, Arabidopsis thaliana landsberg
aatttctcaagcttcattcgtcagctcaacactttcgtgagtttcactctaacgaaaactcatttagtctcaatgtgaatgcttcaattaattcgtctggtgaattgaatcattcttttgtagttggttagccaatttcgtaattttctcataatttgggggttggtgagaaaaccttctagaagctgagaatgttcttgttctttattttttattttttttggtttagggatttcgtaaaactgtaccggataaatgggaatttgcaaacgattatttccggaggggcggagaggatctgttgacggacatacgacggcgtaaatcggtgattgcttcaacggcggggaaatgtgttgttgttggttcgccttctgagtctaattctggtggtggtgatgatcacggctcaagctccacgtcatcacccggttcgtcgaagaatcctggttcggtggagaacatggttgctgatttatcaggagagaacgagaagcttaaacgtgaaaacaataacttgagctcggagctcgcggcggcgaagaagcagcgcgatgagctagtgacgttcttgacgggtcatctgaaagtaagaccggaacaaatcgataaaatgatcaaaggagggaaatttaaaccggtggagtctgacgaagagagtgagtgcgaaggttgcgacggcggcggaggagcagagggaggggtaggtgaaggattgaaattgtttggggtgtggttgaaaggagagagaaaaaagagggaccgggatgaaaagaattatgtggtgagtgggtcccgtatgacggaaataaagaacgtggactttcacgcgccgttgtggaaaagcagcaaagtctgcaactaaaaaaagagtagaagactgttcaaaccagcgtgtgacacgtcatcgacgacgacgaaaaaaatgattttaaaaactatttttttccgtaaggaagaaaagttatttttatgttttaaaaaggtgaagaaggtccaaaaggatcaacgcaaatatataaaaggattttcatgtattatataatttaattagtgtattaagaaaataaaacagatgttgaaagtttattgctgcttaaattatgtcttcataatgtaaaaaagcatgtgaaatac

SEQ ID NO: 52199 - DNA, 1078 bp, Arabidopsis thaliana landsberg
caaaatatcgatatttaattgtttgagaatttttaggcatttatagtgttgacagaagatagagagcacagatgatgatatacaattcggagcatgttctttgcatcttactcctttgtgctctctagccttctgtcatcaccttttatttgctttattgtctcttttttaagcttttgatataactattatctatacaaatccatataaccagcaatcttacatccatagttacgagagtgattgaaacagttatgaatatataaatttcaaaacgctagttttattacatgtattattttgtatatggagccttttaggaccgtatataatcagttgggtcatatatctattgaagggttgaaaacgaagatgagccaggggatccgactgaaaggatatggtacctctaatcccagtgtagtattgtgttcgtagtcttctcaaatcggagaccaaaccaaagtaagttaagtctcttgtccgtctccgttactcgaacctcattaagcttatcatcttccacgataaaatatgggattatagttttacattcaattgtatcatatatgtgctaaagaattccataaggtttgatggttttataagtaaggtcatgttttgtaactggagagattaggattaaaaaaaaaattcatgaaaatcattgaaagtaaattatattgtagtttattaaagctacaattcctacaatattaacaattaccgtagtatgttgatgtaaacgtactaatttcaatttctcctcaacctttgtgtatatcccacctttctctcgaaggtcttaggttgaccggatcgaatacaacactcccctcatctcgaaggtcctgggtcggtcgacagtttagaaatttaagagtgagttggtcacatcaatggctttgtctaccgactaaaccccatagtattacaactcttgtttagtttctcttttaagtccatcgataaatggagcacggaatttttgggtccaaggtagagactttaaggtattagtgtagtaacatttggaattttcttaacttgcaatgtggcctcacaaatagagccggtc

SEQ ID NO: 52200 - DNA, 503 bp, Arabidopsis thaliana landsberg
gaggatcccccgctccagcctccagcccacgcctataggggcccctgcctagcagccagccactgtcggctaggtggtcaatgcccccgcccgccgcccatgccacgccgccagccggccagctggctagccggcccgccactgctccactgtgctccagtagatggtgcgatgcccccttccctcgccctcgctcttcgtggctctgaactgatccaccttctgcgttagggtatgggtgacgggtggcactcgatttgctgagttcagctctcattttcttgttgtcgacatatgcagctcgattgtttgccggcgatggtgcagaccaacctctccatcgacaagattaatgccatgcttaaggcattcgaccatacgagagggtatgttcaattatagttgtttcagttatttatcgtatacataacttaacttgtggattgggaaacttcatatgtgtaattgtaattaatatcatgtttctgagaaactaaatactc

SEQ ID NO: 52201 - DNA, 999 bp, Arabidopsis thaliana landsberg
aaattacgagaagtagggatatgacatcaacgtgaacataccaactattgtttctccatccccatattcgatcttggagaggccaaatgtgtgcctagttatctttggaggcttgtttgtttttttatctagtcttgaaagctattgaaatcaccataccaatctcaaggtttgttttcaagagttaggttgatgaaatcagtttgttggttggaggtctttctttagtagctgttgtgtctatcacaagtaatcaattgctctcaaagtagttttgccagcttatggtatagttttgtctaggacaggtagacttgagcgagtttatgttttattttatgtcaaatatttggagaggaagagagatcttcaagtattcgatcacttgtccatgacttaaaatctagtcaattagcttagaactgactagctctaattactgcacgtaaaagtgttattgatgcttgggatcgtgtcaaccaccatgcaagagagtgggatgcgaagatagtagctcaggtgccggaaactcatgatcaaagcggtggtgttactaacgtttatttgggctagttatattaattatcttattgttagatatgacagtttatagcattaataaacaatctaaaaatctatctttttctaaaacgtaaacaacagacgtggtaccattaccaatattgaattttatgaagtacaaatgttaaaatatataagttgtacaaatgttgggttgtgttttgtaatccttttattttttatttttttggtaggatgtgttttgtaatcttttagaacaagttgtaaacgtttgtttatttggtataaaatcttaacattataaccaaaacaaaaaatctctaagttacaactacacaagcccaaaaggcaaaaagtgataaaaataaattactaaatcctaaacaagtaatttcatttcaataaaaataaggaatcttctaatatcacaaaatgagttatcataaaccaaatcca

SEQ ID NO: 52202 - DNA, 672 bp, Arabidopsis thaliana landsberg
taaaacgtttctactttcttgtacaagtaatttaatttgccaaataccaatcgctagccgctttaaccaaaatatattccacatttcaaactaaaccgggttttgtaccaatgtagtaagtaggtcactctcaggttagcttcctcggcaagttataggtctttttcagaaacttagtcgcaggttcatcgtaacggtaacacaatactcttaaaagtgtgtttggttctgtcggactccacggaccagaagtcggcggtaacggaagcttccctctgtcagaaccatgattctccagacacactgctttaaaccgttcaatcaaagaatctgtatccgtgcgcagcagcggaagtatactcttgacagtcgtcgaaaccttctcgatcaaatccaaaggcaatccgtctccgtttgaccagaaaagatcgcatagaaacttgaaatcctcttctacggcagcagagtcttgaattgtgaagccacgcgatggtccacctgcaaggaggaccaataagaacccgtcgaaagaagctctcatgatgtccgaaatgactctggttcggactctgtcatgaaccgatgaggagataatctcaaggcaccgttcgagctaatgaagaaacggctcaatccttgaggaaggaacttccccgagggacagaccatccc

SEQ ID NO: 52203 - DNA, 1009 bp, Arabidopsis thaliana landsberg
agcataatctttcccgcgttggaagtaatccttactttaactagacgggatactaaactctgacttgggccgacccataagtctcctctcttgcaaaagcttcttggcagcttcagtttcttcaatgttcttcagcttgtatctgaatattatccatccaaacaaaaaaaacattaatctctaaaatactcaaatacacatttatcttacatctatgattgagaatgtattcatactcaattgggagttggacttctgctattccggtagtccactgcgtcgagctctcttccgagctacgcttcttgacctgagaaggaaggaaggcttttagtaacaaacaacaatcttaacccctattaaacatcgacactaaacaacttactttaagatgatcaggtatcttatataactcatcttccactcgcttcaattcgttctcaacctcctctgcatcatcaatatttcttccccgtttcttcgccaattcttgttcaatgtactttaccctaaagaatcaaaacaatcctcaacacttacaaagacaaagacaaagacagctcactctagcttaatctatttaactaccaagcaaactaggttacaatttttgtaaagagagatttgcttacatgttgggatcttcaatcaaaacagcagtctcttgagcaaaagtatcttgcaacacaagctcctctttctctccttcagtttcagttttctccactggtttcacttttccgatgctagattgcgccgtagaagataaagctgggatacctaatttcctctctcgcagcttctgcaaaaacttcacctcctctaacgccaatctgtagatcaaacaaaaatcgaaccttttcaacaacccatcaaataaattgaagaaaatcaaaaccctacagatttgcttttcaatttagagctgaccttcgcttctcttcttcctctgaaattgcggctttgtttacatcattatcttcttcttcctcctcgaagctacgcttcc

SEQ ID NO: 52204 - DNA, 1065 bp, Arabidopsis thaliana landsberg
attttgtatctgattggcgaaaaaggttttcaatggtatggtaaaacagttctttgaatctttcgttatggttaaaagacaaattaatttgacaaatagatatgaaggattttagtaattaagtatcatataaaataataagatcaactgtgaaaatatttctgaaataccttacataactataacataaaaacagaaaagtaaacaacttaaactaagtgaatggcctaaaaacctagaaaatagcatgtcgatctaaacatataggtactatgaacaatacggtccatttgctttttctcatctactattagttttcatataatttgaaaatcttatgttactttttgtagagagtatatatggagttgaagtctatatagtagtcagcaatgagtaaaatcgtaaaggaaaaattcgaacattaataaatttcggttcacaaacaaaaaaatacttgagtattgtaccattattatctttactaacgtatttttactttctgtcactttagcttttctatgactttgttgattgctacttttttttcagaaacatcagcattaccgtcaagacacaaaactaccaatccatttcctttgcttctgttacatacgatttatgtataactgtcaagaacgtgaatgcatttttcaatacatatcataattgaatcaatattattgatgataaaaggttacatttgttctgttgtattataatacctttattatgtaaatttgaaacttgtttgatctcgagtatgaattagattcgtgacttcgtgtacgaaaacaataagaaaagagagtcaaactaattaatttaggctaaaaaccataatggaacaaacaacacacatgactgaaacaaaacagcacaagtgctctttgaaatcatcaaagtgcatgtacatgagttgtctcttaaaacaagagttttattcaaacgttgcacgtgtggtgacggtggaactagatccttctttgttaccattaaagccggtaagattcacacaccggttacgcttactacgcaacggaacctggcgactgtaatgtgccg

SEQ ID NO: 52205 - DNA, 568 bp, Arabidopsis thaliana landsberg
  unsure (1)..(568): unsure at all n locations
gaagtaaaaaaaaaaactttttgctttctctttctattctttattacgttncatttctcaaaaccctagagtcaccagaataaacccttctcttcttcttcttgtctttatgttcttgtttctttcatgtccacatggattcttgtaacagtggaagcttacaatcttcaagcgatgatcacgagtcttcatcaactggtgctccacaagaacactcctctttcttcctcccacccttccaaccaccaccgtcttccttcacctactacggtgacccaacaaccctctcttcctcctccttcttctccgctacttatctaaactttgtcaacaatctcatctncgacgacattcttaaccaaactcatgttctccctcctcaacctccaccacctgctactactactcctccctcttcttaccgaaaccctagaaaacgaacaagagcttcaagaagagctcctacaactgttctcaccaccgacacttctaactttagagctatggttcaagaattcaccggcgtccctgcctctcctttctctgaccctttctccttcactactcg

SEQ ID NO: 52206 - DNA, 524 bp, Arabidopsis thaliana landsberg
gccaccaccgcctcgtaatcgagcttgcccttctcgaccagccgcgcgatcattatcttcatcacggccttgccggtcgagaagaccggggtgggggtggtgtcgctgaaaggcaccgccccttcgcgatcggcattgccgccccagatatccagcaccgtctcgccatcgatcacgaccgagaaccgcgcgccgcgttccttgccctcggcaaaattggcggcgaaaacatcctttacggcggcgaacttgggcgggcaaatgccgccaatttctaaagtgttgtcggtcatgggagaggcacctcgaactgtttttctgtgtgtatcgctacacctgtgatgtgacaagacaaacgcgacgtgacttgctatggattctcaaaatcaggaggaaatgccatgcccgtgccgtttatcgcccgccgtaccctgtttgctgacgctgccattgtaagctttttcagtctcgcgcctgcctttgccgacgatccggcccaagatacatacatgcaagcagccgtg

SEQ ID NO: 52207 - DNA, 1229 bp, Arabidopsis thaliana landsberg
  unsure (1)..(1229): unsure at all n locations
ctttcgtgtatctatgaacgagttacttttccgattaatgtattcatacatcaaacagtatgggcttattattggcccataacttcctaaaagaaaacatcgtgaaacaaaagatccgtggatcaaccgtcggcagcgcaaacgtcgtcgtttgattgattggtccatgccaccctaaatccctgccttttttgcaaaagctacacagaagaaactgcaattcccaataagcccgcaatcaacggcccaaatcgagtaatcagtcaaccatcccatacaaccgttctcacatgaaccttgtctttaacaccggtcaatctaaacaaccaaccaatcataattcaccacgtcatcacgtcgttataatctgtctctgtgtctctctcttcttctcactctccgagtggggtgatagtgtgactctgtaacgagaaagcacaatcatatcgattccttcttcaaaagctcttttgcttttttcatctccttttccctttctcttttcttttgtaattttattaattatgataagtgaaaagggctcctctttaaaacccttcgaattcgtccatctcttggttctttgtggtggcgatggcattggcagaggagcagcatcagaattatcatgtggctgaggcgattccgggtacgcctgggatccatgatgtcaggattcaacccggttctgagaattccgggttctgtgttgatccggttggtgtttctaatgtacctggaattaggagagttgggttgagagctgaaatcgatacttctcctccattcggatcggttcaggaggcggtgactcgattcggtggtccgtggttattgggttcctttcaagcttgatgacactatcgtgagtattgatctttctcagattgcacttcaatgtcagatcagtgtattatacagacacattagtatgccgtgcatactaacacttgatgctttgatggagagcatcttccattgttctttagaggccactctcatgacttctgtggaaggacgtgacattgagttcannnnnnnnnnnnnnnnnnnnnnnnnnnnnntattgagactgaatataacactagattagaatctcataatcgacgttgtatcaacatataatgaagactggtgaaagcatcaagatcgcttaacctggcggcctgtctctgtgatcatcattaccattcagtgttgatcgtcgtgtgtaaatgcacacactgagt

SEQ ID NO: 52208 - DNA, 1259 bp, Arabidopsis thaliana landsberg
ggttagactactctgtggggcaattttatgatgatggaaggcaagctaccaaagatattcttaatagagggcgtgttcccattgttacgggtggaactggattgtatctgcgatggtatggctgtagattatatacttgtctagtggctctttcgtataatgttaaaagcaattatagtatactgcaaaatctagaattcatccatttacatgcttttgttaatgttaggtttatgtatgggaagccggatgtgcctaaaccttctccagaagttatcgctgaggcccatgatatgctagttggttttcaaaccgaatataactgggacgcagctgtggagttggtggtcaattctggtgatccaaaagcttcttctttacctcgtaatgattggtacagactacgccgtagcctcgagatactcaaggtttgacaattattaacttcaactgttgtcttgcccttgtagataaatgatttcttgcctgataggttgatgaactatcattgttttattttggattgtatgcaactatgcactattaatcttgctttgaatgtttttcctggcagtcaactggatcgcctccgcttcctttcgcattccttatgattcctttcagtaaatttagttgctcctgatgctgatgacttccttgaggacggttcatctgccgatatctctatccaaaacatagagacagatttggactatgactttctttgttttttcttgtcaagcccacgggttgctctctacagatctattgatttcagatgtgaagacatgctttcaggtaaaaataagtgctactacttaattagtaataacttgcaagaatacaattgcagccccattgcatggcaccttacagtaataagtcttttcttatctgattcttctaattataacccaaaaaagagacaatttgcatgctctttgctgtgtcgtatgcaattttgtatatatttgcttggcattgcttctgagtttatctttccttggtgctttgtctctcaactcaggacccaatggagttttgtcagaagctagatggcttcttgatcttggtcttcttccaaactcaaatcctgcaactcgtgccattgggtacagacaggtgaactctttatttcctgtactgggttgtgaataacgaactgagaagagaaggctttcatctgttaatctagtgcatagtctttataattagccaagggctctgcagtggattgtagcagttaataagcagcatgt

SEQ ID NO: 52209 - DNA, 434 bp, Arabidopsis thaliana landsberg
ataaaagtgtgtaatgaatttatgctttttcgagtaagaaaggttacactcaaggtaaaagatgatactggtagcttaaatcggacatgtacattaagccaatgttgaagcatgtttgacgttactaagaagcttacttccagactcagaagtgccagcagagacgtcagcagctgaagccgccggttttaacagcgtagatctcagatgcggatcatcagttctagcaatggggcccgccatccgatcaacatacgtgccatccgacggagtgtgatgtcaggagtgaaacccctactcagatggcaagaccctctcagcttctcttcgtgcaagctagagatcaatatcccaagtcgaggacagctggcactgcacaagacagacaagaacactctaacttgtgacttgaacggctcggtaagacatgaaag

SEQ ID NO: 52210 - DNA, 1205 bp, Arabidopsis thaliana landsberg
ggacggctacatgacatcgtgagttccttgtgctacattaaaaatgttaacaatatgtttggttttatatcataagtgtagtttgagcaaaacaactaactttatacgttttcctacataaaatccattgctagtatagatttaagttaacttaaaatgtcgttaattacatgtgtttgggacataatagagaaacttggtcagccttttgacgatgttgcctgaaagatatagctatattcactacaaaatacacaattgaaatgctctaaaattgttaaaaataacattttaaaccaaatatagttggtagacgattttagctcaacggtgcaaacatacaagtgaattgttcgactaaatttgttaaataagacttttcaccaactgtagtagtccatcaatgataaaaggtaaagaaaagatgcataggccgtaaaacctataatcattgttttcatttttaaatttgtatattatgcaaaggtttaataaaacggagaaggatttgtttactgacgatatttgattccaaacgtagaacacattctaaaaaaaaatattttcttttatgaatttatgaattaaagagcataaaaaattaaaatgactttaaatttaaataactgaagtaaagaaatactaatcaaatacaaaccatataagaacaccataagcagaacgtaacatcatcatcttaatgatttgaaagggtctcagtctctcagattatgaatttatgatgcagtttcatagtgaagaatggtcccaacaagaaactttaaactgtttttgagtttcagaatttctctatttatatttttagataatgcttctatatctaattagatagattttactttgttttcaaagtctatctcttgctcttattatccttcttggtcgattttggtcctagctaagttttatttgaagcttttgtttctctcattggtatacagtttttaaaacatataaaacaagattattctctcagctagagtcgctggtcctttttatatattgtttaagaagaaacttgtcccgactagtttctccaaaccgcaatatataaaccatattttttctttccctattcaatttggttttaacttttgttccggttgtaagaaaacagacgataaaaaagaaaagaaaaggaaacagacgatagcttacggcgaagcaaattaaataatatgata

SEQ ID NO: 52211 - DNA, 513 bp, Arabidopsis thaliana landsberg
  unsure (1)..(513): unsure at all n locations
ataaaggtcataccactgatattgttgaagaagttttgtactttaaatacaggacaggatttacaggaccgggcttcctgatataactgcaattatttgctattagggtataatcgaaatgacgtataaagggtggttgttaaattggaagcacttacccgggtcacctgtgcctgatgaaggagcctggctaatgccgcttacaggtgttctgacccagcaaataccactccggaagttgcactggaaggcacataactaaatattgagccactgcagattgaaggtgggcttaagtactgtaatgttggtgttggattcactgtaactgtgactgagaataggtcgggttatacagcttgtacagaaaccgtataaacataagtacatttaccggtatgtagttgtgtttgaagaatttcatttggccacctgcnnnnnnnnnnnnnnnnnnnnnnnnnnngctatagcagccctggtccagtcaaatgtcgcacctggtgtattgctcgc

SEQ ID NO: 52212 - DNA, 872 bp, Arabidopsis thaliana landsberg
taatcatctcaatgcatacactgaccaagtttaaggtaacatatatagacgaacaagccaaggcatcagacgggatctcatctagtgcataaagacggcactccaatgattcaggaccaggcgcaaaatgcaagttctgcagctcggctaagaatataacataagtctgatccaaaataaacagagccatgtaagaatcaatcatatgaagaatcacaaactagggatctatagtctatatatatacttggccaataggaggaatatcaggccgggcaaaaggtgaaataagcttcacagtagctcctgcttcttcccaagtttccctcattgctcggtgtgcagctgattctccaacttctagataaccagcaggaagagtcctgcatactcaaagttccatctatcattcacataacttcacacacaacactagaaaaaactcaaagagacaaagagaagaaatgtttttgatttgtatattaccataaaccgtgtgaaggttgaatgttacgtttgcaaagtaaaacttttccttcatgctctataaggcaaccaacaacctgcaatttcacatttaatcaaacattctcatgattgacacaaaacaaaaaggttgttggtagatagagatatcaaaaacagtaccatcttaggattctgataagcgattttgccgcaatgtgtgcaaatagctctcaatttctcttcaccgtcaggtatttcatgcttggttggtcctccacaccattgacagaactttatcttacgaacatctccctaataaaacaaccaaaaacactattgaagcgaccaaaaaccttaaagataagatctttctaggagatgatttagattagagactacagctg

SEQ ID NO: 52213 - DNA, 608 bp, Arabidopsis thaliana landsberg
gtgacagttatttttaacgatcaacagacaggcaggggcaggcagccaccaataaactaaaaatcagactaaggccatgatctcctctgatttgcacaaacaacacgacacaacacacattaatgaataatgatggatctccgtcttccgtctttctctcgccactacgccctgctcctccgttttctcgagccttgctgcttttggttggcggcggtggggcctaggccagtaggcagtagcagccctagttgggctgggtgggtgggtgttaatttaagcccaaaacccgcctcgcgaaagaacacggttaacgatgctctctttttttttcctgtaatttttatacttctctggataccgcatggatcggaaaggatagttatgccgttgctttagctaaccaccaaataaagctcctctctttctttttttttgaggtgcgaggtggggagctaccaacgtacatggatgcatggttgatggtcccattattgcaaaaaaagtcaaataatagaagaaaacaagttgcaagggggttatttgtaggtttgatagtttttgtagacttcatgtggtggatgtataactatctacttgtaacgggg

SEQ ID NO: 52214 - DNA, 338 bp, Arabidopsis thaliana landsberg
agtttggttgacaacaacaaatttatgagaaaaaatatcatattcaatgaaagcaagagacataattaataatcgagtatgatcatggtccctgcacaaaatggctcagacaaaatattgtactggtgtttttggaaatatttcccaccgagaatagatgtcacaccagaactttcaacttttgtgtgcgtaactctttgcaaagtttttcgaaaaatccaaccttgtttttaacatgtttaaaataggacctcacatcaagttcaagtgatcagatgtgtacgttatgtgtgtttatgccgtccatgctctgattcaacattttttgtgtttacata

SEQ ID NO: 52215 - DNA, 677 bp, Arabidopsis thaliana landsberg
tggattttgaagaagttgttgccttggagggctcttcctttttcttggatgaagctttagatttcccagatttcgatacgctgcttatatctttcttcgacctgctgcttcctgatttaccaacggttttggggggttcctcttcctcgctctcctcctcagagctcgcctcctcttctctgctagcttcctttgaatccttcgatttgctcgctgttttgtcatcctgggacgtcttgctggacttggaagcaggagtagctttagccttgcttgatccagctccactacccctgaatacatcagaagtacaatattacgtattagtagagaattattttagagacttcaacacttgttaactatttgctttcagtttcaattactttttagctgatgagttgtccatctttgattgcttgcctgtcttagctttcttcgtcaggggcctgcatgacaaaatgctaagcttggtcatcacaagtaaaaagatgacatctagctattccttccagtgccacataaacaacggaactaaagaagtaacacgtacactgtagaggcatcttcctcttgacccgtctgatcagcagcttcttcatcctgatgacagaaagtgtaagttacaaaataggcgaagagcaaaaaaagccacagatggatgaaatataatgccc

SEQ ID NO: 52216 - DNA, 469 bp, Arabidopsis thaliana landsberg
tgtagcgtggtatttgtgtccacgattgcgaagtcatcgtgctgcttagctaagtttaggtcatgcaagaaggattaaatcggtgtttcgtatccgatgagtggtcgaattaataatatgaaagataggttaagtattttatctggctagctagtaagttctggtgatgttgccgtgccgatttagtttgcttaaataagttaatgctttgctagtagacattttaattagctggcgggtgatgcgaagtcgaccggtctggtagtttagaagattgacgtgctcctgttcttgttttaaaatttaaaattcttagactaatgaatttagaattattaagtttttggtgtcgaactttaaaaggcaagtagagcgtgaacatatatattattgattggcgatgtcttgctataggtgtttaattcgtggacatgtagtaatatttagtcccgcactattcttatttata

SEQ ID NO: 52217 - DNA, 1235 bp, Arabidopsis thaliana landsberg
aatccttcaattaaatccgctatactagctgttgcgctgaggactctactgaaagtataggaattaggacaaacctctttccggagcatcttatgaaaccagcaaagcgccacctcataatatccattgctcacaaaagcagatatcatagcagtccatgttatctcgtccttctcaggcatcattccaaacaactctacacatttagagatttctcctttcccagaaaatcctttgatcatatctgtccaggataccatatctttacccggcatcttctcgaaaagttcataagcttcagaaatatgttcgcgctgaacaagacccgtgatcaaggaattccaagaaacactgtctttatttttcattacaccaaacaccgctttagcctcacccatataaccaagcttagagtacattgaaatcaatgaattccctagaaacagatcaaactccagaggcattcgtgaaactaacccatgaatctgacttccctctcggtatctgacaaaatctcgacaagctttaaacatgacagccaaagtattagaattaaccttgacatctccctcctgtctcattctcagaaacagaccaaacccatcttcaaaaaacccagctttaaaatacccatcaatcatagcagtccaagtaatcacatttctctcagtcattctatcaaaaagacttctcgcatcaacaattctccccattttgcaatacccatgaaccattgagctacacgataccacttctttcacagccataccctgaaaaacacgaacagcctcgttccatttccctgctctcaaatacccgcttagcaaagcattggaagcaacagaatcacggaacttcacaggtgtctcagcatacaagcattccgcctcatcaaaccgcccagcccgtacaaaaccggtaatcatcgtcgcataagaatccgcattcttctccggtatatcacagaacaattcataagctttacccaaatcacacttgtttttaatcatagccgtaatcatcgcattataagaagttgtaactctcacaggcagttcatcgaacacttgccatgctttactcatcttaccattctctgcgtaagcagaaatcatcgcaatccaagaggcaatacttctatttgacatctgtctgaaaataacttcagcttcttggagattcccatttctcgcgtgcttcggaatctgagaggtacatgaaagatagatgtgctc

SEQ ID NO: 52218 - DNA, 1019 bp, Arabidopsis thaliana landsberg
tcaaatcggccttcgggttttgaagttttaaaatctgttcgagtattctataattttggattcgagttcggatcaagtttttcagatcggattcgattcagttcttttgattcgggttttttgcccgggcctataaagcttggatatatttgtgaaaaatccatttttccatctttctgttatattttatgaagtactggagtgttactttcctgggttgtatatatttgacatttctcattgactttgagccatcctagctggatgtatgcattgtgctgctttttattagccgccttgtgttgttgtcattggtaaaagctacactaacaatatgtatagtctatcttagtgtagaacactgtcattacctatgttctatactaaaacaaagaatatacatattgtgattattgttgtctatacatgggatttattctcacatgtgttactatctatgagtttgttggagcgtattaaaaaatcgatgtgatcgactatatcaaaattatgtaaataatgaaaatctagacgatcatgatatcttataatttcttagtttaaaagtatttacatttgtcttatcttaatttaaatatatatatatatatatagatatattgatgtatattataacattatttttatgagtataatactaattttggtaaatagtttatgtatttactcatcaatttataaatttgggcctcgtgtgagatctatagataaacatattttaattatttgctggatgaaagcataaaactttacgttatgtcgttatgtataaataaaagttgaacattacaaaataaacgtgttatttgttttgcctttttctataagtcggccaagcaaaaaaaaagaggaaacatagcaacttcatcttcggctatataaagagaatgtctcataacttttaaggatcatccaaacaaaaaatacaagagagaagaagagacagagcaatagagatatatcaagagagaagttagattcgcttctctttttttttt

SEQ ID NO: 52219 - DNA, 771 bp, Arabidopsis thaliana landsberg
agctatgacgtgcatgccagcgtcgtaagcttggatcctctagagcggccgccctttttttttttttttcaagtaacatcacatcacaagacaaaatatctttgacaggccatagtaaggagtttttaaagacacagagacgcactactagagaaatgcaaaacccataaagcgttgcacaaagttttggtcggccacttcttcacataagtttcatcttggagatacctccacagacctggacctggatcctgatggcgaccttgaaactgctcttccaccacgacgtctatcctctgcttcatagcccggttttctattaagaccaatcaatgtccagatacgaaaaatcagacacaatcttcaggggcaaaacaaatcagacaccatgtttcacttactctctaatctcattgtctccatttctgtcccgatctggagcagcagcagcagcaccttcatagccaggggagtaggacctacgactgtaattttcatcttcttccccacgaggaggacctcctcttcgtcttggtgcaggagagtaagacctgtaacaccattatctaaaatcatatatacttcttgttgacttgatgatgatggaaatgtatgtgtgatgaagcatgttaccttgatcggtatctgcttctagaatctgacggacgacgtggagaacgtgatcgagagattgaacgtgaacgagaccgtcctgagaacaaaaaatcataaacatactcaagctgtgtatacaaaccatgagaacatgta

SEQ ID NO: 52220 - DNA, 1161 bp, Arabidopsis thaliana landsberg
tcccttagatttcagtaaaaaatgttggttccctcttcaatatttaatcccttccaagaattaacaatgtgtatacgagcagatgttaaatacatatcggaacactgcaaccgagtcagaacgggaatgcatagctagaaatcttcaggaaacagaggaatggctatatgaagatggtgatgatgaatctgaaaatgcgtacatcgagaagttgaatgatgtcaaaaaggttactctctcaaagtttgcaatataaaggttaagtctatgtggataacattgtcctaattgatggcttatgtttctgagcagctcatcgatcctattgaaaaccggttcaaagatggagaagagcgagttcaagcatcaaaagatcttctgaaaactattgcagataaccgaatggctgcagagtctcttcctcctccaagaaagaatgcggtttggttctaaactactaacataagtctcactctgttggcaataatatatcttataagatggacaaagtttgttgtctagttggctatatgattgagattatataaccatgatgtttttttcgttttcaggttctcgatgaatgccataaagctgagaggtggctccacgagaaaaccacagaacaggaatctttacccaaagacgctaatccagagctgcaatctgctgaaatcaggagaaaagctgatgctctaaacgcgtaaatctaatctttccctctctttctactcttcaagccatcttcattcttcacatttctactgcaaaaactttggtcataattgatgaaacctatccggatataaactgatgaaaggattgtgaatgtgtttcaggacatgcaagtacattgggaaatcaaactctccccccgcgaaaccggaacataacggatcatacggaagtagaaaatcagatgatatggagcttgattgattgttcttctttctcttatagtctaaattttgaatcttttattctacatggggcaaacaaaaaaaaaacaataaacaatctcactgtgtatctctcatgatgcgtgatttgaaacgattattctcgaggttgatttttcagattttgtttttttttcctatggtgaatccctttttatttaatctttaaccacttttatatttaaaatgctttgttggatag

SEQ ID NO: 52221 - DNA, 786 bp, Arabidopsis thaliana landsberg
gtacttaagtttggagtacgcattaaccacaccatcccttggatacctatcagtggcaaataccggacttaactgcaacttctcggcgacataagtgtttggggagtgaatgtggagtgcataagattcaggaaagtgataataaaatctacaagtataatactaaatgtacgcaccttcagacaaagaaacatctctatcaacacttttgtcaccttcacacttctcatctacatttctattagttaaactgtcattatatgaactcatactgttggtatgctgcgttgggcctgcaaatagagacattaagatgacaaacattaacccatagacatgttaagcagtcggcaaaactaggcacatcattcaataaatgctggttctaaccgtctgatgataaaatatatatgtcagccctcatggcagcttcactccaatcatctccatttccaacagaaccaccttgactagatgaggtcagcgggctagagatgttcgttgtcgctacgagaaggaacaaataaatagaaatattgatataatgcaaacaacgtgaaaaggaaacaacaataaagcaaggtttataaccttcagaagaacgatgtccattttcagatatggcagctacattagatgaggtaagactgggatcaccatcagacggagctgcaagtacacacatcatatataaaacttttcaagcaaattgtgtacatacaccaaatttgtcacacctagccttcagacgacacatcgctatcaacacttatctcatgtgaaaca

SEQ ID NO: 52222 - DNA, 301 bp, Arabidopsis thaliana landsberg
gtagaaagcaggggtactgtgattgttattttattccacaccaaaacatgacctaagtgtaactagacgcgccatagcgtgatctatgctaaatcacggaggtcaaaggtataccgttcgagacatcagctttcgaatagtgagcacgaagcaaagctctacaatacgagagacggtattccgacgaagatggccgtgagcacgacaactcgattatgaagtccccagtatggaatatctgcgactacgacgccagcagtcacagctgcgatccgatcaggactactgcgacggatcctca

SEQ ID NO: 52223 - DNA, 166 bp, Arabidopsis thaliana landsberg
ctataaaaggcgtgagaaatgtaacaggagcactaataagatcgtggagatcgtggattataactttgtactacaacattagatctatgacactgagtccaagaaaggctgaaaaaaagcacgctcctatacatatcactcgatagaacgagctgattgaggagaa

SEQ ID NO: 52224 - DNA, 524 bp, Arabidopsis thaliana landsberg
ctgttttacgacagaagcaaaatcctaatctctaattaattaatcctatgatcatacgatgcatgtttacggtcccgttattttaagaatacacgatctctagcagaaaaaaatctcaaaaagtttatgttaacttcaaattctgtgaacttccgcacatgaatctaaagaccaccctttatagaaaaaatggtcccgagactatcaaacgtagtctttataatgtcaaagtagtgtgaatctcatttttcaaacatttttaatgttatgaattgatcatctgatcattttcgtattaggattggtcattcaaatacggtatgattactcacccaacaagtagtaatttaacgaggcatcaatatactatatagaaaacaaagcaaatattccgaaactaacatcaaaactaatgggagagtggatgtgaagaaaattcaatggaatgcaaaatctaagatggaccaacatgcaggcttcccccgaaagcgacgacgcatttcacttgacgacaaaagttgcca

SEQ ID NO: 52225 - DNA, 992 bp, Arabidopsis thaliana landsberg
catcagagaaaacttgggaatgaacgtgactaataaaaaaaaattaataatgataataatagtgggcatagagatggttcttcaccgaattatttcttgcccaagaagcaccgtttggttagaaattcttcgacatttatagttcaattaaaaattactactccataattttgggtgacttaccacacaatctttccacaaatcttcgacacgcaattcacaacagtatcatagtttattatcacactttagtaatttatgccaaacctcactacgcaagcaaactatgattcattagatgtgtggacaattacgacgacagcaaaaaaaaaaatatgtgtggacacacaatgacaaactcacattgaactatcttaaaataaatttatactaaatcgtagcgaatatataatcagtaaatagaagttaaactgaagatcataatcaactaaaatgaatatcgtaatcaaattgatgataataatgatttcagacacaataatggtgacggtgttgatgatgaaacgatctgtggcataacaactgattgaattcaatgcatcttcatgggttttattccgttagctttatctttcacgtctttatattctttaaactttgttatgttattgacatttaaattcatttgtatgcatgttatgaagagatcgtataactacaaaaatataaaggtaaatctttcattttaaaaagaaaatgtttatatacgtgtaaataattagtaaataacacatatttcctcctgcgcgtagcagttcaacaaactctcttcttcgcgtagctagaagctgcaataacataaagaaatgatatatttataaattatgtgaaaatgaaaaaaaatattagtccgcaatatccacgtatcattatgcgccacgtaaacaaagtggacccagaataacccttgtttccagtagaaggaatcaatcagtggcaagaaagaaaataatgaatttcattaaatcgcc

SEQ ID NO: 52226 - DNA, 662 bp, Arabidopsis thaliana landsberg
tttatggtgaaattgatccgattttgtgtattcatagttgcttataactcgagatctattatggtattgaatttgatttgtatgaattccagtaaacacttagttattgcttcaatagtgagaattttaaaattgaaaattttcgaattttggtgttttctttagggttttgttcttctgggttttgaaattaagctgaaattgaaatatgggcactcgtcaaattctggcttttacttaattttgacaatagtgagattttgaaaattgaaaattttcgaatttaggcgttttctttagggttatgttcgtctgggttttgaaattaagctgaaattgataaatgggcactcgtcaaattctgggttttactcaatttttacaaatttgttaaccatagtgatctgattttgtgtattcatggttacctttaactagagatctgttgtggtattgaattaatgttaatggtcttgtgtttgtagtgtcgacaaaagagaacggatcttgttggacctgcgtgccaagaagaaagcaagacttgcctattaagttatgcccaagtgatattgacaggttgatttgatgtttgagattttttgtgtatagagatagtaaagccgtgtgatgggatatgatcttgttgatgtatagtatgggag

SEQ ID NO: 52227 - DNA, 774 bp, Arabidopsis thaliana landsberg
tatgggccaatctttataggccccatgaagcccataacctaatattactttttagttttgagcgtcatttcaaaatcaagataagatgttctgataaaccatcttcacgctaaaacctctcactctgcgtttctaatggcgactgttcttaccacagccattgatgtctgcttcaatccccaaaattcagacacaaagaaacacagtctattcttaaagccttctcttttcagacaatctcgttccagaaagcttaacatttcttgcagttccttgaaacaacctaaaaccctagaagaagaaccaatcaccacaaaaaccccatctctctctgagcaactcaagcctctctctgcaacaacactcagacaagagcaaactcaaatcttgtctaaaccgaaatctgtctgggtcaatccaacaagacccaaaaggtcagttctttcacttcagagacaaaagcgttctgcttactcttacaatcctcaaatcaaggatcttagggcttttgctctgaagctcaatagttctattttcactgaaaagtctgagtttttatctcttctcgatgagattcctcatccacccaatagagataacgcattgcttgtgctaaacagcttaagagaatggcaaaagactcatactttctttaattgggttaaatccaagagtctggttcctatggaaactatattttacaatggtacaatgaagtctctgagatttgggaggcaatttcagcttattgaggagatggcacttgaaatggtg

SEQ ID NO: 52228 - DNA, 687 bp, Arabidopsis thaliana landsberg
ctcacttttttttttaacgctttgattggttaaaccaaataatcgtctttatattttttgcaagtcgaaacccccttaatatcaagaatttttaagaaaaaaagttaacaagggttcgcttaattaatcgccgagaaaaacgtttaagccgatgaattattagtccgatacaatacacttaacttactacaagacaaagctgatgaaactgaggttcggaagtggaacgagaggaagttgagtttgagtaatttgttcttgccttgcgagatttgtagagttgtttatatattgagccgctaaaaacacttgggctaaatattgaagctaaattctgtttatgcacgtgaagagtaatactagtgtggagaatcttgcaaaatccctgagttttagcctatctcaaagtccttgcgtaacacgattcctctgctgatgagctttttggttattcccttttatttaataagtcggtattgcggtttctttgtttattttctacacaaatttggaataaaacagatctacaaaatctatcctaccttttttgttttttgacatatatcatcataccttaaaagtttctaccttatatagaacttacataattcgtacgaaaactaatttatgggatattcgatctatgttaatacttttttggttaaataatagctgtatgctggatga

SEQ ID NO: 52229 - DNA, 965 bp, Arabidopsis thaliana landsberg
agacaactggaatagtcatccaacctatctcgtttctttcccttatcaaatctgctttccctcccctttgccggatttttagatcttactcttccgatgtttttcattagctttcttatcctacaaatctggtttgtggatacaggtgtttctgtgacatataacaagatatcaacctgcagagcaaatcaaaaggtttagaaaaatataagtagatctgaaaagttaaacgagaaaagtcaaaaggatatttagctgaccactacttctttagctaacaatcagagtagatcttcaattcgtaaagctaggaaattgtgaaataaaggaaaactcttccaagatgagaagttctaagaaaacataccatgtcacaagtttcaaaacctaacttcttcacagaatcaggctgtgcatattcttcaccactcctgtatgaaatattgaggcatgggccaaaatcgggtggttgtacagtgtcaggtaggttggctgcaatatttagtagaccgcgctttggatccatgtaatgggagattggtaaaatattcagtatttcagcgtaatgatttgggaactgttctttaaacaatgaagatgaaagccatccctccagcttcagcctttcttgacaagtattagtctcagcctttcctctcaaagaccccaaaaaaatttgcttgacaccaatttctacctgttattgaataagaaacagaccaattaagagaccaaaggtattccaatccagaaagataagcaccagtaacatcacggaacacaagtcactaacctcaaaccaatccatacaatcagtagtttaaatttttttaccggttttgttgtttctgttcataagatagtgacagatcaaggctactggggggcaattcatgcttgaaccactctttatcacactacgaactattacaggatggcctttactccagtgtgtctgaaaatgt

SEQ ID NO: 52230 - DNA, 260 bp, Arabidopsis thaliana landsberg
cccctcaaccgggggggaagatggcggcacctgaaatcagcccggccaacggttttgctggcctcggttttggcggctatcctcagttgaattaccggctaccttctttcgctggatggcggatacgaagaaaactgactgactacgcataaatatctcggtataggcgttgcctgtatcagcaccgtgttgtacctgctggaaaccggcactcagcgttttcaccgcctgcaattaccagccggcggagtttgatggtg

SEQ ID NO: 52231 - DNA, 890 bp, Arabidopsis thaliana landsberg
  unsure (1)..(890): unsure at all n locations
aatctccgatttaaaaagcctctttttccagtctacccgatccccacattccatgatctcaacttcctcttataacttccttaagatccaatataaaaattactgcactaccaaatttattcccgaaattactcggcaaaatgctcatcaacaatttttatcttttcgtcttgatttcattgttcatccaatttcttttaacttagtttatgtttttttttttatgtcctgctaactctctataactcaaactgaatcatccatggtcgccttcttttgaaaacaatgtaagttgtagttaacatcgcatattgatcttagaaactaagaactttactacattttctgttttaaaatagcatacaagctatttattcatgaagcctcaatcctcaagtctctaactctctccgttttcagtgttataaatcagttacaatccaatctttggtggggaccaaagaaaacaactagatcaaacacgtactagatgtcaacaactatgaagacgtcggtgagaaacaacaacaatggacttagatctgaaagatttgatcgtctggaggatgcaaagctctcacatgaagagtttgttatgttcaaaacagattcccgttaagagtgaaaagaactcatccatgttaacatcacgacaaggcacgtcttcttttttctactctcccaagtatacccatctttatttttaagtcattaaaaaaaccacaagacattctcatatagaaactttaagtatcattctcataattaactgttcgtttgtaattatccctcaaatttgtgatactgtaatggctttatttgtttagagatcaatatttggagaatttttttttgtaagaatacngattgtatttatatcaaatatttta

SEQ ID NO: 52232 - DNA, 653 bp, Arabidopsis thaliana landsberg
gggggaataactacattggttaacatgcccttaaccagtttcccttcaactgtatctcctgaaactttgaaactcaaggtaaagccatccactttagttttccagttggtaagctcgacactattcttacagctttttgcctttacagattgaagctgcgaaaaacagaatacatgttgatgttggtaaacactttttgctatcaaaccttaccacatctgttgattcaagacaacacatggtgtgccctaaatctttgtttccatttttctccagggttctggggaggtctggtacctgacaatgcactcaactcaagtgctcttgagtctctcttagatgctggagttcttggtctcaaggtagatatcaatctatcatgtgtcctataaagctgtggcttgcttttctgtctataatgacttgtctcaatctttgttcagtcctttatgtgcccttcaggaatcaacgattttccaatgacaaacatcactcatataaaggttttgtttcttgagtcttatgatccttctctcatgattcaatagttattacaaaaacctcattggcccttgtctcgctgatactgtttgtttatgcaggaaggactatctgtattagctaaatacaaacgaccattgcttgtacacgca

SEQ ID NO: 52233 - DNA, 499 bp, Arabidopsis thaliana landsberg
attgaacttaggtcacttgttctccaatccactggtttattagctaaagttggcactggtttattattgagttctaatggaacatcaaatctttggaaatctatggaaccatgttgctttactagctttgaagacccggtgctaagctctgctctactgtttgttattttgttgatcagtggaggtgaagggaggaattattgtgtcggtggtgaagaaagttgattggcataagagtcaaaggagtcgagtgaaagtgattgattatggagaagctgtcctcatgcctggtctcgttgatgtgtatgtcatctttaaaaccatcatatgattcagatttttgtctagtttccgcctaaaatcttgcaacttctttaaaaggcatgttcatcttgatgatcctggaagaagtgaatgggaaggttttccttctggaactaaggctgctgctgctggtaatgaaatctgtttctcttactgagactgttctactcgcatg

SEQ ID NO: 52234 - DNA, 720 bp, Arabidopsis thaliana landsberg
ttccgtgcctaatcacaatactagttatttacatatagtttagtcagcattaattccttacactaaaaccatttttaacatgactccattgctctccctctgatcaaccctcctcctccgccgctgctacaaacactttaatatatattgccaccgtcctaccatatatatatagtccacttaagatctttccactcatttataacccaaatttgttctgtttcataaatatgtgtcttccatttcgacccgtctcgaaaacatattattcgtcttcttcttcgactatcgtgacgcgtatggtaaactgcatactactttttgtattcattttgttggtctacctcctcatctcggcctcaagacttcaatctaaaaactctattcatgcatacttctcatcttctgatcaagatcaatctcagagcccgacaaaaatcgagcacatcgtctttgggataggctcaagcgcgaactcgtggcgtgcacgtagagaatacgttaagctttggtgggatgctcagaaaatgagaggctgcgtctttgttgagcgtcccttgccgtcttctcaaaaccacacagattcatatctccttcctccggtttgtgtttcccaagatacttcccggttcaggtaatttagttcaatttgtttattgtttttagtcagaaaaaagtttcaacttctgtttcatcataaattaaaaataagtatagttt

SEQ ID NO: 52235 - DNA, 486 bp, Arabidopsis thaliana landsberg
  unsure (1)..(486): unsure at all n locations
catatttcaaatatctcgattccaaaaaaaaaaaaaaaataacaagtaaaaatatttcgtttgaaactttgaataatttggtcctcgaaggtacgggagtcataaatgtcgttttggaaattacaaactgatgaatattgaaggagtgttggactgatactccattcaacatgacttcattaaagtataagtttatgaccaaagtctatggatatatatacgcaaactgaaacaagtacataaaatttaggaaaaattattctactacaatctttttttttttaagaataaaaattgtaaaannnnnnnnnnnnnnnnnnnnnnnnnngtcctaattaatgaacagttgccaatagaattctccttttggcccccaaaatgggtttcctccggaaaaaagtggttcccagataaatttcctaggtttaaacccgttccgggggaggaaaattgcaaattagccttcggttgaaggacctttaaaaa

SEQ ID NO: 52236 - DNA, 510 bp, Arabidopsis thaliana landsberg
gttgcaacggtggatacaatgtactactaccatgcctatgattatgtcttatgaaattagaacaccctgttgttggtcatatactttggccctttggtcatggtattaagcaataagttaatgtgttttgtctttcttttggatcagtattctactagctaacatattttgtgaggatacaattatgaatggttgaaatgtgaaacaaacgataagttgatgctttaatgtgtgtatatactatgtacttataattatggttctattaaatttatattgcttatattttccgaactgataaaactcattatgttcatgtgataaaactcattatgttcatgttcactgtagggcacacaaagtgtgcggcctgttatctgttgacaaggtatccataatctacagatctggagagctaccagctggctgcaatgactccaaagaaaagaggggcggctcagattttttggggactcttcgagacccatgtcgccaatgctacgccgtttg

SEQ ID NO: 52237 - DNA, 529 bp, Arabidopsis thaliana landsberg
gtcccttcctcccacgtatctcgcctagttaacaacagtgcaattcatggatggagctgactgctgatttgtttggggtagctttggatgggggttttggagtcctcggtttgggggattatctcttgttatcctgctgtgattgcccattactgcctgcagtgcgtgctactgaagtacgtgaggatgtcctcagtgttggactccaacctcgggggggggggggggggggtcatgtgctatttgctaatgctatgtacgagcgcccaaacttacactacctaagatttagggtttttctggcttgtggtttggttcgattcgtgtgatgggaaacacaacagtccttgacatacgccctgtttggtttgccttatgcctaccacctggcacggtgtcatactcggtgggagaacagctatacatagaacagagtgcccagttatttgtcgtggtggttgggagggaggcagtagtgagaatcatgatcaccgcagaccacttgcgcgcttttcatcgattcctgtgg

SEQ ID NO: 52238 - DNA, 991 bp, Arabidopsis thaliana landsberg
gaggaagcacttgaatgtcctctatatcttccgacaggaaaaagagtggggttttgttaccaaaaatgcttgtataaaagccaacaattcttgcagacaggaaaagacgaccctgcataagtaaaacttaattacatgtgttagtatactctctatatttctaaggaacaaagctgatgataagagaatgcggttgaatacaaaaaaaaatgtgatgtacatcaagggctcgttacctgcaaaggcattttccgctttaagtgacatgtaaagtcattgattagaaattcttcttgtgggagaccaaagagcttgtgaaaagctgaatttgttagaggagaccgcacattaatctgaaatttccattcagcagataagaacgcgcaacaacgctaccagtttatatgttgattgagagaacaaagtcgtagccacataccttcttgcccacctctttctccatcttatttaaatagtctctgacaacatctccacctcctgtatgatccaagaaaatcctcaagtgaagtttggattgacaagcctgagctagtttcccttgaagtggaacccaaacatccgctaaatcagatatattagatctcacaaagttgacttcagcatgccccaatgaaacagcctcgtcaaaaggtccatcgaaatcaaaaacttcaacattcagtacagaaggaggatcagccattgcatcgaattcaaatatttctgcacaaacaaaattccaccctcaaaaaaacaaagagttgaaacattcaagaattgacgaaaacaagtggatgaaaagtcagcttgaggataagaccatgctaccactaagataactagacataaaaaccatagagtaaccatttaccgttccactgaggattagatttctggaacttgatggagctggttcttgtctttccattggaagtaatacaataaacggatcacaatgcccgcttgatctaacagctgttagatcgacccc

SEQ ID NO: 52239 - DNA, 753 bp, Arabidopsis thaliana landsberg
tgtacaattttctgtgaaactaactgtagtaatttctgttggtaatcccatttatatgttatccaagtttcaatgtttactaattacaggattgttgtacctttacttcctatgaggtcgtaactttcttttgacatcccttgcaggatgaggatgatgaagaaaatgaagaagaggagggaggtttgagcaaatctggtaaagagttgaagaaactgcttggtaaggctaatggtttggacgaatctgatgaagacgatgatgatgattctgatgatgtaagccctcttttgacatattttacttcttaaaaaattgttaaattttcaatcaaactcattttatctggtttggatacacgcaaatcatcatgaatgtcattcttaggaggaggagacaaactacggtacagttacgaactcaaaacagaaggaggcggcgaaagaagaacctgttgataatgcacctgcaaaacctgcaccatctggacctcctcgtggaacacctcctgcaaaaccatccaagggaaagagaaaactaaacgacggcgattctaaaaagcctagcagctctgttcaaaagaaagtgaagactgaaaatgtaagatacttgatttctatgtttgagaaagagttgatcgtttgtgctggatttgatttctaacaaacaggtttctgtaatctttgtaagcaggatccgaaatcttctttgaaagaagagagagcaaacacagtttccaaatccaacacacca

SEQ ID NO: 52240 - DNA, 825 bp, Arabidopsis thaliana landsberg
cattcagttgatttttaaagaatccgaatgtgatactatcaggtgcttgtttgcgttttaatgttcagagattgagcttcagatgatgcttggattgtgcataacgcgtcgaatctttgtaggctttataagaatttcgcctcttgttaagtgttgtggtgctggaaattgcggaaactctttagaggtttatgatgagattgtgcctccaaggtgtttgtagtattgcctgagtgatgggaaacgggacttcccgtgttgttggttgtttcgtgccgtctaatgacaaaaacggtgttgatttggagtttctggaacctttagatgaaggtttaggccattccttttgctacgttaggccaagcatctttgagtctcctgatattactccgtctaactcggagaggttcaccattgattcaagcactattgattctgagacactcactgggtcttttcgaaacgatatcgttgatgatccttctttcttgaatagacacaacagtaaaggtttggcggaaactacgtttaaggcaatctcaggtgcttcggttagtgccaatgtttccacggctaggactgggaatcaaatggcattgtgttcaagtgacgttttggagcctgctgcttcatttgagagcacttcctcgtttgcttctattcctttgcagccgctccctcgtggtggttcgggacccttaaacggattcatgtccgggcctctagagagaggttttgcatctggtcctttggatagaaacaacggtttcatgtctgggcctattgaaaaaggagtaatgtctggaccccttgatgtatctgata

SEQ ID NO: 52241 - DNA, 516 bp, Arabidopsis thaliana landsberg
cccaacaacgctcgcgttgcccctcgcgcgggcgacagagcggacatctaaccgtagccgtcgccaccctcacctctcctcccgccgcgccgtcgcccgggcaggctgccgacagctcatgcggcccgcggggaaggcggtggcggggccctcccttctcttctccggtggattggggcggacgcgactgcctggtcctctaggaggcctcctcgtcggtgccgacgggctggcggtggaggatagggccaccagatctggcgttcccccagctggattcggtggtcgtgcaacgagaggtgtgtgatgtgcatgggggcggctggaagctgggcaacggcaacgagcggcaccgacggcggccgtgaccagtgcaggtgtctggcgctgggggctacttggcttcgggttgtggctgcgggccgtggctgacgggcggtcgtggctggccatggtcggctgtggtcgaccgtggcttggctagctggggccacgcacgggcggcgggctttgtgg

SEQ ID NO: 52242 - DNA, 1081 bp, Arabidopsis thaliana landsberg
tttttttttctgtctacctttaatttttcttaatctgtgtgttatcatcatatcttacccctttttgtttcttggatctttacagggattgttgttactaatgatgggaatgctattcttcgtgagctagatgtcgctcatcctgcagctaaggttttacttctgacctttctctatctattgttcttgttaaaattgttttacttatccatttttgactctggtgattgcagtcaatgattgagttgagccgtacgcaagatgaagaagttggtgatgggacaacgtctgttattgttctaggtacgaacattcttttttgctaacaaatagtttgtcaatggcttggtttggaccagttttaatgtatttttaactaaagcacaaacaaattacttaaggatattatgggtgctgcagtattcagttcaacatcatgatctctgtttataatcatgggttcttgaagtcctctttttgtttgctttttgccaacagctggtgaaatgcttcacgttgcagaagcgtttcttgagaagaattaccatcccacagtcatatgccgaggtatgctggcactatgaattgcttattgttgtcatgttacacatgtcgttttcatcttaacgaatgcattcttctctgcagcttacatcaaggctctcgaagattctattgctgttcttgacaaaattgctatgtcaattgatatcaatgaccgtaagtccatttctaccttgtatttgttcatttggagttgaccttcagctactttggtttctgaagttagtttttctttcacgtttgtactgatggaagaatgtgtgagttgcaggttcacaagtgctaggattagtcaagagctgcatagggacaaagttcactagccaatttggagatcttattgcggtaagtaccgtaattacagtagcttcttacttatgcattaccagtccaggttttattgctccttaatatatattggatatgtctagacaagtaggtatagatacagcatacatcttgaagtgactttttaaatgtaagatgagtaaccatgaaatacctgaatttgatgact

SEQ ID NO: 52243 - DNA, 1331 bp, Arabidopsis thaliana landsberg
cgttggaaaactatatagttgccttataacactaataaatttatttccgatttatgtatatcttgtgattcttgtcaaatgtaaaagaacggagatatctatttctttcattataaaggttcgactctcctatatacatatagactcatgactattgtctgttagctagatgtacattatataatatacacatgaataaacatagatgtagtttacaaccaagcaaacgacactaatttcatattttatactactttttttataacattagcgacaaacattcagttaagaatttatataattttgaaataattgcttccaaacaaacacaagttgggaaataaccactaataaaaagttaaagaaacatcatacacacaacttgaagttgggcatgtgcatgtgaaggaaattttttatactttatagacccttttttgtcatcatttacacttatagatattatagagtgagtgtttgctcaaaaaaaaaagttattaaagagtatgatcatttgcaacatgttactgacatttccttcttccatattttgtaaagttttttttttttatcttctcgatcgacaatgggccgaaagttaccacagatatgagagcttgagaacagaataagatcttcaatatttaaactaagaaaatgtgaacaagggctccacacttatgttctttgttctaaaacacgtaggcaaaaggttccctctaactctctaagcattttagataaaattgtcatctatgaaaaacaaagctcaaaagacgctttatttggcttgaatcaacaacatatttaggtacttcttgtcacaagttttttagaatcacatgtgctaactacatacaaggacacaattacactatactaatactacaactgtttgttctttgggttagaagcaacttagtacgttgaccctcaaaagactcgtttcacgaaacacgagttacattaatatttttctaatcgaaggaaaaggaacgaaacgtaacaatgccgcttaacccacaaactcagtcttttgcttagacccaaatgcatccttttagttctaaggttccgcaaatcttgtcacaatctggttcaccgttcacgcatacggaaactcatacggctaaaaaaatgtttgcatagatgaattgaacatgatccaataataatgttattaaacgcatacggctaaaattttgacatgtcaaggaaagtgacaagtagacaagtcgttaccccataaggtcagcgtccttagtcaacgtgaacacactgcacatccacgtgtatccatcaaaaagcgagtttcgtaaaccgatgctaca

SEQ ID NO: 52244 - DNA, 665 bp, Arabidopsis thaliana landsberg
cataaatttacgggtgagaataattacacttttgtatttttccatgagccatgcgaagcatgtttcagatgcttgttttctctataaagaccatattctaacatacaaactgcgaaatcttaacattcgtaataaggccattcctataactctataagagaatcaagactaaccttaaagagcaagtcaactagacgagacgaagcgccaatgaccaatttttttgtttttgaaacctttcacctaagcggacggaagtttcgtgggctttaaataggcccataacgatatattgttttacgtatagtctttaatatctcctgttaaatcttttcttacccaaaactaaagaaatgtgtctcatcatattaaaattgggattttcaccgcggtcatgaaattatttcgaaatccatatccgtaaatttcaattatttaaaagatagaggattataacccccaaaattagcaaatatactatgatgatacaaaaagaaattcatttacatatcaaatccaaaacaacaaaacttttcgtaaagaaaaatatctacaaaaaaacattttaaagagaattgaagtaaaataaaatgaaatcaaatgctgaattctagactttgcgtaagagttgggactgctcatcacaggatctagccatttggact

SEQ ID NO: 52245 - DNA, 926 bp, Arabidopsis thaliana landsberg
aaaagccacctttgaaattgaagaaatacaagagagagacggtaagaagatttacataaacgaagatttgcagtttcttttttggggctcgtctggctttcttttgtttttcctgtctctcccgtttttatgttcacgacttgtctgtctgatcgtttgcctttgtttatttcactttttattcacgtatttatcacccttctttatatcctccacgtatcttaattaaatctaacttgttcacttcaatcacatattgtatcttcattagtcttcattatgtcgactaaataaaatagaaaaaacaaatcattaggttcatgattgtcaaaaaaacaattataaataaaacaccgttcattgttgtcgatcaaattgaaaatttatatattatattcataaaattcaattatttattctgttaagcaattcaaaaaagtctcatatatgtacaaaattacaaaactagttacatcaaaatcaaaagttatgatcttgggaataacctagttgttagtagaataatagtattgttttaagcaatcatcttagatacgagatgatctaactaattatagtttaatcagtcaaatttatcacatagggagcagtcaaaatatgcatgggaaaagagaaaaatgtgcacgtgacatgatttggtgtcaacatgtgagcttccaaatggatggctgtcaatcttcgtatgtgatctgtgtagagaggacgacaagacatagacagtctctttgtatttcaaactttctcaatacaaatttgccgtgtccgtttctatattccaagaaacctaaacaaaagttttttttttcctttgctttttaaagaagacaattgtttgcgttgtctgaagattcgattagtttatttagatgtaatgaagtaaacagaagataatcaatcagaaacga

SEQ ID NO: 52246 - DNA, 1517 bp, Arabidopsis thaliana landsberg
agagtttatatagtaaaatttataaatataggtataaaatcaaaatttattggattttccgtaagtttaattgtatgtatgaatcatcaatagtacaagatccataatatatacctatacgcatcaaaattggtatatgtttcctcaagcaaagggaagttcgttaattagcataagggtaaagaataatgtcttctacatgattcgcatgactattacttgagttatataaagattctatgtacgtatgtcttcagatatgtaaaggaagaattaatgtaattctaaaatgttctaaaaaattgatgcgggttttaatttagtggtttgtatgtacgaatgttgctaccctgttcgctgtccggattccaatatgataaatatgcgtgtgagtacaaacgaaaaaaagactattatagaacattaaatctttaaattattgagttatttacgtgttaaggctcaatgaatattcgaactaaagttgtgacatcaatttacaagtaaatgtgggctttccgtcttataaacttttttcatttcccatgacatgtgtattgaactcctttaatacaataatgaggtgaaaactttttaagataaagatttttgtaactccactagggaaaaatcattgtatcaaactttaaaaaatttcgaaatacaaatgttaaaatagaccacttagcatgaaatgttcgtatacgtatatagatcgagctttaagaactttgtactaattaggatcaaactataaaatattttgctaatatatcaaactgtatatgattatctcaacagaaccttgttgtaacttgctataagccatgttgaaagctggttcaccagccgggcacaagcttagctcctggctcatcgaccgatctgcgatacgactttttcagtggttaacaatagtaataggtccctccactcgaccttttttaatgtatataaaaagctaagacgtgagcttttttttctggacatttaaagttgagttcacatgagaccgaaaacaaaacatgaatctggctataataaagcgacgtgtatatgtaatatatataagtctttgtcctctccactttattctatatgaaatgcatgtggccgttgctccacattttttgtttctcatcataaataagctaagtaaaggtatctaaaaattaatataattatagtatactaaatttaattttaatcagaattttgtactagggattgtgtgatttagaagtctaggcgcatttttcatccttattaattatctttccttagattggtaaattattaagcgaaaaagctatgtaatgccgtatatatatttatacaatcaattatgattgatgcagcattttaaccaaagagaaaacaattcaacattaagataaaaattaatttattttctatatttccattaattttctgttgtatatttaaacattatttacgaaacaatatattttgattcaagatttaacaattaaattattgaatttttcacattaatt

SEQ ID NO: 52247 - DNA, 1017 bp, Arabidopsis thaliana landsberg
  unsure (1)..(1017): unsure at all n locations
ctctctcctttgccaatagattgaaagaagtctgtaccagtgattgaatttgacttgagcagcaaccaaatttaatacactgtgattgccctgttcttctctttggtgtagtgatgtcagaggatatggtgaaggatgggtatgaggacatcatgaatgttgatatctcttcagtggctattgagatgatgcaaaccaaatatgcatctgttcctcagctcaaatgtaacacttcttttcacatctctagtttatattactttagctttagaaatatgtaagtaagaagctttatcctattatactctgtttttacccaacagatatgcaaatggatgttagagatatgagttactttgaagacgattcatttgacactattattgataannnnnnnnnnnnnnnnncaccaattactctgtttttatggtgaaaagcttagaagtgatatattgttacctgttgttgcggctgctggattgtgtaggaacccttgattcattgatggtacggaacctgatcttttgtttctcgtgttcatgtctacatgtgtttataagttttcttgttttgtgtgatacggtgggttccagtgtggcagtgatgctcttctaagtgcttcgagaatgttgggtgaagttagcaggtcacatatatcatcatggatgctcctggatcatctcatatagatgccattttttggattcttttttaatatatattctcaacaaaactcttctcttttttcatattgcaggctgattaaacctagagggacctactttttggtaacatactttctcttgcattccccatatgtctgtaactgttcatagtcattgtcactggtactagaaggatatataagatattttgtgtttgttgtggtggtttggtagataacctacggtgatccgaaagtgagaatgcctcatttgactcgttctgcgtacaactggaagatttccttatacattatacgtaagctttcatgttttgcaacaaatttttttatga

SEQ ID NO: 52248 - DNA, 667 bp, Arabidopsis thaliana landsberg
ttatattggttttgacgttcgactttatgttttcataagttgattcatattattttggatttgatctatttaaaatctactaaattattttcttgtaaatttgttttttatatatttagaaaaatagtagaattaattgaattgcaatttatttttccttttttttttattcatatataattttatgtgattttgttttttggattatacatctttttccattattgttgcaacaataaaattacattttcttgaaggaaaaataaaattaaaaaaaattacattttcttatttgatttcttaaaatatttaacttgttcgagcgtctattaattttttatgtgagttgatttaatattaatttagaataatttgttctaaaacagtcgacaatacttttcgtagataaaatttgtataacagctgaattatttagaatattcgcttaaattcataatcatcggctgtattttcttatttcaatctatctttcgttttttttgttttatgaaccctaattattaattttccattaaattaattgtaatgtaatttgtagactcatatttaaattagtccatataatatatacattattttggtcaaaaacaaaaacacgtaggtacacgatttcgtcgacgtgttagtttattcgactgaaaacaac

SEQ ID NO: 52249 - DNA, 830 bp, Arabidopsis thaliana landsberg
gacgactacccatcttcatcttcttctactgaacataatgaatcccaacctcataattcacctccttctctgcatgcttctccaccttctcctgacatccattcttcgtctaaaccgcatatatcggctgacggcctctctcctccctttgtacatcagccatccggtttgcctcctccccaggttattttctttgcctcttctcattttcacaacttcacacctgcttctattctctttatttctttcactctgcaaggtatataagtactgactatttcatctacctctttgttttaaccctcatcctgtcttagccttttaagtctcactcgtctcaacctcctacgcctcccttgtctgaaacatctctacttggcgttgcctcttttggtcctgcagaaagtcctgtcaagggttcatctactcttgagtctgcaagatttaatacagacgctgttgcttctaaggctagtccttcttcagacttggtactcctttattataaactgaaagttctgctttatgtccttcctttcattaatagttttttccatgtcctgcaggttcagcacgttacccccaattgtagcttcgtccaccaaattcccataaactctccgttagataaactaccttcaaatgaagaggttctttccatgtttagtccaaaagggctacccttgctccctatttctcctgcttctctcatgtgtcctcctatcccttctcacactatgaagctccggtcatcttccaatcctgcatctaggtcttcccccatcaaaccaagaaaaccaaaagcatgccaacaaaaacgccttgagtcc

SEQ ID NO: 52250 - DNA, 1105 bp, Arabidopsis thaliana landsberg
  unsure (1)..(1105): unsure at all n locations
tttcaagttttgattttttttttggttaattctttaaagtttttttttttcttaaagagggatcattatgatgaggatgatgatctgatctgatctgtacataagagaactaaagaacaccaacaacaacaaaaacagaggaagaaaatataaaccaaatttttcttgttgcaatcattagaaattaaattcaattcttcgattcttccgagctggttctcgaattgggtttgctgcaaattgtgaatccaataaaatttgttcgtgttgttgtgttgatggtgatttgttagggttgatccgatcaaaatttcaattttgtatcgtaaaacgatgaggtttctaagcctcgtcggaaactcattcggttgttctgcgtccggcgaacgcttagtatcagcggccagagacggtgatttacaggaagctaaagctctcttagattacaatccaagactcgctcgttactctacttttggcgttcgtaactctcctcttcattactccgccgctcaaggccaccacgaggtaactgtaattacttgaaagatcaatactttgtgagattagagattctaaagttctgacttttatggtgattggtgatttgggttttgtttatcttcagatggtttctctgttggtggaatcaggagttgatattaatctccggaacttaccgtggacaggtgttgtgattagtgtctttttgttctttgcattattgatttggttatgaagtagtctgaaaacaagaaatttttggaaacagacggctttaatgcaagcttgtcaacatggtcattgggaggttgttttgattctgattctttttggtgctaatgtaagactttgatcaactcttctgactgattgtgatttaaaaatatgtcagggatattggaacaatgatgattgtgtttcttgattgttcgggttttagattcacagatcagattacttaaatggtggtactgctttacaccttgcggctttaaatggtcaccctcggtgtatcaggatcttgcttaaaaagtacataccaagtgttcctaattgctggagccntattatgaataagaaaacttcagttgccgcattaatt

SEQ ID NO: 52251 - DNA, 898 bp, Arabidopsis thaliana landsberg
tgattattagtttatttagctacttttatttcacctttgggccttacacatcaaatcaaacttaaaagttaaaaggaaaactttgggccttggctcttgggttatatactcttaagggttaacccgacggcggtcaactaccggcctgaaataaccggtttttatttttcctattgtttctcttttcaaagtgctcactttcccggtgactctttagtcaaaatttcaaattaattcctctaaggtgccctaattccggctgctcgtcgggggaaaataacccggcaggatttgagcgacacgtgtagtcccaaagtgagagacagtgtgaatccaaagtgagagagtgagtgttttagcgacagagagatatggccggattaacgagaacggccggtgcttttgcggtaactccacacaagatctccgtttgcattctcctgcagatatacgctccttccgctcagatgtctcttccttttcctttctcttccgttgctcagcacaaccgcctcggcctctacctgctctctcttactaaggtttcactcttcggtttctcccgaattgcaatatcttgtagttttttgaggtttaattcagcaatgtcttttgattcttctgagtttcctggcatgtctctcatacccgacgttgtgtcgagtttctttattgcatttcttagagcttctctgctaatttctgagattgatttcagcgatgtctgttgtaacgatttcacggctcaaaactcttgtaacttatgtcgatttcatgagtgagtaatgaatttgctggtttcgtgtgctatacaaactgttcttttccctgacgagattgatattcatggtgcagtcttgcgatgatatatatgagccgaagctggacagctcatcac

SEQ ID NO: 52252 - DNA, 634 bp, Arabidopsis thaliana landsberg
  unsure (1)..(634): unsure at all n locations
cccccccccccccccctcccccgccccccccccccccccccccccccccccgggcgccattactcccccgcacccccgngcccacacttcccacccccccccccccccccccccccccccgccccccccccccccccccttcttccccccccgctgccccccccgcccccacaccaacaccccccccnccccccccccccccccccctccccccccccccctccccccccccccctccccccccccccccccccccccccccccccccccccccccccccctctcccccccccccatcccccccccccccccncaccccctttcccccccccccgttgtctccccccccncccccccccccccccnctacccacccaccacaccncccccctcctccccccccccccccccccccccccccccgcttcccccccccccccctccccccccctctctttcccctcccctccctctgcctcccccccccccccctcttcctccccccccccccccccccccccccccccccccgccccccccccccccgtccccccccccccccccccccccccccccccccctcgcccccctcccccccccccccccccccccctccctctttcccccccccccc

SEQ ID NO: 52253 - DNA, 670 bp, Arabidopsis thaliana landsberg
gaaagggatatattgacaactttgggaccatcacttacatgccgataaaacaagaaatttagcaacatacaaataggcagtggcactgtggaacccatttttaattattcagtcttgactttttatgttctttgtttttcattttcaattaccaccaccttttttcttgtaattttaatttgtcactctctatcttcacaaagttggggctagtggagaggatcttgctatgcaaaaacttgtgtcggttgattaaaatacatatcttatatgctcttcattatctttgttaacaaaaccagtctgtgtgaaaaggaaattgcacgcataatcattgccgaagaagaggaaggaatgtaagtaataatacacgtgacaacatttggtatcaagattctgtagctgttgactctctcttctaagttctaacattgatttcaatattaacagtgacaatgacaatgcacacgcgttaaagtggggtcagagaaatgcatatatatcatttatgataaacattaacaactacaagagtgtgtgatatgtttcaattgggttgtgactacaacataatcatattaagaacctcgaacttcagattttcataagaaactttgatcacttttctcaaaaaaaagcattttctactttaactagtaaccaaaagggg

SEQ ID NO: 52254 - DNA, 372 bp, Arabidopsis thaliana landsberg
taatataatatttattttgactattataaaaaaaaaaaggtctgtcttgaaatagaaattaattctttttaactaaagtacagttcaaaagccttgcaaaaaacatcactatataaggagtatagttttctctcttctctcttccatatcttttaatgagaaactctgcttgctttctacgatcaaatgtttcatctgatgaatcgccgttccgaatgactcggctcttgcacggtatcttccagctccagtaatggatatagccggttcttgtccggcaaatccggttttcaacgactgttttgtcaggctttcattttttcgtcgtcgattggttttttactgatggactttaccttttttttttttttt

SEQ ID NO: 52255 - DNA, 697 bp, Arabidopsis thaliana landsberg
ttgattgaagcaataaaagaaaaggtaaggcattgtgtctaaccagttagattcttctcctgtgcagatactttctgttctgtatcttcattcttggcaggtttattatccacagtttctttagtcttcaaactcagatcggccatacatttctctaacagcctggttgatctcctagtgctgtagaccgactggaccaattcatccttcttagtgcaagaagttgctgctgaagttttccttgtgcttcctgctgctggagttttgagcacattggcttcaaacttgacattgctagtcttcatttcttgagcaacattcttgtttatgttttcctggtccatatctccagcaagagacttgctcgtcgaacgacaagaacgggacaccaactgagatgatggctgaggctcagcttttgttgtggtcttccgtcgagttgttctagttgcagtgcttggtggcagctttgctacactggttggagaatgcggagcactggattcagattgattcatgtattcatcaagaccatccacctatcaattgacaaagcaaacctcctattattttagcaagttacaagtattcagaatgtggagccaacaaatatagagtccccgtgagtttcccgatgccacgagcaatgattaaagatcatacaaaaatagctcaagctaaaacgcagccaactcaa

SEQ ID NO: 52256 - DNA, 1276 bp, Arabidopsis thaliana landsberg
gctagtatgtatgtgatcatttgtatttagtatatatatatatataagccttagttgtttcaaatgcatatatttgcattttctgttgcggttttgtgtgaaaatgttatgttcataatcacaagatacattgttgacaaatatatcaaacatatttttcaactagtaaacgatatagtatagcaaacataaaaacaaggttggacaaaaatgaaatagttgcaagttattgaatcaaatattcaaatgtgcgtaaacaaatgtttcacaacttagaaaccgtaaaagttggaatctctgaatctaacgcaacattgtctgcgaaatttggccaagatatgaactaggtgacatagtattttggtttatgattacaagaaacgttgataaacaatcagttcagaatctgtctcttttacaatatgttgtaattttatagaaaatgtcaaaatgatgttgatattccacgataaagccaactcaaaaatgtcgattattcagtccacatcatcattcatgaccaccgaacctacacttttggtattaggtttattggtgccaatgtggtccatattccatagttaacatttatgtatgtatttcacttctttacccaaacatatatatccaaatagattcttcttcttcttttgttgacatgtagggtgggaatttaagtttgatacacaatatgtaaccatacaatcagattttgcgccagattttcgtagttttaagtagatgaccaatcgctatcagtattcaatatcttacataaacctagaacttaatgtaggtcttgtggttgctaaatagatttataagatttaatttttacgtaccaaaattaagtttttaccatcagaaatatgtgaaatattgtgtattgtggagtttctgtagactatagagaacaagttttcttaaagttaatatatatgtaagttataacttataagatgttctcatatgatacattagacgacgaaaaaaagttattctattgtaaaaatttccgagtttgttaatgtattgtatcgtgttcaaaaagggaagatatatatacctctgcgtggctgcatattttatggggtgcatgtgtctccactcattttttttttaataaagaatgttttacaaagaaaataagttttggaaagaaatgtgtgaaaattcttataaatatgcttataatacataaatcttaagctcttaatttttgtctgtttagaatagaatttgttttttgccatggcgatcaagtcaaggggggggg

SEQ ID NO: 52257 - DNA, 226 bp, Arabidopsis thaliana landsberg
taaacctacaagatttattaactctccaattgcatactggttttaggtgggattaattgaaccaaaagcgcttatgttatcctggagctggattccaagtgggcttgcggaatgctgagagtggacttagtaatttaagctggcccattctaacttgtcatgtgtaatatctgtttacagggctcaaagcttccaattgtattggactagtggttgtgatgtgatg

SEQ ID NO: 52258 - DNA, 582 bp, Arabidopsis thaliana landsberg
gatgaaaaaagccggttcgattgatccaaaatttggagacaatcatgtcacggaccgtccggtatggagaaattgcccatatcgtcggttcggcgggattgggggaccgctttcataatattccgtccggttccgttaaaatgtttattcggcgtgcttagctggcaactgtagcgaaacagctggcatggtcactctcgcacgtggccagcgtcgtcctatatttactattttacccctatatagcgctttcctaatatttctgttttcttcgttctacatccatttattttagtaagctacggaaccatagagtatatatagaaatggtaaatatatcagaacactgattaaattttgataaatgaatatttgtgttattaatccaagaaagaagataaaaattagcaggctttttcgagtgaaatgccagctatgcatcagtaaatgagccttcacttctcttttgctttatttccctattttctgctttcttttctgtcttttgcctacccacatataaaatatgttgattttccatttcatgtcaacgaataaatttttacttagacaatgaagtgt

SEQ ID NO: 52259 - DNA, 531 bp, Arabidopsis thaliana landsberg
ttttctttctcgacaaagcctattcgttatggctttaagtcagctgtttagactattacagctgcaatacatagatacaaaatattgtgtaataaaagttagtacagattaaaaccaaacgatcaggaatgctaaaacatgatcttgattcttgaaaccaaaaggaacatgaaggtattccaaccttgtaatcaggccataataacataaacagagggcccttcgatacacaatgtcacttgctcatggttcatggataaaggggaaaaaagcatgaagcatgatcgtctattctcgtaggaaaattagcatgtctctactaccactagcaggatccttggcttgcagcagctgaaacctgaagagaacctcctcttccgctttatttctttacactggctggctggcagcatggcatacacacgcacacgtacgtgctagccggctagtagtcgcctccgctggagccatcgccgtcgccgtcgccgcatccatccccgtccaccagcctccacaggctatcccacagca

SEQ ID NO: 52260 - DNA, 865 bp, Arabidopsis thaliana landsberg
  unsure (1)..(865): unsure at all n locations
ggccctttagaaatcatatttaaaagcaaagctttagcgtctttaacatttctcattctgcataaactatggataacatcagaaaatggttttatcccacgtcgtctagcttctccagataaatcacccaacatctcctgagcaaacgtgatagtcccatcattcttgcagagtgcagttatcagagtagccacaaatctaggaggcaaagatttctctttcgtctttgccaattcataaaccgaataagcctcttcggccttcccttccttacaaaaccaagttatgatgttacccatctgttctccctccggtaacacaccactcttaagcattttctcacatacagaacatgcccaatccataaacgaccgcttacaaagcgcctccagtgtcaaataatatgttttcgcattcggagtaaacccaaactcttcggtcttactaaacacatcaaaagcagctttggatttaccaagtttcccaaacaaggcaatcagttcattcaatatctccaaattcaaaacaccacaactctctttctcacctatctccttaaccaaatcccacaaaccataagcatccattctacgtgtatcactagcaattgctacaagaagagattctacaagcgaggtggtaacagtaatctcttcattctgagttgcccacttcaaaaacctaatcaaattcttaccnnnnnnnnnnnnnnnnnnnnnnnnncttaccacaaaatctaagtgtaaatcgacattaagcgcattaagaccaaactccaaggattcttcatcactccgtacaaagacagtacagattccagcttttcgtcataaattggtaaacctcgttttctattgcaacaatc

SEQ ID NO: 52261 - DNA, 573 bp, Arabidopsis thaliana landsberg
  unsure (1)..(573): unsure at all n locations
tctgctctgtttctttctctccgaaacgtccgtttgtggtgcgcaccatcatcgctatggtttgattggcgcgcgcaggtgatgcgggcgatctccgtgtcgaggagggaggccatggcgacggaggaggagaaccgcgcgctggcggacgcgaggatcggccgctctcgctgcagctggacgagcggcttctgctgcgcgcgacggacgcgaggcttacggttacgggcttcaacggcttccgggggctgctgcacgcgctccacaacgcgagctcgctcctcctgctcatcctcgccagcggccagtctcgtgcgcgcagcggccggcgcacgtgcgggcggacgacgccggggccggcttgttggcgtccatcgtgatgctgcagcagcggatggcggaggaggccgctgacgctgagtccgacgggcctggcgcgcccgggatcgggatgtgcgagttcaggtgcgcgcgccgcgccgtggagcgcannganngagngtgtgagcgcgccgccgcggcgagngtcgatatgtgcgtagggcggcggtgtcgtgaaggacaaggtggagg

SEQ ID NO: 52262 - DNA, 1170 bp, Arabidopsis thaliana landsberg
tgcaaatgcttggttaaaaggtagaaaaagtgtggagtttcaaaatatatatttggtactctcgtcctagcaattggagatgggttagatgagatatcatatattaactaagcaatttatggccttatatttcaaaaattcacaatgttagttgaaagactaaaatataatttcttatatcataaatttaatcatatttgatcactattttaaatgttttccagattaatctagatttcaatatgagatctcctgataagaaaaagtgtaatcctaaaactatgggattattatacaaaatgtcactttgtagcccaaatattttggatatacgatttccttattgaacttgtggatttgccatttttgcatttttttggttcaccaaaaaatcaatattgccgttcccattatacaattctaatttgattttcgattctaaaaaaatatgtcatacatagatatacacaaaaatgtgtacatctgtttgaaattgtgtccaaaattatgtaaatatacttgttatatccacaactaaacattccctttattcagtaggagctcgtgtgtgtcatgttcaaatcctgccaatagagacaccaccgaatcataagtttcttttttgacacaagaccaacctgttttctaacatttgttgaaaaagtaagtgagttagaaagttaggtgaccacaaacaaagtccaagtcaagaaaatcctaaaagatcagaaacatcaacaaatgggagcatgttacaacttacaagatgataataacacaacaataacacataaacatggactacaagaagaaatactaaacctaataaccgtttgcaaaaggagccaaaaccaaagataatatgaacacaccgactataagacaacaaccaacacataaacatggcctaagaaaaggaatatatactaaacactaagcacatctattgagggggccaagcatcatataaacactgggaatgtaaaaccgtggaacccaaacaacgaacaaaaacaaactccattgacaacataattatattccttttctaaagaataatgatttgcatcgagcaaacatcaaagtggtcatagatacaatttacaagatatcctctagtttcttctcaccgaaattctcaacagaatccaacaaaagagatcccctatg

SEQ ID NO: 52263 - DNA, 1340 bp, Arabidopsis thaliana landsberg
attggatttttcaaaagttttcgactttataaattctattgatgtcaattaaattgatggttacaaatttttttccaatatcgctataacataatacatatatatattaaaaaaaaaatcaatgttatacttttaaaggtacttacgtaacattaatataaagattcaaatgctgaaagctttttattttatcgactataagtctataaccactcaacacagatatacacaaaagcagactcgctttttgcaatgaaaatgaagaatcctcaagtccttaaaacaataaaagagaaagaaaatgaagacagaaaaatctctctttttcactcactgcaaataccaaaaacaccaaaaagtactcaaaattttccaatcttcaaacactgcgttgttgattccagctaggaggaatgcgatcagaagtgatgggagtagcagcaggaagactttttacgttgatgttaagaggatataaccgatattcgatatccaactctctgcataatctaccaatctcttcaagtaattgacctctcctacatatctctctcccatattttgatgattcatcttatgtgttggccacattgcgatcttcacactgtttaatccacacatatctctaaacacaatcatcggcgatggatgccaatgatccttcttgttatctacatagctgcataaacacataaaaaaaatcatattaagtgatgtttttaaaatgtttaggattgagggtttagggttttagctactaacctgagtatcctctgtcttaaggcagttgtcttttcaggtggagttgctatatggacaaagaattcaatggcatcttgcatatcaggactgcggtaatagttagcgataggttttgttccgagaagactgtttggatatacaatcttctgattatcaaatcgaagaaagacagtagtcaaaatgttcatctcttccacaatcatctatacataaaaaaacagaggattagctctttctttaagttttgatgcataacgaagggtaaaaaaacagaaacagagtttcaagggacaaacctggacaccgtctatttcacacctgtcaccgacatcaaatggatgcataacgaagacgaagatgaccgcttcaaagatggttttacatgaatttccaaacacaaagactacaagaagaagctgagagcttatgacaagcaagaacttggttgtagcgattcccagaatgagaagccagatgattaaaatcacaatgctgaccaatacatcaacgattcgatgaagcctgttcactgctgtttttgtattcgttaatgttaaagctagtgctcttcgttctct

SEQ ID NO: 52264 - DNA, 1027 bp, Arabidopsis thaliana landsberg
tatatctgaacaatgggagttccaaattgcatatctcattaaacagtaatcccactgtatctcgtgacaatattctaaatccaacttttgaaaaaaagaagaatatacatgaaactgaaggactaggcaattcacttcaaactatgtgtagcactggtttcagacatgtggcagaagaacgttgtgaacaatcaatgttgaaacatacaatgcactgatatacactttgctagagccataaaaccaatagatcaaagtattgactactttttcgcagaaagatgataacaacatagaattattacagttctgataagtaaacagccagagctttcctgaattcaccttttttggagccactttcaaggtcttctttttgttttcactagcttgacgtgttttcttcctgtgatacaaatttcaaagaaaattaactaacaacaacatggttgattataaacagcccacaaaatgctaaacaaatttgatgaaagttaactgtaacactaacaaaagttatctcatctactatttcttactgacaagattctttcaaaagaacaggcatcaataaattagtcagcatgaactacattctatcctgattccatatgtacattagctactattagccatgccaaatcaattttcccatagcaaatatatgatcgaatgggtttcatacccagagcttgatgacaagtcgagacgaatgcgagctgctgcactagtagaggaagatgcgtctttactccttttttgtccagaggccttccttcttaccgtgtaaacagaccaaggctcagtaaaatccttgtcactaacacctaagcataagacaattatttaacatcagtataagatagacacagaaaccaattttgcaaaaataccaattgaaaaataacagagactgagaactagcttgatagcaatttcaatccactcaatattggtgccgttttggaaatttgaagtgacccaattagtgctctttcactattacagaaaacatgataaattcaag

SEQ ID NO: 52265 - DNA, 542 bp, Arabidopsis thaliana landsberg
ttagaattcaagctcacacgagcattcgatcaccaagacaaattacaggaattcacaaatctgtctttcattacacagtgtttttgatacacataaagctcataaggtacacatatttctatttttacattcattagttgaaagggataacaatatcgccaatgttgttgtgccatggatccgccaagtgagttgccaagttctccaatggtcctgtccccgggtaagccgactgttgcacacagaatcctacaaacgccaacagcgcaagccgacctgttacacccaccaagcaaaaaacaccaacattagatatacatttgtacataagtttgatcaagaaaggtaagttgctgtgtgtgcttaccgttcttgatctctttaactttcaattcctcgagcttcttggggtccttcgagtatccaagagggtcaaatgcgcctcccgggtacttcttcttctcagggtctttctccatacttcactggtgctcacaaatgcaatggctaagaactcaatggccaatattgcgggcaaagtt

SEQ ID NO: 52266 - DNA, 1037 bp, Arabidopsis thaliana landsberg
ggggctggggttcaggcttatcgtccaatgatagtacattgttgactgggatgtgaaaaaaaacttcaataagcatcacaagactatatagtagaacttgactgttatttcttaacggtctacaattttagtattggtttgcttatagcagaattagaaatctagactatatgggatccgggtttaaatgaaactttaaatggcagaacaaaaaaaaattatgaaaagaatctttatgccacttgaagagaaagagacgagggaataactgaatctttttactgagaaaacttaccaggtgctagagatgatactcctagagcctcacacagactcggagcgtattggcgaagaaaggcggcatcaaacagattttggactttgtcggcatcaaaagtgtaggccaaactgaatgcagatagaaagtggagaaaacccaaaacctccactggattctctgccttaaccaatgttgtgttcttccattcagtgactgatttgatagcttctacttgtacttcagtcttgggctctggtgacatatccattaaacattccagcaagcaaatactaccccttcttacactatctggatcaagctttgttactgccatcttttcgtgaagacgttgtattgtgtttaacacaagctttgccgggtcagaagatgcttttagagcacgcagaacatcgaggtgaagctgatcacatttcttcagatgcccacgtaagagtaactgcaaagttttctagtcacatacactagcgtctcgcaccaagtcaacttgttgatccgggttgttttgttgacaaaagctggacaatttctttgcattcagctcatattccttaacacatttagccaacttttgttctgcggaattcagctgatcatctttattatccaacctttcctcccgagcataaagcttcttatctttcaatgtcaatcttttctgagcgaacatgaatttgcttcttcttcagtccaagttctttattatgtttcgtcaatgattcttttaatttgacaagct

SEQ ID NO: 52267 - DNA, 922 bp, Arabidopsis thaliana landsberg
tcaatattcttccactgataataatcagatatctaatcattcctataaatctcactttagttcgtcttataatcgagacctgagtcctagcatataacttccatgcgtagtcatcattaaagtggtgttttttagatattttttccccctggaaaagataacgttagttttataagataaaagaagatgatgatgtaagaaaacaaatactttagggaaaaaagagataaatgacaatcattgtgtggttgaacgtataatatagttactaaacaacaaataactaatgagctataggggtcgaagtttgacaacaacaacaacaacaacaacaacaacaaaaaaaaactataggggtcgaaaaaactttcttgcattgtggataacttctcaattccaaaagaagattttgctggtaacgaatatagtagtcactattgtccatttcagatgggagtgaatttcccatatgggttctttcgtgaaggaatgggtacattatatttgctattcaagaacactaatgggacgacccattcttagccctgaaccaatctgcgacatgaaccggagttcaaaagaaccaaatcggtactaaccgaatgaatcatgcaaaagtaaataaaaacaaaaataaaatgtcaagagaaagcatttaagtccgtgaaagtgagaaaaaagagataagaagttgcagtgtcccttgtccacccaatccacaatttctgtttttatttatcttatttttttttgagctatttatctacctatacttttgtttatttctttgcccaaaaaataaacaaactagcttttgcttattatttctccaatttcaaaagaatattattttatttttgcatttttattcggcatgagtggtaccaaaattgagttttttgatctattagttaggttatct

SEQ ID NO: 52268 - DNA, 528 bp, Arabidopsis thaliana landsberg
caggatcagcaagagaatgatcattctgacagtagcaacattattttgttatgtggtaatagagaggcagtgaggaagggcagggagaagaagaaggctcgcactgcataccttgaagatgaagtgatgagattgcaatctctgaatgagcaattccttagaaaacttcagagccaagaaatggtggaaactgaattgatcagactccgggctcttctggtagagatgcaggggaaaattgaagttgaactttgtagtttctcgtttcagaaacaatgcaacggttctggttttgtgttcaaagaaggtgatttctcctactatttggtttactagttgaaattggttgtcaacaatctgatacgttgatgaaaaatttagcattaagaggaagaactagtaaatagctaatgaaacttgagctactgaaactttattgaacaatacgaaacgctagagaactagtttcatttagttagatatcgtcttagtaaagatcacattttcgaataatgaaaacgtaaacta

SEQ ID NO: 52269 - DNA, 403 bp, Arabidopsis thaliana landsberg
taaaaatatgtatctataacaatccattaaaatatcatcagaaacataccatatcttaagggaagagatattattacagagatgatgagatgagtgtgagcgtggaagcatgtgtgggagtgagaagcatcctctgggcctggagggttacagctatgagtgtgactacatcctctcgttactcgatcttgatctttatcttcttcctcattcatctttatatatctttgattctgaggtccaaactcaagatctccaaagaaaacacctgttctgtttgggacatagaattatggtgatattattagggtttttgattaaagtaaagatggtgttgaagaatatgttcttgattaacatagtggatgaataaaacagtagtcaactcttataattttttaca

SEQ ID NO: 52270 - DNA, 846 bp, Arabidopsis thaliana landsberg
gaacatcctggtggtgacgccattcttgatcatgctggtgatgattctactgatggcttcttcggacctcaacacgccactcgtgttttcgacatgattgaagatttctacatcggggaacttcattagtaaaagcttaaagatttgagatttgattgaagatttgagatttcttcttaagtaagcttaaagatggcttttttaattctcttctcattgaagatttgagattgcattacctttttgtcttgctagtgtaacacttcttcttccattgtattgccaaagtttcctcctttctcttaattttcatggtgaagctatgctctgtttcaagtgttctatgcttagctctgtttcaagtgttttaaatccatcaattttgagtttaatctattgaattgctttatgggaatcaataggatcataagaacataacttttttactgcgatgaagaatcataatattcgacaaaaaagcataacagagatctcgagttcgagttctatctctgatatagacctaaatcccaaagcataagcattgacatctggttaaccaaaacaaactaccaacgttcatatgatgaaggtctgcctccaggacggctaggacggtcataaggacctggtctgcttctgtagggtcttccctcatcgcgtatcggtcccatatctccatatctgtcacttgtatcccttgcgtatctgtccctgtcatagcttctctctcgcccgcgatattcattctcaagatgatgttcaggcattccatacctatcactcacaaaacggtctcctgggggtgcgtatctacattggtaatacaatcaaagggcatgactt

SEQ ID NO: 52271 - DNA, 964 bp, Arabidopsis thaliana landsberg
  unsure (1)..(964): unsure at all n locations
gaactctatcccttcaagtcttgcaagaaccggtcaatggtacgaatctgtcttttttcaccaatagagtctcccggcgcgaatcattagaaattttaacatgtatatatgtaactttgtagggttttttctcaagatattccgaccgatgttgttgttgaagtcggagaagccaatttctctcttcataaggtaagcaacaactcttaattcttggttcacaacattttcaatacaaaaaaggattatttatttttcatatactcatgaactaggcttgaatagagtaataataggatggcgagattagtacaaaccattagcttacatgtttttaattacacaaaattttaactataatttttcatgattgtatatatatagttcatgttagtggctaagagtaactacataaggaagctaataatggaatccaaagatagcgacgtgacaagaatcaatctctcggatatacccgggggtcctgagatatttgagaaagctgccaagttctgttacggtgttaacttcgagatcaccgttcagaacgtggcggctcttcattgcgcagccgagtttcttcagatgaccgataagtactgcgacaacaaccttgctggtcggacacaagacttcctttctcaagtcgctctctctagcctctctggagccattgtcgtccttaagtcttgcgagattctcctacctatttctcgtgatcttggtattgtcgccgttgtgtcgacgtcgtcggtgctaaggtataattttactcagaactcattcttacttcgttggaagagtgatggatcttcattttggctagtggttaagtttttctttttctacctatataggaataacccgaataacccaatctaggtagttagtacagntttaggtgtggttttcaataaatggcaagaatatttgggttgggtatttcataagttggaaatgattt

SEQ ID NO: 52272 - DNA, 932 bp, Arabidopsis thaliana landsberg
agcaaacaaatcatagttttttaatcacttgtaatggactaagaaacaaaaatggaaacccaagtccaatgttttacctagtgagcaagcagagagcatctccaccaaattaccagaaattccccactaacatgaacagtgatccaaatcgaaattgaagcaacgagaaaccgaacaagtgggacaaaatgtcaatgttatgaatccaattccaattccaaactcagtttcaaaatggcacaatccaatttcatgaaaaatcctttaggtcttaaaaatatgaaatcagaaaacctaatttctcaaatcgacaacaaaaatgaggtgaaactgtgattgcatttaccaaaatcgaagaagaagaagaagaaagagatagtaaagtagctgcttaaaccttgatgttggagatgaaaacaggagattccaaaaacgaagtcggactcaacccaggaggaatcgtgatatcagtcgacctcgagatcggaagcttggccggtgacatcagcttatacctagcacctccacctccgtttcctccagctgaatcgtgctttgccgtgagatctcccgtcgccgaacaatctccctgaaactccttccggtcattagcttgagggttcatttcagagattcgcaagggtagaacaaaaatgaaggaaaaaagaagctaagggaaagtagaagaagctctcagctatggcgaaatgagagagattttggtctctgcgttagtgaagattgtagtgaaagatgaaagaacgatattgacttcacacctctcttaattctttgtttttccttttcatttttttaataatttattttcttcttcttctttttctcctttatccggatttatccccttctaaagcaacaacaaaaaacgttaaagaaaacaaaaaccattagaagatgtcccaatgctcttt

SEQ ID NO: 52273 - DNA, 581 bp, Arabidopsis thaliana landsberg
agatgagccctcctctgcatcgtccttttattgtactaaactcaccttctttattttcggggatctcttcactttctactctataactcttacctaaaccgggatattcaggctctgcttctctccattctcaagctgaaagtatcagacgaacagagacaagcggggataagtacaccggaacctctagtgtcatttgctctcagctgcgggatgcactcatctcctgcggtaatatttccatatctatctgcattttacatcagattcttgaaccgatattgcaaatttctcacagaaattgcttgcaggtgagaatatactcagccgagaacgtaggagaagaacttgaagaagctcagaaagattatatccaggcgtcagtgggagtgagcccaaggggaaagttgattgtgccccaaatgcttcactgtttcgccaagaaatctgtcgatgactgcaaggttgctctgtggatttctcgtcatttgcctcctcgccaagctgcatttgttgagcagtgtattcacaggcgacaacggtggggttttctgggttcatctagtagcagatgcggcata

SEQ ID NO: 52274 - DNA, 867 bp, Arabidopsis thaliana landsberg
  unsure (1)..(867): unsure at all n locations
tcaactatcttttaatttttcaaattataccatttttctaaaccacaaacactcctatgtatcatatcattaagtaagattctaattaaattaaaagtgggatgttgtagtccaagcggatgtttctaaattttgtgtgtgttaattagctatgtattatgtcattttcactgtttaacttctattgataacatagctaattagctataaagtgaaacaacaatatgtatggttgtttatgtagtagctatatatataatcactttaaaaaaacataacacaaatccaaatgaaattattagtatcattttattacaaaataatgaagtacatgaatttgaaatatttttggcttttccataaaagatagtatttatcttgatatgagttagttgacgtatttggatattagtgattattatacttcttatcaaatggtttctcgaagtggttggtctataatgatgagcaaaaaagcaatggttagcagaatcatttgacttcggccgagggcctgagggggtccgaaattttcaaaatcgatattgcacctaccatacactcctttttgatccatctaccacagacaagaaacaaaattaatgaatcttttaaagatgagattattaaatgtcccaatagttaagatcaaatttatgtggattcagcagctcgagccagccaccacaactgtggtttgtacctaattctactgaataatcacagtaaatgggaagatctcgaaagctggttgacactaganacatggtttgagaggtggtcttgcatattaatcaagagagcatctcatgagagttttcatgagatacctacanaaaataatattaaaaagaaaagtagagagaa

SEQ ID NO: 52275 - DNA, 1045 bp, Arabidopsis thaliana landsberg
aaactgtgtcaaaagaggttttgggtgttgtggctcacgtgacttgcgcgtggttttgaaggttattaccaaacaatcttactacgtggggatggttttaaagttttgggacgggtacagatgagtgttgacactttaacggttctttttttaacggttagattgatgtatagacaaagagtatttaagatttaacaaacaaacatatgaataaaattgaagacaaatgttaattttttatattctgttttaaaatctgtgaaaggaaccatagcgtagaattacataaagtacaatcaatgtttctgatcatataatgtagcaaagttaatcttcgtcgctatcgttcccgaaaacggacgcgattgctactttcggcttcttgatgctgcttgtgggttggctctgtaaagatgaaagagataactagtttcagtgatgactgagtacggtaggttaaagcaggctaacccgtactggcctgctttaagcccggctatactaggcttggcctgtaatagtgagtttccatacctttgatataatgccgcttttagaagagaagccaaacttcaatgtttttcgctgatcttggacagcaagtggtgcaaccgtggtcttagccggtgcagaaaccgggacattctctgggacttcttgctggctctgttgcatctgatgttgtttgcgagcatcagccctagaaagttaaaagaaaaattcgggtttacgtccaatgcatacaaaatctttcgaacaagtaaaaggtaacagagactagaaacgttttgagcacattttagtcatctccctctcttgacgttgctgctctcgtttcttcctgtcatcgcggccgcttgctccgtgcatttctttcatttctttgaatcgctgcataataccagtactttaactctcggttttggaaaaactaataagctataaaacaaggataagggaattagagtatttgtttaccttcttatggttgtgatcgtatgagctcaagtgaccttcaaactccatcaccgttctatactgtttg

SEQ ID NO: 52276 - DNA, 547 bp, Arabidopsis thaliana landsberg
ctccaagcagaggctacctggtcacccggctgctgcttcctgttagagtgcatggccgccatcaacaagacgacgcctgcaaaatacctgatatcacatttaatcatcttcataaataaatcctgctgcggggctaacacccagtcgtgaatgataagtaccggtaaatatgatctgaatttgtttcaagtaaagggtaatgcccagaaaaagtttttcttccccggtagccattcctgccataagccccagatattgaatcatgcgataacgaaacgcaaaagttgcctccgccggaagatctcctgtctttgctatttcagcagacaataaaaacacttctgaaggctggtaaccaatacccaggcggtacaccgtaggtatcacatcatctcccaggccatcatattttacccgtaccgggttaaaggcctgcaggcccgtatgccagtgttcattccaatgaaccatggccgccatcccaaaggtgatggcatgggcgcccccataccggggtacatgcatgtggaaataatcgaattgaatg

SEQ ID NO: 52277 - DNA, 1063 bp, Arabidopsis thaliana landsberg
aacaaaaaagcttcatagtgaagaattattccttcgttttctcgatttctgaatcaggtttaccatttttctcactctcttctctgcgctttcttcgtttgtgatgaaactctcctcgcgctgtgacattgttttttccgctttcttaggttttttcaaaatttccttatgcgatttttttctctctttgttgttgcagattttgtgaattcagattagtttcgattgtttgtggagtcgtatcggaattgaagttgatcgactgagaattgcgagttttttcttagatgtcgtcagtattgttttggttctctgggatagtgtgtgactgatttttgcttttcattggtgatgcttggacttgtgttcttgtgtgtccttttggtctctacgccatgttttagcttatcacagtatggggtcactgaatttgagagctctgtgagattgttttcagatgaagcttctgggaattctactagttctccgatttctgtgacttgtcaagacctggatggtgttggatcgttgaataccacttgtacattgaactcgaatttgcgattcgattccgatgtttatgtatatggaactggtaatctgaacatacttgcacatgtcttagttgattgccctgttgaaggatgtatgatcaccttcaatgtatctggaactattcatttgggtcaatcagcaagaattgttgctggttctgtggttttttctgctatcaacttaacaatggatagcaattcgtctatctacacgacagcattggctggaccaccaccttctcagactagtggaacaccatatggtattgatggtgccggtggaggccatggtgggagaggtgcttcctgtgtgaagagtaataaaacgacttattggggtggtgatgtttatgcttggtcgtctttgcatgatccgtggagctatgggagtgagggaggggttaagttatcctcaaagaatatcagaggcaaaggtggaggtcgtgttaaactcatattgacggacacagtacatgtgaatggaactgtttccgcagatggtggtgatg

SEQ ID NO: 52278 - DNA, 878 bp, Arabidopsis thaliana landsberg
  unsure (1)..(878): unsure at all n locations
ttaatcacaaactcttcttgaaatccagaagcaactacaatatccacaggttcttcaatcatggactgatacaaccaacttctgtcacattcgtccgtctccttccttgagaatcatctgcctcaatggtcacgtaacagagttaaccgtcaccgggaacagaactagtaagctctctggaagttttcataaactcttcactcttcttacacaactatcgagcttaaagactttgtctcttacttctctcggaatttctggttctctttctcctaagatcatcactaagctatcaccgtctcttgagtctctcaatcttagctctaatttcatctctgggaagattccagaagagattgtgtctttgaagaatctgaaaagccttgttttaagagacaatatgttctggggttttgtctctgatgatctcagaggattatcaaatcttcaagagctggatttgggaggtaataaactcggtcctgaagttccttcactcccaagtaagctcaccactgtttcnnnnnnnnnnnnnnnnnntagatccaagattccagaacagatcaagaagttgaataagcttcaaagtttagacctttcttccaacgaattcaccgggtcgattccagagtttctgttttcgattccttctcttcaaattctcagtttggatcagaatctgttaagcgggtcacttccaaattcttcttgcagctcctcaaagattataactttagacgtgtctcacaatcttctaaccggaaagcttccttcttgctactcttcaaagagttttagtaatcagacagtgcttttctcattcaactgcttgtgtttgattggcactcctaacgcgaagtatcagcgtccgctttctt

SEQ ID NO: 52279 - DNA, 537 bp, Arabidopsis thaliana landsberg
tggcttctcagtaacaattctcttatttacctttttgcattttgacttctcagtaacttctttctcttctggtttacgtacaccgcaaggcttggtcaaatctactaggtctttttcctgtttaactaaacccaatcgttcatcaaactctcttttactcttttggtaagcttctgctgcttcttcttcagtaggaaacgttccaagccactttctcttcttctcaaacggatttcttatctccgccgcaaatttcccccacggcctccgtcgtacgcctttgaaacccgactacgttttccggtttccggctgctttattccctgtagaattcgaaacgttctcataccttttgatcagcgtcgggacacagatctttgagacgaaacgtttcggtggttttggtttgatctgacggcgaggattattgccggagatagcttcatcgtcgctagaggaatcggtggcgtctggatcattacagattacactaactgttttaatcaagttgagacagatgttctcttctctgaaact

SEQ ID NO: 52280 - DNA, 579 bp, Arabidopsis thaliana landsberg
aaaggcttcaagagcacattatacactacttggtcaaccttctcctttcgtttcacaatctgggcatggattcctctaccaacccgaagatctttcaaatccacgcacgctttcaacgccacggatatcgaaaaattcccaggctcaatgaagctacacaacatatccacatagacgatcaaaccgtctcttggtgacccgtttctagaatacccaatcgccatagctgcccagactttctcagtaagtagactcgaatcagttacatcgtcaaagattttccgagcaagatccaatcggcgacaaaccgagaatagggtaatgagcttgcttagcaatttggggttgtgacggagactaggattgttgagaatcaaagaacatatttttataccatggtggagtgatttagcggagatacaagcatgaagaaggtctgtgtaagcttcgggagtggagagattggacggcgaggatgatgaattctctatcaatgtcacggcttcgtcgagtttggttgatttagagagacctaaaggctttgtgaagacaaattgtctccatgggatttgtaaaaat

SEQ ID NO: 52281 - DNA, 1119 bp, Arabidopsis thaliana landsberg
ctcatgtaagcctagacttccccaagtagtgattattactctggttctaaaacatgtgtttgatgttgtattgatcggggctcaacacctaaaactctcactgggctcttttatataacaaagtgcccggctcaactacaaacgacaaaccaattaaaattctcatcttttagtaatgggataatatctgtggaccaaacagctaaacaaacaaagaaacacataattctcccatcttacagattagataacagcaggtgacaaatttccagatatatttgctgcatcaaaatattggtaatgtgattaatgatgaacgaaaaataacataacatacactaacacatagctgttcagaacaccactgagttgataagttttagaactgatttttcttatatttctctttaagtttgatttacaacagatagaaacaattcatgaacaaaccaaatacagaacaaaaagtagccctgggaatgagttatagagcatcccttaccctcccaaggccaagaccatccaaaaatacctgataatccctatctgtttctttccaaactatatagaccacttgagcagccattctacacaagacacaaactataaaacaactaacccatcttgttgctacacatgtgtgcccttcatgtctttatcatccaatctttcttttttgggttatcatcattcaccactgcccaattacttaagctcctcataagatcaataaagtcctttctgattcatacaaatgcagttgctgcaaatttggttggaaatgtcagaaaaccactcagctccaataagatgatcatcaaaaaagttttggatgaaactaaagatgactgctttagccttaaggtgaaatgcaatgcattgtagctaccatgcagctaattttcaaagctggaactagttttaacaattctctagatgaaagtagcagaccaactgatattgttatagatggaacaaaatcgagtagagaggtcatatacattctgaaatcaatagcatccaaggcgagatgatttctgcagtattggctgattaaactatccctgacccaagtctggtaagaagaagaaaagacggcgtcgcgcctcctttgtcgga

SEQ ID NO: 52282 - DNA, 2769 bp, Arabidopsis thaliana landsberg
gaaggtttaccagttaaggcacaccgaaagatctacaagagtattgtataaacaagaagttaaaacaaaagagagagtttgactaacccaaaaaaacaaatactaaaaacaatcacgtgattggagtccataaggatagaatgactatggtaattgacaaaactaatcatttgaatttcaaaaggattaatatctgtcagtcatacctgtgaatggttaactgagagattgatagatcctaaaacagcatcagacaatcctgtgatcttcaggttcctgaaacctgaatctgtttttgcagactctccatccccggaaccaatactttctcccaaccaagaaggtaatacatatctacagagacattgttttcctgactacagataatattatagataaattaacatacaacattaggataataattaacaaagaaaacggtatggtacataacaagaacctacatagagaaagaggtcattttctggagataaaacaatgatatccaaatgtggaagcagtcctattttcactctgcaaggaaacagaaaaaagggttgtcatactcataactcatgacatgacgacagaaatagtctcatttacagtgacagagagggcaaaaaaaattgtaagtaggaacttactgagaacgtgtcacaacaacaggtgcagcagcaatcgcagacacactccagcttatatcaggcttaacatcgaacagaatttcgttattgatttcaacagtttgaagtcccaccgataacagcttcttttgttctagaatcagaaagcaaattactgggactgaattatcagttgccaaaaagacctgaaatatattttgaggcacttgtgaaaataaaaaataatagtaaatacttcagtaaaaaaaatagtatacaatcttcctcaaataaaggtagcatgaccaacagcgagaacattagatagatttgtcaccttagatgcagctttcttagcacctttcgcttgccatattctacgaaaagaaacccgcttcgagagaacagcatcaggaacaatgccgcttgaacatgacgcagaagcttcaaggtttgactctataaattcggccgcccacacagaatgttgcatcttgcctgaaaaaaccaagacaaagtatttcataaaaacttaaaaaagcatgagccatcagcctgaccagagaagaaacttacaaacctttgttatacgacgtcataagaggtagacggtcacttgtccaaattgtcctctcatcgtagtccttcattatggtcaacttccccctctcttcaacgtaggttggctgaaaagtaagtagatgagttaccagatgaaaagtataaccaaatattgcatcatcaaaaaacatttatgtgctgttgagataacaagaaagaaataatataggtcccgatataaagaaagactggcttgaagcagaaataaagttacaaggaatatctacaaaatgatgagttcatttaccccaggttcctctagtggatctcttagaatcagatgggaagacatgcatggcatatctcttttgctaataaggtcatgcgcgactggggaatggaagttttgtggtgaactattcccaacttcttttctttggcgcagtatctcacgagaaccaaggatggggctaacaggagaaaatggaacatgtgagggtggattcacttcaccagcttgctcaagaagtagaccacatggtagaggccatattgatttgacagtacgcattagtggaacagatacaacttcgcctgttgccaacaattgccaaaaatcagaaagtaattacctcagctagtgttacctcagaaaagagacaaacagtactgattaatcagatctagtcaacaagtaaaaaggaatacgcaatatatttccaagagcagatgaaaggaaactagaaatagaacggctaaaagttaatcaatcaacttgaacgttcaaaaagctatcaatgcacagaaagctacctgaaatctattcttcataaaccgattccataaattttcatttgtaattacacaatttcaaatgaatcataaagaaagggaccaactatgtgcaccagtatgagattgtcctttcgttagaagcaaaccatataagaatccattagggtataatggaaaaagtcggatagtgcagaaatattatagttcagaggtatctagccacaattacctgatgtgttgtagattgttaagcaagcaatttgtaatacacaaagaaaagcttctgtccctcgaccaaggttgctccagcatgcctatgacataaaaaagctatgagttaaaacagtctttctgacgcatcaaatagatggaaaatatttttgtctatgtttttgttaattcatgtggaacagataacgtatccaccaatacaacagaaaagcattgttaagacatagctagatttgtttaatcaaggattgtcacagataagaatccatagattttcaaacgggaaaacttgagagacaaagagccaaaattctaatggaaatcaccttaatgacggcagaagacaaggtaaaacgcttgaggacccgcgaaccgcttgtccagattatgctatcatcaaatcaaaatttcatcgtcaggtacagaaacgaaacgcaattcagctagatacgttataccaatatccaatgaaattagcttctactaaagcataacccttacggacattactggaagaaagaggcaaacttgaagaataggaaaacacgttcgaagt

SEQ ID NO: 52283 - DNA, 2118 bp, Arabidopsis thaliana landsberg
ctgagacactagatttcgtcactagaattgaaccctttgggcccatctttacaatcacccatttcgttctttttccgttcctcagaatttcttgtcctgctttaacagggttcctgatgccagttagagcctccgcctaagtaattcattaaagaggtcaacaataatttgacacagtagagaaattttcagcattagcgagagatgcacaatgtacctcctcagatgttagaagaagaacatcactcattcttaagaaatgagcaagtgctctacgctcatcaggagttcccttggacagactctttccccgtggtccaggatcgaagaagatagctgtcccaactttggcagcgtaatctatcgttgacataataaaactagggctgaaatcgtcaaagtcataaccattgcagaaaagaacttttgactgtctgattgccatctttacttcatcagataggtcagtgatccaactgaaagcaggttcctccttgaaatcagctcgactaaaaaaagagaaacaactagagagaataagttcctatagtagtaaacaagaatattacccatcagaaatttgtttcacaaatagacaaaagaattaggaataaaatgggacagaaattccctgagtcaacaaattcaaagaactaggcattggaggcaagtatgacaatatcacccactagcgtttgtctcaatattagaaacaagatctctaaacaagaaagccatatctttctagacatatagcattaagaacactatcagcaagaaaaatattccgatggaaaatctggtatctacacttttttgtttccaaaaaagttctatcaaatgaaaagttatatttctaggtccccatcaccatccccatcacagttcatgaatgagatgatgcattcactatatacccttagcaaccgtttccccacataaaccagctctaccatccatagatattatcaagttttggcgtggcaaaaagcagtacctgcaaaacccatgcctctgcaaaggatccacaagaacccagcaaatgagagtttcacagaatgagctggtatctttttcatttgttcctccattcaatgcaaccgtacctattccttcctcatgaagcacatcaagaagaaactcaccatagatttcatccccaacgtgaccaatagcaacacaatgaagccccaatctagcagctgctatagccatgttacagttgccacctgcttcccagtatttctataagcaaaacagggaacatatacttcactattaacatcaacagactcaacaatactttaaccttaattcaactgaaacgagaaaacaaagattcaattttctcatcaaagagattgagctaagaagttctttcgatcaatccgaactaaggcagaacaaattatacatacaatgttcgaaattatcaccattgaaacactaagaagcagttaaagtcaagatttagaacccaaaccttatctgggggagacatagagagttcgtccatgagggccttgcgttctccacgagaaggagggggcaattcgtgaacactgagaacaatgtcgacgcagagattacccaaggttgagacatctataggtttctcgaccaccgcgacatctccagtttccccgagagaacagatggaggaggagccatcggcgtatataaccggagatacatcagcggcgctgctccggcagcggaggcaaacagagctggtcacatgagggactctagcgaatggcgggaggagaggattagggctttgggtggagaaattggagagggataacgcatagtgaggagagaaggagtgaaattttagggaaaaagcgtggtgatacattcagaaaaacccaggaaaaaagaatgaagaagaaagagagttgattttgaatctgcttcgtcgttctctctcagcttctccttcgtcttcaatcttcttgaaatgagatactttattgttcttcaccatttgaggaagaagaaggaaggctttcttgttctgtggtaaactaaaccggagtgaaattggaatatgaaattataccgaaccgggtttgatgtggttatttaaaccgccttgaaattaaaacgggaggt

SEQ ID NO: 52284 - DNA, 629 bp, Arabidopsis thaliana landsberg
gatgtgtagacaaacacacaaattgtgttgttcgttataagaaacttggaatcaaagatgtgttctatttagcagtggtacgaatatttttattggttgggtaacagatggtataaatgtcaaagaatagcatacttattctaattgttgtcacacacacacaaaaaaaagcatacttattctaattactatacttaggccatctccaacgtaacggtaaaactgtattttgatgtaatgcagtatactttttcactccaacccaactgtaaatattacactataatagtgtgattcctttattttgtaaagtactccactatatttggcgtgctactgtagcaacggtaaaattaaatatatatatttttttactttaaaattattacatatgaatatagcttatttaggtatagcatattaaatatgacttgtattgtcatctaataatttaattgaattttgtgagtcaaaaaaaaaatatcaaaactatttatgtatttttaattttgatcatatgattatgaaatattaatcagttgaagacataataattataacaaaaagatttattgaaattacattataaaattcatttaccattgaaatagtaacttacacaattaaag

SEQ ID NO: 52285 - DNA, 256 bp, Arabidopsis thaliana landsberg
  unsure (1)..(256): unsure at all n locations
cccccctctccccccccccccccccccctccccccccccccgcccccgcccccccccccccccccccccccccccccctccctcctcccccccctcctccctccccccctcccccccctccctcccccccctctcctctccccctcccccccnccctntgcctccttctcccccctccccccccccctccccccctccccccccccccccccccccctcccccccccccccccccccccccccctccccccccccc

SEQ ID NO: 52286 - DNA, 616 bp, Arabidopsis thaliana landsberg
  unsure (1)..(616): unsure at all n locations
aacgggaccacagttagcccagatcaaattagtggactgatgtttgtcaaacatgtagaagatatgggctgattaccctgcccatagtgttgcgatcgttttttattcagcttttgtattcggaattatatcaacccattagaaaaagtcaaatacaaaaacattcactagtcccaaacgcccaatcgatttatcacaactcacaacgtttttttaaaatctatgttaacaattttaataagaaaggataaacgagaaacaagaactttgctcaatttcgataatctttgtagacattggacgactttagaagcaaataaactctaaacaagataatctacatttgtaaacaagataatctacatttttataatatagatttgtagacgttgaaattcaaaattaacagatatataatcatttacttttattggaaacgtggaaatacaaaaataaacaaagatataatcgtttactgaacaataggatcaagagagaataagagagcagataaacaaatacaataagaataagtcaaatttcatctaatagaccaaaatacaccttcatccccaattcctcttctactacttntgattctttctttctaaacaaa

SEQ ID NO: 52287 - DNA, 606 bp, Arabidopsis thaliana landsberg
tgtcatctgcatatagaaagtcccttcgtgggcactaggtgctgaagtcctcatgattcggccttccccttgaaaggcactttgtgggcattagacaattgattcctcgtgatttggcctttcaaaccaaagtccctttgtgggcactagatgaccaagtcctcgtgactcggccttttatctaagagccccttcgtggagactaggtggctaagtcctcgtgactcatccttcaccctaaaagttccttcatggcactagacgattgagtccttgtgactcaaccttttgactgaaaaagtcccttcatgggcactagacaactaagtcctcatgactgagccttttgtctaaaatacctttatgggcactagatggttgagtcctcgtgattcgaccttttgtccaaaggttccttcatgggcactggatgtgtaagtcctcgtgatttggcatttcgtctgaaggtccttttatgggcactagacaagtcagtcctctcggctcagcctttcatttaaaattccctcaagggcattagagatatacatttgggtggaactagtgggctggccgaagtatgaaaaagccggccaagcacgaaca

SEQ ID NO: 52288 - DNA, 930 bp, Arabidopsis thaliana landsberg
tgatttggatagaagcacgaatcatgaacgtagcatagaagaacgaagatgggccaattttgggccttaaagatgccgatattttcgggctacttcatgatagaagtaaaaaaccttcttaaaaggtctcgacaatttttcgaaatcctcaagtatcttgatcatactagatccaacggttgagatagagatattttacaaatcttcgagaagaatggtacgaaaaaatgacccacattatgacatgttttgtatcaagtggctatatgccacgtccctatatgattctctgtctgattcctaattttccctcttccaaataaaagttcaataatgaaaaatagtactagtataaaactgtcatgttaacctattatgacccgtataaatgctggcaaaaaaagggactatctatagaataaaaatgaaatatagacagagttttcagtattatgcttgacacaacacagatttcaagtcttattttttcttaaatctgattgagtagcgttttcaaaagcaaatacgatcactattagagtgtatgtatacagtagtatatgtgttttattggagtgtcattttcaaaactttttgcattatgtcattcttagaacatttgaaaagtctggggggattttgtctcttttgaaatcagtaaatctttctcgttactctccttctcatgttaacatcacatacttgagaatttattgcttatagttgttatagacatccttctttgataaaaaaaaacaaaaaaagaaggtcgtagaatttactaaattaaaacatataatttgacacgaaaagacggaaattttcaaaatttagtattcgctcattcagatgtaacaagtaagttaaaaatatattcgctcattcagaaaaagtactcttttgattttcttttctttagggaatgtgctg

SEQ ID NO: 52289 - DNA, 1248 bp, Arabidopsis thaliana landsberg
ggtccttgacaataatgtggaagatagacaaagaaatcattgattcatgttatgacacaataacagagtttgtcagcgggatcggtatagactactctgcgaatctgcataccaatatagggtggaaaagtgttttacaactactttctttatgtggaagacatccagagaccaaagagcaagcggtggatgctctcatcggtttaatgtcatttaacgcatcgcatctatcgcagtcaagctacgcttattgcatcgattgcgccttcagttttgttgctttaagaaatagctctgttgagaagaacttgaaaatattggatctcatggcagattcagtgacaatgttggtaaaatggtacaaaactgcctctactgataccgcgaatagctatagcccagcaagcaacacaagcagttcatcatccatggaagaaaacaacttgagaggggttaactttgttcatcatcttttcctcaaactctccgaggcttttcgaaaaacaaccctcgcacgccgagaagagataaggaacagagcagtgacgtctctagagaaaagtttcaccatgggtcatgaagatcttggattcacaccttctggttgtatatactgcatagaccatgtcatattcccaacaatcgatgacttgcatgagaagcttctcgactattcaaggcgcgaaaacgcggaaagagagatgagaagcatggaggggacgttgaagatagctatgaaagtgctcatgaacgttttcttggtttacttggaacaaattgtagaaagtgctgagtttagaactttttggttaggagtgttgaggagaatggatacgtgtatgaaggcggatttgggagagtatggagataacaaacttcaagaggttgtccctgaacttttgaccaccatgattggtaccatgaaggagaaagagattttggtgcagaaggaagacgatgacctttgggagattacgtatattcagattcaatggattgctccagcgctcaaggatgagttatttcccgatgaagagatttagacttttattattggacctatgtaattcatgatttaatgctcaaattatatgatcaactctaagaagtcatgagattttggatatatatagcttctactaattccatagagcaatcatcaattttatggcaaataatccatattaaatatatatacccttataagtctcattcaattaccacataccacattagtcttcatttttt

SEQ ID NO: 52290 - DNA, 377 bp, Arabidopsis thaliana landsberg
  unsure (1)..(377): unsure at all n locations
tactgcggggcgcgggcgggcggtttcggggcgggctccccctccccgttcgttgggtgggggtgtcgccggtgtttcgcggtccgctgccgggcttgttccgnnnnnnnnnnnnnnnnnnnnnnnnnnnnnnnnnnnnnnnnnnnnnnnnnnnnnnnnnnnnnnnnnnnnnnnnnnnnnnnnnnnnnnnnnnnnnnnnnnnnnnnnnnnnnnnnnnnnnnnnnnnnnnnnnnnnnnnnnnnnnnnnnnnnnnnnnnnnnnnnnnnnnnnnnnnnnnnnnnnnnnnnnnnnnnnnnnnnnnnnnnnnnnnnnnnnnnnnnnnnnnnnnnnnnnnnnnnnnnnnnnnnnnnnnnnncttgtgtgtgtgttggtgtgtg

SEQ ID NO: 52291 - DNA, 286 bp, Arabidopsis thaliana landsberg
  unsure (1)..(286): unsure at all n locations
taattttagcaaaataaataattattttttcctatgttaaatccctatataacaattaagctttgcacaatttaaaaattatagaaaatctttgcattaattattttttctattcacatnnnnnnnnnnnnnnnnnnnntgagacaactggacagtcgatatgggtaaagaaatttataccccgattaagagtggttgatagcatagaaaaaccactaagaatttattgcgacaataaggcaacaatattttactcctaccaccattcaagtggggctgcaagttc

SEQ ID NO: 52292 - DNA, 163 bp, Arabidopsis thaliana landsberg
agaagaagaaagaaaagggaaaaaaaagaaagaaaagaggaaggaaaaaaagaaaaagaaagaaagaaagagaaaaaagaagagagaaagagagagagaaaaaagagaagaaaggaaggatgaggacaaaagagagaaaaaaagagggaggaataaagaaaaa

SEQ ID NO: 52293 - DNA, 703 bp, Arabidopsis thaliana landsberg
aggctctgcttttgtttccccttgagctgcttataatgggagagttaaagaagataaagcatgttatttctgacgagactgattggtactcgttgcaagtggttttacccgtgggtttatcgtgtctttttggcttggctatctctttcttcgggttctcatgtcgtcgggccatttctgcaacggggttcaccgttcttggaattgtgaacaagctgttgacagtggtgatcaatttgatggtgtgggataaacattcaacgtttgttggaaccttggggctcttggtttgtatgtttggtggagtcatgtatcaacagtctaccatcaagaaaccgaatgctacacaagaagctaaaccgcaagagcaagacgaggaacaagagaaacttcttgaaatgcaggagaacaaggagagtaacagcgtcgatataaaggaaactctgaaatcagaagagaaactatgatcatagtggttggagcttacagtggctggagtttcttcggtactgatacgatttagtttccaagtaaagaactacattgtacttagtggttatgaaattcttttgtatttagaggtaagagtacttcggtcctgatccagtagttgaacaatatcgacttcttctttacattgtgatgcggtcggatatttatcatgtaccccattcatatttatatgcgagtgaagaattcttat

SEQ ID NO: 52294 - DNA, 633 bp, Arabidopsis thaliana landsberg
  unsure (1)..(633): unsure at all n locations
atcctgaacttcctcaacaagtggtacagaatcttgattctcttccttaggttcctgaagctgttcttcctcttttacctccattgaagacccattttcttgtgtattcccataatctacaacaaaggccgaagaacaacaatgagaaagactgatttatcaacaaactcaaagaaatctctttttttgaaaactataaccatagaacatcataaaaatcaaaactttagtttataagaagccaaagagacagaaacacctaaaccatcttgagcttcatcttctagcttcgctcgtttagcctgagaagaatcagatgtttgattgctatcatccacgatatttccattaagctcaacttcgtcgagctttcgcttgagatcgacaggcggcgtagagataacaacaaaatcttcctccgtnnnnnnnnnnnnnnnnnnnnnnnnaggaatttagggaaagctgagtactgtatggtttggggaagaagagaattatcttcggcagtgaaaaagtgtttgggttgcgactctgaacggtggtggagaagtaacgttaaaggcttaacgcctatttataatgtttgggcctttattgggcctaaaaagggctaccagttttttttttaaagtt

SEQ ID NO: 52295 - DNA, 529 bp, Arabidopsis thaliana landsberg
tcggacttgtcggtgtttggtaccagtgacacactaaagggtatcccgtgtagtgcttttaggaggacagcgaggtcgatcacagctcgatggtttgtgctaggcacgacaggacacataggattatacaggttcgggtcgctcaagtgtgtaacaccctacgtcatgtgagcttgtggaggtgtgttgctatgagttctcggttatagagagttctcccccactgtcttattcccgatataagaggagttacacaaacgatgcggtgaacgttctcagtccacccacgtctacgaaaatcatgcctacttgcctagaggttagcgagtcttcatagagctcgcacatcctctgcatgcacggaatgtggcccatgcgtcttcgcacccacgcaatcaccttcctcgcccgattctggttacgcccaactgatgtcccctaaaggctacggctccgggcgatcgagggcctttctgatgtgccatagaacatatctaggtcatggtagatgaggagatatatatcccac

SEQ ID NO: 52296 - DNA, 602 bp, Arabidopsis thaliana landsberg
cctgcactctaactctagccaaacgcgtaggaatttagaaaaccaaataataatttgtgaaacagataagatttgatatgggattcgagcggcgaaagagttaaaaggaaacagcaccgcccaacagtcgtcaatgattacaaattgttttcggttcataaattaatccaatgaattgcttaagaactgacgaaaaaaaaagaattgcttataactttgtgaataggaaataataaagtatgtgtggttatagagttgtctttatgcaatatacaaaaataaaaatccgaaggaagagacgttgttaggtcttagaattatgaacaaacgtgtgggttgtctctgtctcttgtgagaaaccaagtcatacataatatgaccgaccaaccaaattatatagtgttattcggaggaaaagtttaattcagtttttttttttcttttcatatgaatgggatgttgacaaaagaatcaaaagaattttggatggattctcgtattttactaacttttttttgaagagaagtgttttgcggtgcgagagaagtgtggtgcggaagaagtgcggtcgatttaaatatacaaaaatcataatatattat

SEQ ID NO: 52297 - DNA, 695 bp, Arabidopsis thaliana landsberg
gtttttaacgtaaaaagggttcattcgtgcttacagggtttggtcatcaactgcaacaatgatatctccaagcactatattaccagcaaaaccccgggatgtcggatgtaatcctgctttttccgctagactcttacccggtacctgtttttgtatggaacttgtaaatcataatcataatcatcaaataaaccaaccggtttcgatgttttagagtaagaactacgaagtgttttacatacctgaaggacaagggctccattacgaacattgagttgattagctactggatcaggggctaattctatgttaataccagctcgaaggacctagagttttgcatataacattaacaaaattccaaaaatggattaagaaaacaaaacaatggatatcttttcatacttactttgctgaattgtattagttgaggaacaatctttaatactgttgatgacggaatagcaaatccaacacccgcagatgttcctgttgaagccaagagtgaatactaaaatggattcttacatgattctgtgagtcaatgaaaatcacctgtctgtgtgaaaatggccgtgttgatcccaatcaagttcccttttgaatcgagcagaggacctccgctgcgaaatttaataaagaaagatccattaaacacacagaaaatgattttacaagaaaaatgtaatcctctt

SEQ ID NO: 52298 - DNA, 594 bp, Arabidopsis thaliana landsberg
  unsure (1)..(594): unsure at all n locations
ctgtatttcggggttttttttttgtctattcgggtaacacgttataaaaaccgaatccgaacccgagaaccaaattgatacgatctgtggaccaaacccgaaaaccgaaacccgaaaaaccgaccaattcagtctattcgagttcgggtccggttcgggttcggttaacgggtttaaaatgcccnnnnnnnnnnnnnnnnnnnnnnnnnnnaataaaatagatagcccgttcagctccaacaggagcatcacctcgaccccaaactggatctaaaagtttggaccgggccatttagggccagcaccacacaaaaaaaaaactaatgagattgtatgaaagaaatgggttaggccgacatgacctaaatggcgcgacgtatatagtgtcttaaacttaggcacgataggtatcacggcacgacatgactagatagtctgtgcttggaccgacatgaggtgagacacggattaaaaaactagtgtttaaatgcatgttttaatatttttttctttcacaaaaattatagaaaacattggtggctctttctcaaaagaatttagttaattgcaaagttatagatatttaaatatata

SEQ ID NO: 52299 - DNA, 1872 bp, Arabidopsis thaliana landsberg
tgggcttgatcccatgacatgttctttgccaggttgtgcatgttgtttttgtttctcagacgccatcgctcttaggcacacacgcggcgataatcttctcttttcaagtagaggtttcttggtattgtttggaatttgagaaaacgagaacgtaacgtttgatgataagactcttgacgaagtgaacactcgacacaacacattcatggccatatatacaacatgctacattgaagtagcaatatatctcaacataggatctgacatgtggcaggttgaggaacatgacatggtcggaggaggatacacgtgttggtaaacgtggccagatttgtggtgatccgtatgacatggacaaacacaatgtctccttcacacactgacaaatttcttcgttaagaagatttattaattaaaatttaattttactatataatcggataactataccttatatgaaaaaaaaaaaaaaaactataccttatatgtatatatacatatatattttaactcgaatttgttgttgtgcatgcatgacacgtgaagaggatgtgcattaatacacgtcgtcttttggcaaaacgaaacctcctcggtgccaagtgtttgtcactttagcaaattcttatcaagagaagctaattctagacctttaagatactataaacaaatagagtacaggaccaacaaaattacattctctttgcctttgcctatcgcttaattctgcttttattaccagagaaagcaagaatatataagaatcagaaattgggtgaagaagaatggtcttgattactaagatgtctctctctttctacatcattcatcttctcattttctccttgatttccacttgtgttgtctccatccgtacgtattggctatctatctctttcttagtgtatttacattatgtatttgtacaactcgttcttgaataaatatttacatatgtaatacgtgttttgagattacaagatggtttcaccggaaaaaaggattacaagatgatcgttttgtaaatatatgtataataacatttattcaggtctttggtaattacttttaagctcataatattggaatttacaatgtcatccccatgcatgttcatttaaatcgtgtagatggaatttttctcattcatagatcattatttttgtgttttgaatgttgtagaggccgaggataatcttcttcaaggcctaaacagctaccgaactgctcaaagagttcctccatttgccaagaatgagaaggctgattgtgtggctgatgagatcgccgacaagctcgaagatcagccatgcacaaaccacaccacagcgagcacggttactcctggctcggtacctccacggctgacgaactaccaggacattctctctgaatgcaaaatcgacccaaacactacccgtgacggattgatcttacctgtctgtatccctaaccggatcccgactttggctttaactaattacacccaaactgattatgctcggtatcttaatgattcgaggtatgtcggggctggtgttgggtcggagaaagagtggatggtggttgtattgacgacaagtactccaggtggaagctttacagctggtgttgctgctggcaaggcgacgtctgtgagagtaatggctggtttagggctaatggggttgttgttcagttgccttgtgctcttctgagctagtgactggtgtgtctttgtgtgaagactcttctgtatcttttaccctctgcttttaacgaatagtttaataaacacatcataactcaattaagaagtcaacagtcgttagtggtggacgtagaagacattattataataatcaaattaaaaaaaaaatctgatatggttgg

SEQ ID NO: 52300 - DNA, 465 bp, Arabidopsis thaliana landsberg
tacttccctctcgagaaatcatcccatgggtggtcttgaccaaagatttcgtcgataatgtttgaaggtggaagcagatcaatgttcttagtgcaacaatgatctggcagtattgaatcacaaggatcaaatgaatacgactgatccacaagatcattgcagtggcgccagtaattcccaatgttggattcttctctatttctaactggacatcgagagtagattgcgttggactgattctcaaaggacatgtacgaatcttcattagcattaacctcttcttcttcgtctcttgagaggcttttttcggctttgtcatctgatggagtttcagcaccataaaaggtgttgtcatactctacttgccactcatcatcatcactatcaacatccaggcttttagaacggttctggatagctcgtcttcgcaggataaagacattgaaataatagctcacaatttcc

SEQ ID NO: 52301 - DNA, 570 bp, Arabidopsis thaliana landsberg
  unsure (1)..(570): unsure at all n locations
aaatgtaaaatgaactaaggctaggaaaacattaattgaatagatatgaaagaggaataacaaaacaagttaggactgaacatatatgtagataggtgcaggtaacatataaagaagtaatgttttaaaatcttaataaatgtattgaggagaaacaacaaaagacaactcattgacaaatctcttctcaacctttttagtcagaacatctcaaatcacaaacttatccaatttcccatatatccaacaattatatataatattatttttgtaaccgatggagggaaaaagatttccattaattttttttgttcgcctaagttaacaagaggatttaggggaaaataagcaaaatataagccgatgattaatgaaatgaccaagaacatgtggggatttcaaaggttcatttttgtttttcttatataataataaaccttaaaaatataaaagattcaagaaggtctcatgagaggaggttggaagccatttgtctgcagccaattttgatgaggagtagaagtagaattanaaatctgattgtgatgatgaggagagaatcctgatgat

SEQ ID NO: 52302 - DNA, 788 bp, Arabidopsis thaliana landsberg
ccaattaatcaaccttgaagatgttccttatatttgaactatcaggccttcaatcactggagttgaagatgcaatctcctggctgttcaccaagaatggtaactattctgtcaagttaggttattatataatccgtcaattatctccacctcagcatgacatgtatgctttgaatttagcttctgcaacaaatttgtttaccaatatatggaagcaaaatgcaccaccaaagatcaagcatttttggtggagggcagttcataatgcattacctactgcagataatctaaagaaacgtaaggtgactatagatgatacatgtcagagctgtggagaagcaccagaggatgttaatcatctcctattccagtgtagagttagcagggaagtatggcagcacacacctcttcaatctccttcaggtaacattctaatgctcaactcacttatacaaaatgtggaattactccggaatttgaaccatgatccaagaaaggatgcaagtttgttcccttttattggatggagaatttggaaaatgcggaatgatatcattttcaataataaatgatggtctattcgggacattataaacaaagctctcattgacaagcaacaatggaatgagagtctacggtggagtgacgctaacaaacagcgagattctattcaaagagaccctaataccacaacactattacaaccaaaagaggacgtaatgactattattcatcaagcaaaaacttattgttgttttgtggatgcttcatgggtctcttctactgcca

SEQ ID NO: 52303 - DNA, 783 bp, Arabidopsis thaliana landsberg
cgattgttgcaacgccgtttctcaccgtcacactttttttatctgcaagtaacggccgtttcccatgggtttggttgatgatgttactctcaaactcatcactagtccatttatcacccgaaggaaaatctccgtgaagagcaacgatgtctagtttgattggacgggtgagattcaccggcttgtttgagtcatcaacaaggataatctcaagtggattgttgtccacgtcactgattttactccctgtaaatattggtgtcattaagttcttacggaaaattagcttcagtgtcggagtagtcgcctccggagcttcgatacggaaagacgatgaccgagataatcgaaatcgtttactaattccatattccacttcttgtcttacctggtcacgttaccaaaacgagtagagttataaaacactcttatctgttttatattaacaaataatttgatatccttattacacaaattaaacaatacatactaataaattaaatatgtaggccaatatatagatcttttaaaaggtactagcatatatgtgtgtgtgtacgtgtgtggaccattattttgtcttttatttctagatatagttgattgaaatgttaggttagagaggtcttgtttattaataatactaaaaagatttataactttgtaaatatttagtactatcttaataacgtatgtgtatatatatgatataagaatgcaactatgcatgtacatgcatatgtttgttacctaaaatgtatatagtattagccacatgatcca

SEQ ID NO: 52304 - DNA, 1299 bp, Arabidopsis thaliana landsberg
atgtttcattgcatgtgtgtaatttaaattcgcctctcgttttgtttaatgccttgcttggacttatttgaatttcattaacttcttcaatggacatatcgacagtaacgtcttttttttattgttactatagtagagtgaattaatttattcgtgtttatagtgagacaaaaacattttggtacacatgtacatgtccaggtaaaaaatattccaaagacattggatgaatttaaatctctttcgaaatagtactattctattctatattttatatcgatatgaatactatagctaagaatcctctagttgaaaatgtgtaaaagagtctttggcaaaatctttgttcaaacaataatatttaaaaatacgatctaaatagtcataaagttttttttaaaaaggttctagaacatgtaattcgaatacgtttacacatttactactactagtaatgtgtacatacatactccatacgctaatacttgtaataaaacgaataagagggtgaccgacctattttattcatttactatagtagtattaagttcttagtccgagttcaattatagttttaatactaaaaccacataacgtgtcacataggtgaaattctgtatactattataaatatcagataccgactagaaatatcacatttttatgctcttgattcatattataatcctccaacatgagacttttgactttttaaatcaaaggtaagaaaacactatcatgatttattaaattaaataagatcacgtcaagaaaactcaatgaatctgagtaagcaatgactcacattacgaacggcaaaccaataataaaacattaaaaatgtatatatttaaagtgtattaatacatacaaaaataaaaggtgttttcgtgatcaattataataaagttccaaaaaaagaaaggaggttttacataattggttaggaccacacaacttgtcatctgtcgatacaacaaggcgtcgagctgactcagattaatgagttaatgggacccacaatcacctctcttttgaaaggcccaattatcaacgtccttgtctcccgggcccacgacagctgcccttgtaccccgtttgccctacttttttcttttttttttaaactcacctgcagttgacacgtgcggtgatcctcgctcgtgcgccagctaagatccgagttcgtgctacgtggctgttaagtaaaggtcttaaagtttgcatgggaattaaaatctgttgttttgagtctacggttactatttgatcttttagggtcgtcgtgtatgacacgtg

SEQ ID NO: 52305 - DNA, 2668 bp, Arabidopsis thaliana landsberg
tattttcgttttctgtctaatgtctttatagagcatgatttttctcgtaaatcaaagttgcattcgccagatccagattcagaggatgatgagcatgatgatgatgacaacataatggttggaatggagcctggtctaagagataagaaaagttttggggaaccaagactgaaatccccttctaccagtttctataattctgtacctcgccacaaatcgtttaaagagacattcaaaggttcacaacgggaaatccctgtaactaacagcaagaagggtcggataagttccaaaagttgggctgaagggtcgagaaaccatctggttgccaacgtccaaaatctttctggaagcaatattgaaaccaatcagtctcatgattatgataataatatatctaatggcggacgcaagacgggatatctcactaaatcttcgaagctgttacctccgagtagaagcagatcccctgagtcaatggatagaggtccatcttctgggatggtaaagatttgtctaatacttccatgtctacatgttcctttcttgcccttttatggaaatatgacttgtgttttgtgtgatatcttcttttaaaggcaggaatatatcacggggagaggaatcaaatgaaaatgcagagagagaaattgcattcgactgatgaaccaccggtgagtttgatggttaactatcttaaaaatatagatattgatgtatattttaacaaagtttagaggctctatcaagttcgtgttctgacctttaacgaatgttaataggttgccaaacgagtgaaacatgggtatattcagcaagtatatgcaccaaaatcatcatcatacagcgagattcttgaacgaaaaagccagataaatcggttagtaaccaaccattgtgtaatgcatttattgtcccaaagagatatcaaatcggcttattggatcatactgttatgtttgtaggtctggtgtggaactgccttctagtttaagcggggacgatgagactgacgaatctagctcgtcaatggattaagtaaagaaaggtacaaaggaagattaggaaattccggtttgtatagatatatgatgaaaccggtttaggatgtgaaaatgttgcatcgtgtaattggtaaaagttagagctctcttcattttggtaactaaacggtccccaaagagatacagtgagccagtaatgagcctttttttgtttaaatttgctcctaaaccgttaccggtttgaccgaattgagtatgtaaatcccagtgattacaaaataaccaaagtaaggcccatttattaataaagctcaaattaggcccaaaatattatggtagtccggtttagtcgtaaaaggcggttcggaaatgtgtgactaggagatttcgtcacatgagaaaaaatcagagccgttgactagttttcgtagaaagtatgtggtacaattttgattcggccaaaaaaggtttttttctttttcttttagggttagcgttgctttgcctcaaactcaaattttgaatctgatttcgaatctttacgcttaatcaattattcatctggattttcaaatccaatccttttcctccctggtaagaatctctcttcttcttcttcttctctctcacgacgattccactgttctccgattctgtgttagttcctgcgatattttccatcacttgttcgtgtttcgttattacgggtttgtgttttgtgaatttgttgacctttgtgtctccgtaatttcgtccaacggttgatgtttttgattgctgattagatttttgtcggtaggtattgaaaacgatgatctttatggattttgttttctgtttcttctttcctttttgtaatctgacttgcaagctttttgctttttttgtcggtcggtgttaaaaattgttccttttctcttgttcaattgtttcctcaggtgaccaagtaattggggattaacaaagggactggggctttattaagctcgaaacaattgttcttcactctggccgcttctgcaaagtcgtgtgcttctcgcacctctgcgcaggtgtggggtggccttgaagtggtgacttcactctgtcttccaaggatttctctagcttctatcatttggaggctccgtcgtgtttctgagggtcttacccttgattacggctaacatttactacgcccactataccacctcttaagcttttataagaactttttattcgtgcaaaaacttaacttggatcttaattgtttctagtttagttgtggttgtaaagtaaagaaccgtttttttgtggtttggttttgcttttttagtttccgttggtgatgtagttcgatgttattaagtttgacacaatggtcaggttttcatgcttcaacgctcacatccaccgccatagacctaaggtaacttgaaccatcattgcctcttgtgtctttagaacgatagttttacattctctgtccaagactcctttgtccaataagagaatgctaatttgtttctatgttctggtgatgcagaaatctgttgaaggattttcagaacgagtgatcaaagaagatgggtctaaatcaaaaggattgagctcaattatatttgggagaaacattgcttctgttagtgaaaacagcaagccagccgctgttgagcgtgtctgga

SEQ ID NO: 52306 - DNA, 815 bp, Arabidopsis thaliana landsberg
tttttaccttacctaacagagacttcggttttttaaatttataattcatgacattgaatgtttttacactgataatgaaccagcggctgctgcagagaagctagcatagtgtcaagagactatattacttctcgggaagcaactcaaatccatgtgtcctcaaacagaacaggttgcttcttctccaagccaagaacaacaagccctaaaccctgaagaagaggaatacgcaacttccacaaatcctcaagacagcaaattgagttcgccttcagacaaggatacaccatcgatgaatacaatgaaatctccggtcgcgtcgaaacatagacacacgaagtcgaactcgtcatcgtcctcatcaggacttactcctgagaaacactctagaggattcagcaggttcttctccactaaagcaaagtaaaaataaataaaaagaattaaaaaaagtataaatctaactatgttgtatatcgtatctattgctactatattatatgggttttgtttttaattttttactatgtgggaatgttattttaacttaggttttttcttactttctttctttatttctgtactgacaacaatttggtgttgaattccgcggcgtgtaaatgtcaagctaccaaatctcgttttctcattggtgtgcgttattttttaatctaaggtttcttaaaaacatctcaatttaatatcttttcccctatctttaaaaactgaaactacaagttctgtgttctgtaaacaaagccaatcaggtttcaaggtttaatgaaatctcaactttgggcttagcccaaccgcta

SEQ ID NO: 52307 - DNA, 554 bp, Arabidopsis thaliana landsberg
tctactgccttttcgtcacttttcttttcttttctttcttaaatcaatcattatcacataaactctgaatttcgagacagcacgtttgcatattttatattcaaaactacaatcacatgatgataatcaccatgaaaacagagtatgcttttttttttcttaaaatgataaaaacagtatgtaccataattaatcacaacgcatcatgatcaaatatagtactacttggttttacatagcaagagtattaaagatattaagcccatcattcatcatctccctttctcgtagactgtaaaaagaaaaaagcaaagagaaaccaacaaacaaggaaaaaacagaaaatctttagcctaattaagtttataaacaacagaaaaacagaggaggagaagaacccatttaagatcttgacggctaaaatatctttaaacaccacgaaaaagaccgatcagtagcgagtgggatacacgcgcttgccgtcatggtcaccgtcaccgtcacgggatggctgagaactctgtttaccgtcgcaggatggacggaaccaagag

SEQ ID NO: 52308 - DNA, 578 bp, Arabidopsis thaliana landsberg
  unsure (1)..(578): unsure at all n locations
gtatctttatctattattaatacacgtacatgtgttctgttgcaaacaatctttgcactagggttctctacctgggtcgtgcctagcttccccaaggacgcctcctcgggcgtttgcaccaaaaaaaaaaaatcaaatgctagtgcaatgtgattccgtaactttcgggttgccaagacatgtaaaaaaaccaagaaagaaagaaaaccgtttcgcgcaccataaaatcgctttgggtttccaacgcaaaaccgccccgcacttctccgcaccgttaccaaattgatccttcccgcaaagctgcaatggagttcgcctcccgcagtcgacccaccaccacagcagccgacgacgaagaaaacgactgtcttcgccgcttccccgaccatccgccgtcgcagccgcagggacacggtactgctctactgtcgccattgttttgatgttttatatggttgtctttttccacagaaaaagagggattttgggcctgtatcattgagttcaaaaacttggccaaccanaattaaggcatacatgcatcttttggctattgattggttcactcaaaattaatg

SEQ ID NO: 52309 - DNA, 678 bp, Arabidopsis thaliana landsberg
aagcagttgcttatcttctttcacctatatttatttaataaaatgatgataggattaagttttagggtaaaccaaagaaggatttagaaagagtaggaagattttgttttataccctaaggatgctagtagctcatgccacgatataccacttatggcgtgacaatcagcaaagactcctgtaccgatcattttcaagataattgaccgacatgtgttcgtaatgccaaaccgaagaaagtttagaaacctcatgggtttgtggcttccatgggagtgaactccagatcaacccatctcaaacttgttttgtactctctttttggcaaggacacagttaatctttttgtataaccgctacatttcattatttatgaaatttacatttttatcaaaaatgattcacgaagattaggaatatgttttcttatcgcacttaccattaagagggacatcgaaaacattgcatagaagaaaacaacacaaatgatggtttgattaagtaacaatggcgtgaacctctatagcaggatttaggctaaatctttgctgtgagtacatcatgtgacccaaatttttaaaaacgtatcaatttatcaagagaatgaacttataagaggtaagtaaatgagagataacatgtttatcagatgaaacaacagagtttttttttatttgt

SEQ ID NO: 52310 - DNA, 465 bp, Arabidopsis thaliana landsberg
  unsure (1)..(465): unsure at all n locations
agaacccgtcatcaattaagaccgcgactttgcacgtattcatacacaacaaattatacgggtagatacaaagggaagccgatgactgcccgttctgcacagaccccatcggcaagttttataccagcctactggtgtagcggatttggttggatacttcaaaagtacaacttcgccgggttttcaagggaacaaaacccctgaattaatacctgtaatttatacgtaactgcaatctgccattcaaatatatttccccgtataactctctttcacctttttcaaccctgcgggtacacctgaatatatcaggttgccgccggcatcaccggcttcggggccgagatcgatgatccagtccgcggagcggatcacatctgtattgtgttcgataacgatgagggaatggccctgctctatcaaggcatgaaatgatnnnnnnnnnnnnnnnnnatcatgaaaatg

SEQ ID NO: 52311 - DNA, 924 bp, Arabidopsis thaliana landsberg
tatacagtaaaataatctcgctttttttattagtaccgagttttattcaccgtagcatccattagttcaaggagtgataaaaaagaaacaaaaactatagtttctcaaaaaaccatttgtagtgattgaatcactgaaccaatatcctgtcatggattgtctagacacatgtgaagtcaaactttggacactctgattaattagtctcaatttatattttagggtaaggtataatatactatatatctattttaagtatgtataagaaaagaaaagaaccatttaactcccacaaaaatagttttacctgccaaaatggaagtttctaatttttgaatcaaacaagcaacataacaattgttgatttttgtacgtacgatctcataagcaaagatatatactatcatactaggtaacatattcatacaacaagctctatagttaaatatttctctacctattggagatgggatttggaccacttgggactccatgttcattggcaccgatcatctttcccttcagccatgtcgtcatcggccgccgaactctaaacctctctcttcttttcccttcaggcgaagtcaccgccatgtcactgacatgttgaacattggagccaatctggtgagtttgatcaatggttctttgatgggtttggatgattagaaaaagaaagaacaagaaaacaagtgaaatggtgatgtgaggagatctcatcacatgttataccaaataaaagactataagcttatataataatcacaacaaaaagcgacaacatagaaaaaaatggtttatggcacttagggatattcagaattgagaagctcttgtaagatcaagaaatgagacatgatatattttgctctaaacttggagagctagtagagagagagagacacacacaatattgtggattct

SEQ ID NO: 52312 - DNA, 648 bp, Arabidopsis thaliana landsberg
tcctaacaatttataaaggagtgaacgacaaaaataggtgaaaaggtgaataggttttgataatatatgaagctgtaatatgaatggccgtggacccatatgacttgataattgctgtttcttttagagttgtgtgagtcactgagtccttaaagctggcatcttctagttgccggcccaaaaatgacccctcatggctaatgcaatgcaacttgaaaatttaagatacaaaacaaattgcctaagaaaattcaaaaaattctaaatttgcaaacaaaatgagaaaacaagaaacaggagttacggccaaaataaaaactttaatttcagagaagtagacattctgctagatcactaccatttatgtatgtgtgttccgaacgtatctccggtatatgatagacgactggttcacctaggggatgctttggtctagctagtttcaataataacaaatggaactataattagcagccaaactttggtcaaatacaaaaggaaaatcatagtatatacaaaacaaaacataaataataaaaggcatggatgttttagtgaatgtcatataattatccgttggagattacccaaccagggggaaatggaaacagctttatatactgcaatttatctcttaaagatcttacg

SEQ ID NO: 52313 - DNA, 612 bp, Arabidopsis thaliana landsberg
atcccctctgctggtggctttagacatgggcagcgcgagagtccagacctggcctaggagaagggagggccggttctatgtgacggggaagagttccgtgaatgtttagttgggtagaacgcaaggacgaggcagcccaagaagtgcaatatatctgtggcactttaactgttgccctatatctttttgacattttttgttaaaataaggcactgttgaagtacttttttagaaaaagcgctatattttaatttgaggcactcatttaggtcactgttggagatgctctaaaagactaaaacatacatcatcacgagcttttacacaatcatcaagccatatcaaaatagactccgaaataaatattgtgataatctgattgtgcatttgagcatgtggagaacgaagcacaaaaacaataaaaatccacctaggaaaaattcttttcttacgaatcaatgtggaacttcagcaatgaacattcctcgagcatgcaaataatccacttctagcaaagaaaaaaagataaggtgtacttgggactctatgcatatttgccataaatatggagaagtacacacaaggaatagcaagaaattcctatagtgtgtg

SEQ ID NO: 52314 - DNA, 766 bp, Arabidopsis thaliana landsberg
aggctcacgccatggagtcttcttcttcactgtaatcattacaattcactctcttgtctttctaacttaacctgctttgttcagcttctttcgtttcttgaaaaccgtatttttttgttgatgatatttttatttcttgttccttagacattgacttaaattcacaattttcctggtttttagaaaaggttctgcacttgggaagcttgtggtgacctctggtctcttacatagctcatggagtaagatcttggagatacataacccaccttattcgaatcaagatccaggtctacaagtttcaaaaaaaaaaaaagattcaggtctagaatttcagattcaccgagaagagaaattcacacttgtggtttttagcgcaccaccgatctgcagaagtagtagctctgattctactcttcttcatgtgaaagataaagaaaatccttttccattcctctgctccgagaacaacccatcattctctcttcacacacctgcttttaacctttttacctctgcttctactagtctcacttacctcaaatcagaggtaatttaatctccatctcttcagtcttatctcgtttttaagactaattcagaatcttgaaagttagtgtctgcagaaatatatctctgccgtgtttgcaattcagtccaatagctttttaatactctgtttcagatattgtttgatctagtatatgtttctttgtgtattgtctggttttaaaagtcaacaactataagaaacagaatctttggc

SEQ ID NO: 52315 - DNA, 287 bp, Arabidopsis thaliana landsberg
acgcccatgccctcttgttttgctggttcactgagcaactgctactttctgatctcgaatctgcgatggttgctggcatggcctgttgggagatcgaacagacgctgttaaggtctccacgatagatatgaagacgtcgcctactgtatcaccttctgctggtactttacgtgttacggaaacttgcgcactgcactctggtttggttgaggacgccaggtcctaacagctcctctcacatgactgtgctggttgttatatataggacctaccacttgaggcttcaa

SEQ ID NO: 52316 - DNA, 2047 bp, Arabidopsis thaliana landsberg
gcaaattgaggatctctgtctcgcacttaaatcagagtctgtcgaagattacaaagacatactctgttgcatggtactctccgagtgtgtttacaaggtgattaatcttattctttcattaaccttttatataatgttaatcaatttagtctcgttgaattacaaggaacaattaattagttaactaagaggttctgttagttagttagttacaaggctggtctaactagttcatatatatgtatacatctgtgttctctttattcgaattattacttaaaatgtaactttgtaatgagatatataggtagagaaatttagagaagctctgtttatgctattgcattgttattttaatgggggttgtattatgatagagacctgcaagtgagatggttcgagctgttaacaaatttaaagcggacttcggtggccaatttatttcgttggagagagttcaaccttcatcagatcacgttcctcacaggtaactatgtagttggaatgattttgtaacttcctataaatgtattttttgcgctctttagtttctactttacagaaatattttgtgtttattgagtgagtgattgattattaattttgctctttatgctcaaagttggtttcatttatttggaaattaacttaaaagaaactatcttaatgcaggtatctacttgctgaggcaggtgatacattgtttgcatcctttgttggaactaggcaatataagtaagtcttggagttttctattccctggaaaacaaaataggtcagatgttaaaggtgtgtgttttcattcgtgggtgtgttctagggacatcatggccgatgcaaatatacttcaaggacacatatttcacgatgatgtcgcagaggatgaatgtatcgaagcatctgagcctatacagagtgaaccacttaagaataatggagagggtttgcggaatcctaagcaacttagacagaagcccaaacctgctgctcatcgggtatgcttgtggcatgttgaagtagatttcttttcttttgtattttcagtacactgtgattttttgcaacaatgtgttcttattttgtaaatctccttaaattttaacaactaggggttcttggctcgtgcaaaggggattcctgctctggaactttataggcttgctcagaaaaagaaacgaaaacttgtattatgtggacactcacttggtggagctgtaagtctgattgctttagatgttcttacctttgtagctcattgtctatatctgtctctttgttgattcccgggtgttaatatacgtaggtagctgcgttggctacactcgccatattgagggttgttgctgcatcttcaaagagaggaaatgaaaatattcatgtcaaatgtataaccttttcccaacctcctgttggaaatgctgcgttgagagagtatgtttttggagcactagttaaacatacagctgggattagtaatagcattctcataacgtttgcctcgcttggttttgttttttgcagttatgttcatgaaaaagggtggcatcattatttcaaaagctactgcattcctgaagatttggtcccgaggatattatctcctgcatattttcatcattacaatgaacaaagaatctcaatggctggagagactgaagccacaaatggccagggcgtaacatcagaggcagaaaagagaaaaactaaggagcacgagcagttggtcattggtgttggccctgttcagaactcattctggaggctttcaaaacttgtccccctagaggctgttaagaaacaattggataggtacataggaaagaaagaggatcctgcagagacgtctactgcaaatgaatccgcagtgttagctcctattagagacgtggttattgaaccacaatctcttgaaatagaagagggtaaggatggtatatctctcaagccattgccagatgctggtaatggaccaacagttagtggaagaagtggaggaaagaccaattcgcctaatgggttcagggttccttatctaccctcttacgtt

SEQ ID NO: 52317 - DNA, 1047 bp, Arabidopsis thaliana landsberg
  unsure (1)..(1047): unsure at all n locations
caagagctcacgtcaccggttaaaaggacttaaccggaaataaatgtttgtgcacattcgttgattttctatttgtcctttcagttccattgacgaatggttcacgaccaaaactgtaataataacgtagatgtatgaactatgaatccttacgagttacggggattaagtttaagcattaaaggcccgaaactataaccggttattcgatccataacccggttcagttgaattaagcttttaatttaaacctttcttctcaaaagcccaccagaagaagaagaacaagaatattacctaaaatctccataaccctctttttatgttctagtcagcaatcaaatattaccttacacaaaagaatgtgatttataacctgtaattcaatctacattcaaacggtagacatctatctcaaacgaggggaatcagtatagctcagagttattgtgacatttcccatttcatgttactatctcaattctcaagcctatgaaggttagtaaatcacatagaccaatatcgatcatcgacacaatggtatgatgtattatgggaatcagtgtagatcttcaaagaaccatgatctaattcctcccaaaacagatgaaacatttcacagttaccccaaaagcaccagactctaccaataaaatcttcactacatatctctaacatctgcaagctaattctcttctcaccgaagagtaacatccgaaatcgaatgatcgatagattctattctactaactgcagctcaatcctatccaagatcaaatatctcaatctccaaaactagatggcttctaacctactaactgcagctccatcctaattcccagcacatccaaaccaaatcaatacaaataaggagtaaaggaccttatgaacaaaaatgaaaacattcaatctaagattacaaatgttcacttcacaatgttcacatctcccttcagtatcttttcttttcaccattacagaacttgaatccaataaatagaactanagtaaacaattacaaaatcgagacactacgctcatattatt

SEQ ID NO: 52318 - DNA, 1010 bp, Arabidopsis thaliana landsberg
ataatcttgactaaaattttgctgataaagtgcaatatatacggtgcttaacaaagttacaagtacaaaatttacatgcagtggttttaatatgtaatcgatcgataagattttaatgttgaaagacgaaactcgtaagcaagatttcaagctacatatatctttcataacaagaatatccctttcttattctcaaataaaaaaacttcttaacagaattaatgctacaaaattctactaaaattaagacaacgacaaaactaaattatcctaatctatagaatcattttctctataatgcacaaccaaacgccacaaaattataaatacggacgttaatcctttttatgtgtgtttaatatacatacatgtacacggcaagtataacagaatcaagtataatttgtgtattattatatacgtacacatttaattaaaacatcaatatttgctaaaagacaaaaagaaagaatacactcacgcaagccaaaacctgattgtatgttgctacttgctataatactcgtagttaccagagcataacacaacataacttaaatagtaattaattaacttaattatctcttacgagccatgcaatgtacgtaacgttacgtacgtttggaattagagaaagaaaattttcatgcactgtcactagtggacgaaaccagatttaatcttatgatgcttatgtctcttattcaaatatatagcaatacattctcaaattattctattaacttgtttatgagttctggcgttctgctattaatcacccgcaattaggtttttagtctccatgataaaagaatgcaaaaaccactaagacatgaatgcaaaacatttactacatacctggagttataatctatcgaccatctagagcctagaggttatcatttttgttcgatttaacctacccaaaaacagtacagatcagaaacaaacctagctgaaacagagcatatactttggaatcatatacatttatgtatctgattcagtta

SEQ ID NO: 52319 - DNA, 1664 bp, Arabidopsis thaliana landsberg
ttgaaacaacctcaataatatttagcagttgatggttggagaggaactttttatttatctctttttatcttctgccttttaaagactacttgtttctcttcttcttctttattgcttatagcttctgagcatcaatggatccaaatcataataatcttctcatctttgtagccttttttgttctctgcttagccaccaatggtgtaaccggatatgccacggtcacaggctcggtgttttgtgaccaatgcaaggatggagagagatctttgtttgattttcctgtctctggtaataataattccaacatttttacattgctgtctatgcttgtgttccttaagatgtgtttgttgatttgttgcaggaatcaagattagtgtcacatgtgctgatgaaaatggacaggtctatatgtcaagagaagagactactaattggcttggaggatatgtaatgagatttgatgggacaccggatctaagtaactgttatgctcaagtttcagacaatggagttcaacaagacccaagtagctgcagcattgcttcaggtcctgcacagaaacttaaactaatgttcagcttttttgggattgaaacgtttgctgcggatgcccttcttgctcaaccagttcagccaagttctttttgtcctaaaccacccacagctccggtcatgcctcctcctcaagttccggtaatgcctcctcctcaggtcccggttaagcctcatcctaaggtcccggttataagtcctgatcctccagctacattgcctcctcctaaggtcccggttataagtcctgatcctccaactacattgcctcctcctctggtcccggtcataaatcttcctccagttacatcacctcctcagtttaagcttccaccattgcctcaaatccctccaatgccatttgtagagccatcagcttgttctcaccagtgagctttctctcggattcattccctaactcacttcaaaacaagcctagattttcgggttttttcggtttttggctccatgagtgagctttcatatttgttccttatagtacttcaaattctgcttcggtattttggtttttaaatttgatttttcaactaaaaccgaattatttgttggtttgaaaattgttgtttacttaacatttcggttctgttttaaattaaaattgataaaattacaaagaaaataatgtatattatatatctttagtagctaaatatgatttttggtagtataatcttactattggactttattcggtttggttaggctaagcttggttcttagttcggtcttactttcatatctgtttattatgcacacctttgtttcagataatttttaacattttggctttgtgatataggttgtggatgaaacctgagtacagatgctactggagggcgataggtccagacacaaaggtcgcagttgcatttgggctagtagccgggagaatatacggcacagatatgacagtacgagaagcgcttgacgggcgaggagaagcctataagacacttctaagagaggcaacaactgcattgctcaattcatacaactctctaggatttccttataattccgtcgctgtgatcacatataccaatctggctctcctcgggaattcggaacacgatgtcctcatgact

SEQ ID NO: 52320 - DNA, 323 bp, Arabidopsis thaliana landsberg
atcccctgccacaaagaacgagaaaaagttgtctccgctacaaaaggaaatatccctccagcaagagtacctgcaaaatcatttcaggatcatgagtacaaatcttcaaggcctggatcccactccagaaactcctcttcggcacaagccagatcctcctaccctcaaagagatcaggaccttcgcagtagaagaattgataacaaagatctcaggaatagcaactacctaaagcgaagttcctctagtcacaggactccaagctagagaagatgacccgcctcggtctattgactattctaggagggacatctactagagaa

SEQ ID NO: 52321 - DNA, 520 bp, Arabidopsis thaliana landsberg
tttagctagatgcaattagttatggtatcaaacggtctaaatgctgcacttgtaaagacgtgtgtgatgatcataaacaccgacacatacgccatactggacatatcacaaataggggtgataataaaccacgattcaaatgactcctcataaatttatttaagatttaactaattttagttaaaaaaataaatataaatcaaatctgatccttatttaatctgattcttaaattaattttatggcgtaaaacttagatcccgttagcatccctagtcacaatctgggccggcagcccgcagcgtccgagccccacacagcaggagcaggacgagcgcggacgtggagcgctagaaatacacaatttgcgggtcgctgttacagaggccggtggcttaacgagtgccacaaaggcacaaacccacaaagaaatcgagccaaatccgccagggccctggtgccattgcattgccccgaaggccaactggccaaggcacccgcgccgcgtcagctactcgct

SEQ ID NO: 52322 - DNA, 403 bp, Arabidopsis thaliana landsberg
  unsure (1)..(403): unsure at all n locations
gatccccctctggagattccccgatgccacgaacagatgccacaggaaccagaaataatcccggattgcgccctgaactctatgcgggcagcagggcccaggttccgcgtcggtgatcccctcctttcttctctctctcaacgggacaacacttcttctctctcgacgacccgacccctctctctctctagctctcatggcgatggtggctcggttgatgggagtgactgggtattatggtgcgagtgcgctccagatgtgacttgatctctagaatcgcgcgtgcggagatcggttgatttggtgggagtgcgcctcgatcgggagctgggacgagatccgaccgtgcgccnnnnnnnnnnnnnnnnnnnnnnnnnnnnnnnnnnnnnncgtcgaggagata

SEQ ID NO: 52323 - DNA, 376 bp, Arabidopsis thaliana landsberg
accacaataaaagcaacatttattctctaactagatcaatttcataaaacacaaaatatcataaatattatataaaaacatgataattaatgcaatcactatctatatcaatccatcatctatcttagaaaacacacatgccactacataacgtcataaatatccttcgactagatgacttacatcatagatctatcccaataagcactaatcccaacgattcacatataatactactaggactctcctacgaatatcaatcggtcacatctcttctcacatacttctctcaaactgaacgatagagatccaacatctcgtgtattgggtcaatctgacttcgacaaacgattctcactgaacatcagacgcacta

SEQ ID NO: 52324 - DNA, 918 bp, Arabidopsis thaliana landsberg
  unsure (1)..(918): unsure at all n locations
cccttcttttttttcagagaagacaatgatgagttacccattgttaatgaaaatcgttctaagactccaatttcttctacttccacaatgttttgagttacctatatacaatgatccatttgatgagttagggcggtttacggatgaagatctaacaaatgtaatggcaaacatggacatggcttgatgtcgatgaaactaagttgttgcacgaacttgatctttcaataactaattgtggccccaacgaggagtttgatgggctgtcttctatcaatgatgggtttaccatcttgagacatgttcaaaccatcgaatgatgatctaaatgaaaacatcagcaatgagtgattaaaaaatctagttcatgcaacaacttagtttcatcagcaaccattggtaatgtagtaaagacatgaggaggcaagttttcgagaaatgtcatgtccatcaaattgggattaggggttgccatgacatttgataggtcttcatccgtaaatcgcccaactcatcaaattgattattgtacaaatcttcaccttctgtcaagggatgatcatcatacagatttatgtggatgacattgtctttggtgacccgtcgacttgcacacatgtcagactccttggtatgtgtttcaagagtggatgattgcaccacagcgaggttgcatagatttgtactagttgacacaccctgcaaaacaattaaatttccatcaaattactcattttcttaagttaagtaaatgggaaacaattcaatacatgttgagtgtcacacaagaaatcaagtgatctagnatatctctctctctctctggtaaacccgtcgatgataaaagacagctcatcgacctcttcgatggtgcttgtattagtgattaaatgtttgtgctgtaattgtgattaaaga

SEQ ID NO: 52325 - DNA, 558 bp, Arabidopsis thaliana landsberg
  unsure (1)..(558): unsure at all n locations
agaattgnnnnnnnnnnnnnnnnnnnnnnnnnntcctactgttgttgaactcgggcagccggatctgcgtattgccggcgtgcgtcttaacccgaaggatttttcgcccagccgccagagctatatcaacaatgttacattgaagaatatcaaaagcagcaaggaatataaaatacccggcctgccggccaatatgctggcaggcagcgttacctggagccctacgggtaagaaaattgcttttaccaacagcacaggaacaagggtggacctgtatacaatagatattgccacacagaaagtgaccaggataaataaacaagcgctgaatgtggtactgggacagggatatacatgggtggatgataataccattctttacaaggccgctgtaaatacagctgccaatgcacccaaaagacccatcacacccaaaggacctaccgtgcagcagaacctgggaaagaccgcaccgagcgttacttaccaggacctgatcaaatcgccttatgatgaacagttgttcgaatactatggcactgcacagctgaacagagc

SEQ ID NO: 52326 - DNA, 1239 bp, Arabidopsis thaliana landsberg
ttctaatttatccattccgtgtgtaacatattcactaataatctcatctcactaactcattcattgattgtgatatgtttatctagaattagtgttttaacattgtgtctacatatgatttccttttcattgtatgtgaacatgttaactcactaatcattttgtattttcgagttaacatgagtctccacttcggtagactaaagtaaagataggtttgagtataataaagtttaaaatttgctttaaaatcaatatttataaataagtttttatcataagtgatttttgtatgttatattggaccttgtataaacagactacagaagaaaattatttatgagaacttgtaatgttagagtggacctcgtataaactaattatgtgggcttttaccataaactatttatgaaaattattatggcccacaccactataactaaagcccacatatttagcagcccagtttcattgtaagagacatgttcgctctggaactagaattttctggtttttgggtatttgttttcttatgtgtagagaaatgatggtaacgattaaatgttgtgtattacaatttacaatggtaagacgattaatatatttacacacaattttgttgttgctctaacacgttagtgtgtgtgatgatagaatttcataaagctttaactacgaggggcaaaatgttaattctaaatagttgacagcagaaaaagatatgtatacataatataaggattaaaacgtaaataataataaataaggcgagttaaattaaaaccctgttaaaaccctagcttgaaacacatgtataaaaacacttgcgagcgcagcttcatcgccatcgccattctctctctcatcaaaagcttttctccttgattttcgcattctttagagtcttaacgcaaagatgagacctcctctaactggtaagaaccctagccgcctcttctcttttcttcattgcttgcttatcagattaacaatggcgagtgacactcttagctcgtttagtctttaaaactttatgtctttagctgaactgattgtcaactttgttcttttttgcttagaactgtattgggtctgcgttagttctatcggatatagagttgatggttgggttttatgttaaacatggagtctctaatgaatggtcttttgtgttcaggaagtggtggtgggttcagtggtggaaagagggcgtggtggatacaatggtggtagaggtga

SEQ ID NO: 52327 - DNA, 577 bp, Arabidopsis thaliana landsberg
gagatatgctcttcctgtgcgggctgctcctttggaataaaggagaagcctcccaagggatgcacgctggcggggaggcgcgctttaattttgctacgctggttatattgatacgatcgctttcttgtttaatccagctaagctaccataacagcatagcagcagcaagcaaggagccgtcgcgcgcggaattccgacgcgctgcttgcctgcctgctcttttttgtgtggaaaacgccgcgtctgttggatgttgctttccattccatccatccatacacgaacgatcgatgcgtgttcgacccgcgctgccaaatctaaaccgtgtgcgcggcggcaggtcaagatcggcgacctcgggctggcggcgatcgtggacaagacgcacgtggcgcacaccatcctgggcacgccggagttcatggcgccggagctgtacacggagacgtacacggagtcggtggacatctactcgtacggcatgtgcgtgctggagatggtacgcgggaggtgcctacgccgagtgcggacgtcgtgcagatcttccaaacgtcaccggggcgtccgcgcgcgctca

SEQ ID NO: 52328 - DNA, 285 bp, Arabidopsis thaliana landsberg
  unsure (1)..(285): unsure at all n locations
gaataagactgcataccacatagacgtgttactcatatataaatattttgggtatgctgcacaaatcagttactaatagaaacattacnnnnnnnnnnnnnnnnnnnnnnnnnnnnnnnnnnnngatcccgcaaatgattcttacacgaaggtgctggacttacctcctaagggtaccacacctttgcattgtcatgtacatatatttcatcgcgtgtacccgctaacagtgccatgagtatgcttaacactactgactcttagaaccttgaagacttacatata

SEQ ID NO: 52329 - DNA, 998 bp, Arabidopsis thaliana landsberg
aatatctcaacattgatcataataaaaattttggtgttagtaagactttactctagttggatatgaatttgcacttcaaacattttcaaatgtaatatatacatttaaatgatttgtgtaatggatgaaataatcacataaatcaaaggagataaatataggaaaatgcaaaaaagaagagaaacaaatgtgggagtggtccaacgtaagtgaaaagggcaaaagtggaaaaagaaaaattgttggaccaactagaggaatgccccaagattgggagaggtatcaatcatgatataacaaaaaaacataagttatgcatatataaatacgatcaaaggtggtcacttttggtccatggtacatctttgctagcttgaccaattcttctagggcacaaatgtatattggatttgtatcatctttatccaacaagtttctttctttatatatgtgtttcgctcttaacgtttcccaattaaatcactccactttgaatcttccacttatattcttttgtcttcaacacaacacaacatttccaacttttttcttgttcttgttgcccattagcttttagtgcataaagagggaaacattccatcttaattcggataatcgtcgatgttctctaaatagaacattattataactactttaaacttcaaatatttcaatatccactctcaaaatggccaaacaattaacctagatgtttcctattcgcattatcctcacaattcatcgtataatctctactatgtaaacaactagtctattggtgttttttaaaagagcaattaaacgtgtacatttaccattggttaggcaatagccactagaaactttgaaatcacataaaaccaattttatttttgcggatataaaacccacataggtatctatcaatctattgggtactaaaaaaaggcaaaaagctggtactggaaaatgcacagatggatcataagaatttcaaaaggtaaaatgataattggata

SEQ ID NO: 52330 - DNA, 536 bp, Arabidopsis thaliana landsberg
  unsure (1)..(536): unsure at all n locations
ggaaaaaaaaaagggaaaaaaaaaaaaaaaaaaagattgggtataaaaaaaaaaaaaaaaaaaaaaaaggggagaaggggggaaaaataaaaaaaaaagagaaaggaaaaaaaaacaaaaggaaagaaaaaaaaggaaaaaaaaaaaaaaaaaaggaaaaaaaaaaaagaaaggaaaaaaaaaaagaaagaggaaaagaaagagaaaaaaaggaaaaaaaagagaagaaaaaaagagaaaaaaaaaaaaagaagaaaagaagaggagaaggaggagaaaaggaaaagaaaagaaaataaanaaaaaaagaaaaaaaaaaaaagatagaaaaagaaaaaaaagaaaaaggaagaaaagaaaaaaaaaaaaaaaagagaaaaaaaaaaaaaaaataaaaaagaaaaaagatatataaaaaaaagcagaaaggaagaaaaacaaaaaaaaaaggagaaaaagaaaaaaaaaaggaaaaaaaaaataagaagaaaaaaaaaggaggaaaaacagagaagaaaaagaagaaagaaaaaaaa

SEQ ID NO: 52331 - DNA, 615 bp, Arabidopsis thaliana landsberg
  unsure (1)..(615): unsure at all n locations
tcccagaaaaagtctatagtatcgagttacaagttattcgtctttcngagaattcaagtntgcaaaaccctaagaacttaacctttgaaagaatgcaaaacatagacaatgaatacaagatgagcttaccttaaaagtctcaaactttccagtttcagtttctgttgagtggagtcaactctacttcggtggtgatgacattgacagtgctcagatccaccattaacgttttcctttgtgatttgcagatttaactctacaggcttttataaacagacaacaggcctataaaagcccaatgggcttatataaataacaaaaagttggtagttaatgagaagggaacggtttttatttgtcctgaaaataagctcaacggtcgaaaaaaacaaaacaaacagaaaaaacagaacaaatctcttcctctcggatcggtttcaatttttggtttcctttttcttcctctaacgaatttttcgttttcagattttattctttctttcatcaaaaaacaacaacaaagattcttatcttttcacaaagaacccagaattcccaataatgttctgatttttcatatactgattcttcaggaagataaaaagtttcgatctt

SEQ ID NO: 52332 - DNA, 468 bp, Arabidopsis thaliana landsberg
  unsure (1)..(468): unsure at all n locations
tgcgcaccggtccgcttcccgcgttttgaggtatttcttttttaattagttaagtattaactggtatttccttagctggcacgtacatgaggccacctggatcggtagctgcgccgccccattgtgcgccgccatcggtaccaggataaaagatggtcatgctggaagtgatcggaatgtaagcactgccggttttggctttggaaagcaagtcggtgagcgaatcacgannnnnnnnnnnnnnnnnnnnnnnnnnnnnnnnnaatgtctggcgcgtaaatgggagtggtaatgtaggaatgggctgcgtggcggctactttctcgccttcgatggccgggaaattgaatgtagtttccttgatcgggaacagcggctttccggtaacccggccgagaacaaagacgtaaccttgcttggtcacctgcacgacggcgttcacgcgcttgcccttgtgcatgacgctca

SEQ ID NO: 52333 - DNA, 1305 bp, Arabidopsis thaliana landsberg
cttgttgcgcttcctcgcttcgtttaatcccattcaaacggaccttgttttcttcaatccattatccggccaaaacccttcttctacgaccactaaaaccgtcggaagttccttcctttcgccggacgatcatcactttccagaaaatttcaaccgggattgttcctccaccatcggcttcatcatctccgtcgagctatggagaccttcaaccaatcgaagagcttccaccgaagctacaagagatcgtcaagcttttccaatcggtacaagagccaaaggctaaatacgagcagcttatgttctacgggaagaatctgacacctctcgattctcaattcaagacgagggagaataaagtagaaggatgtgtttctcaggtttgggttagggctttctttgatgaggaacgtaatgttgtgtatgaagctgattctgattcggttctcactaaagggttagctgctctattagtcaagggtttatctggaagacctgtccctgagattttgaggataacacctgatttcgctgttcttctcgggttgcagcagagtctgtctccttctagaaacaatggattacttaatatgcttaagctgatgcagaaaaaggctcttcatttggaagtcaaaggtgaggaagattcaagttctggagagagttcagaatccagctttgagtctattcctgagactaaggacgaagctaatgttccggaggtggatttggagtctaaacctgatctagttgaggatttgggaacagaaaagattgatgattctgagagtgggtcaaatgttgttgctttagggagtagagggatgaggataagagagaaattggagaaggagctagatcctgttgagttagaagttgaagatgtttcttaccagcacgcaggacatgccgctgttagaggtagtgctggtgatgatggggaaacacatttcaacttgcgaatcgtttcggatgctttccaaggtaaaagcttggtcaagagacataggctgatatatgacttgttgcaagatgagttgaagagcgggttacatgctctctctattgtggcaaagactcctgctgaggtttgagggtgtaacattggaagaagtcaggtcctgattcttttacttcttttggtccatttgctttggatattgttctctggaccttctaataatgttaagagctcgatcaggattgtgttaaatgagagatagatattgaaggatataaataatgttttcgccaatcgccacatgattcaccattttcaaactgatttccctttatcttatgagg

SEQ ID NO: 52334 - DNA, 520 bp, Arabidopsis thaliana landsberg
gattagattagctctcctgatcaattcgccagatcagaatccgatattatcgagtacatagtgacctcatatgaatttttaaaaaatcaaaaagatcttaaaagttaaaattgaacaccagttttaaacttgacaaaattaagattttcttcctaaccgggaaaacactcctaagagcataatcttgtcttttgtagattataccgtgttatgtgaatgtttgtgtgagtaaacatgagagagtaagatatcagcgaacttagagaaatcatttataaataatatataggggatgagtatattttctaagagtaaattgttgcatgatagggatacagacaaaaacaaaagcaatgaattgaataaaaatggaggaaccctttcatgaatctaatcaagccccttttcttcttctttcaaagtttcaactcttaacgccgcctaaatctacaaatcaactcacattgttttcgtatatacctcatctgggttgtcgccacaagcaacagactcggtccca

SEQ ID NO: 52335 - DNA, 839 bp, Arabidopsis thaliana landsberg
aatcactgacttgggtattgggatggactctctaggggaggatgcgtcttggaatcaatcttcctctaggaacagtgatcttgacttcctacctgaacgaagtgtctcagcaacggagacttcagctgatgttctacacggaattgctatcaaatgtggagctaaggtatgtaaatatcatcatgattaccattaattccatacgtgagttgatgtgttattattccatgacattgtaggtggagtacaaaccaagtttagtttctagtacagatttgcggttctctgttgaggtacgtattgctcttagacgtatctgtttgtatggtgtcagtaattttggtggaaccttatgctctttgagatcctatatttcctttgagtgaggttactttgttgattgtgtcaactgtacattaaatctgtgttttttttgcaggcttggctttctaatcaaaaaattggagaagggattggcaaatcgagaagagaagccctgcacaaggctgctgaagcttctatacagaatttagctggtaagactttctgactcatgatttactcgtgtcttaatctttgtctgcagagatactatttgagatagattgtttgaatctgctatattgggtgaatgttatttgtttgatgtttctaaaccatcttcacaatattgggtgtagatctcaatttttcaaccaatctgtttagtctgtaatattaatagatctattgtagcttcgtgttggtcctcatacatggccctatatcaatgagtatgagtactgccaccacaaacggttgcgtgtcagtatgttatgatatcaaaactgtgggtcgct

SEQ ID NO: 52336 - DNA, 1259 bp, Arabidopsis thaliana landsberg
tgcagctttggagaagaagctagagtgtgttcagaacactattgacatgcttgtctcgtcttttcagacagatgaacagactccagatttcaggacccaggtgaaaaagaagagacttcttcccttcggcttaagtaatagtcctaacctacagcatatgatccggggaccatgttcacctctttctgggactgaaaataaggatcctgagagcaatgttgtgtctgctaattcaatcccagtgtcttttggagctactccaccaaagagggatgataaccgatgtcgtacaccgtcaagggaaggaacgcctgtatcacgacaagcaaattcagtcgatattaagagaatgaatcgaatgtataagaatgctgccgaagaaaatatacgtaacatcaaatcttatgttactggattgaaagaacgtgtggcgaagcttcaataccagaagcagcttcttgtttgccaggtcagtttacacttgtgacttatgctcattcatttacaaatttgttcatcaggaatcagtaacttaaaagcttgcacatgtataggtgttagaactggaggcaaacgagacaggcgctgcttcggagtacgatgcaaccgatgaatctcggatggactggccattgtgttttgaagagcagagaaagcaaatcataatgttatggcatctgtgccacatttcaatcattcacagaacacaattctacatgttattcaaaggagacccagctgatcaaatctacatggaagttgagctccgcaggctgacatggctcgaacagcacttggctgagcttgggaatgcgagtcctgcattgcttggtgatgaaccagcaagctacgtagcatcaaggtagtacaagagctttccttttcttcaattctatgagttaaaccatttttcacaagcatatatatgtctttggtgtgctgcagtataagagctttgaagcaggaaagagagtatttggcgaaacgggtaaacacaaagctaggagcagaggaaagagagatgctatacctgaaatgggatgtcccgccggtgggaaaacagaggaggcaacagttcatcaacaaactctggacagatcctcacaacatgcaacacgtgagagagagtgcggagatcgtggctaagcttgtcggattctgtgactcgggagagaccataaggaaagaaatgtttgagctcaactttgcatctccttcagataagaagacatggaggatgggttggaacatgatatcca

SEQ ID NO: 52337 - DNA, 1120 bp, Arabidopsis thaliana landsberg
caagacttatccttcaatttgcattaaaagagtgtaacgtatcaatatgtatattttatatagtcagcttaacaaaaagaattaaataaatgacaccatattacatttggagcatgaatcgtattatccgcaaaacaaaaagagagacgaaaaccccaaaaaggcttaaaggatttagctaaatttaccaatttccatcttcttcttgatagctttttgaccatggtatataaacgcgtctattatcccggacactgtgaagacacctgcgcatttttacatgtttcatttcggattttaatgtgcgttaaccaacaagtgttgttatggtatatagagattagagagatacctccaactatggcgcaaacattcgtcaagaagtgcaagaatgatatgtgttcctccgtaaatgttacctacggaaacgacacattttagttaggattatgactataaatacgctctaaaactgcaggtaaaacacacaaatacactcaccttgattggagagagatcatagaagatgaaaactccaggtaaagattgcagttgacctgcttctgagctctttacatgttcggtcactgagaactgccaattttacatttaagttaagatagtacgcgtaagagaatgaatagataatgaggtcgaacagttaaaagccttggttcacctgattcgattgaattgtgtgtcctctgatatctgtgtatactgttggtacaacctattgaaagcagacaaagcagaatagagtcatcgcgggtattttatagacgaatttgaagtatatgatacagtgtttgtcttggaacaaaccttgataaagtattggtacatagcattaggtgtgtcttgactccactcgactctgcaatttcaagtacgttagagagtatgaaaaaataaatagtgtgtgaatggaatagaccagaatggttatttacttgtcaagagggttaacgacgccaggaaagtagtctccataagtaagtctattgatcttgtgacttatctgcagggagacgcaacatattgaattgatataagatcagaagcataacgaatgagttgcagtcaataggacaagtcatttcttacgttaaaactgtct

SEQ ID NO: 52338 - DNA, 868 bp, Arabidopsis thaliana landsberg
tttagggattggaaattttcatattgagttctttattaaaatagaataacataacaagggtgagtgttattttaaagcatatagatgattacctaaaacaaaaggcatgatgattgatcgttagtgctacagagaagaaccggtggcgataggggaccaaacataaattcgtcgtaacactcatacaaatgtacggcttggattgagaatcgtcgagatatctcatggtagggtcaatccaacagtgggcctaaaagcagatcctcgaggaatggtaacgactctcatgttcttcaaattaatttattctacgtttgccgtcacatttatgttatttcttgtatagtattgcatatgttgtattttgtcaatcgatatgactaatggtttcaataacatatattgtagcatgtttacaataaagagtgggtcaaaatgaaggttttattatcatcttctaattaacttgactttttttggtttagactttagatcatgtgtcttctctgcttataatcgaatatcaactgactaggagaatcaaaataatgttgaaactaaaatattggtcaaattatacatcaagtcttacaacatttttgttggtgttaaacatagagttaaagaatggccacaagaatcattccaaattgaatataataagcacattaagaaattagaggtctgctaagaggtttgcttatttcggtttttgttggtgtactgctaaacgtagagtttaagaagcccataagaatcattcctaaaggaatatacgaagcccattaagaaaataattaaggcacgtgaggcctcgcgtgctagcgtgactaggctttttatttacggcccatcgtaagtgaacgta

SEQ ID NO: 52339 - DNA, 665 bp, Arabidopsis thaliana landsberg
atgcagcgtcattcaaaccattttcaatggtaactaaaaactgattatgattcttggcctaattaagaaaacatgtgtaactctatattggttgcagctattaatgtaatggctggagttggacttctctcaacaccttatacagtgaaagaagctggttgggcaagtatggtaattcttctcttatttgcggttatttgttgttacactgctactttaatgaaagactgtttcgagaacaagaccggcattatcacttatcctgatattggagaagcagcttttggcaaatatggtcgtattcttatctgtgtaagtggttccatagattttatcttccttttgattattttgatcagttgttctgttttcagttgcttatggtttctgcaatgttatgtgtcttttgtgcagatgctattgtacacagaactatatgtaagtgaagattttttgtagccgaattttactcatggatctagagcttgtttctgtctctataatttaaacttactagattcgctgtccactttctgtagtcatattgtgttgaattcatcattttggaaggagataaccttaccgggcttttccatggtacaaccttggatttgctcgggttccgacttgactctaagcatttatttggaatcttaactgctctc

SEQ ID NO: 52340 - DNA, 1219 bp, Arabidopsis thaliana landsberg
tatataacactaatggccaagtttttaaatagtctactaaaaattagataattatttaaatagactaaaaatttctccaaaaatgatacatcaacatgataattttgttttaaaaaagataatgaaattttaagaatacttctcatttaatctataaggtattttacggccgtagctataattttttattttaaaaaagttagttaagagtgaaatgagaaatataattgtaatttgtaatagtgattatatgattaggctaatcaatgaaataatggggcaaccaaagcttagctgggtttaggaagacgccaggaaagtaaaaaaacataaaaagtcaggtaggggtaaattagtcttttcaaataccatgaagaaagaagagacgccaaagaaaagactagtgacgaaagaggaagacgcggaggtactctcattctctaatctatttcttcgatagtgttgattctccgcaaaatcctctcgagagaatctttcccaaaagagattagatttggtggaagaaaagagttcttcgtcttcttgttgttgttgaggattgaagaagaagagaaatgaaccgacaaaacggtggagggcagcggctgagatccgctagacccaccacaattcacgattgtgctctctccggcgatcttattgctttacagagacttcttaaagacaatccttctcttctcaatgaacgcaatcccgtcgtaatgtccaaatcttgactctttctttatgtatgcattttgattccgggatgtctttgattcggtgggtcgatttagattgtagctgaattttggaatctggatgcaaaatttgaacttttagatagggtctgatttcgaatctcgacaggattcatgatcttcaagctttgtatatgcatgtgaatctaaaaaaagcaaactttattgaaatgtgtgttgtattgactttgattggaattgcagatgtatcatacgccacttcatgtttctgctggtaatggaaatgttgatattgttaagtatcttctcgcttggactggatctgataaagttgagttagaagcaatgaatactgtgagtttggtttgctttctgttttcttctttgcttgagcttttgatttgtcattgatcgttttcaatgttgtttagtatggtgagactccattgcatataacagctaagaacggttgtaatgaagctgcaaagctgcttctt

SEQ ID NO: 52341 - DNA, 1107 bp, Arabidopsis thaliana landsberg
tagttttagttttttttccaaaatttattttatagtcattcaagatttaaattgaaaacaatttattaatctaagaaataaaaaactagtttttcagtgtttaactatttttcaaagaaaaactaaaatctgtaatttttagggacttgggtttttcctcaaaaatcatcaatcatattttttatttctttttttctaacgaaaatataatccattaacataaaaatcaaaaactaaataaagtaggacacccaacaaactaccattcaaatttttaagaaaaaaaataatctaaaactaaaaaataaaaaccaaaagccagaaaactattttaaaattatagacattcatggcctatatactacacccactagttgagttttattataataaaaaaacattagttgtggttttgtccaatatacagtgaataatcaattttatttgaaagaagataagatcgccaaggtacgcacgcctttcacaagccgttgccttcacacacaaagtaaatgattcaatgaaagtccatgggagtaatcttagtaaatgaaagtccatgggagtaatcttaataaatgaaagtcagtactagtcatagttcaaacttttctccaaattttttgataaatcctacagaatatatattactgcattgtgtaatgatatgtaatcttcaaatacatataatggtagcactaatctgaaacataatctaatgaatttaaaatcctatttaatttctaatacaaaaataaagttttaatagaaatagtgtttgtaagaaaataaatatcagatattgaagaaaaaaactagtcttccttttttttttttgttaaagggttttaaactattcttccttgcacacacatgtcagtatcttgaactttgcgaattttatttcgtattcggttcaaattttgaagtccacgatactcaatcctaaaattttatcttgttatttaaggtatatgtatatctcacaagttttttttttttttttttttgggtttatatctcttaagtagtttatttgtcgtttgctaaaaaaaaagtacgtagtttatttgtcctcaattattaacatcattattgttttcgcaa

SEQ ID NO: 52342 - DNA, 203 bp, Arabidopsis thaliana landsberg
gtgcccgaatcacctcaatctatatacacgatgttgtagagtatacatccaaggtagatatattatgtgcagcaaccaagaacccgacttccacgcagtaaatgccagtacacgttgcccatagtcggcaaagcaataccagtaatgcgctggcgcagattttatatctccagagcctggcgcaataaaaggcagtgcactaa

SEQ ID NO: 52343 - DNA, 450 bp, Arabidopsis thaliana landsberg
gcgcgtcgttcaccttgctcgcgcgaggtccgcgccgtcctttgccactgcccgggcgtgattgcccgttgttgttccgagcgtgcctctccggggcctgtctccaggtcgcaacttcggctctctgctccgagctccggtttctttgctcaaggttctttcaatcacctcgcgcgcgattgcgttggcctttatctctagccttcgcggctcgtcccccgttttgcgcgcatctttcccggggggttcttcgagagcagcttcttctgatgccccagagagtcagtggtcggtctaggcatcttctctgccccgggttggctccgtcgtgttcgcgcgcttccgcagactggatgttgtccctgcctgccctggccttccaggcttgccgggtctcttgctagttccgtaggtgtgcatgcgtcgccttgggtttggtcctcggcctcg

SEQ ID NO: 52344 - DNA, 1083 bp, Arabidopsis thaliana landsberg
atgacattgatacttttgagttctaattagaaatagcacatacgtttatatcatgattattttgtatgagtgatacattattgtaactagtagtgggaacaaactatttttggaccatttaattacaagaaccaatggatggcatttgctcatacccaatgaacgatttgcatacaaactttatcaacggcatgtcggtattatatatcaaaatggtaatggtttggagaattcgaaagaaatacgcgtcttgtagcctctcctaagaagcagtatatttgaaaggcggcgttaaaatttacctttaatttaatttcttgatttgatcatgtgtttaacgtttctagtttcttctacatgacaacatttacgggtgtcttaattacgtatagtacaaattgaataatggatctcaaattagccatcaatagcttttgaagcttacatatcgagatctagaaaagaacatggcattttgctcgtgacaaagtatttccttacaaggcataatccctttctagatgggatttgccacttttagtaacataacctaagattgacgttgcccaatttgtgtagcattctttagagattgatctagtagtttcttctttgttcgagtttaatacattttatacggaaatatcttagttactacgaaatatattagtcgtgtattttacattgctttatttcttttcttttaaaaatatgcataaatcataatttcaaactcgaattcgactagtgacacatcaataatattacaaaccactaaattacatatcaatgtcagaaatcaaaactttgcatcgtgtaatttacactagtgaataatatagtaatatatgtacatctttatgcccaagaaataaaatgaatgtaactcttaagtatatatacatcaaaaaggtttggaacatctttcattatatataagaaaaaaaaactatgatatttttaagactagtaaatattttagatgaatacatgtatgaaatcaatgatcaaatgaaaactgacgcatatttgtcccaatctttgaatgaaatattccccagggtcaaatgacatggaccctat

SEQ ID NO: 52345 - DNA, 406 bp, Arabidopsis thaliana landsberg
aattgataagagagaactttatttattgtcaattgttttattattaaaaagatccatagattttttatacgagctatggaaactctatttgttcaggcaaagtgaaatagtcaaacatgatttactaccggtctaaatataagatttaactcaaaaacgtttgataaaataatcatttcctgatgaatctaaaagttgaaaaccaagaaacttgacacacttctttaatcttctaacataatcttatttataaatgatatggtcgatggaaaccatgaaacttgacccctttcttgaaattatcgttaatgtattgattcaataactgtcgctatcacatgtactatacgaacgcaacttatattaagtgcttgatacgtgcacgtgagccacgtataccggcata

SEQ ID NO: 52346 - DNA, 887 bp, Arabidopsis thaliana landsberg
acgggggagagagcaatacgcgacggagaagaagagcgtgaagaaaacggcgtttgtgttatataacggaagaggaagcgcgtcggatgctttcggtggaggagcaattgttgtagcccggcgacgatgatcgtcatcggaagtgcgaggctgataagaacggaaagatccgttggagttgttgttgttggtaaccggtggtttaggaggcctccgacggagatccattggagggaatgaataatctctccaggggggagagagaggagagaggagagaggtggtgaggtggcgtgataagtgtgaaggagagattaacaaagttttataggagacgaactcgcatgtctgttggggaccagcttgctttttcttcattttttcgttttcattttgttttgtaatactatgatttagtttatttatttttgcctaattttcgtaactcatctaattttaggttttcacgttgttgttttttttttgaggtacgaaattagacaattatacgaggatgtgaatgatgatgattgattcataaaagcctgcattaattatagatatttgtgtccttacaattaatttgatatgctttctaatgagccaacctgtcttacattatcgtttattcaaaattatgaagttatggtttgcaaatgtatactaagatttttattgataaactttgattcatatcactaggagatctgtttttttttgaatgattcaacgaaaaacggtattgaagagtagacaagattcaagacaaagtaaaaaataaaacgattcaaccaaaaacggtattttcatctactctcgtgacatatatatttgaccaaaaacagtaataattgccaattagtttgtactattatcgtttatcgttt

SEQ ID NO: 52347 - DNA, 512 bp, Arabidopsis thaliana landsberg
aaaccgacctaacaacaaaggtccatgaccatgcttcgacatgaactcaaatgtcctgatctcatcctcacgatcaaagaaaatctcaacaccttcaccataaatcctaaccaaaaccttacgagaaggacctttttccctagttggccatttgatctgaaacacctcatttgtcattgcaccttttaaaggaataacttgcagagcctttgaatcaatcacatcttcccactctgatgctattgcttgtaaagcttccttgacttctcgaggcaaacgatattgtttattctctacattcttttcagtaccacccatcgtcatttgaatgccacacacaaagataaatctctctgtacaagataaaaacagatacttttagcgaatacttataacaacactgtgttttgtccaattcaggggaggttctacgatcaacccaatgcaacaattctatatgcttccgtttcataaaacatctgaatatcaatctaaacctatacaattacatc

SEQ ID NO: 52348 - DNA, 586 bp, Arabidopsis thaliana landsberg
atccctgccacatcaaacatgcgccaggtcaaattcgtacgcaagcgcactgtgccggcacccaccggccaccaaggcgtcggggggagagctgatccccatagtgggtgaaagccaaggagcacgacccggacgcgtcgacgacgggcgacgctcacacaaggcgtcgcggcagggaggccagtgagggcgtggcggtggggttgtcgatggggctcactcgcatcggggaggtaaccgtgagtgaggccatgttggtgaacacgggcgagactggggtcgggcatagtcaagcggggaggacgacctggacgtgttggcgacgggcagcgatgacgtgaggcgctgcggcgggaaggtcggcgagggcgcggtggtggggatgtcgcccggatcggggaggcgaccatgggtgaggccatgctggcgcatggcgagactggagtcgggcacaatcgatcggaatcggaggcgacacggacggagggcctcactgggagggcaggatggcgtggatgagagggagggtcgtcggaagaggagaagggtagggcagcaagccaatgaggacaagaagcagaggaga

SEQ ID NO: 52349 - DNA, 373 bp, Arabidopsis thaliana landsberg
ggtcatcgtctaacggtagtaatgaggtgagatgcttcgtcttcattctaagatgtctttgcttattagatcatataaagatgatgcttaatctttaaatgttccaaattgatcttattgtgtgtgtgtgcgtgtaagaagttcggcacagagttgagttaagtttccgattataagtcgtattgatatgattcttttctggtttatacttacttggtcgaaaggataaatctgatagtagttatgagatcagatgataacgatgcattctatagaagatcgtgctgaaatttgagtattatctcgagccatagtggtcacgttgtcagcgtgtgtgagcttaggcactagataaatgagtgcgttccataag

SEQ ID NO: 52350 - DNA, 708 bp, Arabidopsis thaliana landsberg
  unsure (1)..(708): unsure at all n locations
atcaaagaagcacttcaggctgctgttggacttcccgtggacagggatgtcccggttatcggtttcatagggagattggaggagcagaagggttctgatattctagtggaagctatttccaagttcatggggctcaatgttcagatggttatccttgtgagtacactaagcagtgaacttgtgatcataacgtctttaggatcacaaagttattgattcttgtctgatgtttttcacaggggactggtaagaagaagatggaggctcagattcttgaactagaagagaagttcccagggaaggcggttggagtggcgaaattcaacgtgccattggctcatatgatcactgctggagctgacttcatcattgtcccaagcaggtttgagccgtgtggtctcattcagctgcacgcaatgagatatggaaccgtccctattgtggcatctactggtggacttgtggacactgtgaaagatggctacacaggtttccacattggaagattcaacgtcaaggtaactcaaaatcaccagctgtgcgcgctgtttctacaacagtttctttcgacatgacaacaaattgatctaaaatgagttaccattttgcattgttatatagtgtgaagttgtggatccagatgatgtgagagcaacagcaaaggctgtgacacgagccgnagacagatatggaacatncgcaatgcac

SEQ ID NO: 52351 - DNA, 459 bp, Arabidopsis thaliana landsberg
tgcattgaaggccagcgagaacaaaagttccattagacatctgtgacccactttcatgattgcatccgcgggattaagggtgtccgcacttatgcgtgcgtctaccaggaaacggaagacacaggcagttgggtcacaagaaatctcggctgccgttcaaagcgctgatcacagcgtcagacgcgtcgtgctcggggcgcgcgatccgcagcagctgcctgtagcggctcacaggatgtgctgcagaatggtccgtaccaatcgttgggccgcatacaccgctacgcaggcactgctatgctgttatgtgattagtgccatgccggtcacacagagcgtcgcgacgtgacttgtaaccgttgtggtgtattgtgctgttgctcagactaacgtctctggtgccagaccggatgatgttgatggcgcgaagatgtacagcgtacgaccatcgcaggcagg

SEQ ID NO: 52352 - DNA, 972 bp, Arabidopsis thaliana landsberg
gcatcattaaggaaagagatcaacatggaaatcccgtaaattctggtttactaattataattgaacaaacacgcaaagattcttaagtttcactaggaaaatcttaggctaatgaaccaagcacccaatcattatctcgaacgatccatacagagattcatcagattatccattttttgttcccagattgaatcaaagtctacgaattttctaattgaatcaaagtctacgactttaggatagatcgtttcccagaagatgaaatctagatcacagaacacacctaatcaattggactcagaattgagcagtcaggttatatggatacacgcctaaatttcccaccagattcaattgtttcaaaccaaactaagagaagaaaagagtgagatttgggattgacatacctgggcctctcaaaaggtgaattcttaacaagtaaatcactgaaattagattggaagaagccaaagagagaaagagagataggaagacaatgaaaattgatattaattcagaactgtcgacaggggtaagaagatcgtattcgacctcgtcgctgtgatcgtggagaagaaagaaatgggctaattgtgtaattaaccgtaaatataaagggcttattttttacaaataaaataaatacgtatacagctcatcacgtatggtggggcctactttcgtgtcctaaatctgagacccatcactttcgtctttagacgcggtgaactatatatctcacgttcttatttagtgcttaggacaaaaacaaaactcggccaaatacattttttcatttccaagtttcagggatgaaatcttgttgtatagagtttccaaatggttgaggagaaaataatctctcattcaacactatattgtatgacattttttaaaaaggatatgatttggtggttaactaattattccgaatcaagtgtgatatataaaaaatcttagaactaaaagcat

SEQ ID NO: 52353 - DNA, 1495 bp, Arabidopsis thaliana landsberg
ttaaatttaaacaaaatttaccaagaaaccacagaaaaaggttaaacatacacagatttacataaattttatatttgtggttacgttgcttattatcaattttttttttttgtgtgtgattgatatgtatgtgtaggaaattttggaccacacaatttgttgacacatcagcaaccaaacctactttcccccttgtgatctgtaaataattgcataattaactataccaaacaaaatattgggtaattaattatgcgaaattagttatgtgtgttttcttcttacatagagattaccaaaccttcattgtttaatccttcttataaaacagtattatactgtcaacccacgtgactcgctctgacaatgaattactaaacaaaatttgaacaaacagacacgtattgattatagtatttctgctattgataagtttttaaacaaaatttagtgtgcaatagcacgcacgattaagtgaatcaatacacataatttacaccgtttgaaagacttttaaccttatcagattatcaacctgttgatggattaatctgattaatataacaatagatatcccataagtcgacgaacagataaacgcaataattaagtaaaattttatgttataaacagaaaccaccaaaaaaatgttatgattaatctgacaaactttacagaggattaattgataattttattgagcttttcggaataacgaatcagatgttggacgagtacaagatccacaaacttagaatgagtcgaaagatatcggctatagccagagacggtccagaaggttacatcatatattcatatgtacatggtatatgcatacaaagttttaagtaatcatggcatgccaacaactggaatagtagttggtaagaattatatttaatttaatgtgaaaatatgcgtgcatgcatatatttatattgcttttgtaatagaatattctatacatggaaaaaatgtgcatttgttttctggtaaatacatataggttagaggaggaaaaaagaaaaaattacatatagaggttagtataaatacatatcctgattcccgggtcagttactaactaacaaaaactatatataattataaattcaaattgttttaattagtgctaaccaacaataattagtagaaagcatacataattagataatagaaaaaattgtttttaaaaaaaaattaggtaacaaaaaagaaacacacacatatactcattagagaaaagattaacggattctcaaattaacaccgtcgacaactaaacatatacatacacatatgtataaagagatatttgaaatttcaatacaaagagctaattcgaagcctaatgaaaaggacaagaagctcacatgacccgaaccatatcattcatgggcccctacgcattactcggtaccaatctcgctctctctctctaagtcttgaaactccatcaagaatctcaagccaccatttttttttatttttataa

SEQ ID NO: 52354 - DNA, 437 bp, Arabidopsis thaliana landsberg
atccccttttttcggggggtgagaagggcgggggtgagaaagtgtggaagggatgggtgggacgcggaaaccgtgggagacggacggggcagggcaggacaacgggtaggtgggataggagagcacgggcacgggcacgggcacggcgtctggttttgtcttcgcatgggtctttcttgacgtgcgtctagttatcgtgagtcccagtcccatcccatcctatacatgttggttaccgaacgtccaaatcaaactggatggatcagtggagctcccgtggtgccgacacgcggtgactttcgtctggcacagaggatacaagcgtgaatgaattaacgtttcgtaagagaaggactgcagtggtggaacgcaagttgtcgtctgtgatgtgggattgacgagcctcacctcctatttcaatacgtacgtaaagtgtg

SEQ ID NO: 52355 - DNA, 387 bp, Arabidopsis thaliana landsberg
ttaagttcaatttagaacaacatagtgctctctagggaagtgtagattcatgaaatcagatgtcaagaaggtgtgcatttgcaatgtgctcactgctcactcaattcagcattatctatttatgtaaccttttgtgtaatgagtaatgaattatgtgtgatgatgatgtaacctggtagcttgacgccttaaactttatgcctatgttgaactggtgctggtatgaggagaacaagtaatatcgaactgggtggatatgtgaattttatatttcatggagtcattatgcatgatgtagtgtcgctgacctatgttcattttgcatctatcaacatgtcagtctcgttgctggaatgctatatgtctcggggatcggacgggggtggg

SEQ ID NO: 52356 - DNA, 748 bp, Arabidopsis thaliana landsberg
  unsure (1)..(748): unsure at all n locations
ncatatcatagacctgcatataaacgaaatgtgacattaggttttgaagatacgctgaagattctctccacctggaaaagcaaaagcagcatcaaacaacacgtgatatccacgttttagctacagtgaacatagcacaatgcgttatgagagtattaagtgaaataaatgaaactcaatctttcatcacatgaagttgttgcagaaattagactaatattaataattttttgtgttaccaacatcaactttacataacaaaacaatgatatcaatcgtctatgcaacatgacaaccctgtcttttaacggataagtaaaaaatgtttagaaaataaatgcagaaacataaattttaataaagtctcaataataaaagaaatattaactaacgaagtagaattaaaatatctactaataactatcccctcgaagtcatgcaattacctgagaagattggtcactctttccaacttgtgatcccacaacaacaggcagatcatactgctcaagaaaagcccagatagagtccctcatttctggaaagacattaacaaaggcagcaatggtctttctaagagcaccctgcagaaaaataaagttacaatgaacacaagttatatagataccgataccagatgctttccacatagcatttgcgagtccaaagtgtaaggggaagaatctccagtacgccactgaccttcagatatggagggatgttttcgtaacccagaagcttaaaaaat

SEQ ID NO: 52357 - DNA, 903 bp, Arabidopsis thaliana landsberg
  unsure (1)..(903): unsure at all n locations
gttatttggagttggtctgtgccaacaaatcccaactaatgaacaaaaaaggaatgaagtggatacttattaacacaattcacctaagtcagtccaacaacaccatctaatgtatttctttgcaattcaatgttttagtattcacttaccacggactctttgacaacatcatcaacaccagtctctcccaccaaagatgcttgagatctacaacaactaagctcattaaagcaaattccaccaacaaaactgaaattcacggttaaaaaacaacaaaaatttaacagcttacacttcatctagcttctcctcctgaaaaaaactcgcccctacatcatcttcctccacaggaactcgcaaattatcttccacagaatcagaagacacacgtttcttcactctatcactatcatcctgcttcaatctctgattcttaatatctttagcttgttccttaagcctaatatccttaagctacaacaacaaaaatcccaaaaccaactcaaaacctcacaaaaacttgctaattataaccaaccacaccaaatcgagactaaacaaaccctattaagcagcaatttctcagcagtcttccggattttagtctgagcgttctcacgttgacgacggcgagcaataacagtacgacgtttcaatgccggagtagctccatcaaagacgaagatcggtttagtccttagaaacaaaagcttacaaatccttcgaaaaaacccgatcaagtgtgcgttctgaaccatatctcccttctcgtcacgcatcgctttgataaattgtaccatccatatactcgcatctgcaaattcgaacgatgaagaagaagccggaaaataatacaatacaatngaagttgatcgccggagatttgttaccgatggctaatcg

SEQ ID NO: 52358 - DNA, 2516 bp, Arabidopsis thaliana landsberg
  unsure (1)..(2516): unsure at all n locations
ttattcatatatcattcataattaccgtgtgtttcaaattgaaaaccaattataccacctatattataagaatttataatattctttatatatatatattttttttgtctatccacttttgcattaatcaatagttttgagaatacaaagatagagctgtttttagctagcgaatctgcaatcacattggcggttcttgggatatgacaacaagaaaagctagaaaaggaggttgaacttgaagtgatgtcctgaaggatcccatggatttcggacaaagggaactgagagataatagccatagtaaggacctggcagtctgatttcaagataacatcgtgaagacccaaattgtgagcagaccaaagagccgagtgaacgaccaaagcttccgcaacaagcggggaaggaacatgctcagatagagcagagttctttttaagagggattcctggagatttgagggtccatcctagacctgcagagcatgtcagaacactccacgctgcatctgtgtggattaccgtcgaattcagagagaaaacttcagctctgagacccatggagctcctaacctgaaaacgagagtttggttcctgtgcaaattgccattccttggcatcttggattgctttgttaatggtttcgagttcactgaaaagtatgtttgagaatactttttgattcctcgtgatccagagagtccagcaaatccaagggtataaagcacagtaccccaaacccacagaagggagcgtcttcttcttctttagccaagagaggccaagtttaacatctgtaaacacaaggaataaatcaataccctccagaggtgcaagcctccacactctctggacaaacatgcagttgaagagagcatggctagaggtttccaactctccacatctgcagcaaacaggatcaaaggaggggattctaattgcaagctgcgagcctacaggcaaggcaccactcacagccttccagaggaaaagtctgattttaggggagcattgaacattccacacttcatcaaaccagttgaaagaaagaaccggatcccgagaggaatcagaatcaacatcacaaagagtagctttataacctgtctttgtggtatataaaccatccttggctcccagccagattcgtttatcagcacccccagctctactgggcctaattgccaggaccagatccttcacaaatgggatagcagcttctatctttccttcatcccaatctacagaattagggagaaacagatccttaaccttccaatccttggatagaagaggggcaggtccaaccggttgaattcgtttatcatgggcaagccaggcatcttgccacactagcacagatttatcgttaccaatagtccaaccaagttgctttctcagaagatctctccctgctaagaggtcgcgccaaccatgggaggcaaaagtgggactcagggccttcaggaaggactcattctggcaatatttgcctaagaggactcgagctaaaaggcaagaagggtgtggaaggactcgccagctctgctttgcaaggagagcaacattataggctttgaagtttttgaatcccagacctcctctaactttaggaacggctaggcgatcccacccaacccagcacatcttcctctgctgatctgtcttatcccaccagaaccttgtcaaggtagactggattctatcacagagtgataggggaagaaggaagcaagacatagcatacacagggatagctgtaaggacactttgaagcataacttgttttcctgctcctgaaaggaatcgagagctccaagagatagctttctgcttgatcttgtctactatggaagtaaatagatccttcttgcgtctaccaaaatgttcacgcaggccaaggtatttgcccataccaccttctttttctatctgcaaccaatctttcaccttggttttcacagcctctgtggttctcctagagtagaagatggatgatttcagcttgttgattaactgccctgaggcggtttcatagccaaaatctgctggagagctctgcaaccctttgcttttgccttacaaaagaacatggtataatcagcgaacaagaggtgatttattcgcgggcatcctctagctaccctgattccaataagttggccatctctctgacttttctcacaaaggcctggaagaacatctccatagagaataaacagataaggagacaaagggtccccttgtctgataccccttgaaggaataacctctcccatgggaactccattcaccaggaaggaataagacactgtggacacacactgcataatccaagaaataataataggatgaaaacctttgcgaatcaacacaacttgaatgaaaggccattccaatctgtcatatgctntagacatatcggttttcaccaccatagagacgttcttcatagcttcagaggtctttaggaagtgaagggtctcgtgagtcattaggacgttatcagagatc

SEQ ID NO: 52359 - DNA, 294 bp, Arabidopsis thaliana landsberg
  unsure (1)..(294): unsure at all n locations
gnnnnnnnnnnnnnnnnnnnnnnnnnnnnnnnnnnnnnnnnnnnnnnnnnnnnnngattgccccatgcatatcattatggtttgggtcgtttcagcaacgaaaatcattgttctattgtactaagtatgtttcatgtagtattccgtagacgatgaatcttgtttgctagccgctatctgaaataatttcattctaatcattgttatcgcagatttgataatttcctacgcgcgattagtaacggtacggtgtagcctctccaccactcacatacatcaggctctcgtcaactc

SEQ ID NO: 52360 - DNA, 599 bp, Arabidopsis thaliana landsberg
tgaaataataatgacttgtatttgttttgttgtgaaaggggatgttcttttgtttcttgtccaaaatatctatgtgggctcaaagttttcaaccccgtttcctttaggtcacataatatgtatgtatgcatacatagagagagaaaagaatttgacgagtgtatgtaaagaagaagattaaacaatcagagaccatacaattgccttctccatgtaaggtgcgaggtcaatgaatcaattaacaaaaagaagaaacttttttccaagaaaaataaaaaagaagagtaaagggataaaagaaatcttttaggactcgaaaaagagagctgaaacaaaagttgatttcagaaagcaaaaccctttgtttctccctcttaactcatctctctttcttcctctattagtaaagctgagacagcagtactatccaccaccaaagaaaagaagaaaagaggaagaaaaacctctaattttcacatgaaaaaacaaaagattcttcgattttgttttcttttccaatagtccaacacagtaattgtcacttcctccaataccacatcgttaacattaaagaaaaaaagaagatcaccaatgatcat

SEQ ID NO: 52361 - DNA, 802 bp, Arabidopsis thaliana landsberg
tgttcaaggcaattttctgataatagcataaatatgtcgtggtctttaccttctctgtaatagttggtggctagtgatgctcgaaagttgctggtgacatgttgaggcttgttgaaatcttttgataggggtccgaagcgtcatgtattattgatcttattgattgctaaacactaaagaagtagctccctatcttattttgtttgtttattgttatcaatctcatctcatatttgattttatttggaaaaaaaatcttgttatttgtatattggttgaaaaagaaattcacttttagttgtataataacaagatttgtttatgtttattttaaccaatatagtagcatttttatatcttaaccgaaaatctttatgttaaaatatatattggtttttttttggttaaaatataaccaataaatattttttatgattttatttgaaacataaaaaactttttttttatttttgtttatagtaggtattttatgtttattttatttgactctattttttattatttaattattgcacattgttttaatatatgatatgttattatagttatctttttgaatatctcttctgatctttttacattcaatttgatattatttcataaatgttgatgataaacttattagtttacaaataatagcaaacaaaagatgtttgacaatgaccttgttttagttgatgcattggtgaatagcttggatcaagtaattcaagaagacaccaaagtttcgtggtgacattgtttatctttattattttcttacaattttggggttggtggt

SEQ ID NO: 52362 - DNA, 1157 bp, Arabidopsis thaliana landsberg
atgtatcagatcatataataatatatgatgggtcgtgtcttgagaccaactagtaaatcaggaccattttagaattagaattatcttgctccgccattatatgcgaataatcacagtcgaaccatatgcattatatcctcagctaaaatttagtactaaaaggttcatgatttgcgaagctttgttcacttggagagctggagtatattatcataattctctttaacttagcttattggtgtttattacagtcgcattatctctaaccacatatgataatagagaacaacataacttctagtagtaattaagcactttttatcaaattaaaagttaacactacaaataaaataaaccattgaaaataaaatagagctaaagtgtcaacagttaatcaatggagagatcatttgtgacacaagcagcagtatcatcgtcggcatcactcactagcaaagctcgagcttcttccttcttcttcaatggtcgctctctttcttctctgaacccgatctctccgtttctgttcctccccacaagtagatccttcgctctcgtcgtcaagagcactctcgggttggttcctgatccatttacaaatttcatattaatttgattcttagtttgactctgtgtcaacgatttatgtaacttaattgtctaattttagtccactacagaggaaatgagtggaaaaaaatccaagcttttccaatttaattgcttattctcttctctggttttgctattttgttcaggtttaggtgtgaatgtttatagttcaaccttgctttgattgtttgattgataacttgtgttatagcattttaacattaggtggagactaattgcttctttatgggtcttacttgtttggaaaattgtcatactagtacaaccaccttgcatgcagaaggaatggagacaaatctttacttaggatgactttaagtggggatagctcggaaactgtagagatgacttcaactgatatgattttcgagccgattttggagcatggagttttccggtttgattgttctgttgaccataggaaggctgctttccctagtgtttcatttaagaacagcaaagaccgggaagctcctattcggagtcacatttgttccaccatatattcctacttgcggttgtct

SEQ ID NO: 52363 - DNA, 637 bp, Arabidopsis thaliana landsberg
tagccatcggatcacaaaacagaacaacaacaacaacaacaaacaagaactcaaacacttcataactaaacatcctttaaagccttttcaaaaactcaatcatgtcaagcaactgcggaactgcgactgtgctgacaagacccagtgcgtgtaagtgtcctctgtttctttttttgagaaagaccctgtttctgattcgttgagttatcgattttgttgagccaacagcagagtgaaacctctctgtttttggatcttgatgcttgatctgtgtctgaaactataatctttgtcttctgtaaatcttatgttgctctagatcttgattgacctatgctttgttactctgtgactgtagaaagaagggaaccagctacaccttcgacatcgtcgagactcaggagaggtaataacaaatgacatgtttgtaatagtaatgatacaacgagatcatattcataatgatggaacaatttatttgttttgcagctacaaggaggccatgatcatggacgttggtgccgaggagaacaacgcaaattgcaagtgcaagtgcggctcatcttgcagctgcgtcaactgcacttgctgccccaactaatgaagcttctttaatcaaatgtaatatgaataaaag

SEQ ID NO: 52364 - DNA, 1185 bp, Arabidopsis thaliana landsberg
ccccacgactttgttctccaaatcaaatccgtacgaaaattaagtttttctccgaaaccgcaaatttgagatagtatgaagagttgacaactgtggcacataaatatcgaaacagtaatccaagagcatcttaaaatctttttttgatcaataaagttaaacctagaaatgttgaagaataaccactgttcgggaatgaagaataattataagttaccaaaacaattttgattagagacttgatgttacattcgagaatagtatggttacacggctatgttacattacatacttttgacgaacggcaagaagtaaaagacttggaactcatcagaactttgaagagaaacaccaaaagtcaaacatagccgcttaatacaagagagaactcattacgtacgataatgatgttgtttttttcatttttggttttttccatatgttgccttttttttattcattctaggcaaaagtcatataatcaagtaagaagaaacattgttgtaaaatgtttgggattctcagtgttcaagagcactccgtatagagactgttgtgtcttgggttgagttgatgtggcctctcgatctgaggtcatggttcaagaacaccactataaccgtgatgtcatcatgaaaatgtcgtctcactttcttgtcaatcttccttagatctgaatatttcatctcacgttttctcgctgcctcgtgaagagccgcctttatcagtctctttgcgcttccctgaacatagagagaaacacacaatgcaagaaatcatttatatatttaacgaatttgtaataatgaggattcttgtgacttgactcgcttaaaactgcaatctaaaacttatctagaccaaaaacgccatctaagagagaaatcaaagtagaaacttacagcacggggatggttatgaacaatctcaactgctttttcgttagtcaaatgctcccaaagaccatcagatgcaaaaatgagaaacgaatcattagggtgcagaggatgagagagtattgttggtgttgcagacatcaagggtcttttcattggctctgcaattctgaacttttgactgattggctccttgttaaattcgggccgttttatgtacatgtctcctatagaccttgatacctatataaacagcgaatcaaagttgaacagtaaatacagggaatca

SEQ ID NO: 52365 - DNA, 555 bp, Arabidopsis thaliana landsberg
atatgcagcttttatgttcaattatatatgagagtttgtaagatttgacatccaaactaattcgcatggtcggttactgggttttgtcaaaagaaaggtctagagcctacgtttttgtatgtttgaacttctttaggtatacttctatgtagcttaatgtttggttattttcttaccatatagttacaaaggtaaaaaatattagtctttgttataaaaatttgaacatgtggtggggctacgtattagctgcgataattggatgtatgtgcataaagcaagttgtagctaaggaactttcaaaggtgatagatcctcgcttttttcttttgcttgattttgatccgtgtattgatttttaggttttttaataaaaattcgtcatgggatcataattcacattgtaaaacaataaagatgttgtctaactcatctattaagccctgagcaatctatataatgttattcgtttcgatcaaacctcatccaccttcaccaaactttacttgaatcttgatgtttactaaacaagcttacatttacaagttttaaaaa

SEQ ID NO: 52366 - DNA, 1282 bp, Arabidopsis thaliana landsberg
ttggggtattggtggggcattttccgttttattgtactagtatcgatattacgatcggcttctttctttcttttttcccctcaaaccatgagcctttgtattgatcaaatgacatgtacaaaggttttgttcatcagaaggaaatttcactaaaataaaaaattgcttgatattttattcttgctgtttatatatgaaaaaagagaatccattgtgagcagctggtttgatgtgtctagatcgatagagggtgtacatatatcagtgctagataagttagttactcccttagtttgagaagtactacttgttttgactctattaaggaatactgatattattgtagtttagagaggagagatgcttcacagaacagacccacttctgcttcagaggcaatgctgtgtttgggactagtaaactaaacttctacaaggccaaatcgattcctaaacatatgtcaaaatggatccattagattagtcctttttagccttaaaaccattagtacagtataaaatttgtggtcgatctgtaatcatcctcttagtataataatctcaaactcaaatataataacaccacagtagcatttatttgttcacggatattcacacaccgtctcaactaaaataatttgaaaatgcagatcactagatctagagacttgagaatgggacccaattcaacattatagagcggtgagatttcgaatagagagattggaatttaaaaatctccgatctattttttgctaaacacgagaaaatataattatttaataaataaaaaaagacaaaaagattcatattacaacagatggcgacaactgacattgaaaaagacaaaacagcttctaacaaaatatagaagaagcagacacattcatacacatacaaaaaaaaactaaaccccaaacattttttgaaaaatgtgttatctgttgaaccgcgggatttttcatttgtaaggtttccgccacacactttttgattttctcattccaaggtttcactttgttacttcacatcgatttcatttgcttttgaattctccaaaggtttcatctttgtacggtcaaaccaaataattagctgagagctcccagtataagaagcaggtacggatctgttctgagattcatggttctgtaatttttgctattatctcgtgaagttgtctgggtcttagctttctcgtattggatgtctttatttctggtcctgatcgagtctgcaagaatgagattgaaaatgtagcttaaagtattttgactttagca

SEQ ID NO: 52367 - DNA, 956 bp, Arabidopsis thaliana landsberg
acttttgcaagtctcagccagaacgtttcaggtttaagactgatttgcatctgtgttctttgttcttttataacttcgtctacttaattttactcggctcattgggatgttgcagaggtaaaagagtaattgagcttggatcagggtatggattagccggtttagttattgcagctgcaaccgaggcatcagaagtggtaatctccgatggaaacccccaagtagtcaattgtatccttcatgttttgtttttgtgttgtgcatatactgtttcattagagttgtcttcttctatggctgaaacccttgagatatggaatctcggtactcaaaacgttttggattcattgatgtacttaacatccagatattaaacgtaacatagaaaccaactccatggcatttggtggcacaagcgtaaaagccatggagttgcactggaatcagcatcaactttcagagttaaccaacactttcgacatcatagttgcaagcgattggtaccttgctctccattttagtcttccgctttttcgatatgtttttttctcatcccttatcatgacacatatttttatgattcaacagtacatttttcaaggaatttcataaggaccttgcgagaaccatcaagatgctgcttaaagccaaaaaagcctccgaagcattatttttcactcctaagagaggtgactccttggaaaagttcatgaaggagattaaggacattggtttacactacattttaactgaaaactacgatgcacaagtttggaagcgccatgagacgcttgtgaaaggagacgaagcttggcctaactatgacaagaatcattgctaccctttacttattcaaattactaatcatatttagtcaagactatcatatttgcggctatggatggggaataaacgcagaggttcacctaatctctcaagctgttatataaacatat

SEQ ID NO: 52368 - DNA, 1292 bp, Arabidopsis thaliana landsberg
  unsure (1)..(1292): unsure at all n locations
tttgtggaaatcaattataggcaaattagtagtaaatatttgtaggtcttattaaaaaaaaaaaaagaatttgttggtgggtcaataagtgcatgatatggagggtagggtgcatctccctcatgcgttacgtacataccccacttgttggatttaaggatcttccaacttctttacattttttccatcctacaatcaaatcttcttcnnnnnnnnnnnnnnnnnnnnnnnnnnnnnnaacaatttcaataattgcatgaccagactaaccatcgaaatgctatgcatcggcattgtactactgtctttttctccccttcgtcactatatattgcatgtatcatcttatcactaatttgatttctaccaaattatactgatctcgaatgagtccaactgcgctttgatgtatattaaatcacggtcaagattgtacgcaaggagatgtaactcaactactgaggatccggaaattggtgctttgttcaacataaatttttcatctcttaaaaagaaccctccgactccgtccgagggtttgggcacaaagaaggaaacactgagcttagacctacggacccacggaacgtcgacgtcattcttttttgtaatatctattcttttctatttttcttggggcaaactttttaatatctattctttttatgttttggttttccttaaaaacaattatcgcctcaagtattctaatttgtttgcattatgagcaggtgattagccaaaaacagaggggatgaaccaaattaaaagtttagtcttcctctatatattccaagctaagaaaactaattatagctttcaattgaccattgattagtttcatttataaaaatagaatctagttctttttcaatacgatatatattagaatttgtaggaaaaagaaaaacgtttgtaaaagtgactagcccaagaactaatgagttttaatactttattatgtaaagaaaaagatagactttcacttttaacagtttgcagctgtaattcattaaaccttaatgcctactcaggattaaaagcgtcattatttagtactaattaagtggtcgtgtgtgtggtcatagctggcacatgctatgtttgtgttaagttaaagtcattaggaggcatactaatcactaagacactaatcaggattatgctttgtatttaggcaaatgtcttttcggcgtcttctgacaacttctaaagtttcgccacgtatacatcttaaccccctaaataatttggcctaaaaatattaaaaaacttaattttttggcttttta

SEQ ID NO: 52369 - DNA, 624 bp, Arabidopsis thaliana landsberg
tttgaatttaaaatgaaatagaaaataaaagtgaaaggaaaatagaaaatagaaatcaaaagaaaaacaagaaagcttacctgggcccttaccgcaccaattcggcccaccaggggattccttctgcgcgtaccacttcgctagtcactggcgtgcgagccccacttcgccagccacacacaccgtctcactcgccctggccagtgggcccgatttgcaggtgctccaccgcttggtcggatgccgcgcatgcgcctttgaccgcggatgcacacatgcggggcccctcttgtcagacaaccctcgcgcacgcaccgtcgatgacgcgcgggccccagcagcaggcgtcttccccaactagccgcggatctcgcgcgcggaagtccaggcttgaccggatcccaccgccccgcttgcttcggccggcgtcgcgctaacgtgcgcgggattcctccctggctccctctgtcatgtgggccctagtggtcaggttcactccgagctcggttcaacgtcaactgatgctgccgctttgaatttctccgaatccgcatgcgaaaagttcgccggtagttgcgtgattgactccaactcttggcaatataaaccgggcttcatggcgat

SEQ ID NO: 52370 - DNA, 1197 bp, Arabidopsis thaliana landsberg
aaacaaatttggaacactaaatttattatggtcatattaaaaatcacgccagcttagttaaatattagttaaatattaccacaatcacaaaaatgattagttaaatatcacgatcgtttttgtttaaattaatattcgtagcgtattagtcacaaaactgttgtaatatatatgttatgtcagaaattagcataataccaaaataactgaataattgttagcggaataaactaaacatgataagtttttgtaaaataattataaaacgctgaaaaaactagttttagtagtttaatcacgctttgccttttctagtttaattttaatacacttgtaacatattagcgaaatcacttttctaaaacgcaaaaaagtgaaacttgatgactatttttcatcaactttatccaagttttgcagaagaagcaaatccctttcataagtgatggtcaaatatagcggaatcacgttttcaaaatgtgaaacatgaacaagttgtataacatcatcctcaatgtttcttgaagttggtttgaacttttgattttgtctttattacattgaactgaataccttaaaaaacaaagaagtgaatacagttaagtggttcttttaaacttttttgggtaatttctataccagataactcatatctgatgttcgacatgcaaaattttcgtttgacgaattcagctattttcctttgctattgtgcgtgatatcaaaatcgtggaacttgcataggccaacctaaccactcatcaataaaattttgagctaaattaatttgtctacaaactcgaatataaatttgtaaattgtaatattctttgtttatctctaaatcgaccattgactttgcatgtgaaagacttgtaaaatattatatttcaactatacatataataaaacaagactaatgttcacgttcatcattctatgatttattttcgattaaaatttattcgtagataatttgttatactgaagaatatccaatgcttatatatctaatcgttaatttgagcgttgacttagtttcgaacaacatgattttctgttattaacacttgtcttggtattttctgtttgctatctatgtattagaattatagcttgcagtaacataaaccatatagagcacacgaaaagtaagcttttacatttcattctcaaaatctttcttatcactcgtta

SEQ ID NO: 52371 - DNA, 862 bp, Arabidopsis thaliana landsberg
cttatcaaatttaaatgaccaatttacaaaataagttctgtttatttgtaatagtgccacatgttgacacgggaatataaagaggtcgtaaattgtaggattgcgttagcaaaataattaaagcaattagaagtttcaacttaagtgcggtcggttaaagcgttttgatgaccgttatggaaacgcgttccaaagactcaaaagcacaaaatcacaaaatcacgccaagccacgtgttggtcaattttcttggtgagacggacacgttttctcctacgtgtctttttctgtcggaagtgacgtgtctttttaataacggtatcgtacatttggcggcagttttgagccgttggagaaccccatctttactctgttttttatttactgttcgatgataattgttattttcttttcttcaaagaacagtaatgatatatacatcaataagtatcacaaatacataaaatgccttttttcttcttttgtctactttcggtttttccatgctttagtgacgtttacttgtctgaaatctacgattatacactctcttttttggtacatcaacgataatactttgaccaaaaaaaagatctacgataatacactttcattttacttaatattgtctatatataccaaaatagtatattatagattttaatttattttatttttttcggttaagcttacgattgaagctgtttatcggaagtaattcgctatttggtgtataaacccacatgtaacaaaaaaaaagaaaaaaaaaaaagagaaaagaattattctctccgccaatccatgattaattaagtagatagattatagaatttgatagagacctttattcttctcttttttt

SEQ ID NO: 52372 - DNA, 917 bp, Arabidopsis thaliana landsberg
tatgggcttatccatacctcaatacttttaccagtactcaattttggaaacctatggacccgttcggacatccgcaacatgggtaaaacactaaaaccacgtcttttgatatcgtcaaattaaactaatgctcaaattgttctgtttctttttgcagttcaacaacattataaacgttcctttctcatctaaagcatttgtttccgggattttggccttctttctagacacgacattgcctccaaaggacaagacgacaaagaaagatcgaggactagtttggtggaagcgatttaaatcgttccaatctgataacagaagcgaagagttctactctttgcctctcaatctcagcaagtactttccttctcactgatgaaatggcattgtaaacttcaagaaacagagtttgatcgattcagtgtcctgcttcccgcacttgtttcagtactgatctcacatctctacttgtgtcttcaaagaatatgtgattagttagcttcaaaacgttaataacagtactaagtgatacatcgaattcgctctcgtccatctttaactacgacagcgatttggaatcttccttaaactgtttgcagcttgaagcaagaagtgatttctctcaatctctaaccaaacattctgcgagtcatcgacaataagaacagcttctgcttcttcgtttcccatcaaaaacatcaagattcttcttatgtctcaccgtacgatcatcacgagaaataattcgatcgctgaaaaactttcctttaggatctaacaacttagccatctctctagcgtaacatctatcgcccattgggtatatatacatctcaaacatgtcgtttgcttgttttagaaacgttcgaataagattccacagtgaaaagaagaagattgtcttcttggcccccccc

SEQ ID NO: 52373 - DNA, 660 bp, Arabidopsis thaliana landsberg
tattgtgctagaataacgtgtggtgactggtgaagaaagcattttattcaaaaacttgattgaaaagagattttttttgttgaaaagaagagagagtgttcatagtgaaagaaacacgaatattaataaaaaaaaattgcaaatgtaggtcgttgatgacgaagagtaaaaaggagctgctcattaaactctataaactgtgttcaataattaacatgtgtttgaattaatttgttcggttgattggattagttagactttttgttttgtaaaacaaaacttagtgatagttgtagaaaccattattttttttgtcagagaacgttgtagaaaccatccggtacttgttatagcttttgtgtcagttagttcgttgatgtgagttatgctctacacctagttcagaatgcataagtacaataacataaccaaagaagatgattcatcatatataagattcaacgaagtgctcagattcagtgagataatatgtatgtggaaaataaaacgtatacaaaatgtacgtaaaaagtgtactaagcaatgtacacatccgagaaatttcgtgattgagcactcgttcttttataaggttacatttagaagatctaatgtgcgacttcacatgaaagttgacaatcagtaagatgaagacagagt

SEQ ID NO: 52374 - DNA, 336 bp, Arabidopsis thaliana landsberg
tgtgcgtgttcttctcaatccaatcaagattccacgctgcagaagccaaggggatggaggtcacaatagcagagaagaagcctcgactcgcggaacggtgcgttgtgattgacaggctccccgaggtgctcctggtggaggtgctggcccgtgtcgatgtcgacggtgcctgctccgccgccgcgtcctgccgctcgctctactccgccgccaacgccgttctagggagcgtcacgtccatcgacctctccgtgagcattatcctccccttctcacccaccgcccgccaaacaggttccttttccttcctcccccactaacccccactctagggtt

SEQ ID NO: 52375 - DNA, 781 bp, Arabidopsis thaliana landsberg
aattctcgacaacccacaaaagcgagtacgcacacacgtcagattccgacttgtcaaaatcccgtgtccgagatctacttacagccgcagagtccacttgtggtcctcaaactaacatcgttgcctctatctccaccgtccgatcttctttaataataccaatagaaacaaatgtttttatgacaacaaaaaattaaaaacaacaattaaaaaacaactctcaggatccgaatcagttcccgcttcggatcgtcagacacggacaagtacgccacgcatgacgtcatcatatctacgggttctgtttcatcatggacacgtcagcggagacgatgagagccgttgattagacaagaagaagaagggacggctgagatgccttgacgcgttagctcagccaaaacgctctccgcggacggcggttttagcccgagcggtagcggcagccacggtttgcttatcgcttctttaaccacttgatctaacatttcctcgtcctgacccgacccatttacatcgcaacccgacccggcaaattttattttttattaattaattaggaatttttatgtcttaaaaagaaaatagagaagtgttgacactaaccggctgactcgccggcattattttgaagccggtttcagctccgttgggatattgaaatccgccgccggtagtattctgcaacaaaaaaacaaaaatctctttaaaaattaaaagtaagatttttgtaatgattaaatttccataaatataaagtttaatattatagattgtgata

SEQ ID NO: 52376 - DNA, 581 bp, Arabidopsis thaliana landsberg
  unsure (1)..(581): unsure at all n locations
accgtcaattattgaatgcctaactagtaaaatttgtttaatgtgagactattgcaatggtaaatatcatatgcatgtattgggggccgactgattaaaataatggatcatgtactaaaacatatttttaaagctagaataaagataaaagaccctaaaatgttgcaaaatatttttggaccatgtacatatgctccactagaacacccaaagaaccggcccaacatctattgtgtagatgttttgagtgattccttctcatttcctcatgagcaattttattttgtgagaacacccggcccataagaaagcgcttagaaaacgaatcttgttctagatgattggagcgtgttccacatgaaaatgccacgtattgtattcttatttgtaggcataaaatcaaatccaacatttatgatattgcttaataagaatgagcaatacatgatttgttgaattcttaanaaatatccaaacacagtaactattaatagntggtgaatatatataattaatgataaatgaatctgggactagaaatctttggctgaacacaaacactgcataaatgttcaaccttt

SEQ ID NO: 52377 - DNA, 507 bp, Arabidopsis thaliana landsberg
atacgaacataaaatataaagatttggtgtgtattatttgctttcccttggccttgtgctctatcggaggggcactggccatataccgtctattgtgtcctaacatcgcttgtaagggcattttaaatttcggtttagtattttatttatttacagatcaaagactaatgatgaaaccatcttgggacaggaaaaataaggatcatctacattttaacttaattaaaattcacatgaaatggactttgttatcccagtttaatttacacgtaaaagagttcgtatataatatatagtaaccattcaaaaaggttaatggtaattacgtcatatatagccttttccacaaaatgccatttgaataaagcctgatcccaagaacgattctaatctcttgagatagccactcgttttttcttttgttctttttgggattctttaagcagtagaaatttggaatatatttttaaattttcataccaatacaatttttgtataataaatgtt

SEQ ID NO: 52378 - DNA, 861 bp, Arabidopsis thaliana landsberg
aattataaattcagacggagaagacaagatcaaggaaagtaaaagctcaattgttctaaaagcccctaaatgcttacaagttacaactattcacttttttggcctcgtagttctattccctcaagatttaagcctcccgtaaaataagacatttcactttcaaaatgtacaattgtgctgggtgtattaggtttgtaaaaaaacaattgacttcaggtagattgtaattgtagtgctaagattggcaaagtaacgcgatagcatctttgtgactcgtgaatatgtaatgcattgtatagtgtttgttttacgaaaatatgatgctctgtaaaatagaatggcaacatgctatcaaatagaatggtagcatgctatcaaataaaattccattgaaactcatcaaatttttgtttggaaacccctaactatgttatattgcaaatcaatgaaatatatgggataatttcatgttgtcaattatttactctctaaatttttatttatcactttctttacatcccgaaaactgccaatttgtcaactcgaatttgtaggtaagaaaatcttgcgaaatttcatattttatgtagttttaaaccgtgtttgattgtcaatgaagtaaaaaattaacagatctgttattttttaaagttgaaatcatgtagacaaattacctataaatgtaacaagtaaccgaaaaataaatactggaaatgcacttaaatagagttgggcaaggtgggtgaaccggtattcacgtgggggcattgatcttacaatagccaagtcaacaatcaaagttgtaagtagaaagcttgtataagttgtcaccacccgagttttttcttctaactttcatat

SEQ ID NO: 52379 - DNA, 569 bp, Arabidopsis thaliana landsberg
  unsure (1)..(569): unsure at all n locations
ttttcttcgatccaaggtctctcagttacagaagatggagaaaacgccgttcgttctctgtttctcagtttctcggaatcaaattccaggtaatcgatctagattctcaaccaacgaatcagttatgagtttcgcgttttggatctaagagtttttctgcgtttcgtttatgctagtcatttctgtaaatccgttctgtttcattgcgttttcatggatttggcgtggttttactggtgatcgattgatttttccggcggagaaattgataatttctggcgatcaatttgattgttccggaggagaaattgattatttctggtgattgattgagtgttatgaagattaataatcttttttattaggaaaatcaatttgatttccgcgaattttggaatctaaaatctcgttgttccgttttttgcgttgttatggattctggatcctgcgttgaggtttatttgctggtctcgtctgttgtgatgatnnnnnnnnnnnnnnnnnnnnnnnnnnnnnnnnnnnnnnnnnnnnttggagtgagaaaattctggatcatgtgggtgatttca

SEQ ID NO: 52380 - DNA, 319 bp, Arabidopsis thaliana landsberg
cagggattgtgcaagaaatttttcaattttaacacaaacacaagcttttgttgagaatgaagaacacatgaaacaaagggatgaattaagtgagaagaagtttactctgcagcttagaggcttgtttcttcatcttcttcctcgttgatttactacttacatctgcagcactcggtggtggtggtggtggtggaacttgttgagcttcttcttctgccttaatcaatgacttccaaatactcgcaatctgagactcggtcagattcagattctctgtcagcttagacaccacttcttccagacttttgaaatcacccac

SEQ ID NO: 52381 - DNA, 856 bp, Arabidopsis thaliana landsberg
  unsure (1)..(856): unsure at all n locations
ctcgatgaagtgtttgattaatttcttatcaagaacatctgtgatttaatcggctactttcgtggagtttgcgataatgaatattgttgagaaaattctttttttttttggaactcttatcttattataacnnnnnnnnnnnnnnnnnnnnnnatacaaaaaagaaacacaagcttgtcgtagtaagtactaagtagtaactagtacaagtgacatggttgcatttgccaaagccggataaagatgctgaagaagtatccggtggagtgaaaggctcttctgctgcacttaaaaggataataatgctgtggacttgcggctcagagannnnnnnnnnnnnnnnnnnnngatcaagactggaggactcataagagccggataaagattctctcagcaatcttcacatcactcatattgttagttattgtcactctctctctactctatgttgaatctgcacaattaatgttgatgatttaaatgtcctttttctttgcttacataccaaatagaatttctgaaccacaacttattgccagctgagataccatctccttctcccgtgcaaaagtatttgtcaactagaaaaatgattgcttaagtacgaagaacgataaatagagaaacaatcaatgtgagtttaagacaacaaatttatattgaaaccatcactatttgccaagcacatgtacgaacatacaacttaagaaatgtgaaattattatatgctaatttctacgatctaaagcttatatggcaaacaactattaattgataactagtggggtagcctcaccagtatcattgattattgagcttatcgatactttcctcttcagtagtagtatcgcattcc

SEQ ID NO: 52382 - DNA, 864 bp, Arabidopsis thaliana landsberg
aaacccaggacttgcaaagccaaaatgtagacgacaaaagctgacctttgatacataagccttgtttgggtcccatttggtgtagcagatgaatatggaaggtaggaatgaccatcaacttcgtggtctgatgtaaattctctatctgaatttgttctcttgaatctgttcctcgcagcgttcccttcaacgttaaagctttcatatcttctccataaattgtttagtctctctaactccatctcatttagatgaatctcaccaacaatcccctctgcttgtgcctgataagcatatcaaagtttctgttaagaaacagtctaaagggaaaagtgtagattaatttgggttgtgatggacctgctttgcagctaattgctcgattaggctatgaagttgtttatccagtgtcttctctctctgagctgtgaaagaaaaacctttccagtcagataatgtgaatgaaatttttcacgctatcaacctatctaacggaaccaaaaaacagatctctattgaattcttactgaaaataagctatgtaaaacaattttttttttgtttcatatatattgaagacgtgatggttctgaatggtgataaaatagtaatttactaactaatcagaattgatgacaaaaaaaagtacctggagaaggctgcttcagtgctctttcttgtataacagcccaactcctctctaaatcctgaactttttcttccattgaactctaaatggaaaatataacttacactgccatcagatatacagccgaatcgactattcccatccccccccatggagcgtaaaatgaaaacaaaccaaatcgttctttttgctctccaacttctctagcataaagg

SEQ ID NO: 52383 - DNA, 333 bp, Arabidopsis thaliana landsberg
ctgcacatgtgacgcgaagacgaacgcgtcgtcgcacatggaagactgaagcgacgcggaggcgtaggctcgctgctgcgattcgccgagcacccacgcgtgaggcgaaggtgcatgctgctgcggggcaatgctcggcgaggcttgttgcagggatttggactgcgcataggcagggacaacgacggcgttgtggattggagggtcgagcgggctggggctgctccagggttcttgtccttgggggggaaaaacaacagccaagtttgacgacgatgcaaggcgaagaggggtgctgctgtagggaatcgacgacgcaaggtttgttgtgca

SEQ ID NO: 52384 - DNA, 725 bp, Arabidopsis thaliana landsberg
ttcaattgttaaaatatcaaattaatactagtctttttttttattcgaaaactagagagaaaggatcaataatgtaaaaacaggtcacgttgtcgggtccgttggccaatggccatcattatattacgatcacatatgcaactgaccgatcgaatcctatcttcgaaatctcatttgcatgcactccaaaatttgatagatataacttgtaaaaatattgcttttaataagttttcttttcttactgacacacttcatgggatagcgaaaatgctatagagttaagtaagtctaactcgctcaaatatagtttaaacacacacaaaaaccctaaacataattcttataaactaatagtaacccgcatttacagtggctgataatccagtctaatctaaatacatatatgaaagtagtccttggatatgatataaagttataaagtttgctatgagcataagttgcatgaaataaacaatttatcttaacagttgaaaaaaaataaatggaaggtttcaattgatacaatctgtcgtttttagcatatcattaacttctgcacagcaacttttcctttcccaaaggggtgtttggaagcacttgaaaagttgtgcactgccttcctgtggagtggggcacaaaattcaactcgtggagcccaagggttctaacattttttttggtcaacaaaataaacaggcgctttggggctgaaacggctcgct

SEQ ID NO: 52385 - DNA, 205 bp, Arabidopsis thaliana landsberg
aacacattaagccattaactttttatttaagctattttactttacaaacaaaaccttggctgaccattacaaacataccatcacttaccacggctactctctatctgtcactaatgatttaactctcaccaaaagctcaaaaaccccaaacaaacttatcaatgaagaatcttattttttttctacataacacccagggaagagg

SEQ ID NO: 52386 - DNA, 588 bp, Arabidopsis thaliana landsberg
aattaaaagctgttgaggaaaagatcacagagaatgccaataaaagaaggaagtatgaagaagatattgttgaattgcagaggcaagaagtgttgatgaaggaagcaaaagtcacactagacaatgagatagctcggatgcagtctcaagcagctgttcttgaccaagaggttcagaatgtagatcacgaatttcaggcaattctcgctgccccatggaaataagcaagtcgttgatcaaacctttgtgtttaagaataattgagatctctgtacgttgttggtagaaaacataactttgactaatatatcaagtaatgtctctgttcgccttgcgtctcgtatctcttttctctttcagatttgtcaatcatgaatcatatatgaaaattataatcttccaaaattattattgctaattgtcataactcatagagaaagcctgaaagggaactcagtaataagaatcttcaaagctcttaaaagaaacaaccatttgggtcaaatgcaaatatttgtttcaacacaacagctccgaaaacgataattgctagaatcttatgatcaaataggtaactataattatgaa

SEQ ID NO: 52387 - DNA, 951 bp, Arabidopsis thaliana landsberg
tacgacaagacaaaaaaagaaagagaaaaaaagaaagtagccgttaagcgccgattccaattcaaattcaaaataaatctttttttttttgttttttgtatagttaggaagtagttggtgaacaaaaaacgaaagtaaaacctcagggactgttacaaattaacattttaattggacataattgagattattgggctatattgggccactattgagatgattgggctatattgggccacttgatgtcactcatatgaatgacatgacgacatttggacataaaatgaaccaaccaaccaaaaaaagaaagggagagcttcaaagagataagatggcctctcttctctctcccgccacccccaccgccacctccgccgcatttcattcctgctccaccgccggattctccactcccactcacatttcatcccagaacagcagcctgtccctcctcagccgccggggttgtatgatgagatgcagtttttctccgcaggacattcctgttgattccctctctcatctccctcctttccttgactttcagaactccctcgccacattttcggatacccagaaatgggggttctttgtctccgccggaatcgtctggttttacctcacggcgaggcctggtgttctcatcggcgccattgacgcctaccttctcgctcccctccagcttggcctcgacactctgattggaaggaggttgaagaggtccgatttcttggtcactgagaaactcggcgaaggctctttcggcgtcgtctatgccggcgtcctactccccaagaattctactcttgttgatgacgttagggttagcaaagcaagagctaaagcgatggactttaccggcgaattcaagcagagagtcatcctcaagaaggtaacccctgaaactgaagaaaactatttgttcaaataaaagactcatctttgatatca

SEQ ID NO: 52388 - DNA, 1101 bp, Arabidopsis thaliana landsberg
taccacaagtttaagatatagaaggcatcaatgcaatgtattacacttgccacgttgcagctgtatcagcaagttggtttgtcttttagtagtcttgtatatttcagttcattttctagtcatcaccttagtcttccttataattattactataattagatatttccaattaagtcaattttatcatttatgattgacgtggtaaaaacgaaacgcatcatattccatacaaatatataaaatgattaaaacatttgtcgttttttgctagatacgtgcatatcatcccgacatctcgagcatcttttgaatataatgttttttcttagttaatcttcatatatatcatgtgacggctaattaatcattgttgttttgttgttgcatgttatgacctatgtaaatatttataaagtctccacaagggaactagaggtttgaattggtactaagatcacaaaattggtgtcttaaatttgagctccgactgaaaaattaatcgaagaatttctagaacagtaacatcgtgtatacactttattggatgttatgcgataccatatactcaacggtttatctattatccatccataaaactaaattagttgctagtaaatttctaagaaagtaacttcttgttgaactcgttttctaacaataaacaataaataaagggacttccgacgacagtctctagttcacattttaaagacattctgacagactctctagttcacattatatatgtagttatgtccttaaatttgtacgttggttggctctatacatgtagtaaatgatcttttccattgtctctagttcacatttaatttagtataagtataatttctagtgcctttgtttcaaccattgtcgttgtaatatcactacaacttgtaagttgagtcctaagccaaatcatacatacggtataaccaaaacaattagagtattttacacttcatcgaaatttctgcaatttaaagacgaggtttgaatgggaaattataataggtataattttatgatgcctattgacccacccaaattaatagccttttttttgtggccgccaaacgctttattagttttcattttaaa

SEQ ID NO: 52389 - DNA, 675 bp, Arabidopsis thaliana landsberg
tcattgagatgttgattaaggaatttgccaaatctcctcaagctaatcatcggaaggtctccaaattttgagattattgctttgcatttgcatttggttaacttagatcccaggattttgagaataggattttgatcattgaaccattttccggctgctttgttgttgtatagggtggtctaattggcttagctgctgtaactgttggtttgtctacagaagctgctcaatatcttgaggtataactgtaaattattcaaacgtttgcactataacccatagttaatctgctcatattaagattttaaaagttatgtttagtgtaatcttttctatgtataaatccatctgttgtattagtgtagtttcgttcttgggttataggatgttttctaatttttctttttgatctatgacatgtgaagcaaatagtgccacctgtgattaattccttttctgatcaagatagccgagttcggtactatgcatgtgaagctctctataacattgcaaaggtaaagacttgtagtattatacctgtatacttgtagtattatacaggtattgatgcgccacgccttcttttctggtttgctacaggttgtgcgaggcgatttcattattttcttcaataagatatttgatgccttatgcaaactctcagcagattctgat

SEQ ID NO: 52390 - DNA, 695 bp, Arabidopsis thaliana landsberg
tataaagtaaacctgaaagaagaacatggcattgctttttacttttagagacatcaaacaggtatttatgccattggtcaggagaaaaattgcagagttagaatagagagtactcacaatggtgctcatagctaagggaagagagattccagcaaacaaaacacgaaatgctcgttcacctataagtttctctcctatatcccttagactagctaaaccactatgtacaattgcaaatataaggataagcattaacatagcaacctgcaaaaacaagtggtttttaacaatcaaataactgaaattgaaactggttcagttactgttaaattgatctatacctccggtgagccggagatgttagagacggcgtcgatgaatgattttccgaaaccggtggaattatcgatccaaacaacattgaggataaagagaacaactccaaggacaacaccgaaataaacccaggaaacaagcttctgtttccctaattcaaaagcagcagaatcttcaccgatcagtagagtaggactactctcggagtcagaggcgatgggttggtcttcccggagagtgctacgaaccagaattttccgaattaccggtgacgaataagaaagcaagctggtcgagtttccgaggcgaggatgagctgggatacggcggattaaggtgaagttagggcggctaggata

SEQ ID NO: 52391 - DNA, 1030 bp, Arabidopsis thaliana landsberg
tcaaggcaattcgatggtgatataagtctaagaatttgattttaggtaaatggttaaacgttcaactacgaggggcgtgtaattaattataatataccttaactgcctaccaaatactaaattatagtgcaactttactaaagtttacataggttcgagaagtcattagcatttgacatattaggatttcattttacacaagctttcgagaagataaacatgtttgacttgtatacggctgttcaacgactcttgacgaaaactcaatttttggtatttcaaattgcttgaaaatctgatgtaaaagggcaacaactacacgatatgattcaaactactatcaattttctttaaaaaaaaaaaaaaaaaaaaaaaactagactaatttttatttgagtactgtatacattattttctaaaacaaatgtctagacattgtagtattttataaacacttacacaacaccaaatgtttgtcttaaccccgactaaaaaggacatatgtgttgttaatgctggatcaccggtggttttgttagtgtctacccttatttgtatggaaaaacactgccatagcccataaggtaacttataaggacatcaaagcttttggtgtttgactgcttaaatgttcagtctccagattccagcacatgcatttctcgaatacttgactaatggtgaagctagcattttttaataactttgtcataccaatcatggtggttggcggacttaatcatggtggtaagcgagagactttattttatcaaaaaaaaaatgagagacttaaaattagaactatttttagttatagttatattttattattttgtctcaattattctccccgcccctctatgtagacgtgtgaatattagagagattgataacgaactcctcacaacatcatatctcaagttcaccacccaaaagaaaaaacacacacacatcttatagagatgaaagagactaattttggcgagaaaacgcgcgttctggtagttggtgggacgggatcattggggag

SEQ ID NO: 52392 - DNA, 638 bp, Arabidopsis thaliana landsberg
tgaaaacttacgtcttaaaaacgcagtttaattgtaatgtgagaaccttgcgtgccaccgtttgtgattagtaagtaaaatccttttgacctttgcgaaagataaatatccaaaaaacggcactaaaaatagcacaatgctttatgaaagtgcgtatggcgagagatgaaaagaggcacgtattatattccactaagcaaaacaactattacatgaattatgaatatagtaagagtgcatgagttttcttataagtgatcattattatcagctttagcaaatttcttagtgcttagagaagactaatgttacgtattcatgtcgaccaaggagtctggacgcgtcttcgagatttaagattcttgagtgggcattcatctttttcaggaacctgtgagtagaggacacgtatgtgtgtgcctgttgattggctttggctataaatagggtttcttgccaaggtaacgtaatcaactaatagctagtactgatcgagcttacattgtttgggaatctatctatttgtctgagtgagcttgtgtgtgtattttaaagaaagaaagagatcagaataagagtaaatatgggaaaattcgtgagaaggggttgggtagtggcgtgtgtggtggtgtgttgtt

SEQ ID NO: 52393 - DNA, 576 bp, Arabidopsis thaliana landsberg
taataccaacgtaaagttaaatttcacttcaggcccattttaggcccatttttaatatattacgctttcttacaattcagccacggaaatgatctttttcttaaaatgtatcttcatctttctttttactctcaaatcaaccttacatttgctctgaaatttaaaattatttacacatgaaaacttagaaaaatatttacagtcaatgagaaattttcctcgacaataaaaaacaaacaaacttatttatctaataaatagtcatgaaattagctaaacacaacaagagacaacatcaacacaagccacaataatctcccaatcatcttcttaaacccaccagaaccatcgctgcatactaacttgttgtcatggtacgtgcacaccggcttcttcctacacacaattcgaaaacaaagaccacgaaatataactttatttctgcatttgaattacgtttacttttgcatatgaaattgacaaaggatggataaagtatatcatgtgaatgtaaaagtcatggtctagtatgaatgaacttgattagaacataattaaagtaacatgagatgttgt

SEQ ID NO: 52394 - DNA, 746 bp, Arabidopsis thaliana landsberg
  unsure (1)..(746): unsure at all n locations
ctacaacataccaacatcgcaagcagaaatatcttgaagtaactagagatgaatatccccaacataatctctcttcttctgcaaagtttttaaaaaaaattatacataaacaatcttcaggtgacagaagtctgagatctttgatgaaaaactcataataagaactaagaagaagaagaatcagtaatcacctggaaacttcatttagcaaacccttagtcgcaatggcaaaagagatgataaatgcagcgtttgcagataagacaccaatcagaacctgtttcaaatgcgaaattattaccctttctaaacaatctcaatgacttaaatcatttaaaccttaaaggaaaaaaaatctaattaagtccattaaaaagaaacgatctaacctttatagatagaagaacagggctatcagaaaagctcgattcttcatcactttttctcagtagcaagcttctatctatgatgagttcagggcttttcaaataagtttgccgatgaatctcaccaactacacatctgctagctacactttgatagtaaaagattataaaacaaaaggatacaacagtctagaagaagataggcgaagaccaacttccacaacagatgctgcacacacacacacaaaaaaaaaaaaagaacccaacaattcttattggatcagagactactcaatatccccaaacttggaaattangtttgtgcttgaggtctaagatacttctatatatggaaaaaga

SEQ ID NO: 52395 - DNA, 477 bp, Arabidopsis thaliana landsberg
  unsure (1)..(477): unsure at all n locations
tactctgcactaatatgcgcatatagtcacagcatcggggctggtcgtaggggcaggacgtagcgccaggacaggacgtacaacggaggatgcaaccgtgatagaaccagggctccacattatttcttaatagagtagtatagataagtgtttcgttagatctgcaaattaaatactgtgattctggcactgttggacatcgctggcaccggtatctgctgctgctcagattctgaatgtnnnnnnnnnnnnnnnnnnnnnnnnnnnnnnnnnnnnnnnnnnnnnnnnnnnnnnnntatgcattttacctgcccggttacatggctgcgtccctgatgcatgcatctaccacaggtagatcttctatctgctagcatagttactacgtactgatgagaggctatattgagtggtgagtcttctagcgaacggacgtccctcaatatcatccagagaggcgattcagaaagagcataa

SEQ ID NO: 52396 - DNA, 1245 bp, Arabidopsis thaliana landsberg
aaccatggccttttagctattatttatataattaatggattgacctatatatatctttaatatagaatgttagattcttccatgatctcactagtactaccacaagacataccactagagtaaaaaattgtttacaggatcaacctgaattttaataccatttaagtttcacatgcttctctcacttaaatatatatctggattttaatctatatcattcatgcattatctaagatctcatctccttttcattgtgattttattttcatttatgcctattaatccattctttaacaaaaacaattatcatcttaacataaactaaaagaagaaggaaaaccaacagaaaaaagggtacaattagtttatcatttttgatacaagtaatactactaaaatctcatcgttatatgaggtaatcaacagattagagatgctagtagtaaatatagattcattcacgatcattctctcggtcatttaaaacaaaagaacttaattacactttgtgagtttgtgtcatcacagtttgctgtcacaatgtattgcgtgtcatttcagagttggatggtccctaagaagcaattatacattcggtggatgcatattgagcccgtgaactctctttgttttcttcttgctattagttcaatgaatatctcctaaattatttataacgtgtgagtaagcaagaaacagtagaagcaatctcaatcttttgattttgaatcatgaacttcaagtatatataatgggctaaaatccaaaaacaaactagtggatatcgtcggagcatggatatcttttgcaatgtacgttttcgttcaagttttgcaataaacagatttgggacgttaagtattgacttgtgatatgataaaccttattgatatgttttgttataattatttttggtttgcgaagatatgataattttgtagacgcaggcaacaccgttgataaactacgtacgtaaacgtctttttctgcttataaaataggtttctcacatctattattacaaacgaaatggtgtaagatcggggtcaccatataaatctgatttttatgtattacttgaataagatcatattaacattaatatacattatatattaagatttacatagaaaatttcaaccggtttttaactaatttgcaataaatcttatttataattatataataaaatcttaattaattatacctttaaaaataaataaaatcatgaagaaataatttttc

SEQ ID NO: 52397 - DNA, 626 bp, Arabidopsis thaliana landsberg
ctactctataatagtatttataactgctattacactctaaaattgcattctaacctattttttatttcttaatttttctttttcctcacctactaaactagccgaattgcccctgttcctaattcacttcattcgtttgttcacaacgtggatacaagagcagatcctttgcacgccaaatcagggaggtgaacctgatatggcggtgaggagggagacgactatgttgtgttgactccgagggcagcgaccctgctgcgttggcttcgagggcagcgacctgctgcgtcggctttgagggtcgcgcccctactgcgtcactagtgagggggcgaagagggaaacgagaggagggagaccgacaacccggtgaggtgggagactggtggcacggcaaggtgggatcggagtctagcggcatggcttcgtgtctcctgtacgaacaatggtgaagaaaagaatgagcagatgagaattgagaaccaggggcagtacaaccactttaggaggtgagaaaaagaaataataaaaaataggttagaatactattttggagagtaatagtacaaatacttttataaaaaaagatatattgaaagtccacaagggagaagctattaaaagag

SEQ ID NO: 52398 - DNA, 827 bp, Arabidopsis thaliana landsberg
tcacgattactaatataacaaatctgtttacgttagataactaaaccattcatattgaaaataatattaactagttgaacatgcttgttagtgacaaaacatgttcacaagattttgtttgaccaatattgaactatgcaagatggtcatttcctataacaattctttaaagaatactatatagatataaacagttctatctaaatatataactaggttcgattcatttcatctttgatgtcatcattcaacgctttgataattcttttatacaaccaaattaaactaatcaaccatacttattctataccgacgaatcgttttgctacacacataagcagccttaactactcacaagttacaataatccaatcatgcttagtaccaacaagtttggttctcctcctcatcctccggcgaatcttgaaaaacaattattatttgccgtaagactaaaagaccacgcaacgcaacacaactgtcacgggatcatcggtcctcctttttcttcaatcccaaaacattaaaaatgaaaaaacaaaagacgagaatatggtccacctcatcgtcgcatcttttgacacaagtcgcaaaactagtggcctcttctcgtcttaattattaaaaccaaaacaaaacataaaagccatataaaaatcactttaatctccttaattaatcacacttttaattaagccaaaagtaagacaatgattagtgctactaatcttcggtggcttacaagattacgagaacgactcgtaaagaaaaaacgcgtcttccttggttctttccttctttatacaacgattatttccttttcttaa

SEQ ID NO: 52399 - DNA, 1407 bp, Arabidopsis thaliana landsberg
acaattttcgttatttttttattaattatgcagaaatccatgtggtagaaactaggattaaaatgaattttcgtaatattgatgatctaatttagatttaattaagaaaactgaatatttgtaaccacgaatcaaagtaaatgttaaacaaatcgcaaatattagattagaagatgcaaatatttcctctacttcggtccatgcatatttaacatataatatataaataaatagaaaagttaataatattttaggaaatcatttttcattaaattaattacagaactattaaaattttatcaatcaagaaaatagtactctacagtctacacaataaattttgatatagagctgaggtttgttttgatttaagtttggtcatttctattttaattttttcttttcttggagaagattggatatatatattttaaaaatcaaatatttggtttaatgtaatatatgtgactatagcttggtcacatatattattacaaagaagaagcaaaatgtttggttcaatgtaaataaacttagggataataacggactaaacttagggatatttgataatagattggattaatagtagaaatttgtaacctcaacatttcttctattattaaatggcatcaaaagtactcgaatatttttggaaaatagtagtttactgatatcactacaaaaaaaatacccttttttttttatttatgattgaaaccttcttaccaggtatctaggacccaaattatagtggacactggactcttggttatcagcggtgaagatacccgtaaaaattattataatgaaccatttgagaagaattgggtcgctgtatgcgaggaaaaatacgagatcgcggttaatagttttcagaaggctcgagtagttggagagaaaatgaacaagtcattaacggaccgtatggaaatgtcccaactcactgaagctggctttgaggctgtgctcgattgccaagacgaatggacaaagattctagaacatgaacaagcgtgtcctttttcttactggtaccataaagttcgaaaactaattaaaattactcgtgttattgtcaaaaggcttaacgcctacgcctagctagttgtattgttactttggatattatttgtttaggttaaatgaatgacttttttttataagtttttgataatttctcttcataaatgcatgcaaaacatgaagttttaaactttcgacgcaattatgggatacatgacctgaatgagatttgcaactcgggagatctaaagagaccaaaacaaaaattaactgactaatgcaaccgcctcttatgatcaacagagtttgtcacgcagttataaactggattttctgaaatatttcttggttcagtgatataaaatttcctcaatttttttt

SEQ ID NO: 52400 - DNA, 605 bp, Arabidopsis thaliana landsberg
agaatttctacaaatgtttttttcccctaaaaacacttaaaatctatagaatattgtatgctcataacataaatttgaaattacgagaaaataaacaacaaataaaaaaaaaaaaaaaaaagttttaccaaaaaaaaacaactaaaaaaatctttattcgtgtaccaaaaaaatgaagaacaaaactttattctaacttctaagtttttttttaaattaaaccaaaaaaaaaaacgtctaagtttttgaacaaaagaaaatgattgctttaactaatgcaaatcagattaatgtaagaagatgtaaatttcaaaacgatccatagtaagaaaaagtttatactttatacattgttacataatgattttttggtttaaccagtaccggtatgatggagatggctttaaaaaaacaaacaataaataaattggccaaccgaaacatttgactttgagctgtaccggttcaagaatctgattcggtcgtgtcatacaaactctctttgaaaaggcctaataaagcccaatattaattataagacttcaaagtgggccaatagcatttaatttaatatcccacaaattgtacaatagagaaaaagtttc

SEQ ID NO: 52401 - DNA, 808 bp, Arabidopsis thaliana landsberg
ggcttatgaccagggttattccacttacgttttatttatgatctagaacttggtttatttatggtaatgtgttttaattaactcagtttcatttgtatgtttgtgatgtttatgctgtcttgattctgtcttcctccttttcacgctgtctcaaaggagaaaagtaataaggagatcacgagggagattcataacttgcttgccttgtctccatgaaacatgtaagagagagagacattaatcggcttggcggttggataaggtgtgtttgttgtgttgggagcatttactgataccgatgtggctgtaccgttcacctggatcaagagagtggttgaattacattctttgatactagtgtttgttaatcaaatcattatagtgttttctcagtagtataagttcagaaagtttctctggctttgcagattgacaaggtcgagcacactcatttcatacaagatcaataaaagggatgaagaatgactctgataccacacacaaacactcgctcgtctgattgtgaacaatttattcacttctcttatgttctgttctatcaaatgtatcagaccaaaaatctattttgaggtcttcttggtctgtaaggtaaatgccagttatgatatgtcatatttgagcaagtacatgaaaaaaagaagcaatgtataaagagaatgagatcatatctacaggggactgtgttctgatcagataactgttgatagaattggagaagaagttttgtgatctcatttcctcatctcacacctcgacacacagcaccaggttgaagatcatccagttt

SEQ ID NO: 52402 - DNA, 118 bp, Arabidopsis thaliana landsberg
gcaggtaaaggtagaatatagaggatgcatgtataaagtaagtaggaaaaggagaaatataggtaggaataaaaaaaaagaaagaaatatataaaataagatgaaataatgtaatgag

SEQ ID NO: 52403 - DNA, 881 bp, Arabidopsis thaliana landsberg
tgaaactccagaagtgattgatgtggaggaatttgatttgcaaaacggtggtgttcctaatggcaacaatgttgattataagaacaaagggaaggctatagactttgattccatgtcttacggtgactatggtgaagaagatgagtatgctgtggtaaatgtttgaattttcgttttttcttttcttctaatgagtctacttacgttgtcacaactaaaaggtcttttttaaaaattattctagggatctcctggtgatgattatggttatcctgaatcatctccactatcaaatagtttgttagacccagagtctttgatctatgaagacgacgaaaactattccgaacaatatgactttgaaatggaggcggagcctgataattactccatgtatcaagaccttttcgatggtaaggatatcccaactggtgtggaggtttcaatggattggtttccaaattcagctgacaaggaatcagcgagtagtagcaaatcgtctcatgctaataacgggaataacagttccaagaaagcaacaaaagcaagtggaatccattctcaattttcttcagatatggaaacccctgtagctcaaccatggaatgctttaccgcacaaagctgaaggagtcataccaaactctgcttatgccttgccacagaacagcaaggcttttcaaccaccttacgctgtccactattcagcccttaaaactgctttttccaattatcttcagcctcagactcctgataccgtattgggggaggctccagctcctgctgcaggttcttctggtttattgccaccaaacacacccggttttaaaagtaatgctgctcggtttaaagaggagccgcctatattacctccggatgatt

SEQ ID NO: 52404 - DNA, 649 bp, Arabidopsis thaliana landsberg
tacaaacatatttcagttttatttcagtaataaagagttctatgattactagtaattttagttgaatttgtggggatagatgagaaatttgtggggagaataattaaacaataatttgggattgggagaaaagttgatttgtacgttaaataaatggaatataagattttaagcaactaaaaggaaagaggtaggcatccagatgatagtgacattttattttttttttgttataattgtcagcaattatagtttgaaatttttggcattagaaacatatataaccaataattgtcaagagaataaaagaaaacaaaacaatgatattttatttacacatgaataatgacaatactatataaaaaaattcaaattcagcactttttggatctttttattattttagctttcttgtgggttctacacatcttcaatatttttctaacttttaaatatcatatctaactttaatttgtgtactcatgcattcacatccactcattttcttaagataataatattttataactttacaatggtgaagaaagatacagttacagttcaatttacatattaatttaataagccatactatatacattacttagtatattgcatttaatttactaaagtaattttttttgtacat

SEQ ID NO: 52405 - DNA, 125 bp, Arabidopsis thaliana landsberg
  unsure (1)..(125): unsure at all n locations
caattaaaccatagcaaacacaacaagtaaganatagagtaattaaacaataatatgtaacaattataaaccataacaaacaacaacaatatgagcataagaaacaacatagaacatagagatag

SEQ ID NO: 52406 - DNA, 1003 bp, Arabidopsis thaliana landsberg
agtcacatgtcaaagtgtccagtttattatattgttttggagaagaatcaagaaaaagactagaggataaaacgtagagtgagccttccacagtatattacaactctgaactgataaaggcccaataatacaggcccatttatgtaacaggtcgaataattataagcccataaaaagttcaatgaaaccctagctctagactaccaccgtcgggtatatattgacgctaaacacatgttcttacaaacctacactaaacactgcaacacagatattcaaagcaacgcctcttttactctttttcatcgagttattataaaaatttcttccttggttcgttttaattttcttcttgatttacgttattgtatttgccaaaatttgatgggagaagagagcgatgattataaaaaaacaagattaaaattctgatctgctctattactgggcatgatagactcatatacacccatagaatatgagctctcttctcaatcatctatttttgttttccaaaagactttatcaataagcattgtctggattaattgaacaacttgtaattttatcatattagtttcgtaattgaacatctcaagaatttcaattggattaataaattttaggttttgttgatgataaaaacaacttaagacaagtggtaaaattttccgtaaccagaacaaggctaataaataagtggacatatctctgtgacggtttgacctatcatatgaataacctgtaacttatttttcttgcaatggactcttaaataagaactagaataagaccaagactatcttcacttggttgcgttgttaataagatgttaaaacgaagcttatgtataaaaaaattgacagaacataactacatatcaaactccaaacttacgaacacacacaagttttctctggaatctgtcaagttttatatgaaggttcggaagaactaaaatggggatttatctagtggaagacaaaaaggaaaaagatgagta

SEQ ID NO: 52407 - DNA, 1137 bp, Arabidopsis thaliana landsberg
gttgcgaaatatgttaagagagtagaaaaaccatcaatgttttgatatttgcatattcaaaaattgttgcaattacacaagaacacactgtttctgtttggtatcttattctcatttgcttcagagaagcgaatttagcatacaaaactgtgcgcgttcccttccctattttctcaactgttgttcgagtctctcaatggctgcaccaacaccactcgtgacctcaccgtggtggctggtcgaatcaatgttattgccttcgtttgctttcttcatgagcttcagttgtacccaccctgtagaatcaatgcaagtatcacttagttctagccaactttccaatcctccctgatgcttctctatcaatctctaaatattgttatgacttgtaagacatatttatgcaaataaattaccaagagggaagcacactgtggctccaagaactgaaccaagcaacacattccgcgcacgccaagcaagagaccccggcactgccacattttgattagagataatgatatgttaggacacagaaaagttaacatcctgaatctaataagccataagtccaaaggaggatgcagagagtttgggatgtatcagtactgattaagccaaaaactgcagcagtagctgaaccagctccaaccacattgaaaacatcatgcactcctcgagtctcagctaaaaagttttgtagactaaagaaggaagcagtgaacattccaagacgcatccctccaatgagggagccacgagttactcggatgaaccttttctccattgcatctcgcatcaacctgtgttgttcacgcttatcctgtgtactacccatcttcaacatcacttctgcatctttgctctgtttcaaatcacacacacactgatttttacacaggaaataatattcagctaaaagtcttaaactttgatatcttatgagttcagtctagtaccagaagtcactaagttacaccaaggtagtggaatcgaaacacaaatctcaaggacaagtaacgagcttgaatctgaaattgaaagcagacataccacagaagcagaagcttctttgctccctccatatagcaatcctgcaaatactccaacgacagttgctgatccccagttggattt

SEQ ID NO: 52408 - DNA, 801 bp, Arabidopsis thaliana landsberg
gcatgaagatgcaagaaatgatggttgcaattagcagaacaaaagcaccaactgatgcaccgatgatgacaccgagcttcttgcctttatctccaccattttcaagattaaggttcccagagaagctgaaggaagaatacatgagtcttactgagaccgtcgagctaggaactattcatgcaaaagcagtttaaatccgacaatatacttactttgagatcacatctttggtcaggtctgatggtatggttcctgataacacattgttctgcaggtacctgcaatcataaagcaggttgggtgcataagaatgtagattaaaaggtcatccccaccacacaaattaatatatcaaactatcctaaaaaaagcatacagttccttcaggtttgggagtttcgtcaacgaggaagggatctttccggttagtcggttgttctcgaggtgtctgccacagtccattatatatttatagttagatgaaggcaagaaaagatatataaactccaaagaaagtgattttacattatctccaggtttggacaccgagagaaatccggtattggacccgtaaaagaattcccatcaagccatctgccattgacaaaagttgcaacatcagtaaagagaatatctctgtataatcccaaattcaaaagtctaagaaataagtaacttacaactcaaccaaaccactcaatttcaccaggtcagaaggtatatttcccgtcaagttcatattcgacagcttgctgcggaaagaatgaaacataacatagttgaaatatgctgcatgaaatg

SEQ ID NO: 52409 - DNA, 853 bp, Arabidopsis thaliana landsberg
tccttacaaagaactcttattttccatttttcttcacatttttccttgcaaggtcactcattttaatttatgtaaatgatagaatttgaagatccatacttcagcaatctgtttttcttggcatgttgagtttttatcaacaacaccaattattattttattttctctggttcaagaaattgtctaagctccattcaaacattctgtacttatatataaagtttacatcatcacatattgtgcatcaaatagcaaaggttttggcaacatacatataatatgaatcgtgcttgtacacacacacacacacatgtatatatatgtatttattgtttacccttgaacaacatttttaggtaagggggtcttctatcatcaggaaaacataaggtagatgaggtaacatctttagattcgttcgaagtagaactcctatgcatttgatcaaattgttttctaattaagtaatgcaacatttaaaccatgtgcagcgcaaacgatggcttatttaggtggatttgcaaatcttttcactctttagggcatattccaatcaactactgcttgaaatttgactgatcaatgtgatgcaaaattcacggcatggcttgttttagcagctagtttcgacaacctaatcacccgaaaataacaaacaatcggaaatgcagcgcgataagtagatatatgtctgtgatcacccaattagccacaaaatagtgtactatgtttgtgatgttacccttttactcttcaattttaaatacacatctcgttatagtatttttttttttttttttaattttttgtttttttggtaaaactcgttatagtatttcgtgagagtattaac

SEQ ID NO: 52410 - DNA, 585 bp, Arabidopsis thaliana landsberg
atgagaaagcaggcggtgagttgtcgataatagcgaatgagtctggtttaagtaacaacacaatgttttattggcctgtctctgatatggatgttaacactgcgtataagtccattcgacctagatttgtcttggaagtaagtttgtgctttgatgttaatgacttggctctgaaggaagtgattttcatatctgaaatgattctccttttttgtagttatgtatatttttaaggttgaatccaaaggcagagcagaatgagtcgatagatcggagttttctacggttgagagttgctagatgtcataggaagctgcagctggataagaaaatgactgatttgtctagcgaagcgtcgtggcaaaaagcgtggcatctttactgtgagtttggaacactagggtttattttggaatcacattgtgaccgttctcgtggaatttgttttaaaagcggaaaaccagaagggatgatagagtttccgtggaatgatctgttaagagcgcattctctagcgtctggtaagtttcttggtaagcaagtgagtgtgtttgcttcagttacacctccagttcaagcgcccaa

SEQ ID NO: 52411 - DNA, 796 bp, Arabidopsis thaliana landsberg
acacatatatacgccccctttctgttacacactctcgtactgaaccgtcttttttataacgtcttctctgtagatttagaagtcgcagaaggttctcgccaagtcggttcagaagcccactaagaggaagaacacctccaaggtacttacttatcctctttagtacattgtttcaactgattctttacatctaaaagtttcatgaatatggaactaaaattggtgatccaaaagaattattcttgatttcacaactcgaaagtatgctcaggtatagaagaagaagccgctcagtatcgcctggtctctgttatcgcaaccggcggtacagccgcagccctatccgtagccgatctccaccttacagaaagagaaggtcaccatccgctagccacagcctgagtccatcgaggtcaagatcaagatcaaagtcatattcaaaatctcccattgggacggggaaagcaagatcagtgtcaagatcaccatccaaggcaaggtctccatcgaagtcggattcgacatcctcggataatagcccaggtgggaaaaagggattagtagcctatgattaatgaataatgattacccttaagttaagtgtttgttctttttactgagaagggatggtaaagagagtaagtagtttacttctgtaaaacataagcattgtcttttgcgtatgtttgtttgattatgctccaagattgttaaaaatttctgttgatgtttgccgacattttttctttgttgccatttgccgacaaatgttaacttccattatttcgtgcggagt

SEQ ID NO: 52412 - DNA, 829 bp, Arabidopsis thaliana landsberg
ggtaagcctagaaatcaaaatatggaccaggacttttcaaatcaaaagacttgtaatataaggaaagaaaaggaatctaaaaaccttagatggatcatgtttgaagcaggagaagcaccacgacatactcttaaattcacttctccaccgttcaaagggggaaaaaaggccaaagaaacaccaaattaaatctaattctttgctttactctaaatggaaacttcgccaaagtttcaatgaaatgtttaagaaatttcctgaaatattagagccaatttgcttttcatgtttgaattaatctcgagagggagagacagagagagatactaggggagcagagaggagggacaatagcgcactagtggcctagcttttcttataaggttttatatacaagggaaagagaaaagaaaaactatattataaaaatgttaaataaaggcacaacatttgcagagaatgtatagagtttcagatttgtcaggccgtaggataaaatcaaatagaatatcagtcatatcagtatattcctaaagtaccatatcagtagaacactaaaatactaaggtttcttatgtaaaagtagatttgcgaaatttacacagtttaaggcttaattttttttctttctaaaaagttaaaaatatttacttttggctactctaatgaataaattctacggaggcgaccgtacacaattatagagaaataatataattaacatatttttttgtaaaaataattaatttgtaaagttggagaaaatataaattttgtaaagttgggttaaagttacttttttggattttttttaggtaccgcgtagaga

SEQ ID NO: 52413 - DNA, 1062 bp, Arabidopsis thaliana landsberg
ttcttcgcgtcgatcagtactttgagatcaaagacttcacggaggatgagaagctgagtgcgattcggacgtgttttgaggatgatgccttgtcgtggtatcgttgggaacgaggacgaaatccgtttctcagttgggaacagatgaagacaagaatcatcgaaaatttcgcaaccacacacgacctgacacctggagagcggttgctactgctccgacataatgatacggcagtaaagttctgtaaggagttcatcgccctcgcatctaacgcgctggaggttcctgaacaaattttggagatggcattcatgatcggccttaaacctaagatccgtgccggagttaagatgtttgagcctcgaggactcaagaaaatgatgagtacggccaagaaagtcgaggagtggtcgggagacactccggcggaggattgtcagggtttacaggcaaaacgacaaataaaagagaaggagatcgcgcctggacacgtggaggttaacagactaataagtttgggtggaaaagaggcgaacacgacgccgtatcgagcagacaagaacaaaaacctaactgtgccacagagaacaaacgagagtcgtcgggcgtcgtatcacaagttgacggatgcggaggccaacgatcgtcgagctaaggggttatgcttccggtgtgatgagaagtatcacgccggtcaccgttgtcggttcaaggaactgcaggtcttgatggtgactgatgatgacgtggaggaagatatcggagaggaaggcgaggaagagtatgtcgacgtagtgggtccggtcacagagtgcgccattctctccgttcactccgcagtgggcatttcgtctcccagaactatgaagctcaaaggaaagatccaaaagcaaaaggtagtggtgcttattgacagtggggcgtcacacaatttcatctcacagaggctggcaagtcagctcggcattgcgatgcatggaaccacaaagtatggagtttcgatgggaacgagagtgattgtcagaggtaaaggggtctgtcaaggagtccgattgaccgttc

SEQ ID NO: 52414 - DNA, 459 bp, Arabidopsis thaliana landsberg
tctttgactcaactccatccagcagagggtggttttgagacagtttttaggcagatatgtgtagaagaggcagtgaggggggattggggcctgcctgactcagggagtccagtcctcgtcaccagatagccccctatctgatggtagggcttaatcctccggtaagctggttagtgcatctgggtgggccacctgccagtgtcttttatcagtttgatgaatggactagccattgtgcctctggtttaaataagatgaaagtggttaggagaaactagctgtagatttgaatgtgacaccacagactaatgtaggtctgtcaggctttggataactcagagtctccaaatatttgcagataaaaggagacagtttcgtccatctatctgctgaggacggttaggacttaagaaggttgtttttacatgctttggctgagacaagcccctttgatctttc

SEQ ID NO: 52415 - DNA, 1402 bp, Arabidopsis thaliana landsberg
  unsure (1)..(1402): unsure at all n locations
atcccagtttccagacctaaatgcaagcgtgataaaaattatacttggtagagacatttaatcattcactttttctacactctacagaaagttcctccttatttttttagcacatatcaacttccaatttcagcaacatcatgaaacagcaaacctttaaaagcatctgatgatcaaatctaacaatcaaatttcgcaaattctgaggacatacttgtaaacgaaacgccggatatagtaagagagaatcatttgttcctgattagcgatatgaagttgagtttacctggttagattttgtgtgattcctggaagatcagatcgatctcttccgatattctacacacggacagtaaatgaaattcccctacgcccgaaactcccgaagattgaaatatcagtaaccactgtgatcgaagagaaggaaatggatgtagcttagcaaacccaggaaagaaaaaacgaagataaaggaggagaagaagaagaagaagagaagaagagaagatgagcaaaatagggagagacacagcagagagtttcgactttccgattgtggctctctacgatggcgggaaatccgatgatagtgtagcgggaaactaaaataactccaataggtttcggttagaccggtatttaattcaaccgaactcaaaccgaaaccggaattttaaacgaaatcaattttattctaactgatagcactttgtttataaagactagtcgaaaaaacaaacaaatcgaatcacaccaccactaattatatttagtcaaccagagatggtaaagcaatgttgtgctgtagaataaggtaaggttttagttttattaaaaaaaatcatctctaaccagaataaaactcttttgtgttcatggctttcacgtcatgacgactttctcctaatctttttttaaaaagacccaaaccaataggtgaatcaacaacataagacttgattgcaggcacgactgttatttatcacctaatcatatcttcacagctacattagtttgtttttgtaatatggttcaccaaatttgattctagtttctctcgactctccaaagaacacgaaaatgaaactggaagacttacttgtggaagacgaaaccaaagatcaacctggcgctagcgttgcgtctcttcttgatcatcatcgtcgtcacccccagccttcccttcaacaacaagtaagtcaaactcgtatttataatcctatcatattaatttggaatcccaacaatgacatatggaaacctaagttatatcatattatcggttttgttgcagccatcanaagtgaatgagcatangagcgaagaagagaagaatgatttgatcaagaagaagcanaagcgaagtcttcaaagagagtgatgaannatgcaggagagctag

SEQ ID NO: 52416 - DNA, 327 bp, Arabidopsis thaliana landsberg
acactcttgggcattcaagaactatttacttttcggaaggggtgacaattgcgttacggcaatgtcatccacaaatatcgatgaatacttgcgggggaggcggtagaccggcggaggctgacaacacccccatggaacacagggtatgcgatgtgctagatgaactcatgtaaggcggacactttttacaatgtcgacgattatagttcaaacttgtgtggttgtccttattcctgaacaacgggctgagaaagctcatgactggtgatggttggctagcaattggatcagcgctaccaacggccgactgacgcgcttatggaccac

SEQ ID NO: 52417 - DNA, 1002 bp, Arabidopsis thaliana landsberg
acaaatgtttttgccaactttagccgcttgatatgtttgttcaagcataagagcgttgttataacaaaatagtggtctttgtgaagagaaaattaaaccacagactaatcaatcttggcggtagacatatctggatgtccagttaacgaacaaagccatagccaccaccaccaaatccaccgcgaccaaatccaccacgagcatatcccccacgaccaccaccataacctccccttcttgcaaaaccaccaccacccccaccacctcctgaatcagctggatgcactccaattattcgcccatcaagctcctatttaagcaggaaactctataaatggcggattgacataatcaagcaaagaaagaaagaacaatcccattggtttctgaagcagcaacgtagtaccaaaacatctctctttctgtctaaagaaaatgagataaacaaagcaatgaaaagaatggtctaatttcacagtatgattctttactaaaagagttacttatcaaacgagagagacaggagtagcattacaagctatatgataaattgctaatatacaaactagtgtactagaaacaaacttatgtcacaaagtaagaagattttaaggatatggaaagaaagtaaagtgagaaagtaattagactcatgataattagcaaccaaaataagccggaaaattggcatcaccttattttgcatagcttgcattgcgttattagcaacttcgatcgaatcatatgttacgaaaccaaagccccttgataaaccactttcacggtccaaaaccactaccgctgtgaagaacaaagtaaattttagtcagcaatgagaagaaaaaccaatggagaaatgagacagctgtaaaaacgatagctaccatcaacaatttttccaaaactgccaaaagcttctttcaagagctccacatcagtagatggtgagagacctggaaaaaaaaagcaccatataacagaatgagacccttaagagttaag

SEQ ID NO: 52418 - DNA, 1080 bp, Arabidopsis thaliana landsberg
  unsure (1)..(1080): unsure at all n locations
tgcaatggagaaatttgagttagctggaacttgtaaggatgatgttgttgagataataagtgaagattatgtggcaggcaatacattacgaggtaccacgtgatctagttcaatattgattttgaaaaagataggccatgatgtttgatataatcctttttcattgctgcagatataaggtttcacatggaagagattatacagatttttgacgagatatatgaagcaaaacattggacaaatgggatcccttcagaccagttggaagagatactaaagagaagggctgaaaatatatttcatgtgccaaatatagcaatccaacgtggttgaagcggtttccatgacaaagtgtctcagaatgattttggtcattatcttgatcaagcttcatttcaaggtacatatataatctcacgaaattgttaggtctgacttctgaggaactaaatgttgttggccagtgttagggctgaaccttatgttcaagatgataaagaaacttaatcagaccagactatgcttagtccatttcatttcattgtccagactatgctctgtcataactacctaacttttattttacttattgcgactgttataggcaatgcttttacttctttgacctgaaccaataagtgttcacattctggataccacttgggtttgaaatcatcatctaaccacaaaatctctctttgcaggtttttgtcttgttgtggtacaaccaaattcagatttttgtagacagaaagaaacatatatgttctattttgtttgtgtaacatttataccattgattttggtgaggggtgaagcaaagatatcatgcagattcttcttctgccacagggtgagttgtgactttattcattggtttatgactcagattgcatttggcgtgaaacattcatacacaaacaacaaattgntttttttttcttttttttttcattttctatttttgggcccttagcaagattttggtgcggagtcagtcattgtcttgtaattcgttgttacatataaaatttaatgatgtttttgttacatataagcaagtcgtatcagtgtattgac

SEQ ID NO: 52419 - DNA, 1104 bp, Arabidopsis thaliana landsberg
aaaagctagaaaatgaagaaagattacgtggaggatcatttagacaaacaaatgagtggagaggaaatgcgatcattggtaaataaatgtgatcgggtctagtagggcttccgattagtctatttcccaaatttatctctctgatatatcaatttcaagtcacttggtctcatttcttgtgattccaattcgatttcgttattttgttccccatgattcgtgtcccaacccgtatcatatctttgctgtatattttatcagagcaaaaaaaataaaaaaagaataatgaagttgggtatctattttgttgatgtaacttatgtaatatgttgacgttatagcattgttgaatccaacacgaattgttaatgggctacaaaataattacatgggcttcttacgatgggccactaatataaggtcaaatgtgaattacacaataagctgaagacaaatttggaattagtcttgttgacaaaaccaaaaaaagaaattgaaactgggctcaatttcaatccatgtttttaggataacaaatcacacaaagagagactatagaagctagagagagtattgcagaacagttttgaagcattcttcttcctctgcaatggcaatggcaatggcaatgacaaaaaaagactggacaaatcatgttttacttatttgatcagtttcatcccaaaaataacacaaagccatgtctgtaaacaataagacatggattacaacttatgaatcccagagaatagatagaaagacaggtttacttgcgaggggctttcttctttcctgcaatcgcaacggctttgccctttttggtgcgagcgttagtactggttctttgtcctctgcaaggcaatccatgtctatgtctactacctctgtagcaatctacttcgaccagtctctgtatttccgatccaacacgcctcctctttaaaatcgaacaacaaaaacggtttgagagatggaatagatttaagaccatgataagaaagtcaaatgtgattggataaaaggattataccagttcatcaccatgctggtgctggccaacttcttcacggagatcaatgagttcttttccagttaagtctctgg

SEQ ID NO: 52420 - DNA, 754 bp, Arabidopsis thaliana landsberg
gatctatatattttttgttttacctaatattaaaaacatggtaattcctcgattaatactatctacatattatatatgtgtagattttgcttgaattgtttgaagataatatatacttcactattgagaaactttgattatttagactcgtatgctttcaatgcttttaggttctatataatcttttatgaaattaaatatcaaacacttaactatatatgtagatttttatatatcataaacaaaattcttttgtccaaaaaaaagaacaaaaaaatccaaacatttaatgttcaagttaatattattccaaattttagtctatatatatatatatatataatcattccatgcatctagatatacaatttttaattaagatgtgttcaagaaatcggtaaatcatttccgggtccattcaagccaaatgattcaacggagatatgacggtggctttctacaataatatttgattgatggagccatcggaaggattttgaagttttttctttcaataaaaaaaaaaacgtattgcagattattcattattgccaaagcgagaaagaacaaaaaaaggacacatttgtgtttgtgccttcaaccacgtgcctcagagtaaagttgccataattcaacttttccaatccaacaaatacaaaactatcatttagtcaaaactttaccactacatttatgtctataaataacgtaccatccacaactcattgctctttactccaaaacataaaacatt

SEQ ID NO: 52421 - DNA, 1077 bp, Arabidopsis thaliana landsberg
atctccatctcacggcgagtcaactctctaaccctctcggcgtaagccttctctatagccgcaagccttatctgctccgcggcttgccacttcaacgcctccacaccaccgtttggaagctcctccgctgttgagatcgagctgaggctgatggagagtttgaggtcaagatcgtggtggatcatggaggaggaacggtggtgattgttgtgatggtcggttgttataactgttggtcggtgtttccttaccggagattcggtagacggtggagaaggtaaaagctgaagctctttgtgatgatcttgttgttcagccatttttgtattcttgtttgttttttttggctaaaaggctgcacttctcaataagtgtggggatggcaattaccaatcactttatatgtaagctgcttcgtgtctgtgcacatatactatctacttgaaattacacttataaccccttattcgaatatgcatatctttttgggttatttgatcattgggtttttatataatcctcaaagttaacaaacgaccaccgtaccgccattatgtgaatttgttgtcaagtgtggttccatgataagacgaaatgatgtgattgtacaacaatcaactaaagttaaaaataggttagatatataagattttttaagttttgtcgagttacaaaataaatagtcaccaataaccaaatttttagaatgttttataatgatgaacatgttatttgcgtttatgtcgaaataatataaacatgtaaacgcaaacgtgattaatgttgttttttacgttaaagctactatatattatgacataacttgcaattgcaaaattttatttgttttttttttttttcaaaacataagaggagcatacttgtaaagtgaaaataatggagggtaggttagtaaaacgaagatagaaatagggaaaaaaaaatagttaaggtgtagagaaaatctccgttgaagaaaagacagagaagatgggatataacggatcacgttattgaagcatgagaggcttttcaaagaacccttttcactttttcatcatctatctcattttatat

SEQ ID NO: 52422 - DNA, 768 bp, Arabidopsis thaliana landsberg
  unsure (1)..(768): unsure at all n locations
gttacacaaaagtaaattttatttctcaaccgcaaaacttgcttggtcattgctaattgaaattcatttggcaagagacaaacaaaaaagtattacctcaatgtattttctccagtttccaacagctaaaagatgttccaacagtattgcataagtcttgaggttgattccaacaccagaggcaataatcttatagaacagctgcgtgtgtttagtggtacaacatggtttcgttaacattcttttgtaaacaggttggcagaaaagaaagataatgtggaagtctaattagctgatcaactaaaagttcgttgtaccttcatcattgcttcaactttaccactcttcccgaaaagatgcagcatctgattagttaacccgatagaaagcgatggcaggtacggatccatcatttggatgaggtctattgctcttttccattcctgcaagctgcaatgttgaaagaagaagggtgatatattgcnnnnnnnnnnnnnnnnnnnnnnnnnnnnntgtaatgttttaaatagacatacaagaacttacgtgttacaagccgaaaatatctcaaagaagaccgcaccagtgaaggggatttctttttcccgcattaaatccatcaggacaaagacatttgacggttgacctcccttgttgaaagctctcatcaaagctgaacaagcaatcgaatctggctctattccatttgcctccatttccaggaagagttcacaagcctttccccacttttctggcaacacaaaacca

SEQ ID NO: 52423 - DNA, 380 bp, Arabidopsis thaliana landsberg
  unsure (1)..(380): unsure at all n locations
acacgtctncctcctttgtattatgcttctaattttaaaaccaatcattttagatctttgtgctttctggattggattctgtatcctgcgaggaatctatatcatcacttgctttgtctatgatcatttcataacgggaagaaccgatttgcttctcaaccatgtcctgatgttcatacggaatgtcttgttattctccatatgggtaagaaatcccaaaactctttcactgaaaacgtctgaatattatgaatttttgaatcatgatgttttgctgtgaacagatctctgtcataccgggagtgctcggtctccttattgaccttatgatcatcatcccatcacaagttccccctggatttagttactgtacgttggtg

SEQ ID NO: 52424 - DNA, 1027 bp, Arabidopsis thaliana landsberg
actgcgacgcccaggacagtttgaaataatatctttcccacacataataattctctttaatcttttgtactttgtgtatggaagaaggctgtgaaggtctatgtgaccttatatgttatattctttctatcacaggcttgttgaggaagccgactaccgggcaactgctgagctctttggagtgaaggatgatgacaaaaaccttgatatgtttatccccaagtctgaaagcgattttttggaatatgctgaaatgatttctcataggattaaaccatatgaggtatgttgtattctgccttatatacctttattctcattggctagtattgaagctcatgatgtgtgaaaatatattttggtttctgttgcagaaaagttatcactatatagcgctgctcaaaacaatcatgagactttcattgaccaacatgaaagcagctgatgttaaagatgttgttcgtccattacaacgatagcaaatgaaaaactaaaggcagagaaagaagctgctgcgggaaaaaagaaaggtattattctgaatgtgttactcacaatcacttcatctttggtttatagttttatgaatgtgttattctgaatccgtttttcatgaccattggcattgcttgatcaggtggaaagaagaaacaacttattgtagataaggccaatgacgatctagtggctggtccttatgatgccatggatgacttcgacttcatgtagattaaaagagctttttgagcaaatgcaaattggatttgtccagcgtctattttatcatttatctatcactcaaaagaaacacatttttcttaattttggtttgaatagagcaagaagagccaaatttctggttgtggaaatatatagttggaacatgggaagcttttgttttggtttggtctgggaattctctagagtcatgtttttggttctatttgttggttgaaaaagctatacttaaagtgtccgtataaatttattattgacattgatctgattaaatctctttgggggttga

SEQ ID NO: 52425 - DNA, 604 bp, Arabidopsis thaliana landsberg
taaaatacgaatgcatttcacacacacaaaactatatacccatcacgatatgcagaaccaaacaatgaaacctaatgggaaaaagattataggttgcgaacagaaacaagattaaagaaaacgaaccattttcgatagacgtaatttcctcttgttgttcttcttagctaacaaatgctgctttccagatctcctcctcacaatcttccctctacccgtcactctgaaccgcttcgctgaggcctatcaacaaaatacattacacattctcataattccattcaacaaagacttaacaccaatcaagaaaaggaaacacctttactgaaacaattcaaaacttctaaagctaatatgaagttctcagtttcagtaatctcaaacttcaccagatatactcttaagtctatcactatgacaccaatagacacaagaatagccagtgaaccgaagaaaaatccaaactttcaaagcattgatattccaatttccgccactatactctccaaatcatagtacttcacttcaatttcagctcaacttaaaccaaaaccagaaatgcagagaaagtgagagagataggggaaaagtaccttgtgggtct

SEQ ID NO: 52426 - DNA, 812 bp, Arabidopsis thaliana landsberg
gacttgtttttaaatggacacactggtggatcgcgaagaggaggaaattgcatgaaagctagtttcttcctacaaagtaggatagtatctcttgagaaagataacaaggcatacatctcactttggttaagatcagcaatttcacgaccgctttggagttgcatcatcagctcatcaatgacatgctccttgttcttctttttactcttcttcaattgttcttgaaacttatgtgtcttctcttttaggtaggattcgacatttgactctttcttcttctgcacggacttcggtaaagcgaaaaattcgtctaggagaccatgagtcgcctgaggagatggccacaccaatggtccaaccttatcggggctgaaaatgattacaatagcccttacagcacacaatatggttagctctttcacctttttaagtaatcctaccctcattttttgcaaacttgttgctcttgacttgtcattctcgatccatacaagttttactttctttcttgtcatgatcactcttcgatttttatttctctcttttaaaattttaaatgttgttgagcatatgaatgaagattagcgcgggaatccgtttaaatagtgttgaaaagatgagattttggaaaatgatactagtcaaaagatgtaaaattaattgctacttactaaaaaatattgaatgtctatggtaatgttttagttaaaccaaaccttttagatctaaaccaagttgaaaatatcaactcaaaaactagaattttcctatgttttggttacaaagttattttcaaatatcataaataccat

SEQ ID NO: 52427 - DNA, 103 bp, Arabidopsis thaliana landsberg
cagtcaccattcactgtccgatgctctgtcagatcaatgtctagctgccagaactagtcgttggagcgcacagatgccgcaccatactgtctgataggcaatg

SEQ ID NO: 52428 - DNA, 453 bp, Arabidopsis thaliana landsberg
tacatcccatggtcacccactgaattatatctccccttgtgtttttggtcacccacatgtaagtaatgggtatagaaagggcatcacatagaatcttctgagattatctcgtttataactgtgttttgcgtatgtgtgtgaaggctcttactctacatttccagacctacgcgaacaaggtcataatatcggtaacggctgatccaacggtcattcctgaccctcacaagatgtgtgatgatttggtggagtctctcaagatgattaaagccgctgttcttgaaagagggttatatgagattgaggtctaactaaagctcttttgttgtggatcacaatgtggattcgcccgtttcttctttgtctacggctcctcaatgattactctaaattgataccttatgaagttattattataataactagacatattgatataaaagttgtaagaca

SEQ ID NO: 52429 - DNA, 453 bp, Arabidopsis thaliana landsberg
  unsure (1)..(453): unsure at all n locations
cgccggcggtgccgacccccggatcggcgggcggatttacgcttattagatacgacgataagacggctcaatggcggtctccagttcaagatattcggtttgcagcccgcgttcgagccagtgatggacagcgtccacattacccagnnnnnnnnnnnnnnnnnnnnnnnnnaagcccccgaccagcactgccgatgccgcccagtgaccgcacgatgcggaagccgtccttgtcggtcaggtcgtcgccgacaaaaacaggaatcgtgccggcaaacggcggctcgaccatgaaggcgcgcacggaccgccccttgtccatgcctggcgtcaggaattccaccaccatgatgccgcgttgcaacttcaggccggtgcgccgcgccagatcctcggcgaagacctcgaccaccggatccagcgtcggttcgaggcggtaatggagggccacgc

SEQ ID NO: 52430 - DNA, 1182 bp, Arabidopsis thaliana landsberg
tcacatgccagaccattgacattgttataacttataaaagttggtttcctgtgtttagaatcaaacaaaactatagtctaaccgggccaagttccaagcaatcttcttgagaaaccaagacttgatcttagctaagtcacaaactttcctagtgggtttcacccatccgatcagagttatattatatctcaccttaacgttgaactacgaacaaagacattagtcgttccaaattgcttaaacaagaacagtaaaattcttttttcacatgacacaacatgatttaagtttttgcttcttttatagcatgtgtgtgaagttagatatcttaagttacattcgtcacaaactggtagatggcgagtggtttcgctctgcttcatgttggtctaggccaataatcctttcaagtgagaaactgtatctcatcgttccgcttgactacatgtagacattttaagtggcaagaaaactcgtatttctatagactcggagttagtgtaggtttcatcttaagatgagtacaaagaaaaagaaaatagtgatcccaggctaagacagtgtatagactcgtttatagtgtttttgtttgtccatccattctttgctgtattttttagtgtagtgaaagaagacagcgtggcattatcatgattgaagtcatatacagatctaacgaatacgtcaaagattgatttcactttttttacagaattagacatgatgaattttgatgtcagggattagtttgaatgttgggttcaaaacgttaggccagagagagttacagaagtggaccctgtcttataaacgttgagccaaagttacttggtggatttttgctgagagaaaaaggatctaaacaaaacatctgaaacttgcatgtgcacatcattcattatcaatacactatttgctctttcgttatctttggcatttactcttttgtcgctctctcaaactaacaaatcatctaaagtgtaaaccaaagatttgatctttctaataaacccaaacctttgaaaactttaggcttagatactgacagagatacacaacaaagaacaagactttcgaatccaaatacataatgaaaaagcataaaaatggatgtgttcaatgatgaaatttcttattgttttcgggtatgaaaatgcccatcacatttacactgtcacacct

SEQ ID NO: 52431 - DNA, 343 bp, Arabidopsis thaliana landsberg
  unsure (1)..(343): unsure at all n locations
ctccgtaggtagtgctaccggcaatccttcctttataaatnttctttcatatccgcatggaatacgggtgaaatgtgggcagcccgtaaggaacgtcggcatgcatccgcttcctttgagtaccgcgatatccttgtcgttcgatttttccaggtgatcaacggaaagcgctcccaattcaaccgctgcttttacttcacccataatggaaaaccgattgacgtgcactttggggatcagccctacttttttacctttccaaaggatgttttgcatttcttccacctagaaataattgcgttctcaaaacacatcgatgttatctgccaatcccttcttttgc

SEQ ID NO: 52432 - DNA, 499 bp, Arabidopsis thaliana landsberg
taaccgagcacccatcggactatgatcaattccgcgtataaatatgcaacccctaaaagtctcctcgtccaactatcaagcaagtcgcgccaccaaaatagcagggagagaaagctagccgccgcggctattctagccggagtcgcgattggcttccatggtgtaggcgcggaattctgttgggctcggcgttggcgtatggcgcactccgtgggggctgggatgcctgggccatcggcaatttcacgccggaacccgtggtgaccgaacgggcgaattgacgacctctacaatcgccgttggtgttcaaggccaaattggggcctcggttccggacagaaggtttcgccggggcccttgtctcgtgtccgttgccaataacgggcccggaggatgaccggagcgcgcccagttcgtcacggcaaccgcgcgtttgcaattcgccgtgaaccgaccgaagcagctccgtacttagggtaaggacccgatctcctggctc

SEQ ID NO: 52433 - DNA, 888 bp, Arabidopsis thaliana landsberg
atcccttttggagtgggacactatcgttgaaactaaactgatctacgccattcattgtttgtgtctctctgacgaaaggactgaaatcccgagaaatcagtttttgtttcttcatataacacactttgacttttcgagagcgtttgagttatgattatttgtacaattacagtcacgtcatggtcaacgcttcgacttaaatcggggatatttccataccacagaagatgagaacggtctttaaacaatgtcgtgacggctctaaaacgcaccaccgtaacatccatgtaaaagcacgtcttcttgatcgctagatacaatatttacacaatatacattttgtcacgtgaatcggtgaatgtgatttttttttgtaatcgattagtatgaccatgcacaagattaacaaaaaaaaggaggctgggaggctggttataaaatattcgtaagatagctactacacatgttttgtcatattgagccacgcataagatgaatacagctacatttatttttgtgtatccatatttttatcctgatcgtgttttatcttcgtacgtataccttttttgaattgatcaaccggtctaaggaacattcggctctaagctatcgacaagtttctttcattcatccgagacacgtatgacttggaaatgttgagttaagtctgacgtgtaaatttgtggttgtcatattcgaaaatttagtttcaccgcaacacgttttataaagtttatctttttccattttagatttaatcaactgtgtttataaaataaaatcataaagttacattttagtaaatcaatgcggcaacattcagatttcaagacatactaaaagtctttacgtaaatttgaattttctattcattataatttaacc

SEQ ID NO: 52434 - DNA, 550 bp, Arabidopsis thaliana landsberg
ctcttcaaaactcactaatgtacatgtgttttttttttcttttaacttggaggctatttttttttttttttgtcgtaaaaaaattatatcttcaagaccggctttgcccaaaagttagtggtttcatgaatttataatgttagaaaaaaattagaaatataacgttctccaaagcccaatagaccaattgtattttgatattcaacaaagggccagtcctaacctagtgtataagacgtaatgactagattagggccactataatttcctaataggcccaataacgaggatcctgtacaaacatatgacttttagagatttcaacagaattttttttatcaaatctcagaatactcttcatatgctgcatcctttatgcaaattcagcataaatctacgagaaaaactagcaaaaattgatgtttagttttacaagaaaatgatcactaaactacaataattaatcataatcagatatacgaagctaaaacaccgttgtgcaacaaatatacgtggctcaacactaaaacacacttacaaagacagtgtt

SEQ ID NO: 52435 - DNA, 801 bp, Arabidopsis thaliana landsberg
cttcttgtgtatccaattttagagattcgtctccgttttctcttcttggtctagtgacttttaatcggtctcggtttgagccgttttgaactgaatccgggtgggaaatttacaattctcccatatttttttctccttcagagggcaagggggcctccatgcaacaggcggcacaattcgacatatgccatatgattctgctttagagcgcaacttctctatgtaaccaagtggatcatcaaaatcctgaccatgaagcagtatcataaggatcaaaattttcagataagataacaatttaactaccaagacagaaccaaaattgcaactcgagtattttaaatacctcattagtgggataaaagatgggagcgtcatcaaccaaaggcctgcaagcttctgatggattccacctagcagttatcttcaaatacgcaacaaaacgatatcattcatgaatcagattcatctgctcttggacaatcagatagctaacacaacaaacaatctaataagatccagatgagattgctaaattcttaagacccaagtaaatagattttgcttaatctaaaacaaatacaataagaacgactctcagaaagatgagatctttgaaggaagattcttgataagcaagagccacgaacttaattaaaactagaattggttggattttcagactcaaacggcgttagcacatagataagccatgaacctctttacccaaccaatactatgctagaaacccaattaacttactttaggactagaaggagtagagtcaggttcaagactact

SEQ ID NO: 52436 - DNA, 738 bp, Arabidopsis thaliana landsberg
cttctcaacgttaagctcgatcatctccttcgtagctttaccttgcagaggaatcttcaaacaaccatctatggactatggtaagactagttcttgtagtaaccaacttgcagcgatatgacacagaagcatccaccttgacctgaagattcgctgcgcaggatccatagttcacttcaagaaaagtgaaactttttcctagctcccttcccttttttaacccacccgctggtttggaatttctcaccggctaatcctgctgccgtccggtcgacacaaaatcgatcgaatacgggtccgactcagagaacagagattctgcaccgtcgatgacgaggctccgtcattttccaaagggacggcggctaattgttctgtcggcagcggtaggttatatcacccatatctctcatcaatataatattaatattattattttttatgtcgattgttttagttaatataaacaattaaaacaaaaatttattttcatttcagaaactattgaatattttctatttttactatcttttattaatacttttaaaacatatcaaattaattttttttgttcaattgtattataactattgactaattagagttattttgtagaaacaaaaataatttaatatttggtaagagtttttaaaattttcttttattgtatcaactaaaacaataataatttattactttcaattcaaattaatattaatatatataatttaacatgta

SEQ ID NO: 52437 - DNA, 881 bp, Arabidopsis thaliana landsberg
catgataaaataacattaaaagacaaaatcaaaatataacaaaaaaatggtttccttgtagattttattacgcatattattataaagataagcaaaactatatacattgcatattctcatatacatacactagctagtggagattgactgggtaacttacgtggaagatatgttccacgttgacgctaataatggctaaacgaacgacacgaggatccacatgagccatcaactctgtgacttgccgtttcgggtctctcagaggtcaaaaccctcccttagctagttttcgagtcttcttcacattgaagaaagatcttactattatattccatttttattgatcttatcaatacatcaatttctgtagctgttgaatgaatgttctcatttgttatttttggaaaacatatatcagtgttttattaaaatactaagcatgagttgatttaaattcatcatataaaattacgtaaattaaaagactatttactaactttgcaaaacgtcacatatttgcagtcggccagtgatgcgcgtaagccatgcaactattgtaatctcccttctcttccatctgttatgtcttttctttcaagttttaatatttctttcgtataaagaattaattaattaatgtatattttaatcatcttttcgatgaacgtaaatatccacgtataagtctttatgtacattcaatttttatatacatatgtctatacttaaaatcttagatatacgttcacatgctgcatgtcgacattgtagaggtcctcgtaattggtctatgcagaactaacaacgtcaattttcttttttataaagctttaaagataaaattttgaattaaaattttatggaagacaacccaccggcca

SEQ ID NO: 52438 - DNA, 322 bp, Arabidopsis thaliana landsberg
ccattcggggacaagtgagactcacgccgttgtgccaaccgagctttcttttgccttatgagaggggacctactcgacgtcttagactgcgcccgtcgatcagtgctctaaacgcatacaccatatgcatcctcagaagaggagcgatgaactggggtggacccctccgagaaaattagatgcgttgggcgagcagcgaaagagctggctgacacataccgtgccaatgctagggacatttatgccgagaaggaaaccaggctcaacctgatagggcggatactgtggcgtaaagggtgagacatggaaactatggacgaga

SEQ ID NO: 52439 - DNA, 1148 bp, Arabidopsis thaliana landsberg
attttggtcgtattgtttgaatttcgtatgccactgttgcattttttagaagggctagagcttcaagggtatgtgattcttctttgaaaagaattatgtttgaccgctaaccagtattcatggtcatggatagtctcactatggtcttcaattcgatagactctttgtggccaataagctgcaaccctataaaaatctttttggtcacaaagtagttccatttgtaactattgttcggtatggctctgatgagtctatttttcttcagtcgcattgtagtaccaaaatttgttagcatgataacacaaactaacaaaaaattcaaagttcattcacttttcacacaaactaacaaaaaaaaaattcaaatttcattcattgatcacttgtcacttaaatgatgagtacccatgagatgaggtaggaaaaattgtggatgaaaaagtaatcaagaataacattcttgtgactagaaaacataccaccacgaagcaaaaaattagcaagttcgttatctccaagttaggtagagagacgcccccatgataaagactcaattgtcaattttgttttgctgattagatggtaagttatgaaacatagtttaagaaatttcttgaaacaacatggagaagcgcctttcttattcaatgttagaaaactttttccagtcgagggatgtacgaaaactcgtaagcaaaataattggaccaaaagaataaaaatccaaatattactttaagatttgaacaaaaaaaaaatcaaaacctaaatatggtaaaagactggtaaagattcggaaaattgagtttagtatttttttacttataaagttatacttagggcataaaatagtattttgaaattctttttgctaagcattcaatagaaattagagagacgaggttatgattattgtattatcaaaattataattagaagaagaaaaaaggataaagtattgactataaactacataaccattttcaaaataacaaaaaaaaatatcttattacatgcaaaagatctcaatcttcgttataatgaaaagaaaaaaagtattatattaagacttgtaatagattggactgaattcacatctttttccaatgagttttaacttttttgtaatatcaattggttttcca

SEQ ID NO: 52440 - DNA, 474 bp, Arabidopsis thaliana landsberg
  unsure (1)..(474): unsure at all n locations
acgaacctgtccacctcgcgaatttcttcatcggttgtcccttttaggctttggcgaaaggaatcagcttttcatgttcccaaaccgcaaaagtataatcggtataaagttcggccctgcgcccgctgcctttttgtgcgtaaaccattacagcatctatgctcagcggatcgactttccatttccaccagtcgcctttttttcttcccgtgaggtaggcggcatcgcggtgtttcatcataaacccctcagctgctttttcgcgggagatcaggtgcaattgttttaattcttcccacgtattgaaagaaagtaattcggaaagtttgaaaacctctgccgacagcgattgcctgtggatctcttccagtaactttcttctttcggattgtggacggttgcggatgtcctcaccatggtattccattatatcnnnnnnnnnnnnnnnnnnnnnnnnnnnnnccagtatttttt

SEQ ID NO: 52441 - DNA, 935 bp, Arabidopsis thaliana landsberg
tgtaatcaatatttatgacattaggatatgaattttaaggcttgcattataacactgaattagttttcatctgaaatttagaagggatatgattttgtcagtttttttcccaatatgtttgcttcatttggccctaactcattttccaattccgtctttgatcgaataattcacgacaaatatatcatacattaactacacacaaaattgagttacaacgaggaaactcgtaatcgttaacatagatcgaataacaaatgcttcttgatagactatttcggctactaaattcttaatctctctcaacctaaatttgaccttcatgaataatatgttctagtcctaacatttcttgaactttaacttgtaaatcttcctaaatatttcgtaatcacaatttcaactaactttttcatgttcataggttttgaaagatacttatcaacaataatcttatatttggcgtctaacgatcgacatttatttcaaattaaactagttatatgttatacgttttggtctattatgttttcaaaatttatcggcttaatgttgcaatatttattgtaaaaccgtcttttttggtgcatatattgtaaattcaaacaaaaacaaaaattaccaaattgaaatttcttcaacttccgtgatattcgacaattacagaaaatatacaacattcgttatatagttgaatcaacacagataacttgaaaatgtaaacagcataaaacaaacaagaaagacaaacaaatttcctttcttggaaatttggtcttcaaaaatttctcttaattgctttattggggttacatttgggtattgttagtcacacctttctttacttcactggtaataccaccaccctccacttttgtcgatgtgttggtgatcggcagcttctgcattcctattttctcttccaccgatatcac

SEQ ID NO: 52442 - DNA, 866 bp, Arabidopsis thaliana landsberg
atacattacatatatatatatatatatatatataattaatcatatatttcatctatgttgtcaaatgaatttctcactggatttcttctgcgtattgttgttcccaccaagcaatgacataaaacaacatgataaaacatgtagaaatgagtgtcacacgataacaaattaaatcaacatgtgtaatcaaggcctacttaatgaattcagagttcgtgaataaatcttaaacattggcctttttcatactaaaccaaaaaaaaaatttggcccttttttatgctaaaaaaatcttgaaaatctaatcaaataattgggccttaagtttacccaaaataattgaacttttagtgtcataatacacagagcttacgtctaagactgatcaagaaaagtttagcatcgaatgatgatgacaagaagatcaagagtgttaataagtggtgagatggatatatacaatttctcacattaccgccatgaggcaagaaagaaacatttgcatgcgaaaatgcaagtaagaggatccaatcatggatgaaattgcggttgatgagagcaagtagataaaatcagcaaatgttggaaaaaaggttccaacaacacaagctagtggcacagggtatgtttggattactcataaagaaggaaatggcacatggattccaattttatgttaagtttaagaatcccacctcaattgtaagagatatttcacatgttggtttatcaaaaagatatttcaaatctatttcaataagaaatctaagtgcaagtcgtaaacacaacatagagaaatctgaagttatatgagagagagacatagatagacaggaaaaaatcaacaaaaaatcagatgacctccc

SEQ ID NO: 52443 - DNA, 560 bp, Arabidopsis thaliana landsberg
  unsure (1)..(560): unsure at all n locations
cattccagtttttattttggtttttgttttttgccttgttggttttattgttgaatgaatccttttttagttttggtttggactttgaagctgattgattacgctctccaagcagtgttatacagtatactgtatttgattcgatttagctgcaatgtattattgcgctaaaaaccattctacttgttgggctttattaatatttgagaaagcccaatcaaaacaataatcagtcatggcccaatttatccattaccgcatcccaacaatgaaaccagtaaagatctgcggtgaactcatcaatgattcaattcatcatgaacatcgaaaactacaatcactactcactaggattacatatagcacaacttgaacttgaatactagagaaaagagaaaatcacaaacacacgtgacatacacgtgtcaaaatctctgtcacggacaagaaaagannnnnnnnnnnnnnnnnnnnnnnnnnnnnnnnnnnnnnnnngtggctccgttggtaagcgcggtgggtgtgaagaagacccttggttttggtgaatacatttgtgg

SEQ ID NO: 52444 - DNA, 609 bp, Arabidopsis thaliana landsberg
  unsure (1)..(609): unsure at all n locations
ttaaatctagttccaagtcatgaaaacttacttgttccctggttatgatagctagttcaccaggcttgacaccttgggtgaagaactctctcgccgcgtatccctgtgaatcacaacatcccaaaacaacaataaattgggaatctagttcctatcttcccgtaatcatagaaatcactagatctagcgatacaatctactctacttctcagagtgataaggatacaaatgagcagtagtacagtgtgatgattcgtaagcgaagagattgaggaaaaaaaacaaatccgatgaagaagaagaacagagagagacttacggcggcgacaccacctccgacgatcacatacttgaagctcttttcttctgccattgatgcgatcgaatcgtctctctttgatttgtcttttttaccttttcttcgtctttttggatccgagaaatgtgattgggtcagaggtttttataggggactttgtccagtatagaaggaatctntaaacgtggcttaatttaaaccgttagatatcccgcttcgtgcacaaatcataatcgaaccgtacaagtcagcgtcttatatttttgacccggtcttatntaacacgtgac

SEQ ID NO: 52445 - DNA, 977 bp, Arabidopsis thaliana landsberg
tcaagaacacttttaccttttttatttatttcccaaacactttttctatttagatcaaaatttcttatgaataatagttcgtcaaatcttaaatctcataagacaataaaatatggggtatgagaaaaaggtaaagcgtgtagtaagatctaaaagaagtcaacgacttaattaactttggggaagaagaagtggcaagatgagatagttgcggatcacgaaagtcgaagcccaccacgttccttaattttattttaccaaatttatatttgactccaatcaccatactttcaattttgcaagctatatttgaatattttaaaatctaaagaaacatttttatattaatatttctggccagactttaggcttagatccaccactttatgcttcctactaaaatatccatccatgaattccatatagtacaagacctttcaagttgaacttatttgacttatatttgttaaaagattgtaagaaactacagcgaatttttcaactcatactctggttttaaaaaaacttttacgcatatattatttcaaaataaaaaccgttatttctcaaatgatctttctaaaaaaatatcccaaaaaaggtacacaaataaatagagacactagcatgataaatggcgtgaaatactgaagcaacacacttgcttcgtttacaaactctactttgaacctcacgttccttaagcttctctaaagctctttccttgaaggttaaaaagtttcgtttttatttaatttcttactttcctctgcttctcaacatctctaagctttcattgaacaaggaatatgaaatcttctccaagatcagaaggaagaaagttcattatcccttctttcttcttcatcatagctctttgtgtactagctttcatcaacgagatcagattcgatagcttattgagttttggaagatgtgctttgtcaaatgttcctatgaataatggttcatcagag

SEQ ID NO: 52446 - DNA, 1085 bp, Arabidopsis thaliana landsberg
  unsure (1)..(1085): unsure at all n locations
gaaacgcacagttcttgtaggttaggcagatgagcaaggtatggtgttagtgtttcactaagttggttgttttctagatgcctgcagggaagatgaggcaaagtaaagccttctggaattcgagtgtcatcaactataagaaaactattggtcaagattagcaagcttacatgattttcaggttgacaagtttgctcatgtctggaagagttccggtcaattcattatcgtcaagccacctatcaaagaacaagtttactcaacaaaagaatgacagagagactaatacaagatgatatctcaaatgcagcattgaaccgctcacaactctgtcaatgcctccatataattgatcccaggcggaatctcacccctcagatttttccttgatagagcactgttgtaagatgcacacaacggtgtcaattatgaataaaaagtttcacaaattttttttacttgtgtaaaactttgtttaatagatcttacattttcgtgactcttggtggtgaagttgagctacagtttacccacgaccaaagaactgggatacaagggtctcctccttcactggcccaatcgctatcaggggacatcgaacgaattgcatcaagaacagacactgcaggattagaaaacttctgtaaactctttatcaacaaattttgatttgcacatttccagcagcatcatagacnggaaaagattcatagaagaatttacaaggtagtagtagcctgtagtactcaccgtcactcctatcagttttcacggatattggtagatacttgctaatttcaattgcatttaggagtggcccttgcgtagaatccttagtcttcccaaatgagaacgtcaaaacaaaatccaaagtcacattcatatagctaggttcatagagagtatagctcccattggcattctctgcaatgttcaccactgcattactatagtcaggaaagtatggctgcaccaacttaaatttccgggtctcgttagcaccaagttcttcaatttcagcaaaataagcatacgcacgagcattggcagggaagtcttccaggttcaatctatagctgatcagt

SEQ ID NO: 52447 - DNA, 1271 bp, Arabidopsis thaliana landsberg
  unsure (1)..(1271): unsure at all n locations
tctcagcatggactgttcattacagaggaggcttagctctttcttctgataacaaagatcacatctttaatgtaattctctctcgattgttgttttgactcacatgtgaaatggattggatgaaatgttcttgttgctgtatctgagattcatatttcttgattgtgttgttgagatattgaaatttggattttacttttctgtgtgatcacaagctatgatctgagactcatttttggatgtataatgtcatcattggaagatatatatctgatgatgtcaaatatctttgtttgtaggttcatccagtgatgatggtgattggannnnnnnnnnnnnnnnnnnnnnnnnnnnnnnnnnnnntgtttctttcttgaagatgttttgttaagagtttgtagtatattaccgtctggcgactattctaatgtcaagaggttttagtattcgttgtatcggtttttcatgttcgatttccgcatacttcatttgtcaaagagactgaactgttgaattgccctttttaacatttgagtacattaaaattttatgtcaagaggtttagggctcataggattagttttttttgtttagttacggcattgttaattttgtttagagacgatggacatgtttttgtttgtaacgtgttggataccttcaacttatgcagcaatgttagcatataatgtagtgcaaggtacaaagaacttgaagaaactggttcatcttacactacaactcacagcatttattctaagcctgatcggagtgtgggctgctctcaagttccatattgacaaagggatcgaaaatttctacagtctccattcgtggctcggacttgcttgcctctttctctttgcattccaggtacactctcttctgacttctcttaaaataacaatctccattactcagtaagaataaatatcaagaactcattcaaatcttttgttacaaacagtgggctgcagggtttgtcacttattggtacccgggtggttcaagaaacagccgagccagtttgatgccatggcatgtgttcttagggatttccatatatgcattggcgttagtgactgcaaccacagggatacttgagaaggtgacgttcctgcaagtgaatcaagtgataactcggtattccacagaggcaatgttagtcaacacaatgggcgttctaattcttgttcttggcggtttcgtgatactcggtgtggctactccggtcagtggcaaggatcaagttctcacacaatagagtaaaa

SEQ ID NO: 52448 - DNA, 619 bp, Arabidopsis thaliana landsberg
  unsure (1)..(619): unsure at all n locations
ccccccccccccccccccccccccccccccccccccccccccccccccgngaggaatagtcaggccccccccgccctccccttccgccggcccgccccccccccccccccagcccgcccccccccccccctttttccccccccccgatgtccccacgcggccccccccacccccaccccccccccnccnccgcccccccccccccccccccccccccccccccccccccccccccccccccccccccccgccctccccccccccccccgtccccccccccccccgcccgcccccccccccccccccccccccccccccccccccccccccccccgcctcccttttctccccccccgggcttgttcgggcccccccccccctccccccgcccccccccccccaaccccaccccccccccccccccccccccccccccccccccctcctgccccccccccccccccccaccccccccccccccccccccccccccccccccccccccccctccccacccccccccccccccccccccttcccccccccccccccccccccccgcccccccccccccccccccccctccccccctctccccccccccccccccccccccccc

SEQ ID NO: 52449 - DNA, 703 bp, Arabidopsis thaliana landsberg
tggaatcactttgtgcttgtaaagacgcttcactcgaagaggcagaagtatcaagtctcttggtcagaaacttcgtaatctgattttgaatgtttcctgtagttactatgtgttaacgtcacctcaaaagaggacattgttggaaaaaagttttatggaactggaataaatttgattttcatctcacagaaatgtatctttttgcttacactttgatggtgcatttactctgataaaaaagttcagcttttcccgtggttatgtaaccactctgttttaattctcaggtgtacaatttcctttgctatctatggctaaaaccctttttactcatgtccatgatatcttgagcaacacaccaagctttcagtcagagtatggtaccatactccgccatcttttggaaattaaggagtaccgttttcaaatgaggaagcgtacatattccagtgagttctcttcaattctatatccattaattgtcttgtcttgtcatgaatctgaagcgtatggtggtatgctggtgctgtgtattattttaatataatgtttctgcaaggtttggtgctgctatacatggaaagggctgagacagggttttgcgagaaaaacagtggtcaacatagccagaaggaggaagcttttcgctatattcttacgcttcagtcacttctagaggacttccctggtgattttcctgatg

SEQ ID NO: 52450 - DNA, 1002 bp, Arabidopsis thaliana landsberg
gcacactctatctctgattccaaatgtattgtggaagctgagttgtcttaccacatccagtctccccagatacaactatcacctgagaatttgagagttgagatcaaaaaattaatttccatgcattgctgcattgcgaagatatcccgctctaaaattcacctggttccgagcaatagcttgaagaagtctttctttgtccttgaatgaaggcaaagttttcctgaattccagcatcgtccgtccctcaggggattcctattattcaaccaaataactactgctatagcagaaagtttttgataaaaagacaagaggcgtggggtaaagatgattgagtaatacctgccaggttctctgcatattgcgcatccgcatactcctcctctgaagtaccttctccataaaagaaccatcgagaaacgaatcagaattttcatcgggaagttcttcagtctgtttaggaggttgagaatcagctacgcattcattagcctttcctgagcttagctgctgtctatcaagatgttcctggaggagtccctctacccttctttgcaaactcaacggaagcaccacctgcacgatgagatgcattacaatttcagcataaaactacaaataaaaactgtgcattatgattttggtaaaccaagggagacaatgttacctcccgttgtggtcgcttatcatccaaatctggtcggtagttaggaagaggaaccttgcttgcaacaaccacttttccataaatttcactgttaaattggaaccaagaattgggttagcacatagcgcacacaaacacatagggttatttgattccaataaaagtcaggtttctatacctgtaaagtcccattctcttagcaagatttgagatctgctcataatctcttcgatcccttttgtctctgaaaacaatttcttgttcactatcattggccaacaaaattcctaacttccacttccactcatcaacattggccacagaagatgaag

SEQ ID NO: 52451 - DNA, 621 bp, Arabidopsis thaliana landsberg
ttacattcagagattttttggtgatgatgacacatctatgatttggtacttccttttaagtagtaacaaggtaggtcttaaccttttgtcctttaaaattatttatcatatgataattagagatttgtgtggaagcaaaggcataatgaatgactcatcaacatggcctaaccgaagcgtaccaaattacccaaaaaaaaaaactaaatggaaatgcgaatccttaccaaaagattcctttcgaatcttttagtttgcctaaaccctcaaaatgaccaattaaccaaccaacaaacaaattcggcacctttttgttgccttcatttctcactttccccacaagttaaaatcattacactcccacaaaaaaccatctttagtatgttttatcataattgtcaatcttttacctaacttgactacctctaacttcatgcaactgaactaactagtgtgttcaagataattggtgcaaattctagcaatacttggttcaatggctcttgtccatttgttctattagattaagaaatcaaagtccaattcacaattgttttaactaaattgttgtttttagataatcaatcatgactcatattataacatataatcaatgaataa

SEQ ID NO: 52452 - DNA, 1022 bp, Arabidopsis thaliana landsberg
gaaggattaggtgagggaaggcacgtgatagtatttgccttacgcaagcactggagacaagagggcaagcctcggaggcggagcacgtagaactgtccccgacaggcttgcatggtttacatggtccacacgcattcgaacagtcaggtatgcttgatccgctcgccttttctacaacctcgcaaatcacaatacaacaaataaaagaaccaaccaagatgtatataacacattcattgtctctatttataagccatgtaatagccaaataatacttacagtgaaaaagatccaactggaaagtatcactactaacaaaaagatggagaagaagaaatcgcgattaaagataccgatttcattccgaaaagattgaagggtattatttttagaaatattcttaggttctcatacatagaaagggttttgaacaaaagaaaatgaggtgaagagatatataagagagtgagagtaaagattgaaagggattttaaatgaaacagtgttggattcacatgatccatctctctcttttcaaaggctttcacattctttgatcctttctcattaatttgaatcttgttactattttgttttatctaatttggaatactgataggcacaagaatgtcccataataaaaccctattcgaaaggtactttttaaaaatgaagtaacaaaatctcagatgtctcgtcatcatcaagtcctacatgctatcaagcgtgaccctttgagaccttgcttttaatgaagtccccactcttgttacaacccaatataattcactctcatttactactccattctttcatataaaatgtttataattaaaaaaaaaatcatgtagaatgagatttctacatgagagtaaattagaatgagatatcttcaagattcgtgacttggtgacaaggacaagttaagaacttgtagaagaactgatagagttctctttatttagagtgaacataatatcaaattaaaattctaacctttgaaatattaccattctttgtca

SEQ ID NO: 52453 - DNA, 1290 bp, Arabidopsis thaliana landsberg
agtttattaattattaatattaatttatcttcaaatatcaaatcgtcgttactattcacaatgatctatggttcaatgttttgttatctaaatgagtcattccatgagatttcaataacaataattttaatattgaaaatttagattacaatattacccggtagaatcctactaagccgagaattaataatatatatgtggaatctccaattataaaaatgagaaccttttttttgggtaagagaacgcatagaaagaagttttccttgtcatgactcatatggaaagaagtttcgaagacatctaatgtaaggttacgtgtacaaaatagtacaaatattttagtctcccctaatcgaatatttaatgtaatcaacctaactggccaactcttataattattgactaatacaaaaacgaaagtgaagagtcgtcattcattaaacgaacaaaaaacatgcataacgtgtctagcgagaccggtcgaatttgcgatgtgttaggttggtgccggtgatctcttcttacaagtttcgtttctttgggtatgaccgtcacgtggcggtagtagtggtaggtctgtttcatgacagcttcaaactgcaacgtgtcgtagtatagttcgattgtcgtgctttatagctgttccaagcttggtgagattagaactgctctctttataccaaagaggacgtgtgtaaacatcctatagcttatcaaaaaatatcaagatgaaattcaatattctatttttgaaaagaaaagaagaaattcaatattctattagtatcatattatatatttatattatatgctaccatagaatctataaacagagagaaatttgttttcaatctttgcatattgccaccacatttataggatgttatcaattcttccagattcaaaatttattgagacaaaataataacagctaatgtacatgttttcgattcgaacatttatacatgtttgatatttacaatatggaactaatgttaggatctcaaacatgtaaaacgtttagcaaagtaaatatttataaccttgtaaaactactgaaccataaaaatctgtcaaaaacattcgataagaaacttttcatcgaatgatcaaatgggtataaattaagattccaaaagatagaggctataattgatgattagaaaatatttggtggattcaaagaacaaatggggaaacaaaaaaagaaaatatgatggaaacgtggagaagcgcctaattcgagtcatggagaagtcaccgaggaagcatcttacagtatccacg

SEQ ID NO: 52454 - DNA, 411 bp, Arabidopsis thaliana landsberg
aacccaatcatctccaccctccgattatcttcttgatgtcactacttacagacaaacccaaatttgttccctacaaagccttttaaaacataacctaactaatacataacgaatacaacagagagaatgcaagagaagcttacatacaagcacatcgttccggggagagagtttggagagaccaaagagacattgagacactagagatgacgcttcaagagaccacaacacagagttctccttacttaaaaggctaataatgtcttgatgaatcagaaactgagtatctcaaattctcgataccccatatcaacggatggatcaaagcaaaccaaggcttggtcgttgggttacatagcagtcttccatctgcgctcttgtggctacaacagactagtcgaatcctccaat

SEQ ID NO: 52455 - DNA, 850 bp, Arabidopsis thaliana landsberg
aatcattatttgatataccatcatatatcgataacatgcataagctaatatccgtctaattaattaaaataaaatcattatatacttctcgctcaatatgagacagttcattgttatcattgagtatagcctctgcaacttctgcattttcaacactatcgccatcaccatcatgctgcacatacgatgtcatttgctcctcattctaaaaacgtaaatacgtaattaactaattatattcatttttccatggaaatcaaagatatattcttccatcatgatgaacagaaatggataatatatatctacttctgagaaagatgttctgtaatatcagattcgtttaagtcatatgtgttcttagaggaaaataatggtgtcacctctttagatacaacaatatgatcatagtcatgattgttcaaaatcatagttgatattctatattatttcttgacaaatctattagagtccaaatccctgaatctttaagaaaaaaaaaaaaaaaacattaatgaatctcaaacatcaatagtaatgaaccacgatttaaaacctgattcataagaagaactaactaatagaattgatgattgtgattttctaacgataaaagaacagagcaaacaaaatcaacacaattgaaggagagaaaagggaaaaaatcttcataaataaaactagagaagtgatcaatcttaataaatttatatttcactccttgatatcatcaaattttaagataaaaatgaaaaatcttggaatccttgatccaatttgatttttgattcataatcaggatacaagttataaacaaatgatcatcttgaatcataattagacttcacaa

SEQ ID NO: 52456 - DNA, 1333 bp, Arabidopsis thaliana landsberg
  unsure (1)..(1333): unsure at all n locations
aagatatcttatcatcctcatgccttgctattttatatagtaatggatgataaatatacacattttcaagtcttttagtttcccaggttccacagacatcatgtcgcttatgtctctggtggatttctaataatccacccccaactgatattttgggcatatgtgatccgatttggtacacgaagatcttatactaaggcttaacgacggctcaacgccggaataaacgaccagttaattgagatttaaagtctgtgatgttggcgacatgaccacatatacgtcgtatatatggccatgcaatacataaacttgaggttgctgaatatcgtttatgatagtcgccatgtgtgaccatgttttttgccacatttcgtgtagctggcgctcttttttccttttactaaacagccctagctcggccacataattggtctgatttggtaatttcatttgtcgaccttaattagtttgtggcgtttgattaaaaagataacatggtacgcttcaattctccttgtgagctagcttatactagttagttactttccatacaactaatcatatatattgctaatggtttgttctacactttctaatcgaatcgtctaacacgcgtaccacatgtaaatcgtatagagccacgtcttagtttttttttgtttttggtctttctaatcaatttttatagatgtgtgaacttgaatcttgatatgaacaaagttgtgaacttgtgtgatacaatgaaaagttgaaaactgtaaagacaaacatcaaggagcgtaaggaatactgaaaggtgaaagcttgaacactctcatacgcgcttgcttactctacaccgttgactaatttttcacaatatacctgttttacccctgaagctaaacccacacacgcctaaaaggtaaaggataaatatggtatttaaatagaaaccgacaacaaaaagaagatgaccgtttgatagatccgcaaaactcaggcgtttcaaatcattcaatttccaaattaaatcgcaaatctaaaaaacaatattttgtttccacttccaacgcttgaatccgattctctatcaaaatctccacttgcattattccaaagcaatttccaaaaaaacccactaataagagagagttctctgattcttctctagttgcgtacaactgtagaaaaaccctaaaacagagaagggttttgatggcggcgaatcgtgtggcgatggaagaagatattactgaatctgtgactntaatggtggattccgtttcttcttctccgatgactccgaagactgtgacggttaaggaagatgaaactcatcatccttatg

SEQ ID NO: 52457 - DNA, 1078 bp, Arabidopsis thaliana landsberg
ccctaatcacaaagaaataaccctttttatttggtcttttttttttgttcttacacaagtttttgggaaccaatcaagatatcaacaaagcaaaaatcaaacaaaaacagatagacacaatctcaaatcaaaatcaaaaaggaaggaaataaataatcaaaaggatgagggttctttcttcttctagtgctctgtttcttcatctcgtgaaattcgttaatttgtcatttttttgatctttttaacttaagtatctttcttgaaaagatcaagaactccacaacaattcttccaccacggcgtcgtttcgccagacgctagcagaggctgcaaaacacatatattcaattgttaaaacatgatcatgagaattacaatcttttggtataagagacaataaactttttcttttgaaggattttaagaaaagagggttttgcataaatctttgacctggttgtctgtagatactggaaggtctcggtttgccacggtgctgctcgatgctccactcacaagattggtaacacctccaacaagctttgaggaaatatcgctgctcttcgcttcgaaagtttgaagcaaagatttggctccttctatacctctagaaaaagctttgtccactgcatccttagcctattcaaatttaaaaacgtgtcttgttagttttgctgggacgataaaaaacatgtaaaagtttgtgaccaataccgacctgtgtagacacaccagacgcttgtctggtgcggctgcagcctcggtcttgaccgtttcacagatgctgcaacggttgctcggcgtcagttagagtgctcctggcggtttggttaacggttttctcagcatcagtgagagaagccgtgacggattcagcggtgcttgtaacggattctttggcttcgctgagagccgaagttgccttctctaagaattgagccatttttttttgtggtggaatatttttgtcagagagaaacagagacttatataataagttaagtaagaagaagattgagaggaatttaggaatgtgaaacgaagtgagctgttaaagagggctgtttcaacgcctcca

SEQ ID NO: 52458 - DNA, 641 bp, Arabidopsis thaliana landsberg
cacgcaacaacgatccattggcggttaaccaaaacttgtcatcccgcatcaatttacaggtccagttcgtaaattccacgtcttctctttcctttactaaaacccaagaccccactgttttgtgtcaaaagttataagggattccataagccgcagtatccaaccccgctgcaggttcttagtctacaagtagtggcatcaactccgcactctttgttgctccaacacttatgattgatttgctcgtcaggaacatggcaagcactctctctttgttgctcaggatgtctagagttaagagatatcggtggacagacttgtagtgacaatgcgctagctcgactttcccatgctccactctacaaatttttaagttgctagtttagcagcagcagagaaagaactaataatgccttaaatctttaaatgcctgtccttctgtctatcaactgaaaatagcattgctaggcacactgagtatacagtgtaaccatgcatacaagtaatatatcttccaaaatgatcagagctggaacaatggacggacctttgaaagggtccagttgcctgagaaataagtttctggtagtttccaatccaggagctcacaacctgtataggatggccctcggttgtaaata

SEQ ID NO: 52459 - DNA, 598 bp, Arabidopsis thaliana landsberg
  unsure (1)..(598): unsure at all n locations
ctggtgtttggttcagacaggtgggatagagacacctcacactggaaatacagatcaagtattctgtagagatctaggatgtcaatttcagaaaaaacactggaatttcattgtgtgtggtttcgtttctcttcatcatctccatgttccacccccagtgctgatttctgcccttcccatgctggcatgtggcgagggcgtccgtggcggctgtggaagtccatggtatgcacacctactgccatggtcaccatcctcttcttctgtccaagttgagcttgggtcagcgtggatgtcgtcatcctacctcggatcctgatctggtagaaggtcctaggcaagtgcaagccattatggtggtcgtctagcgagggtgagagcttgctcggagcgggcttccaacggtccaatcatcgactaatgacagatgtttagaggcgagcttgggccctcttagtctccgtgctactttgcgagggtgctatgcgcttacatcgacctcatnnnnnnnnnnnnnnnnnnnngctggagtagatgctcacctcattgccgtctgctctgatggtggatgcaagctggagtgtacctcacgtctgtg

SEQ ID NO: 52460 - DNA, 925 bp, Arabidopsis thaliana landsberg
caaaaatttaaatcctagtgatttatggttttgatatcacactttattttgagtcatgacactcaaattcaaaatccgtttagtacaaaaggttataaagtctataatcgatttttgtaatcccaattatcacattggtttgactgtgttacaaggtcaaagtaaaatccccaaaaaagaaagaggaatattttggttttgagaaaagacaaaaaaacaatagagaaaccttgtaaaatcccgccaaaattttcacagaacccctaaaaatgtttgagtgttgccgccatccatagatttattccaccatcttctctttatctctggaaatccatcgccgccgcaaccgtatggtacgtttcgtttagatctacggttttgtaatcatccgttgattcgtcgacatcagcaacgatttgcttcatccacaaaccgaataggttcgattcaaacataagcctgggatttgagtcaattatttgcatttgcctacttttccattttctgggcacgccagatatttgatgaattgctcgaatagatagatgtcaaagtgaagaaaagaagtgaagcgagccgattcgacatgtacgggagaaaagggtatcagcttatcaaagattttgccaccggagagaagggtcagctcaaacctttcaacgtaagacttcaagctcccacctttatgacaccaaatctctcaatttatacaggctattgaaatttttgagtatctgtaatctaacgtatatcaatctaggaaatttggcctgtaggttttgattataggtgacggaatgttagcaaatttccagtcgtgggttgataatatccaattctgtaattagaaagtattatcttggttagctatgaggtagattagttctttaacctcttgtatttctaacagagcaaaccttttagc

SEQ ID NO: 52461 - DNA, 1394 bp, Arabidopsis thaliana landsberg
attagcatcgttgtcaaccttgttttttcttaggttcttatgcagactggtgatacagaacttgaaatgagaggaagatgcagtgcaggtcaaaaggtgaattgttctaaaatcgttcttgtaaaagcatagttatcagttcaatattattttaagcttcgttgttgaactcaggtgatcactttcttcttcatcatctcccgcaggttcttgcttcattgataattaggttggctttagccgagacattttgcttaaactgtggaatattagcccttgatgagccaactacaaacctggatgggcccaattcagaatctcttgcaggagctcttcttaggtaagacttcagatctatacccctaatgagttatgatgatggtacatgggtacatataataattcctcttacatagacatttaactctctaaacactggagtcattattgtgactttcctgtcttttccgtataatgttgttacacatcctaagaccattgctctcaacattggatcatattatgtcgttgtattctccaggatcatggaagacagaaagggccaagagaatttccaactcatagtcattacccacgatgaacgctttgctcaaatgattggccaaaggcaacatgctgaaaaatattaccgggtcgcaaaagatgatatgtaagcaaactattatcgctctcatcttttcttctttctatacttgcttttccatttactctgaattcaagacctgatacttcactggggatcttatcaggcaacacagcataatcgaggcccaagagatctttgattgataaaccagtggcttgttctataaaccaacataacagttcagctaatgtttaacggtaagctcatctttttgaaaagctacgtgtagctttcttggctctgttatatacagctctacacattgtttgattagatgtgtgcaaaaatttctgttgaattgaaaaatcagtatgtagaggaggcaactctttgaacccttatgttaagtttttgttaagagaatgctacaacattccaaagtttgttgatggttctgatatttcatcaagtctcatcgcatattcttaataacaacttgtttttatttatgaacaacgtaaacatatcatgaaaaccaactattaacccattcttaatagctttgtatcatacaccttttagtcttttcttgatcatattatggaaatttaagtcgaataagaagaaataaagttagtagacaggactgacaacaggagtgaaaccgagcaactgcttagaatggagccatggttgaataaccacaacagagtcaaacatcctggtagagccattgggttgagtgacttcaatccttagatagtatttgagtccagcgacgacctgt

SEQ ID NO: 52462 - DNA, 1255 bp, Arabidopsis thaliana landsberg
ttaaactgaatgttttagctcatctcatcatgcttagcagaagcacaggtaatatcaatcagcattgcgaaaggcagaagctaaactaaatgactgactctaagatgaaactgaatataagaggatggttgagttaaaaaagcagtagatgatgatgatgatacctcctgagagaggccgttccagccacctaacccggtattagagacattagacataagattagaagaagccatagggctgggacttctgtgtcgaagtctatcaaaatctccaaatccttggttagacatcattccagagaccctgaacatctctgcacaccaacaaagattcatattatgcaattgacactaagggtagtactaaagtaggtaatgctggattcaatttgagaaattggaaaaaatcaaatcaatgaacttgatctcactctcatggactaattgaatgaactaaaattgaacatttttgtaagaaaattggctgacaaaaaagaaagaaactttaagtcatcccaatctggtgaaaacagaaagggtatatacagttgaaaaattaagatccgaatcagaatgaaaaggaggaaccttgattcaatagacggctacatatgggtaggacctgcataaaaggagtaagcttttgatgttcagcgagaagctccgtcaagtactgagagctgttcaagcaagaaacagaacacagatcggttttcacataaaaccaaaataaaagagtgtctcgaaatcagagtttaggaacaaacctgtcgatctcaggagtgcttctaatctgaggagaagcagctcgagcaggagagaagtaagaggagttattgtataaaccagacatgggttattttgtgtgcctttcttcttcttcttctctgtacaaaaccaagattgttggggaaagggttttgatggaaatcgcagaaccaaaaaaagtagaaagagaaagagaaagaccaaagccagcagcagacaccaaatgtgaattctgcaggaaagacgccagacttttttttttctttttttcttctgtctgaaaaatctcttttttttttggtttctttgattaaaagttatttttattttccataaatgagatttttaattaaactcaggcagaaaaaatcagctaaaaagtttaaagtgacagagtggatctctctgttacaaaggttgaaaaatttagtgattattttttggggataattcaaccgtcaccgtttgattgattctgtattatg

SEQ ID NO: 52463 - DNA, 150 bp, Arabidopsis thaliana landsberg
taactaacctatctctttctaaaacagatctaatttagtaagcaaataaattcttacctgcgacaaaaaatatataaatatcttggtgaaaaaatcaatatgaatatagagcaggccgacctatgccgggcaaaagaccgtaagcagatg

SEQ ID NO: 52464 - DNA, 654 bp, Arabidopsis thaliana landsberg
  unsure (1)..(654): unsure at all n locations
tcgagcgccgttgtggtcctgcacctccaccatcgttcggaggatgtgaccgggtcgtgggcgtgcggacctgtgcgcggatccttacggaggcgggattggcgcctgcggactnnnnnnnnnnnnnnnnnnnntcaccggagcatttggggcgccgcagattcgcctgtcgccgtggcctgtgctctacaccgcgaacggccagtatgaatcccctccatgtgatcgctaggttctcctacttgtgtacgcgtctcggattgggttatggggcaccggggaggggcgagctgtggctgctccgacggcgctccgccgtatggattgtgcgtcgccgcgtgcgtgcagtaggattggggaagacgaccgcggaccgttggatctagcgcgtgcggatcagattagatcggggtgctgattcgattgcttccacccatgaccgtcgattggcgatccgatggtggggaatcggatctgaacttcattaaaccttggccgttgatcatgaatcgtgcggatcctgctccgtaccggttcgagggaacgcagatgtaatctgggccgcgattcctaatcgcgtggctgtgggcttctaatacctttcggcctgatacatgtcttatgagccctacagtttgttgatatcaaccgtag

SEQ ID NO: 52465 - DNA, 356 bp, Arabidopsis thaliana landsberg
tgaacatgcacgagctgttcagcttagattctactctgttattttatgttttagtttttgtcttttcttactcttttaggtttctttttttgtggctttgttttgtttgttgtatcgggataccaaataatattcagttgctatatatgttcattaactggacaaagaatttctattatgtatacgtctattacaaagtatttttcttttgaattcttgatatatatatagaaaacatgtctagccaaatctatttatgatattaattctacaaatcaactaattaccaagaggtttgattcaataagacgtgagctgattaccgctacattcactttattttgtctgctctcctc

SEQ ID NO: 52466 - DNA, 1408 bp, Arabidopsis thaliana landsberg
taaatgtatatgttatggccgctaaacataagacggtcgaattaaatcttctttttcaacaaatatcatgtagcttttgagtaccacaaaccacacatctatatggtcgaaagtctcgactgtgaatcaaacaatttatcaaaaaaaaaaaatacaagaaaataagtaagatgagtatataagttagttaattgagatccaatttcgaaggcaacacgaagcgaataatttagtcaataactcaatatatagaaccaatcaataataatctgctggagattgaattgttcaataattgatgagaaggagattataaaaaaaaaaaaaaaatggtccacccacgtttcgccattttcaatctctcatgataatctaaataagtgacagaaacatactggcgatagtcgtttgtttctttacacactgatataccaatacttttttgagtactatactattatgagctgtaaaaagaaagccaattcatcaagtttactcgttcgtatgagttttaatacgatcgttatatgtgttaaactgttaattaatacattatttgattttattctaacttttcatactaaaaatgccaatcgtttcgttcgtagacctgaatttataaaaaaaattgaaatgctattaaaaaaagttatgtccctttaaacttctgatcagatttcagctgtacatattttgttatttattgctgcaaaatttataccattatgactagtattgttctaataatcgttataaatatttaggcatgaacagtttgaggattcacataattaaattaatactagaaccaggttaatttgggctataaagtctcactaataaagatttgggaattcgaaggtcattagtgaagtgacacaaaccggaacttgtgagaataatggatttaaggcagatttgacaagaaagtgtggaattgagcaaactcatgtcgtcataggctcatatacatatctacatttgtattgtccctatcacaatactttatgcccctacctagcatccgccatatcattcaattcaactctcgacttaaatgatttccttaaatattgagaaaataaaataaggattcttctttttgttggtactatcgcaaataacagatgggtccattttcgtcaacggaagaaccaaagaaggctctatttgggcctgtagacataggattgagcccatttatccatgggttagattattatgtcacagatgtttttaaaactgaatactcaagataatgcaagcgagaggagtgtgtgtttcatgttgaacaaccgcgagaatcgggtcaagaaaacgagccctgtggttttacgtcttgacctattagatctggtgcacaatggtgcttctatcaacacagaccagattagcagcttctgtgatt

SEQ ID NO: 52467 - DNA, 844 bp, Arabidopsis thaliana landsberg
agaaagttagttattataaacatcttaaacaactacacaatattcggtaatttctacatattttagagattagtttgagtttcaatccatactttactagtgattataaattaatatacgtacttttcgactataaagtgaaactaagtaaattagaacgtgatattaaaaagttaatgttcactgttatatttttttcacaagtaaaaaatgggttatttgcggtaaataaaaataccagatattttgaattgattaaaaaggttgaaataagagaggaggggaaagaaaagaaggtgggggcccagtatgaaagggaaaggtgtcatcaaatcatctctctctctctctctaccttcgacccacgggccgtgtccatttaaagccctgtctcttgccattccccatctgaccaccagaagaagagccacacactcacaaattaaaaagagagagagagagacagagagagagagagattctgcggaggagcttcttcttcgtagggtgttcatcgttattaacgttatcgcccctacgtcagctccatctccaggtccgtcgcttctcttccatttcttctcattttcgattttgattcttatttctttccagtagctcctgctctgtgaatttctccgctcacgatagatctgcttatactccttacattcaaccttagatctggtctcgattctctgtttctctgtttttttcttttggtcgagaatctgatgtttgtttatgttctgtcaccattaataataatgaactctctcattcatacaatgattagtttctctcgtctacaaaacgatatgttgcatcttcacttttctctttt

SEQ ID NO: 52468 - DNA, 942 bp, Arabidopsis thaliana landsberg
  unsure (1)..(942): unsure at all n locations
tttgatcctttggatagtggagctgatcaaagcactcactgtgtccaccgacttctcattcacctctctcgacctattggcctttccagagacaaggatctgaaaggccaccgtgagtaaggttccaccgtcctccaccgtggatcgcctgccgtcgcttgagatgacgaaaccagatggaaggattgggatatggaaagggtctacttcgccggagacagcgaaatgcattgtagccatgtccataggagcgtacacgatcatgcctcccaaggcgtccatgtagcagtcttgcagcatcaacatatcatcctggctagagtcttgaaccaccatcttgtcattattctcttcgtgcgttggctaatgtatatatacacatgtacgacgattataggttattagagttatataatttgccaacaaacgattaatagttaaaagatcgttgaagagagagatatatacatgtacccggagaatggttacgcagttggtttcactagacccggtgacaatgcgagcgatctcattgactacggttccataggaaagaatgtcccactgttacacgtagacgtttttgttgttattacgtgatttaagttcataaattttgatgatcatgcnnnnnnnnnnnnnnnnnnnnnnnnnntgtcgaggttttgaaggaaagcgaagacttgcaaaggagtgagagggattgcgagagaagacgaagcactgacaactataccgggtggttgaccggcctcaatgttcatccgaatcgagactctcactccatttttcgactgctgcggaaagtcaatttttccggacatggtcaacatttcgttgaaattcttcaccattctctcacctaatttcattcactccttcttgcttctcctgtcgttatgactgtcaaatataattataacttgatcaacgcacattatt

SEQ ID NO: 52469 - DNA, 4170 bp, Arabidopsis thaliana landsberg
tccgctatatttcttcaatccttaaacgactgctattccagtactcgttcggggtaacaacacatggttcaatacactccctaggcagtattttgtatcctcgtttctcgctgcaacttcaaccgcttctgatatcgcaatgcctaaacttcccggacttgatggatcggattcgaggattcttctacccgcctcagtgagatccgaaggcgacggatgaacctttgcaccccaagtttgcatcattaaccgacgatatggctttgtatggtaagagttggctacttgccatacctataatgttggaaaagcataaaagaaacaatgtcacttataatcaaaacattacatttttcaagataccaaagcaaaattctaatatttatgcttacttcgcagtcgagaccaaatagactagaagcaaaggctaaagaacttccccattgaccagcaccggtttccgtcacaacgttcttgatgccttctttcgcattgtaataagcttgtggaaccgctgtgtttggtttgtgtgaaccagctgggctaccaccttcatacttgaagtaaatccttgccggtgtttgaagaagcttctctaatctctttgctctataatcaaagcaatataaataatctgatataaaatttggctaaactaatacaaatcttgatataaatattcaaaccaaatattcaaaatcttgattatgaaaaacagaaacaaatcctttttattatctttaaatcatctacggctaaattataaatataaaagaaaacacaaaaaaaaaacaatcaaaataaaaaaactaaaaaaaaaaatcaagaacctgattagaggagttggacgccaaagcttatagatttcaagaacttcctcagggatatcaataaacctctcttgtgtagcttcttgtttaatcaactcattggggaaaagatgagccaaatcttcgggttttatcggttcgaaagtctttggatgcaacggtggaggaggcttgactgaaagatcagcaacaagattataccattgttttggaatctcaaccactgatttgttgtgagtagatctcaaagctgcttttactcttaagctagatccatttgaaactcttgtagcttggtttgattttcttttcagagttaagtcactaaatccttgacaatcacctaatcaaatcaaaataaaacacacaagacatcaaatattcaactttgaagcaatcaaatcaagaataaagttttgacaaaagaatcaagagatcaacagtgaacttaccagtaatgaaaacttgaggtgagactgatttagtgaattggtttggaggtaaaagcaattgagaggccatttctttgttatctttatcagtttcaaagatatgaattagggattttgggatattgactagagagtaatgagagatcggtgaagcatttaaataatagactccaacgaagacttcccggcacccaacgacatctaaccattttaatacaaatttgttttgtcttctttatttttatttttattggaccactccatttaactctttttgtcttgttttgtttactcttcttctttggcatcatttttttgatgaaaactgaaaatttataacaatggtttttcattcacactgataatcaatattcaatcatcatattcatatatatatatacacttttgaatttcaagtttgaaaattatcatcttcactatgttgatgatattgcagcatgaatgtccttttaaagattcaacaaccaaacaaatttgtagattttgtggccaaaaatagcttctagcagctcattaagtgtcttttacttgcctaccaacaaaagtagcaaattatcaattgtataggaccatcaatcattcatcaacctaactagtcactttctacatttgtaacgattcttttaccaaaaatgactaccaagtcaatagcattgagctttgactaaataagcctatcttttagtttagtatatttttggctttgacatttggtattcagttacaaaccatgtaatttgcgtttattccaaaaacaaactcctttaccaagttactaccaccatgacttctttacaacttacattcagacaccacaaaatgtgtcaagaaatatcattttgaatctgtctttttccaattagatagatttgttttacatttataaacaagtgtacacggctaaacaaatcgaaactaggtggaagaaagttgagccagccatggaaggagacgctcatggacaagatccggacgatcatcttgcgggcaatgtccaacgccttgtagaacatagaggttgaagttaggtaactgatccggaagggaagtgaagtacttacctactggaccatcaagaggggttagtccatcttgatctccccataagacaagaaccggtttggttatttccggtatcagcttaatcggatttggtccaggaggacccgttaagattgaaacaaaagcatctagtgcaccttcggtatttgctggtccagcaatgatctaacataacattttcacataaaaagtgaataaaactttcattgttctttgtcattgagagtgagtaataatgacaatacctctacaagggtgtcatctacattgtccttgttcccgtaaacatttgtcaagatgttcttcagattttccctgcgtttcgtaaattcgtcaatgcgttagagctctcgaataaatcgtttcaaagtcagggaaaaagtgaataaggacatacctgtctttaacacggttgaagagtgcagaagcaattcctctttgcttgagtaagaagtcgataagtaagagtaaaggcatcagcagcttgattctccagtcatcaaagacagctttgttgttcataccaccagcacaattcaatagaacaagacctttgaccagatctcctcgtgattctgtttttttttccaaatatatgagaaacttagtacctaagattcatatacttgtgacatctttagctcaagtaatcgaagtttatatcattagacgtagaaacaaactcaaatagtgaaaagggtttagacctgaggcagcgatgacacaagcaaggcttccaacagagtttccaatcaaaatagtcggtttctgaaccacttcctccaagaagttgagtatcaactacaccaaaataaatcaaatcaaaccaaaccaaaccaaaacacttctttaaacaacaaaaacatgccagagtatttcaaagattgtttacctcagcccatgactccatggtatagctaaaaccaggtggcttatccgaagcaccaaacccgagaagatcaattgcatacactgtatggtttttagacaaagtatttatgttcctgcaaaagtagtttcattcgttcttgttaaaagcaatgcctatacataaaaatcttccacatacaacaatttattgatacttaactaaaaaaaaacactatctcaacaagattcatacatttactcttaaaacatgaatgatgaatgattaataccttcgccagtgaggaatagaagcaccaaagccatgaaccaaaagaacagtttgactcgccggagtaacttcctccggcgaatctttgacaaagtagttaacagaatattctcctttccacttccatttcttgcttctttctcctatctctgccaattctaccgcctctactactcctccgccggaaaccgtggcgctagacgaagccgtggctctaacacagacgcgatctctccgtaggctaatacgtcgtaagttaaccgtagaagtcgccgtccgtgacatcaccggcggcgacattgccgtccatgttagagctctcatcgtcttttttctctctttctctttggatcttcagttacgtttttggttaatttgccattagaagagataatcctacgtggctctctttctaccaatcaaagattgtctggttcgagtagtttcggtataaaccggttaaaattatttggatataaccaaatgctgaaatgaaccgatgattggggtgggaggagaatccaccgcgaatccggatagaaaccgaaatggagcgtccacgtgacatttggtaggtggttaacgaagataagaagatggatatcaaaactgagatgtgtgggaacaattggacaactatgtgaaa

SEQ ID NO: 52470 - DNA, 789 bp, Arabidopsis thaliana landsberg
ccgtcaagaagattaacagctaaattctccagtttacacagatcttattttacttgtgcaatcctgctggctcaatttcaaatcttctctttctttcagttcctcaagaagagcaacaacaagatggtacttgtcagggtttttagctatttccagaatcatcttcacgtaaacactcgagtcaagtattcgattgttactcttcgagatcagtataagcttccgagctagattcaaccatccaccttcaatgcatcccttgatcatagcttcaattacattcttgctagccaaactattgtcgaatttaagcagtttcagctcatggtgcttcgccaaaacctggatagtcgatgcaagaatccggttatcagggactaaatgagaatgcttttcagcccaatgatacgtctgtaaagctctctcaggcaaacccatatgacccaattctcgaatagtcgtagagagtgaccctttacgcaagaaactaacccatttattgagaacaagagagacatctgcatcagaagaaggcaagctcttgatctctctagctaaaccaatgagaaagcttggatctttatacacttgcttcgatacagaagacaatgcaggtgatctgataatgttcttctttggagttggaagacctaaaggtcgtaacttgtgaggttgaggaagtggtaaaggcctaactcgactcggtttatcgggtttttgaggtatccttttcttgaacagcgatgaaatggcctcgatttcttcgggtccccatacacagcatgatca

SEQ ID NO: 52471 - DNA, 587 bp, Arabidopsis thaliana landsberg
ggattgttttacaggcggtatcacgagtccagataagcaccatggcagttaaagacgatttgatagttgctgtagggttccaaggggagcttatctgcaaggtatattaaaacattctctgttctacagtgatcttatagttactttgtttgctcactttgcatggtcactctgattccagaaaatcaacgaacctgaggttgctttctgcactaaactaacatcagctgataacgacatcaccaattcagttgacatttacaacgcacctaggtaattactaaacagaacatacattggtttcaaaaaaaaaaaaaaaaaaactcatctaactctttcttccttaatccatatagtggctcgttaagggttatgaccgcgaacaatgactgtactgtccggctatttgatgccacaaactttgccttgctcaacagtttcgcctttgattggtctgtaaatgtaagtgaatctccttctcttaagacccagctgttatcatctgctctagcttcaaagtgtttatgactaatgtctttggtgcgtatctgtagaacatctccaccagtccagatggtaagctagtg

SEQ ID NO: 52472 - DNA, 729 bp, Arabidopsis thaliana landsberg
tccactgcatagctgaatagatacataaacccaaggaaaccgctgaaacaaaacataatcataataagcaaaacactgaaacctcataaaagttattggacaaattacactaccaaaatcttgcaacaagtacctgatgtaattgagtcaaaagctggaaacttgctgtgataagttccaatgttttaccaaatctcaatatcctgaaaatcgcttggtacattttgcttcaaaattaaacaaaacccaaatcaaaatcagtactcttttagaggtaaaaacttcaaatttcttagaaaaacagagttttttattttttacttggttggaggaattccattttcgggtacaagtgaagcagcacgaacagcttccagatactgcaaacctaaggtttttcattcaaaggatcaatacaattaacaaaaacaaagacgaagattgaaaattgaggaaacgtacgatcttcgttagcgtcgcgactgtctttagctccggtggaatcaatcatagccaaggtgttagcttccaagctaccgccatagccactcatcactctgcttgtattgttattacccttcgtctctttcgacatcttctctttcacaatttcactgatttcttctcagcagcaccaaagaagaaaacgagaaggagagattgaaatcttaatccgaaattagaatggagaaagatttgtagaaaccctaattcttgacagaagtcaat

SEQ ID NO: 52473 - DNA, 1024 bp, Arabidopsis thaliana landsberg
  unsure (1)..(1024): unsure at all n locations
tgcagcttaccatcctaatttctccattagatcagccacaaatcaaactccagacgatatataataaaaggcagcaaaatcaaattcgtcaaagcacattcgctatgcaaatcataatccaaaataggcacagttccaagtaaagatcatagatagtcaaatacaaatcgatcgaagatcatacctttgctggcgctaatgagaaagaacccatctggagtcaccggactataagccacatcgacgacgggacgagaatgcccgtggcacactaacggagctcccatttatcttcttatctattcactaacaaaccctaatgaacaaaatctaatcaattagtcgatttactcgtttcgaagacaaggaatcaattaatttcatttcttaaaaaggataccagaaattttttgaatcgggtcaagattgcgttaagaaagaccaatccgagtttgatcggtgcgaatgtatgacccgccagagaaatccccttgaagaggatcacacctatacaagggaagagaaggaatgataaaaggagaaactntttttttttagtttggtttgttatctatggcttaaacgcagagaagaactcgcggagacgacgatggtagttgcacgctctcaattcagaaaacaaataaaccttttgtattttacgagtaagggcttatatttattactattgatgatattgccccataacttcaaagtaattaatttttacgttgaaagtttacaatagttattaaattgcccctatagaaataaactttggtcagtcactcctcaatcgcgtgaggattgaatagttttacgtgagaacttcacctaaccataatttttattcttagcaaaggcatttttttaaatttcaagattgactaaatatatacatgtagtttgtcctaattctgatataaatactgtcgtcgccggaattaatattatatatgtggataacgtataaactatgaaattaaaaatatgatgattaagtgtttgactcaatgattcctca

SEQ ID NO: 52474 - DNA, 943 bp, Arabidopsis thaliana landsberg
agattttgcataaagttcttgtaaagtccaccaatcattaagcttaattttgcctcattcacgcaggtgcggatcacatgaccacactctttatgcccttgactataggagtcaatgctgtgtttataagctgcaatgtggtgggagcatatttgcttcgcctgcaattgatgaggtgcagactttaactactctatccaagtggttaggcatagttgcttgtccacagcttaacaatgtcatctgtggtcaaagattttgttggttattgcagttctcttcacatcacctgatttatctttgatgcttcacccagggtcatagttcactttacgtggcctctaccagtggtcgcgtgatagctgtatcaataaaggtatgggtcttttatccatactcttaacaccctatgtgttgttgcttgtataccttttgtataccgtttgttgcctcactttttgcattccagtaagtcgtcatgataagaataggtcagttgtcgaaaatgaatttgtgtgctctacacaaatgaagcagaatagtccttagaaataatggttactaccaaaattgggtcctgtatgccttaccctatagagctgtttaacttaactgatcagcattacagtttttcttggctccagaggaagatttgttgttgacttcttataaagtaatgacagagccttctttattcgggttgattttgtaaatgcaagattccccattccacaccttatggctatttgaattagaggcaccgatttttggtttcctatgcattaccccatcaactcaaaacagaatattcttgctctactattttctttccatttccttgattttatgatcattggtactctctattttctgtcacagatatttgctgcttactagatggccgaaggatcgcaatgagttcgactggaactatcattgggag

SEQ ID NO: 52475 - DNA, 3275 bp, Arabidopsis thaliana landsberg
tgaggcctgtttcttataggcccatggacggtcggtcctcttgagggatggcatgtgtgtgaaatgagaaatgtgaatcatgtcttatttatccaacatcatcactttacttagtttcttctaaaaatttgcaagtaacatattttgtaactaatcatgcaccactaaagtaactaatcatgtaccacccaagtaaaatattataatatctgtatgcgatgaaagtatgtccaatcattctgaatgactgatgaaataactggatgaaataactggatgaaataacggatgggttttgtcgataacctcgcgaaattggacctacatttcattcatttatatttcacacattcacaatatcctcatctaccctacacatccatttatacaacaagcatcctacacattcatctatataccatccacatctccctatacattcatctcatctatacaagcatacatcacaccatatccttcgaaagctttacctgcagtcgtcatatgtcagtctcaatatacacatacacacgtcacacaccctacacatcctatcatgacattatctatattttacaagcattcgtcacacatctgatatatacacattccacactcaatcaaagtatggcacggcacaatcccaatgatgcatttagatttctctcttctatgacattctccttccatcactactccatctgcacatcatcactttcatcatcaaggcgttttctttacatactccggttgagtttatgctcttctaaaaaacctgcaaaaatcaaatcaaaattttcattacaacgccttctgaatttcagaaaactatgtgcaacataatcatgcaagtatcatatactaatctaaaaataaaataaaaacctttatgcccaaatatccatttcagacatatattttagtttttcaaagaaactaatcttcttaataaaacagaactaggattgttatttttcctatatatcaatatgaacaattaaattcaagtagattctttcaagactgcctaatttattttccatttcaagacaattttaagactaatctaccaaatcaaatagccacgagaacagaggttaagcttctttgttattatcatcttatgtgacctcttccaaatatatatatctcaaatgttttaaatctgaaagatatctagagcatcgtagttaaagaaataaaccaaaagagttaccgttatgtaacgttcaaatttacctttttctctaacgttccgactgacgtgactcttatgcgcactgtattactagaaatcaaaataatagattagtttgtttttttgttacggctaatagattacttgttataaaagtaaataaaataaaaagatcaaggaatccgattagattcaaatccgaagctattgataagtacttaatcttcttaccattacagataatatcaaaccgtcacgtggacagccacagctttctttattataatatttgataaagtattaattcagtttgattaaagaatcttcctcttaatagtttaatcctaatcagaaacttcgaaaactatcaaatcaataaaatattaagaacacacacgttgaaaattcccctttcacttatgattctcataaacaaaactaagaaaaacaaacaatgttctcaatagtcaattccctaataagagtcaaaaaccaaaggcttgaccctcgttgaacatgttgcacatgcatcattatatatcagaagaacataactttcacattcaaagatcaatatatatcagaagaacataactttcacattcaaagaattttaagcgacatctcaagtctcaatggaagcaacatcacaacaatttatgtctcagagttaccttaacgctcaagaaaccaccacaagggcaacgaaaaattacctaacttcgctccattcgacacgtaaacaaccttcaaagcccttgaagaggcctgcaatatcatcacctttgaatccaatgcatcctcatgtctaccgagtcgagccagtaaacttcaaagagttggttcagaggctaaccggtgcacctgagcacgagactgtgcaggctaaaccgctcaagacttcggatgatgcagcaaagcagagttcttcgtcatttgcgtttgatccatcatcatcttggggagatttctcattccaaaatcctgcaaatatttccagatggtagcttctactcttgcaaaatgcttcttttgattgaaatgcttaacattcttgtatttatttttagtttgtttttaataaaccagaaagatgtaatcatatatttttcagactcgcattctagaattaatttgttatgtcatttatctgtaacacacataatttgtgggagttaagacttttgattaaaataaaacataattggattgattaaagattctaactacattgggaataatttgatattttcattaaaagaataaattgaattaatcaatgattctatatacacatgtttcacatgtgagaataattttacagctaattaatgatgattattcttatgtgtgtagatataatcaagatgagccgtcaatgttcttctcaccaagcaatcttcgtcgtcttctttatcgcagctctctcccgccacctcatgtaattttgattctatcatttcctgatgaaacacaatgaaacataaaattacaaacgaaaatatataactacgcatgaatcaacattcaacatgtgtttacgcatataatactaaccagactaagtgtatccgccggagaggttgtgaaggaggcgaagtaggcaggttcagggcgggcgctgcacgttagcatggtggcgcaaaggaggagagctatcgtgatcaaagtagagagatttgccattttgtgattatagattaattaattatggatatattgaaaactaatgaccaaagcatctttatatatagtcaatcatggtcaactcttttcttaatctagttcttattttaagaagaaaaaaattagagtgttttgttcttatctttttcatttgttaatgtttttatctattaaaaatgtagttgtaaaagttaaaaaaagaaagaaagaaaaatgtatatctctttcactcgttttcaaaaaggaaacaaatgaatgtgtaatattcaaaattttatagtattttaaattatatataaagaaaagtggattcgataaaagttaggttataaccaatatgttctaaagaataaccatcacacaatacctcgatttatattggaaacatcta

SEQ ID NO: 52476 - DNA, 1095 bp, Arabidopsis thaliana landsberg
tttataacttttttcttcctcctatttagataaataatggtccactaatcattgactgtgtagtgggacatgattaatcgtctacctttatgaccaggacccatcttactcgcattctttttacaatctaaatcgcttgtctttagtgaccatttcacacatgtaaggttttcctttttcttatgtagaaatgcttttgtacaaagacaaactttggtttatgtatcctttccattgtgtgtaagcatttagatggataaggttattgttgtgagcatttaaaatattcaaaagagtacctttcattaatcagtccaactatgcaacgattactagtctctttagagattattaaattaaacaaaagtcagagatactgattattgccttaaaaatattataaactcaacattaatactaagacatggtgtaaaatgtaatgtggacacaaccaattccagctcaatctaatcccatttattttaattctaatgatcacgactacacatgtctccatagactattcaatcaaataaacaaaaaaacctttactaattcaaagacagatatggtaggaaagacaaaagaatgtcggatcctcctgaagcttattgctcgagggagatttctaagtcttttcttgggttctgttaattttctctcgaaccaggttgtctctgctttgttcgagttgtggccttgtggggtcaaaagttatctgtaatggcgacattgtctgatggattatttgatgacatgagcgtgttgggagtgatcggatatgtacttgagcaaaccaggttcatctttctcgtgccgattctgaaacgtcttgtgaatctctgtcaggttgtttcggtgttgttgttcgtcgatgcagcttatatggctatagttgtagccattgtcaaattacttggacgaacaccacagaaagttctcaaatgggaaagcttcaagagcgatgatatcgagctagctccctccagcaatcatcccatggttctcattcaaatcccaatcttcaacgagaaacaggtgacttgaattcgaaacaaaaacagagcactctgttctaaaaaacagagaactctg

SEQ ID NO: 52477 - DNA, 813 bp, Arabidopsis thaliana landsberg
aaaaaagaattgaaaaaagaagaaagacgtttctaagcttagaaattaattggattagaaagacccaaacgtggcatattctgattgggttcattttttttggtttcacgattttgtttctttgtctccctcggcgattctgatagcgactgcaatttacggtgtgtctgtagcacctcgtattctgaggaagtaggtcggaaagcctaatccgtagaaatttgcgtatagaagtaagtcgttaagtcccgtgaaagagaaagaggaaaagaagcaagaagaaaagaagaaagaagcggaggacaaagacgagaaggaaggtaattattcctcgaatcactttcaatctggcgattgtaccctccaagttaaacaagaaaaagagactcacggtccaagtttttaaggaacatccgtacttctttcgtatcgcaaccatagtacgagaaaggtaattgtattctatggctcgcataaggacataggttaagcgaagaaagtcggattataagggaaaggtgtgaaggattcaagagagaaagttgcccgagaagagaagaatcaagaaaagtcttgatctgaatgaggagttagtcgccaaagcaataagaccgaagaagagtttcagatagaaggaaatattcgaaacgaagaaagaagaaagcttgtgtaagaattcgggaaatgaaggtgaatgagaaaggaaatcggacttggtatttataaaattctaactttcaccaagccgtgaaatttcgacgattagtcttgtttcggaaacttgcaactcaagttggctcacttggagcggaa

SEQ ID NO: 52478 - DNA, 528 bp, Arabidopsis thaliana landsberg
gatattaaggacacaatgtataccacaacgaacttagtatctagataacaaaaaatgccaaaacatgataataacataacataggacggaggctcgagctgaatctagtcccataaacaagaaaagaatatataacacattgcacctagaatctacacaacaaaaaatgtcaaaacataacataaatcgagcctcgagctaattctagtctcattcctaaacaaagtaaagacacaatgcacttgaaaaatcttatcgtctactttaaaactagcctatgacttaatgtaacttcttgtgagttgggtagtgagtctctcattagtcaactctttagctctctggtttcaacgcaaactcacatggctagcaagcatatactggaggagattgtaagcagcaccggcccaagcggttgttgtaacaactccggttgctttaataatctcagcgcttagaggagaaatcacataaaggcgaggaatgtattgaacaagaacgatgagcacaagagcatttgtggtatga

SEQ ID NO: 52479 - DNA, 219 bp, Arabidopsis thaliana landsberg
  unsure (1)..(219): unsure at all n locations
tgctcccatctccctttcatgagtacaccaagcattctctaatcattccgaagcaccaagactcnnnnnnnnnnnnnnnnnnnnnnnnnnnnnnnnnnnngaactccactttagtatagaactctccgggttgtgtagtgaactcgatttgtgacttatgtgcgtgtatctgcactggattcgtggcttgttcgcgaagctcaactcgtccttactacc

SEQ ID NO: 52480 - DNA, 419 bp, Arabidopsis thaliana landsberg
atagtattacgtcagcattgggaaatggtaaaatgatcttgtcttgatttagctttgtctatatgtcaccaacactagctctgtaataaatttacataaaggtaagattagagaatctaaaacaaatgtatcacagaagaaattgtaaaaaatgtgagacgagaaagcaattgaggttcaggtagtgggtcgtgtccaactggtttgagatgtactcgtattcccatagtaaacttttttggtagattcgtcccaatatgcctacaagagagatagtcaagtgacaatgttttagcaactgcgtactcatttacaaatcaaacgctagtggaatggtgaaacttaatacctgccatcccgacgggagatttgctgagagttttgttagatcaggtttttgctgcttttcggggtctttc

SEQ ID NO: 52481 - DNA, 532 bp, Arabidopsis thaliana landsberg
tttgtgaaaaattaagaaagtaagcaaagttaaaagacaaagttctttttttttattattattatcaaaaatgttcatttccgtaaaccaagataatcttcgttaggtctttgatctaatagtcagtagtcaaaacctactaagatttgtacatgtagtgcatttcacaattaatcgcctagtcttttctcaactgacctataaatttgagacaaaataaaagaaacctctaaatttaagacttatgtgatagtaaattattaacttaaaagtctcgaatatgaatccgtctttgtgttttattacctaatttgggggaattttaatcataacctctctcatgagtcatgtctcataagtcatgactgaaagaaactgttgcctaacaactacaacaaaaaggtaaaactatttgtttgtacgatgcagaattactagctactaggaaactctgatccgattctatagacatttggagtaatctccaatcatccattttgagaaatgaaaaagagaaataagagggacgaat

SEQ ID NO: 52482 - DNA, 595 bp, Arabidopsis thaliana landsberg
  unsure (1)..(595): unsure at all n locations
ctaccgtcatgtcgtcattccgcgtgatcatttttacttccttttttgggatctctaatattataacttttgcatgtgatttaacctttaagaaattaaggccattgttgaccgatgaatcatcaattcgtaaatagcttcttaatttcgaattaaaggaatggaagaagatatattgcaactaggccttttaatttgcactcctaagttgttttgttatttggaaaatcaaaagcaaaaacctaaaacctttcatcagttactgaaatttactttagacaaaactgtgtcataacaggatttagtagttgtaaacctaagccaaacagagtacatatgcccacaaagaanagtcttattagggtgtgacccatcatactatctacacagggctatcaacttgtcactgcttgctttgtttcctaatcttcctactgttatataacatatacatttcttttttttttacaatcaagataagatcactactcatctcagagacctacaagtcacacagtatgctttctgagcaaatgtcatagtactgctgccacttctaacaccacaatcactctcaagttaattgcagcaagat

SEQ ID NO: 52483 - DNA, 1140 bp, Arabidopsis thaliana landsberg
tcagctaaactactagccacaaacacacaatcctcaagaccagattttaccacatacccatgaacccctctcccaaatctactccatttcaacgcaccacacgctttacaaacattcggaaccacaaaattatcaggaaaaatctcattttcaagcatctcaacaaaacccattaaagctccttcacataacccaatcctacatttcacaccaataatagctgcccaagagaaaacattacgaaccctcaatttcgagaaaagaacttcagcaatctccaaagcatcgcacttggcgtagaatatcaccaatttagtctcgatgtactcattcctcgcgtagaaatcaccgttctttaaaatccgagcatgaatttgcttccctgtacttaaatctctctcgtaaacgcatccttggaggatttcaccgtatatctcaggaccaatgcgtaagtttctgaaatccatctgtgtaactaaactcagagcttctttgatctcaccgttcttacaaagagacgaaacgcgatgaaagtaagatgtggaagaaggagaatgagcttgttcatcgtggtgtttagaagaaggttttgatgatactgaaaatggaactttattcgggatagtgttgaaaggaagagaagccattcatgcctctctgataaacgtctctgaagataaaacagagttctttcgaatcctcgtatttaaattattttatttattatctcctcgacttcttttcgtaaaatgttctccaccgttgattcttgtggcaaatacagacacgtgtacggttttcatctgttactcgatacatatttgtaccgatcgcgattcgtatgtgtaccaaccggttttcgatttgatctcggtttagttgaattataacgttgaaaaatatataattcatttattagaatatacttcaaaagtaacgacaaaaaaaaaatacttcaaaagtatataaacaaaaaatttgagataataacagaagaagaaggtgacattttttataggcttttaatatttatctgaaacctatgtatgacctaaaagacaataaaagcattagctaacacaagcatcaaaacatatacgggaatggaagaggaatagtaagcgatcgctgaactggttg

SEQ ID NO: 52484 - DNA, 806 bp, Arabidopsis thaliana landsberg
caacagagtgttgtttcgtttgtgccactgcaagggttactttagagatgttacactccggttgttcttaacacttgattatttcatccatgagacaaaaaaaaaaaatcttgaatttgtaaatggatttagaattgaagataagttttatcatcaatgatccaaggaaggagttatcaaaattcataattctcaatgatacacccgaaccagccaactgttttaggcttttagtatttttcccatatacacatataaagtcaatgactaatagttaatactaatagatataataaaagcagaggtcacaagaccttaatccaaaggcaaattaaaattgaaagcactagtataagcttagactaagctgatgtcaaaattaaaattcagtttttgtttttgtttttattttaattttaagatcaactctggaacgatcgtgtgatgcactcttgtttaattttgtaggtgatggaatctactgtttttctttcattcgctggtgcattatgttatctctttggccgtaaaattaaaaggtcaatctcattcccagtccttttcgatatttgaatgttagcaacgccttatcaatcaatttgtaatgtgttatttcctatgatggctcaggagagttaactctttgggctgacgtattacccgtgtggacggcttgaaatcgctaggtatatgtttttgtttaataattcgacttctggttatttttcatctgcattgggtttggattaatataatcctttttagtttttttcagatgatttgcttgaaaaaacaccacgaatctc

SEQ ID NO: 52485 - DNA, 1274 bp, Arabidopsis thaliana landsberg
gcttgggaaacgaggcagaggcattgatttatcaaaggaccacaaacctaactgtacttccgagcggctacgtattgagaagcttggaggtgtgatctacgatggttaccttaacgggcagctatctgtggctcgagccttaggagattggcacattaagggaactaaaggttcactctgcccgctcagctgcgagcctgagctggaagagattgtgctgacggaagaggatgagtatcttataatgggctgtgatggactctgggatgtgatgagtagccagtgtgcagtgacgatggtgaggagggagctgatgcagcataatgatcctgagagatgctctcaagctttggttaaggaggctcttcaacgaaacagctgtgacaatcttactgtagtggttgtctgtttctcgcccgaagcgcctcctcggattgagattcccaagtcgcataagaggaggagcatctctgcagagggattggatctcctcaaaggtgttttgaacgagttgtgaaggaactgagagcaagttggaaaaaggtaagaagagttactttattctttttttgtttcctcttttgataggaaagtcagagagatattcaaggttgtgtgcttttttctctggtttttccaagttttgattgattccattttttgtactgtagatcttaaccatatttaaatgattaatatttggtttcataatttaaaaatgcctcattgaactgcttcttgaacttgtgatggcctctttttggtttgtttgaatccttaccaaatatccaaaaaatgatcaagcaacaatggagcacaatctctcagaaacaaccgtagaaaagatttaacagagggtagatgtgcatctgccacaaaataatggatcctaacactaatataacgattgaccatctagggactgagcctgaataacaaagatgcgcataggttatggctaaacaacctagaacatgcacttcctttgtctgccattggtctatcatgcctcatgatgaattctacaatggaatcactcaacaagaagtagggatttagaaagccatttgtcggaccgagtaatcatagaatgaacatgaagaaagatgtgtaactgtatcgagtcatttgatggctgtgggagtattaaatcatgagggatccaaacctgagacaattgcctctagatggtgtcacaaggtccaactttgatacaataaaataaaacaatcgaagggagaaaacttttgtctccgacttgagttccatgtctt

SEQ ID NO: 52486 - DNA, 473 bp, Arabidopsis thaliana landsberg
tgaatctcgctttagttatctgtagctacattctctcttttctctatcttccgacaagattttgagataatgttgcaaggactttgatttttctttccgtatatttcagtgagtcccctaatgaagtttactgagttaagcagaagtgttggtttcttagttaactgctaaagtcatggttttgcaaatgtttctgttgtttgcttactaatggagttcttccagatgaagtttttagtgtattttagcagtttctcttatatgaaattgatacttgtgaaatatgatggatgttttgaaactaatggtttactcgctgacgtttcacatattccgttcttggagtaccaactggcctggagctacattccttagcctggagtaaataataggctgaccctttgaaatcaacatggtgaaccgggaatatgtttctcagtcctgtgttatatctttccaaactctcatcaatg

SEQ ID NO: 52487 - DNA, 611 bp, Arabidopsis thaliana landsberg
  unsure (1)..(611): unsure at all n locations
gtggtttataacgataccacggccattgccgctttgaaatttgccaaggaaatggggtttaaagtgtcgcaagacctgaaaatagtcggttggtccaaggacccgcgcagcgaaatcatcaccccttccatcaccaccattgaacaatatcctgataaaatgggagagaagattgtcgaggtcttaatggcaaggctgcagcataagaatatgaatccaatggagataagcacgcccaccattatgccggtgcagctgatcagaagactttccacttaagtcctgtaaaaactgattttaatttgtaaagattaaaaaagtaaagcattttattccactgcttgaaatgcgctcattaaacaaaccatttttaaccattttacaaacaaaacttacatcaaaaccatggtaagaaaacaaaaccgcttcaaagaatttttactgggagcaatcgctctgctcgcgatggcggngagtctcaaggcgcacagtaaatctcagatgaaggcgctgattaaaacgcagtttgattatgcggccaggcagtacacattactggcatcaaagacgccggtagataaaatgccgcagaccttcaaccctaaacgggc

SEQ ID NO: 52488 - DNA, 547 bp, Arabidopsis thaliana landsberg
atagaataaaatttaacaatatgtataataatcatattgtcacagttttataatcaaagtataatcatttaagacaaataggttagcactttcattcttctcaccattaaatgatgggctaaaatctcaacaattggaatttaaatgttggcaaaaaaaaaaaaaaaatgaaccaggaaaaaggtattataaacttttttttgactatttctccaaataaactctagattaatcacaaacactttcgttaactgaatatttttaattcaaataaaaattaacatttatatagtgctatgaaagacgttaatcattttttcctcccgttttaaaactagaaatatccaaattcatcaataggtagtaattttactaaaatatctaattccatgaaaatgaacttgaatcgttaatgtgatttgagttacgtaccttatgattttaagtagattcaactgaactagtgatgtaagtatattggtgaaaacacttcgtgaaaatcataaaagcagaaaatggcccaagctctatatgtttggtttctaat

SEQ ID NO: 52489 - DNA, 499 bp, Arabidopsis thaliana landsberg
  unsure (1)..(499): unsure at all n locations
gactttgcttcattcatctgaccccttttcagttttcgtttctaagcatggccgttatcaggggtcttgagcaggtctccacattcactacagacaagcgcctcctccatagcacagcatatcttagaaccacattagtatagtgaataaatagccaacttacctacttcatgacttcccctcacctctaaaacataaacagcttagggcaggttgtggcctgctgtattcatctttctgtatttctctcttggtatggtgcctatcttaaaatagtccctgcatccagttaaaggggcctctgaacaattttcctcacaaaactcatcagagttgttagataatttgctgtatctgtctaatatccactgtcaggtgcaagggattctgtgccactttctttattcttgagcaagtcagtcatagtctgtggcaaactcnnnnnnnnnnnnnnnnnnnnnnnnntggctggtataaaaataatcaaaccagccactct

SEQ ID NO: 52490 - DNA, 358 bp, Arabidopsis thaliana landsberg
  unsure (1)..(358): unsure at all n locations
ttgttccttctctggggggatgtgccaggctttggcccatagcgattgtaagactttagctatactccatactcgaggggactgcatatttnnnnnnnnnnnnnnnnnnnnnnnnnnnnnnnnnnnnnnnnnnnnnnnnnggaggtcgttgagaatggtatcactgattttgatgcttgcttatcctaaagggatgaggttgcttgaggaacaagaagggctcgcgtagttgaccaggtcgcattctgaggaagaattattacagccatgcgagctgctgatcttgtgaaaccagataagctagcccgtaccctactatcgcgggtggggtctgccacaacttctatggttcttccat

SEQ ID NO: 52491 - DNA, 1196 bp, Arabidopsis thaliana landsberg
ttattttatgtttgatgggttgtttgcaaaaaaaatagctaaagaaattacgcaataatgtctaattttcggtgtgtggtttaataatcacgcaataaggtcttcttatttctctttttttaatcacgcaataatgtctctacatgatgatgacaacagagaaaatataatgcatggttgattattcgttataattagtagctataccttccaaacgggaaatcgaataataagattgctgcactaacaacataataaaaatgaaagcatttcagcatttggagttggagggatatgaatctaattatataatttgtgggaagatattaatttgttgaaaataacctgagatataaagatcttaaacataaaatctaatccaggatgtattcatgcgtcgagccgtcgaggtggttacctgattgatagagaaattagacatataaacatatatgtattaatgtatgcgtattattactgtccacgttatagaaaaggtatattggtatttgtgtgaaactgtgaatatttcgcttgtccagaaacatatattgagaggttaacacgtaacacaatgtcacaatcgcatgtattgccaaagataagttccggttttaaaatgattattgatcatatattcatattgatcaagtagttaccattatttgttttctgttactgtaagacttatattactttcttgttggtaattaatatatccatttaacttgatacataaaacatatctgacaaacccttaacataatatttaaagtctgatccaaaatctaaacatttctcatctcatttaatattcgtccgtctgttccaaattgttgcaatttaccaacacagcctggcaccgtcgctcgtgcatgcatggtatatagtatataattaaaccttaagactatatattagaataaaaatctttaaaactatatattataaattgaaaatctaaacgaatccacaatgtaccctaatccacgagtgcctcttacgtacaaagaaggttccttgtgacatgttttgaatcatttaaatcattgttttgataatacctccaaagtgagctgttccccggatgtcccacgtccgtacaaaaacccaaacttgggaccttcatcgtactttccctcagatccttcttaacctctatatataatctcattcttacacacattcaatatatc

SEQ ID NO: 52492 - DNA, 1126 bp, Arabidopsis thaliana landsberg
  unsure (1)..(1126): unsure at all n locations
ctttagtagcactgaggaagatagacggaacccaggaaagattcaaaaggtagtatagtgatgactctaattaagaaccaagttttacaaaaggtaacaagacctagaggacgacattatgaatgcctagacgaaaataatttcagagaagtcaaggtaaaggtgtccaaaattaagtcatccacacaattgcatacttgatctattcttctgttcctcaatcacatcaaccaccgtttcattcacattctttaagtatacattagataaccaatcaaacactggttaagccaatagaaaacaatttccatcgatctagtggcaagaacagtactttgaaacaattaactgactgctacagttcctttgcttaagatcccatcttaggtagattccctaacaccataagccatccaacacctctgcttaaggagtttggaagtcaaaatgtttgggaagaatacaatactttctttaatattgtcttagaagtctaaaaataaatagtaagcgcacatttatgaaataacctcttacaggtaatcagaattatagagcccactgagagagtttacctggccatatcttctctccacactttgagagggagactggaggttgcttaggtgcttgctactatcgttctgcaattgcatcaactgagccaaaaaaaaaaggaacagctcaaatataccaaaaatctttagtaaaaagtaataagaaaaactccacacacctttgacttagaatttgaaagaatggttctagaataaggagtccttggaaaattttgaagcccatagctctctcgtcggctttgaggagttgcaaaaccagattgctcacttgacttgataccaggccaacaagcagaaggcttgcttgatggtgatgcaagtgatgatttccctacaagcatactcctatctaaacaatccttttcatttcttgctacaaaaccttgggaactacttgatgatgtctgacctcccatatatgcccttggcaagttctgccggtgaaagaccaacttcatctcgtattttgtctccgtcaagtatctacgaaaaaagttaacgcgaanaaagtgagtaaattgaaaaacatcatataataaggaaacaag

SEQ ID NO: 52493 - DNA, 913 bp, Arabidopsis thaliana landsberg
ccctgtctcgagccgttgtcatgacaagaacagctgcgtggcctagccctgctagcttcgtggacagacccatgtcatagtaccttccctgaaacatgacttaaaagaaaagttaactaagcagtctgataaaggaaagatagaaaaaacgttgaaatatttgaaagttacaaactttgaggagtccgatcatgtctgtgtattcagctggttcaggccaatgatcatccggatcatacacattggcccatctcacgtttttgtttagctcgtatgtttgttttcctctttcagtcgttaatatatctacctgaacaccaggataccttacaaaacaacagaaacgtacggacaatgttctgcatttcagtttaaggttttaaaaaaatgtcgaatcggagacagagtcttatacttttattacctgtctttgattagctgaatagtcgggaaaaagagtagattctcgtaaacgccaccggagataacgcagcaacatcgtctaacatctcctctgattttcaacggtaaagaagcaagctcgacggtgtaaccctttggaaacttcaagaagccgtaagggttatcaggattatccggtggtcttggatcctcgtcttgtttaccgtcggcaaacaaggacccgtattcgttatccgggtcttcaccgctatcaaacgggtcgagccacggattattcttcttcttgagattgaccgatacatcggaagatctcgacgtaagacgagtttgaaagttgaggaagacgagtggtttggaggtagaaaacggcggcgttttaaagaatggggaaatgggtttgggtaacagaggaagtgaagaagccattggaaggtttttttgagccaaagaaagaaaagtttggatttttaaatgttgtgaaagaaaacct

SEQ ID NO: 52494 - DNA, 611 bp, Arabidopsis thaliana landsberg
  unsure (1)..(611): unsure at all n locations
ctcgaccgcacattactgatccgacggtgcacaacccatattctttcctaggccaggatggtggcggccagctgccatggaagcgccatgggtggggctccccaaggcggccctggcgaacctatcaatgccctaaccgatgctatacggagcaatgagcaaagccagaccatggatgggattcatagctcgacactagatgagggcggccagagctttcctttgcccgtagatggggatttgcggattttgtcgatggaaggagctgggcgcgggcagtcacatatataggcgcgagatgcggagtccaaacggaagtagtacacgcgcatccagccggatcgatccgagattcccgacagcggcatagcgattcggttggatcttggcacgacacgcgcctgccaggaagacgaacccgccaaggcggtcccacacgatggtgacgaagggcgcgcaacgtgtacgtgggcgggcccgcgcgcaaaagtggaaatgggtcgggtgaggttagtgggctgaacgagctgaagccggccaagtgtgcccccatttctttggccttttntcaatatttctattccaaatttaagattatactagggtacgag

SEQ ID NO: 52495 - DNA, 1411 bp, Arabidopsis thaliana landsberg
ccttcacccataattcccccatatcgatcctgtggcgctgaagttactcaagcgtttgatcgcttttgacccaaaggaccgtccctctgcagaagaggtaactaagaggaaaaaagagacactgaaatcttggtttgtccagtgttccttgcattcattttaatgatgctttcttctttctgcaggcattggctgatccgtattttcaaggattggcaaatgtggactatgaaccatcgaggcaacctatctcgaaacttgagtttgagtttgagaggaggaaattgactcgcgatgacgtgagggaactcatgtacagagaggtaaataaagacatcatgttcttatgagacagaaaagtatggtttgagttttaggaatctcttaaaacttttttttttgttctctttctggatatgaaacagattttggagtatcatccacagatgttgcaagagtatctacaaggagaagagaacataaactctcattttctatacccaaggtttgactcatttttccaataaacttggttctttataaagagaaagtgtgtcttactttggtgaatcaatcttgatatccagcggagttgatcagttcaaacaagagtttgcccgactcgaagaacacaacgacgatgaagaggaacacaactccccaccacatcagagaaagtacacttcactccctaggtgagttactacttcttgaaactgaaccatcatgagttttaagcgaatcaggctataagtacatgtttgggtttggttgcagagaacgggtgtgctcatcagaagacgaaggttctgattcagttcatgctcaatcgtcttcagcttcagtggtgtttacacctccacagactccaaacacagcaactggcttatcatcacagaaggcgtcacaagtagacaaagcatcaactccggttaaacggtctgcatgtctaatgaggagtgatagtatctgtgcttcaagatgtgttggtgtctcctctgcagtgtcatagtcagaaaaaaattgatttctcaagttgtttagcagcaaaccattgattgttgtgttctgcctattgtatcatgatgtctctcctgagtgttttcattgtggtaactctcttcttcttcttcttactctctgctcatattggaatctcgtgtgtaatggtttctcttggaacttgaaattcatatatatattcttattaccacaatctacctaaatcatcatttacttaaattagatgttgatatctacaataaacaatagcaagcaaaactaaaatcttttgcataatcttttgctattatcttcataagaaatgattttgagttcataaacaaattcaaacttggactatgaatcgatcaaataaacatacatgaaaaaacttcaaatgagttatttt

SEQ ID NO: 52496 - DNA, 166 bp, Arabidopsis thaliana landsberg
tgtcaggaaaaacaatatatatacgttcttaaacccataaatatgctgatgagaatattaaggaaaatatctgagttgatagaagagtcataggttttacaaagtcacgagagtcaggaaatgaaggaaaatagcctagtgaaagtatatccatttgttttacaaa

SEQ ID NO: 52497 - DNA, 738 bp, Arabidopsis thaliana landsberg
aaactggaaccctcttgcataagttttctggtaaagataaggcagcctctcccagtcatgaaaaagtagaaacagtatccagtgagaaggaagcagatgtctttcatcgaattacaaaggaggaatccgagataccaatgtcagagaaggctgtggagctatccagggtgtctgtccccatgccagatgtccatggcgaagttaattgtactattgctcctgataagcacatacacttgggagagccaacttcagagtccggttattaccgagagaagaatttagttatgtgtgattgtggtacccaatttaattttgaggatcgttcctttgagtctaatactcagggtactctctgtcaaaagtgcaagtattcttcacaccataatgcttctaatggaggtggtattcaagttaatactctagaagatggaactgctcaagcttcgccggtttctataattccctgcgaagatgaaaatttccgaggggatgcaatttcactacctaattctgggaagccatcgaccttgcaacgcccagagcgtattgctaaaaagcgtaagcttggaaacatggtgtatgaaggagacgtgaaatgggagaatgagcaaggctttcttgattgtcaaagtgacaagtcctttaagggaagcgacaagtgtggttgtgttccatctatttccaaggaaattgaaattggtagagcagctgcggtaacagctggacttaaaggcc

SEQ ID NO: 52498 - DNA, 1337 bp, Arabidopsis thaliana landsberg
catatttgtaggcagaagaagtaaagagagtaagacaagcattaaatacaggtggggggaggggtccttcattattataacatgctcttgttcctcttctcttttatttctttttaatcttctctcttgtctattattcaaatatattttacattcaacatacatatctatcgtatgtatatgggtgtcttgatcggccaaaccttttgtctacttgagagtcttcgtggggtcatcatctcctgcattctcattttcctttcttccatttgctcaccttattctccggtttcttcccctttttcatccacgccattattgtatgaccgacgtgtttactctcttaagtcctaatcgatcaccttcttatcattacactatttgacattgatttctttggacaaaacactcaagttatgaaaagcttttacattcaactttcacttcaatggtccaaaatcccaaaaacacaaccgcgtctctcatgttccacgtgaccggttggaaccttgaattacaatctttgacgatcataaatcgagctaaaactgtgaacaaataaatatatgaaacaaaatcaatattgaaaagtgtaaaatgagaaacaagccagcatggtccgaccgtctcctccttctctccgtcaacgacaatgtgggacctttataagatcatcgccggccaaccttcaaccggtaccgtccatgtctgccacgtggcacagttcccttgtgcttgcacttctattgagtttggtgatataacttctcttcacttaggctttgcaatttggaactgtcatggcccatgtgccataagcgacgtgttatgtcggcttatagattgaagacataaaaaaaacacaacaaagtcaagagggagatgtgatagattcacataaagtaggtttttagatccttgaaagaagattatatacattattttatgttttctgtacatattaacgcccgaccaaaggtccttagagaataagtacataggtggcttgcttgcttagtaattaataagaagatgaaatatttggtgaaaatagagaggagtaaaatgaaatatccagcaagaggtctctattatggagatccaaatccaaatgtgttttctccgctgtaagtgacatagaggaacccatcatcatcctttttctcttcgtacacagaagacatgagcgcacctgcaaagttaccagatcagatcagccaaatataaacaatttataatcaccggggaccatataagtagacgccttcttatgctcttgatacttgtgttaaaagataatgaaactcctgagtcttgaatacagaggggatcgatct

SEQ ID NO: 52499 - DNA, 1133 bp, Arabidopsis thaliana landsberg
tcaagttctcattttcctctgtttatatcataagaaacatcgacgaccgcccataaaccatctccatgttgcttgcaatatctaagaaacttcttttgtttgattggaactaatggagacatcacttgaaactctgcttgcatctgttccaaacaaaggactcattgaattagcaaatgtcgccaaaatatataatctttatggttcttgagtaacataccaatagaatagagccgtttcttgatccatcactaccgttggatatcacttcaagggttgatgcaaccgcgactatgcactcaaacatttctgcccatttgttctgtaacaaaccaataacaaagatgagacgtttagtagagtgtgcatatatcgataaaataccggttattagagagtatagcataccgtgtccataagagtctcgactagagccaagctattgataagtactaaaccagtttctcttgaaccagggaaatggttcatcgatcctttctcactctttgaactccataaagaagtttccaattctgctaacttcaacaactcatccatggcttccatggcaagatccataaacatcagtgaagttccaccactgacacaatgtcctataggcaaatgctgtgagccaatcccaccatttgaaggctgctcaagtgaaatagacccaccaatgaatctatttgctaaagcacaaatcctatcaagctcttccttaagcttagcattctcaatcctaagttggtgctgctcaaaagaaacctcaccaggtataactgctccaccacaatcaatacatagagagcctctcattgactctttaaggaaactgttttctagccgcagtttttcattctcttgtttgagaatcacattctcatgccgctctagttgcgtctggtcaatataaaaaccacaacattcccataaaaatcataactctactatcaaaaccataacttttcagataaagtaccttcatttgtgttcttctgttctgaaaccaaaacttaatttgcttactctccaaagtaagttttttgccaagttccaacctttgcttctcattaggatgaggacacaaatttgaagaaactacactcagaaaatatcaaacattcaaaaac

SEQ ID NO: 52500 - DNA, 1855 bp, Arabidopsis thaliana landsberg
  unsure (1)..(1855): unsure at all n locations
tttatgaaaccacgaggcatcttggggctgcaattcaaaggaaacacatgagcatttttcagtttttacaaataaaagacaaaaattataatctaaagactggtaaaacgaatctactcacggtttttggtcttgaattctagaggttagagattccaaccgattcattccttcacggaaattttcttcaacagaacgatccttatctatccgcacccagtggatcacatatgctttctgtgctcaacaggatcaagaaaaactagataaactcttcaattcataatccgcaggaagatgcaaatactagtataccttctcaacatgatcaaacacgatcacatcatcataaagacccaaattaacatcaggaagactcctatcatcctctggagcattagaaaaaggcagcttcttcttctcaacataacgtacagtgtcatatgaaaagtatccaacccaaccacctggttacaaatcaaatcaaccatccaaacaaatcagcaatgctaaaacaaacatcactctatttaaaaacagatttctccactcaccgcagaaagcttcaggcaattcatcaatgccttgtggattccattcctccatgattttctgaggaaccatcattggatcatccacttcctcctctgtcctaagaccagctccatggtccatcacagtaactacatttccctttgccacgatttctattgtaggctgagctccaactacactatacctaccctaagagaaaaatcctccaagagttcaatttcattgaaccaaacaaaatgcaaacactgagaacaatcatcaaaaaggaaggcttacgatgttggacgattgcgaaccaggctccacagactcgaacaagaagctaggagcatctctatcatcttctttcaccaaacatcggtgagcaagtatcggagtcaaatgatccgagaatacacatcggaatagaggaactaagtttcccttttccgatgcttttttaaattttgtgaactgttcctccgataaatctgtgaggagaagaagaagttcaacttcgatcgaaattgagaggcgctaataatgggggagatcagatttttacctaacgacggagtatatgagcatttaatagaaggaagacgacgccagaagtggagaagttttgatccagccacaaggttaagagaagtagccggcggggacttgagcgatagtggaaaccggagcgaagggaaatgtggtggatgcggcgtccgatggtgtgtaacggctatggcttcgacggtgaaaaaatcagatttgacggcggagattgaaacggccgacatccccgtgagctcgttgattttaagtctttcgataccagtttaaacctttttaagtgtggactgggagaagaatatatacactacagtactacaaatacaaagcccataaagcaatgttttctaaaccggaccggcgatcggaccgaatgggaccgcaaacgaaagcatatctggatgttattgccaaaaaacagtcaagcatagttttataaccaacatttattccttaggggtttgctggattcatgatctgtgttaattttaaaatttaatcagaatttttggtaattttcaatttccaagttgaaattatgtgctattcaatcaataatttaaaatatttaatccatgattttgaaatttaagctatagattttggagattttaataatttcatggatattttaataatttcatagagattttaaaagtaaaaaatacgaagaaaaacattttcaatcatagcaaatcacanaaagttggtatatacttgatgacatgttattntaaccatggtgcaccagagcacc

SEQ ID NO: 52501 - DNA, 1135 bp, Arabidopsis thaliana landsberg
ttctctattatttatatctacacttaccataaaacaaaacacctttttattacactctcatagtttttttaattcttacaaaaaaaaatttaattttgttttactgaaaagaaaaatgatgatatgaatatgagagtgtggcggacgattgccttaacaagatacaatgagaatgttagttcttcgcactcccaccggacctgtctccgccgtcagattcatcaccaaatccaaaccttctcctttctcttcacccgattcatggctcgtccctgcaccaaacactctccggagacgaaacgtcgtcctcgctctctctaaccccgacggaagcgtcaagtcaaaaccctcaacctcagcttctcaaatcccttcttcaggagatgaaacagttttcgtgggtcaagataatgttcctctcgagggcgtgattcaattcgataaaccgtcatctacttcatcttctaacattaccaaatgggggtaattaaaaactctaactttactttgttttagtctctctagaggaaggattgcttttgtattgttatctcaaatgttttgtgtagtttcttcagtcgtgtggctttacttgctggtggtgatgttttagctctgcttatcttctctgccatgggagatttagccatggtttccctgttttttctattgatactctccacacagctgaccctttcattgctggtattgattcggtttcgttactctcttatctatcttgcgtttgagaagctttgtttcaagtaaaaatggaaactttatgtggcaggatggtttctgagtgcttatttcttggggggttatgcggaggaaggacgaggaatgaagggaaagtctaaagctgtggttgcagctgcaaaatcttggattgtcggaactccggtaaggcgacatttaccaatctttttgacattgtaggtttagggtgttggtatctctactaaactgtttaaagcttgttcctttcgttacagcttggaattatcattaggtcagcttcatcaggtcacattccggcatatagctttgtgttggtgacaatgggcagtactgctgttttacttataggaaaaaaaaaattgttattcagtgtgcttcctacagagtccaagaa

SEQ ID NO: 52502 - DNA, 870 bp, Arabidopsis thaliana landsberg
tatataatagctatttagatacattaaaggtgttttttatattatagtcaagtctttccaatggagtattatatcatccaccagtgcataattattgtcaaatacaagttgagtcagattagtcaaatacaggcaaccaagactcgagatcctcatcgtctctccactttatataaaccccaagtcagtacttctcataatataccaaaaacgaaactgagaaagaagttttatttattaattaatggcggaagagaaaagctacaagtacgtgatcattggaggtggtgtagccggcgtaagtaaatgcattttcaattttgaacttttcttttgacaacaacatatcttttatcaagtttaaattcgattgtaacacaacaacaacaacaacaataacactaatacaaaccagtacaaaaataaaatacaaaccagtaaattacatgttttgcccaacatttttatcaactcgcattgttcagttttgtagatgatgagactttttttgttgactctgttttttttttgtttttttttttggcttaagaatcattgttcagtttgtgttcattctttgcttacaaatcatcgcttatttcgcatccgtgctttgcttacgaattcctttctctaactctctgttattttactctcacttttacatgtaaatccctttatgcttattaagttcttatacacaagaaattgtttatgattttcttctattaaatgttattcatgtaacgaatacgcatctctctgaattgactttttttttttttttttttgggcatttcggaatcacagggttacgcggcgagagagtttagtaatcagggcctgaagcctggtgaactcgcaatcatt

SEQ ID NO: 52503 - DNA, 595 bp, Arabidopsis thaliana landsberg
gggatccgcaatgtaggcaccacctatgcgcgcacggaagatattggctcgaacttctccccccagccggaagttgagcgtgttgcggaatgtgtctttgatttccgcattcgtattgtttttgaaatccttgttccctgcggcatctcgaaaacttgttcgcgcccgcatgccactgtaacccgtatactcgactgtggccgttagaaatcccttgtcttgaaaaaaaacagtaccacctaggtttcctcgcaacggcccgatcaggctatattcaaaatcattgggcgcgatgggaagcgaggtataaggcggcgtaatcaaattaccgtccgggcctgttacctttccgtccacatatccagcgccaacgctttggctaaatgtctccctgattgcgctaaaagttggactaattattgttccgcctatctggaacattgggttaaacttgtaaatagcaccaagcgagagattgaaaccttgtacctttaccacgaaatcttcaaactggtcgatgtaggtcagctccgggctgttgatatagtcgtcgctgaatctggcagaatattcgtacctgatcctgctgaaaccg

SEQ ID NO: 52504 - DNA, 582 bp, Arabidopsis thaliana landsberg
atcctcttgccggccagaccctcgccgccaccgccaccgccaccgctaactacaacttcggctcgtcgtcgctgcaggttgggtctgaaattcaactgaaagttcctgaaatttgttcatttcggttgggtccaatttttccccaaaatgaatcccacaaccttagttaaaatgttatttgggttattactagacttactttctgctatttcaacctaaacagttcttgcaatgctgatttgtgtagttgcgagtgaattgtggtcattctttagtgaaccaattactgctgtgattttttagtgactacaattggggatgttgtgggcggtttggttctggtggctgctctattttagtgaataatctgatggactggatacaatgtttagtggttgctatttgttgtcatatacccttgattgtagttctatacagattccatacgcatgagcaaattgagggtattttttagtgaaccaattactgctgagggcattttttagtgaatcaattactgaactggtggctgctaatgtctaccgattaatctgatgaactggatcgagtgtttaatggggg

SEQ ID NO: 52505 - DNA, 670 bp, Arabidopsis thaliana landsberg
acaaaattcttagcctcttcgtgtattcgatcagctactttcaagtcctttttgaaaaagaccaacacaattaggtgcaacagcaatgaaaaagtcgttacttttatttcctgtcgagagcgaataatgagtttcgagtttcgaccattgaaacgattttatttacttttatgtaattgttaggagacatataattctcttccttaatatgttacttttcttacgtagacattcaagtgttatcaaattgactcttttccaacaataaacaacaagaattcgaaatctcgtattctacttttgcatataaaatggttaaaatgtttgagtatctattttgatttcatcaaatacaaggctgaattatgcaatcttatttctggaagattatatatattaaactaaaaaaaactataacataagtacaaaacatgtttcatagatttaactctcaagatataaaattacacgaaattgaaaggctttttcagtggatcatgcagattcaaactcagacgtagacgtcgtgtctctgttttcaggccttctaatatgggcccaaagattctcccaaacaagtaagagtacaaaaattttcgtattcacctctcctcttgaataccaatgtttgtgcacaacgcaaattgcaattagagcaaagctgccgaga

SEQ ID NO: 52506 - DNA, 586 bp, Arabidopsis thaliana landsberg
tccatcgatcgaccccagcggaccctaccccagcccacagcccagtgcggcgccgagtgctctggtaaggcgcgacgtcaaatcaatcggcggacctacctgcggtctcccaggtcgccggtgcgcggctgtggctactcgctgtcgtgccaccgccaccgcctcccggggacgtacggggagacccaacggttggtgctggaaagttggaactggatcgggcactcactctcctggtctcctccagtaaataccctctaatatgcattgcacctgggctgctaaaaaggcggccagctgggtgtcatttggggctaggccgtgggtagctgcgtgcccgctgtactctttgattttgacgtgcctgcctgcctgctcatcacagacgcacactgattgcccattgccgatgacggaatcgcatgctccgctcttcgacttgatagctagtagtagcaaggaacacgcgttccaggctgatacgttcgtttcttcactgatccaccgctggcgctgggcggcacatcggtgagccgggacgccagtccttttcgcctacgcgtgtcgtcgccgcccactgcgagcg

SEQ ID NO: 52507 - DNA, 686 bp, Arabidopsis thaliana landsberg
cgaccaagaactcccgttgttgttattgttccttccgctacttccttgcgaggcccgagtttctcaaaccattaccaccaccaccaccaccaccaccgcttgttgttgctcccgcttgaacagctgttacatacgacgcactctgcctccagctcccaaatatagcagcgttccaagaccctctcgacgagtttgttcttaaccgggaagagcctgaacccgagttggtatcttctcttactactttcagtgggttctcaagtgcgttcacaatgtgtctcattaatggtcttcttgttggttttgggtttaggcatgactttgcaatgatagccattgcccatacttcttctaaaaggtcttcgtctaccattaatgacgggtctaagatcttggttactagttctttctcgtttgtgctgatgtatggcaaagcttcttccatgtactcttttgcaagtgcgttgtctggcgagctaatcccgagctttcccgttactagctcaagtaacactttgccaaagcagtagacatcatacgaacatattgcatttgttacacctgaaaagaataaaccaatcagatgtctatcggttaatcggagatggtatatcttgatgaaatctttattctcctaagtgtatacctgaagaagaaagttcaatcgatcgctagaataggaaata

SEQ ID NO: 52508 - DNA, 1097 bp, Arabidopsis thaliana landsberg
agttagatcaatactcaatatatgatcaatgatgtatatatatgaactcagttgttatacaagaaatgaaaatgctatttaaataccgatcatgaagtgttaaaaagtgtcagaatatgacatgaagcgttttgtcctaccgggtattcgagttataggtttggatctctcaagaatattttgggccatattagttatatttgggcttaagcgttttgcaaagagacgaggaagaaagattgggtcaagttaacaaaacagagacactcgtattagttggtactttggtagcaggtcgatttatttgccagtaaaaacttggtacacaactgacaactcgtatcgttattagtttgtacttggtacctttggttcaagaaaaagttgatatagttaaatcagttgtgttcatgaggtgattctgatttaatttgttgactagggcgattccttcacatcacaataacaaagttttatagaatttttttttataacatttttgccacgcttcgtaaagtttggtatttacaccgcattttccctgtacaagaattcatatattatttatttatatactccagttgacaattataagtttataacgtttttacaattatttaaataccatgtgaagatccaagaatatgtcttacttcttctttgtgtaagaaaactaactatatcactataataaaataattctaatcattatatttgtaaatatgcagttatttgtcaattttgaatttagtattttagacgttatcacttcagccaaatatgatttggatttaagtccaaaatgcaatttcgtacgtatccctcttgtcgtctaatgattatttcaatatttcttatattatccctaactacagagctacatttatattgtattctaatgacagggaaactttcatagagattcagatagatgaaattggtgggaaacatcattgaacaggaaacttttagcaaatcatatcgatttatctacaaaagaatacttagcgtaatgaagttcacttgttgtgaatgactatgatttgatcaaattagttaattctgccgaatcatttttctttttgctttgattaagc

SEQ ID NO: 52509 - DNA, 579 bp, Arabidopsis thaliana landsberg
cctgtgcaggcaaacaagggtggtaaaggcaaagttcacctttcctttttcaatactttgcacctggctgtattccagccccgaagccgcagccagctggcggatactgtatcctttgtcctgccgcatcttggtaaggtgcgcagcaaaacggagcaatatcttttccttgccggtcattccggaacaaggtcattgcaaatgaccgattttttgacgtataatcatatatcgatcatttttccattaacttgtgtcctatgcagaaaacaactcacccctgccggcccatcccgcgctccacgctgcacatgatgctgtacggtatcatgcttttctatatccgccaaagaccgcttactccctcctccgggaaaacagttcgccgcaaagccatccatcccccgaagggagaataattgctccctgttatttccctcttcttcccttcttactccgctatcttcttcttgttaataactcaccccttaaatgtggagtattaaataggtcccgattatatatcactgtttactttatggaaatttaaactactgatcacccattaaatcctaatac

SEQ ID NO: 52510 - DNA, 693 bp, Arabidopsis thaliana landsberg
  unsure (1)..(693): unsure at all n locations
cccccccccccccgcccccncccccccccccccccccccccccggggggatttggggggggccaccccggcgcccatccggggacagaagaagcccccccccctccccccagaccccccccccctcttcccccccccttgtccccggccccccccacccaccccccccccccccccccccccccccccccccccccctccccccccccccctcccccccccccccncccccccccccccccccccctccccccccccccttcgcccccccccccccctcccccccccccctccccccggccccccccccccccccccctttttcttcccccccgcgcgttgttagtcggccccccccccccctcgcggggccccccccacccacaaacaacacacccccccncaccctcccccccccccccctctcccccccccgccccccccctctggcccccgcctctccccccctcgccggtcttcgtcccccgcgggccgtgtgttgtttctcccgccgcccccgcccccccccgcccccccccgctcgtcccccccgccccccccccccccctccccccgccccctctttctcccgccccccgccccccccggcccgcgccccccccccgccccctcccccgcccccccccctcccccccccccccccccctcccgccccccgcccccccccctcccc

SEQ ID NO: 52511 - DNA, 878 bp, Arabidopsis thaliana landsberg
ttggtaaacaaaaaaaaggccgatacatagaatattaagttttacctttgaagtcatcgatttgtatgttttcgatttccagttttcgaaaatcgcttctattcctactgacgtagaacttaccccatttatagcctttgtattttggagggttttcaggactcacaagttcttctaatggcttcacttccacatcgtgtgaaggcaacaagaagaatggtatcgagtatctctctcttgttgtgttcaccaccactctatgttcagcactccaatacttgtcattcgtccatatctacattatcatatttatgatatagtaatactcattaattatgaaagaatcttttaatgttatgtataacaaaagaatatgacataagttcaaggatattattacctccatacaattgcctatattgatgacaagagcattagggacgggtctaatcggaaaccaaacaccgtccgatctacgactaacttgtaatcctccaacatcatcttgagccaatagactaataacgttggcatctttgtggtgaccaacacctaaagctaggtcaggtcttggacatggtggataacgatttatcctgaaaaaactcatttgttctttgaagtagtcatgaaaacgctcttttggcacgcctaagcttaacgaaatcagttccaagagattggacgataagccttcagcgtgtcttgcatacacttcacatgctgcattaatgatccattagaacctatcatatcagaaggtgccataactaaaaattcagataatttgtcagccacacatgcgtaacggatcatattcattggttggtgcagcgctgaaagatagtactcacgtcacaccggtagatccggacaac

SEQ ID NO: 52512 - DNA, 1034 bp, Arabidopsis thaliana landsberg
gatctgttcatcagatgcacctttcgggacttgcaacacatcgtagtaactcttcctaaatttcacaacacagattttctaagcattcacattttccacacatttctgaaggaatcgaaagatgttcttacccggcaaggacgcagatggcgtaggaaagagcgaacagtacgatacacagctccgaccaccgaatcgccatggaaacggaaatcggatctctcccaaggattactccaacctgagattcgtttcgattttaacaatgaaacctcacagaatgaacaagaacgaagatcttcttcgctgatttttatgattggaaaactcgaatcactctctctacttgttttcgtggaaacgattccaaaactcgagcctcgtggtcgggttacgtgtacactgcaatgcttaaccaatcaggattaagtctctgacgatcgtaaccaataaatattagccacgtggataaaccaacgtcgaatcgctgactgttcttttcgtcgactttaatgagtacgacgtcgttatactcatataatctatacaaggcgcattaataatgaagcgggcctgtaactcccctacgattgttattcaataaatgtggcctaacccgattaaaaaccctaggttactgggcccatacaaaatcgagattgttttatgtaaaccgatgtgaggaggccagatccaaactagtgttgcatatttatgcattatggattttgtacctaccatattaaacttgttaatatcatgacaaaaccgctgctatgagaaaatttatttctgtaatctttatataatctagactatcttagtcacacattacgttgtgcattggttaaacactactggagtatagaacacaaaaaggtggtctaagtaatcaatacatatattgtctgcttattaattacatgcaaagaaacatggactggtttggacaatcatggcatatgtcaggtctcttgattcttcgcatcttcgacgaagcattgtttactagacatgcaatagtaactagacat

SEQ ID NO: 52513 - DNA, 1115 bp, Arabidopsis thaliana landsberg
catttgatatctttgtcatcgaacttatgttttttttttctaataatcgaaaactttttctagggaggggaaatttattatcgtcaaatattccaatttgttattgaaatgttttcgtaatatacctcaatttcaaatttaaatattttattttaattttaaaattgcgcagccgtaattttaattttaaacttgctcaccctaagatgggttttattttctcctgaatttaatatttaatttactaaaaatgatatgataagcctttatgtatgtaaactttttttcttaccattttttttaatacttccattgctctttttttctgacgtcttctttaatttattctactctatacatatctgccatatatgtgtatatagagagaaatatacttcaattcgtttccaaacctatactctcctctctcacaaaaatgaacaacaccaaaatggaaaacaaaagccatagcaaccaccaccggtaccatcatctatcatcccggagccacgagcaaaaccagcgtggcctaatttcgataaatgccataatcatcattggcatctccattatctccatattcataatccttgcaattctcctaataatcattttacttcatcgacttaaatccgcaagagtcaaagcacaagaattatcttgcaaagaaagcttcaacaacatgaacaatggtggagcttccaccaactacagctacacttctagccctggtaaaacacctaaacattcattccataattttgtaaagaatcataagtttttaattcaaaatcaatcagcaatgagtggagattctcatatctttatatcagtattgaattacttccacatccaatgtgtatttcttattcgaactttaatgttcttgttagatgacatcaagagagattgtctatactcaagaaacccaacatcgttcagacaattacccccacagacaaaaagttgtaggagaagccgagccgaaggagtagaagtgtacacatacaaggaattagagattgcaacaaataatttcagcgaggagaagaaaatcggaaatggagatgtgtacaaaggagtactaagtgatggaactgttgcggccattaaaa

SEQ ID NO: 52514 - DNA, 706 bp, Arabidopsis thaliana landsberg
cattgggattgttttgatatgtttcaaaccatctttcaggttgtccgatttgagacactagggttgatttgctattcgcctgtttaattgaatcggctacctttcctggtaaatgagtcgtcaaacttcaaattagttttggcttttgcaacagcaacctctagaatctagattatcgtttaggacagagacctgttagcgacttttatgaaccaagaatatatatcttgacatattagccttagtttttgactaccattctagtagtagatctcagatttctcgtttttggtgatgagttaatacaaagtttttgactaagttaatgggattaaataagattgcttgaatctgccaaatctcttactttaaaaataattttcctcactggttttggatttatataaagcgtagcatattcgagttctgatgcacacattagaatccaaaaagaccaaaaaccaaaaaaatgtccgaaccaagtccagtcgctgatccttatgcttatcttaacatcgtaaagaatccagatggttcaatcactcgcgacctcaccaacttcccctgcaccgcagctacacctgatccttccccactaaaccccgccgtttcaaaagatcttcccgttaaccaaattaaagtcaacgtggctccgtctctaccttccctcctccgccgtcaacgagggtaacgtttagtctcagaa

SEQ ID NO: 52515 - DNA, 1237 bp, Arabidopsis thaliana landsberg
cggtttacctctatatgccaccactttttgctttctataactgtgaaattagtaatttcagttttttgtttttttctattgataatttatgcctactatttctgattgtttatttcagccaattatacttgatcatttctatgttgctccataaagaggaagacgggaagactgaagatattgataaggaacgtgagtacgttcccaccattattcttatcttccatagtataaaacagtcagaagatgtcactgatgcaacaaagtcaaaggttggtaaaagactttcttcagcttgttctattttacagcagtcatgtcaggactgctttttataatgattctaagcatgccggtataatgaatcacactacttgccactgtcgtggtgccatggagctaacatctcataacttatattaacagaactcacatgcgatctgtgagcttgggctgtcaataatcaatcacttaactcagaaagagcctgatctacaaggggaaatcacacctgtatcgctgcctccgacgctgtacaaaccttctgaaaaagttgaaggagacaagtctcaggtaaaaactcagaaattattcatggttgtgggttcaaattttcatgatgagtttgccaagtattctttggcaacctgagctgtatgtcgtatttgcttatagatttgctgtgttgaactcatatattgttctggtttgtgttttctaacccatgacaggtaggtgaagaaaaattgtggctagctgatgagactgtcctgttacacttcagggctctcaagttggagagtcatgctgatgcatctgtatgttattcaacttaaaaatctgtgttgcagtacctagtgatttctgtattaatccataatttccttttcaggtgatcccccaaacttcagaaaatgaggttatgattgatggggaaagtgatggaaatgaaattcctctgggtaaaatagtagagcgtttgagagctcagggaaccaagactagaaagggcaaaaagaataaatctgtaccagctgaagatgagaatggtaaaaatgatgtctatgttttgaagatggtgagggagataaatctagatcacttacaaatgctggataaattcgaatccagtaatggacacagacattcccctagtgagagagcagagatatgtcaaagagatcagaagggtaacaaaaggaatgttggtgatgcacatcagtagtttcagtcccta

SEQ ID NO: 52516 - DNA, 979 bp, Arabidopsis thaliana landsberg
acttattttgcaggttatagtagaatttatagctaattatatatatatatatataaatgattcagtattttgtgaaccaaatactcctttggcattgataaatgataaatatttgcgacctttttcatgtcgatagagtttttgttttttttcttaattcaagctagttgaggtatctcattttagacttctatacttcacatttactaacagcgaattgtttcctcttcttttacaagaaattacattctgttaaattgtgcacaatgatagaattttttttctccacatagaaaagtcggaatgaacaattttgacttcgtgaaatactattcaagttgatagaaaacaagaaacttctttaaaacatgcatgtattatgaactacattgtttttttttttgtttgttttacattagtttttactcaaaaatcatctaacagcttaaacggaaccatttactgtattttataacaaagaaattacagattctgactttatgttgggataaataattaatataatgcggatggtaacacatcgatgacattaacacaaaccactatcttatatagtatgtagtatttgaaaaaaaaaaatggaaagaaaacaaattagaaaactatcggaccaaaagcataattactccgactttcgttatcataaaaatcttcacccattaactcgaattcaatgaactaatggcttaggtcctttttaaaacaattttggaccatttattcagttcttctatggaaagttcgaactaatttctagggtttggacctttggtgacatgagaaaaaaaagaccacttgaccaaactcactgaagtcagactaatggtgagtactctcgacacgcgtcaagaaacatccattttttttgttataaagaaagaaacatggatataaaacgataagtctattattttccacgaatctttttatggaacttaaagatgagtcatggtaataa

SEQ ID NO: 52517 - DNA, 610 bp, Arabidopsis thaliana landsberg
gtacatagctgattgagaggccggaatcatggaagattgggaagaagtattccctgtatgcatgggtgcccacattgttgtcggaccttgagcagggtttggaaaattcaggtttcccacgaggttacaatccatagcactctgctgcatgtaagccgtgggccacatagggggtggaggaacaaactgctggccaatagatgaatttgacatgggctgagaagaagtcgcattgtttgatgggtccattctagtaagggtggacaggggacagattaagtcagatggtaatatgagttacatttgagcataagcatttgaactaatgatttagaaatcaaacataaaaagcagtaacaattataataaaaggttcgcattaacggttacagtactaaaccaaacacatgagagttgctactgagcaaagttcacagactacaattattccttacatcgaactaagtacttcttcggacagtgtactgcttagacatagacatacatgacatatgggtgttcaaaaggatgtcatgtacctttcactggcaacataaccctaaaacatattcgagtagctattacgggtagactatctgaacactgaaat

SEQ ID NO: 52518 - DNA, 532 bp, Arabidopsis thaliana landsberg
aacaggaaacgattgagaaaatgcgtaaagagattgagtctagtcaggaaaatgcgttaagtttgtgtaccgagaaggttttattggcccgacaagcgtatgatcttgtaagttatatattcctctaaggcttcctcttgctatttaagtatatttgctgctgtgaatgttttgttgtctgtcacgaaaacattgatggatgtgtatgtattaattcaatcagaatctttgttgctaaagtctgaatatagctcctttggttgtttcagccagttttggtgttgtggtaattattatgtttattctggttgtagatagatagtcatgtaaaacgacttgatgaagatctgaataattttgcagaagatttaaagcaaggtatgtgaatttagctcaggagctgtctagttactgttatcttaagggcaatgattagaactatatttttcatattcctaatgcttattcatgctaattattccaaaagatctgttaatattgtgtgccaaaattgatccattgaggttattta

SEQ ID NO: 52519 - DNA, 900 bp, Arabidopsis thaliana landsberg
ggatacgtgaatttgttgcataactatggtctcctgttcctcctttcatactaagagcgtccaccaaagatttcctttcgtatatatcaatgttattacaaattcataaacacacaatggtaaggttaagcatgttaatgaccttagtattagaagctttagtataccaacaaaaagatgattacaatctaatctacccatttaagctctaaagaaagagttctaaaaaacaagagaaaaaattatacaagtacaaagttacaattacaagaaatgaatcatcccatttacttaaaatatcgaagaattcaaccatttgtttgtatgaatgtaagatttatttatagaaaatttggttttacaattaatgcaacataaagtcgaagatcaaaaaacattttagaagaaatcaatcattaccttgagggagacatgatgttcacaatatgtatgtatcaattttctttaccaaatgtataaggtctaagattagaagatcttggccttgaactagcttgtatgcatgtgtactttaaaaaaaggacactttagtttttctggtaattttttcagatggtatgtgtcctggaaacgagcactgtcgcatacttaagagccacttgcatcaagcacaaacacacacacacataacacttgtatatcttacacctaatattatatttgcatttattttaattttacaacagatcaaattggaaatattaaaaaaaaacaagaaaatgggaaacatgataacgtaattaaaatagtactgagctcttccaattggtgggttttaaaggatgggaaataaaaataaagaattttttttaaattaaattttgggaattttaaaatggtacctttttttaaagtcccctctttttttttaaatttttt

SEQ ID NO: 52520 - DNA, 511 bp, Arabidopsis thaliana landsberg
ggtggccccccggcggagcggcggctggcgggagagggagcgggacggcgagggaggtggcgacctcgtgctgggtcatggggagggtgagatccgggcggcggcgcacgcggcccggcgtgccggtgcttgggtcgggaggccgcccgggcgcatggcttggtgcgtggttcgctcggggcgggacttggggtgttgaggagttcgttaggccgggtgtggtagtagtgatggcgtctgcgtgacaccgtctggagtcttctcctccccacgtgcgctcggggtttgtcgtgcggtgcccgtgtattggagaacagtgcctgatcgctcatcaggttggagaacgggacgtgacatcgaacgcgtaggccacgtggaagcacaagcaatatcgagttcctgttcctcacgaggcgacgatctcgcctgacgatgacgcaaccccagcagctggaggacgagtggagatgcgacgcgatgcctcagttggagacgcaccgttgcgtgctga

SEQ ID NO: 52521 - DNA, 660 bp, Arabidopsis thaliana landsberg
aagtgtcgcagatttgtggaagtcggagacagaaaacaacttgcgatgcactaattgtctaatttaaaatgagcaagagctcaccaatattttaaacccacatggaaaatattagttgatcaaaagaagtagataggcccattagtaaatggcccactgataaaccaacttgtaaccgtttttcttataagaagtattgttgagcccaaacaaaagacgtataccgtgttttaaatgattttagatcaaattacaactaggaaaaataattatatgtaagacaaagctctagcctctaaaactcgtctaggaaacatcaagaatatgtttctcgtacatttagaatcaaagtgatcggctacacaccaactaggtaattggtcgatgatcatccaagttaaaaactaaaaagcatgcatagtttcttcaatccgaccatgttcagttttttataagtatttaagcattcctaaacacagtttttaaccacagttttaatttctctaagtagttgttgtcttgttgaaacctttaattatggttatgttttctctaagctctgctttgctttgtttagttatatgtgtaagtagttttcttgttgggtcttgactcttgaggattatactagcttaggttaatcacaaatgatgattaaac

SEQ ID NO: 52522 - DNA, 666 bp, Arabidopsis thaliana landsberg
tgttgtcgagctgggtgcaccgcgtgtgagtggcacaagtagctcagcctgaggtttctagggttttgggttgagcacatgggaggcatcgctcctctgctcaggtgcagcacatctgcgcgacaacatcttcgtcatcaacggggtcaggtgaagggagcagaggaaaaattaatagatctaggtttattatcaaggaaatgcttctacaggagacttttggatttacttgcagttaaatcagaattttgtcagtatgcttcattattgctgatttcaaaatcatcggtgtatatcttttgagatgcttggtcaaaacctataaccttacttctcaaaattgttctgtgtagaagcttcatcttgctttctaacgtaataatatgatctctgatcgtgtggacttgttttctacacagaactggtggccatcgaatctgcttatcctcaactacatttcccacgaggagcctaaagtccttgtgccggagtatggtgagatggctgatatccaagacaaggatgtcactctctttttctggcgagctcccaatccacgctataaggccactctggtttcttgactgcgtaatttactctcatttagtgacatgtgctgtgatgatgcagcatgactatgtgatcagtagagatgatgtgttggtg

SEQ ID NO: 52523 - DNA, 1115 bp, Arabidopsis thaliana landsberg
aatgattctcgtagctttaatgttcgggattagacacttggccaatatgcctagctaaagtatgttatcatgtcttgtcactgaacattaaattcacctcattagtacctctgagcgcgttatatgtttgtagctagcattgtcaatatcaagccagtgagcacattgttcattaccttttctctgattttataagccaaataccagacaacacttgataatatttattgttgtcaagctacaaaacgtgagattcccgatagctatctttaatacattggcttctaaccggttaaaaaagaaaagacatttggtatgtacaccaacgagtcaccctaactaaaactgtaattggcaactccgatcaatttttcaaatccctctagtcatcttaaaatataaatttatttcactctataattgagcataatgcaagttcgttctgatccaaaaaaaaaaaaagttccggtcgttttataaggcaagtcaactttgatagaaactaatttgcattcgcataactgtacattttctttaaaatacacattaaaaaggtttaaacgttcaagtctttattttttatgatgaggatatagacggtctttgatttcaaatattcgaaagtcatttttttttaatatcacaagttgtagtattttaaacaatatgttatttcttgacatagagattatttagtcttttatttatatgtgtttactattcttcttccttttatataatcatataacctatagtttgtatatttcaattattccatcatttaccatttagtcgtctccttggtgatccaaatacttcatcatcttccttcatagcaaattatcttcgtctatctcatacatttaaacaaacatagacatacactaatcaatcttccttaatttaaaaaaaaaaacatggagaaaacccaagaatcagtggttagatatggaaaaaagatcgagaaaatgccatatcttatgcccgccggccgagttgtctttgcatctgcgttcctcgtgtctgcttggagagagtaagcactaatgaaattgttagttctgaatgaaatatattgttgtctcttcatgctagctattgatttttatattcat

SEQ ID NO: 52524 - DNA, 568 bp, Arabidopsis thaliana landsberg
  unsure (1)..(568): unsure at all n locations
gaggatccccgaactaaacatattcttcaaattactaaattcacctagctttggtattattaacccgaccattttattcatatacaataaccaaatcatctatacttgataaatacccttaccaaagtactttacgtataatccacctacaagcatcatgcataactccgatgttacttgggagagacctaccaatgctactcgatcccaactattcggagtggccaaacaacattcatccatgacataaaatttattgctaaatatannnnnnnnnnnnnnnnnnnnnnnnnnnnnnnnnntttaccgattaaataaaaatcaacaccaataaagatggtagaatctatccttcatattattaattcgagcgcacaacgactactattgcgaccagtaattcaatccaatgcattcgatcatcaaactagctaggaggattaacgaattgactcactaatattaaattgactcggacatcacgacaacaaccataggatcagacgattcatcgaacacctggtgtacatgattaaatagacaggattaaacgagcatagtgcaatat

SEQ ID NO: 52525 - DNA, 1027 bp, Arabidopsis thaliana landsberg
ttatcttatttgtttctaaatattgacgttttagaatttttacatatatttaaaataatcattgattaattattattatttatattaaatatgttttaataaatttaaatcaatagtaatatgaaactattaattattgtgctctacgatatcttaatactaaataataataaaaatcttaaaaagctaatctttgtaaaacaaattacaaaagtagaagaacatcatttttctaaaattttctaagaacagagaaagtataaaacttgaaacaaatttggttgaaatcttatatataattatggaaaagtgatatgatatgatgtctgactattgtaatcgggcaattccagtgatgattagaatgataaattccattccctgagacacagttccatgtaaatagtatttttcaaaggtgagtgtgaaaaaggcaaatttttctaccctggcttttcttatttgaataccccaacttaacaactttcacattgattgatttccacacagttggtaaaattcagactataatttaaaatattgaaggacattaaagggccacaacaacaaaagtctgtttgtttctttgaagactaaacttttgttacaaaaagacccttcttttttgtaacttcttactttattgactcttcttcttcttcactactgaaaacttcttgctgagacaacaacactttcaactttataataaaattaattaatcctattattattcgataaaagacgacaataacttatgattaattaaaaaaaaggtagaaaaattcacacttaaggattttgttttcatcttgttaccgtagctagctagtaccataaaaagttttactgattacccgtaaaactattaatttttctactttgacatgtttagcatttattccctgacaatccgataacatttttggatagatcgtaagtgatacgtgtcccttgctgctgcacatttccgatgatcgacaacgacgacgacgtcggagcaaaagcgaagcataacgttccacta

SEQ ID NO: 52526 - DNA, 647 bp, Arabidopsis thaliana landsberg
caagtatgactagcagtctgtagggaaggtgaagaatcagtcacttgatcacgagctttatctgaggtagacggactacaagctcgaccgttgtagaacgagctaagtgctttaagacgagctgatcttgagtacgagtagattgttggtagacgagttgattgcttgttctttcacctttgatgggtccaaaaagttgcccttcaccgaacttgctattctactatttatagtcgtccgtataataagatatcccgaggtgatttgtcgagaatacccttccattgacaaggcggtcgtcattacgggccggagtaattgtttccgagattgggcttcctgatgattgtagtggattgaccgttctgtttctcagattggaccgaatcaataaagcccaatcttacccattaacaaaacacatcaaatcctgatgcaaaagaattgtacactttgattctttaattgtgttttctctaagccttttcaagaatcttcttcatgagcttcttcctagtgtctgttcatcaatcattatgatatgtgtgaacagttcatgtgaaatttctatcaacactaaagcccatataaattaggatgggtaaaagcccatacttattgggccttgattgggttcaaattcacca

SEQ ID NO: 52527 - DNA, 736 bp, Arabidopsis thaliana landsberg
aaataaatacaacgtaactattttagagatattttactatacattaacctctagactctagtttcagctcgggttgtacatgttcggttcataaggtaatgcacagatgaaaaacatttgtcacattaatgctagtaagtactaagtagtgacagatcactaaatccataattaaagtcatttttttcttgccaatatcataatcatttgtgagttacttatctagtattagataggagtcgagattaacttaacatagttactttgagttattccaacaattcccacatttaaattttgtaccatagaataccatttataaatatacaatattaatttataataagattatggcccaaaacaatattctagaattaaatatgagttaatataagttcaacacgtttagttctagttatttcaacaatttttacttttaaatttttaacaaactatacggtttaaaacgtatataatttctgtttatggcgcaaaacagtgatctaaccataaataacaatgattattatatttaaatttgtaacaaattataccgtttactaatttacgatattaaatctttacagatatatgtatttattttaatacattataccgatttatgaattgaaaattatcaagtatagtattaaatatgaattaatattaaacacaagttaaattataggtaacgaataaatatatttagagaccataatgttttgaagaaaaatat

SEQ ID NO: 52528 - DNA, 344 bp, Arabidopsis thaliana landsberg
  unsure (1)..(344): unsure at all n locations
gctgtggttcgaggaacacgagaatggcggcccgcaatacgacgtgccgaagaactactagaaattcaacccgctcgaccacgtgaaggattggcgcgtgccgatgctggtggtgcactcgggccacgatttccgcatcccgctgagccagggcctgggcgcattcaccgcgctgcagcgccgcggcatccccagcgaattcctcaccttcccgaacgaaagccactgggtactccagccgcacaacagcgtgttgtggcatgacacggtgaatgcgtggctggagaagtggacgaagcagtagagcgancnnnnnctagccctnccctgcccgcgggggaggg

SEQ ID NO: 52529 - DNA, 438 bp, Arabidopsis thaliana landsberg
tgtgttaaaatcacacaataaagagatccactctatcttcataattttacaactttgggtattacatcacctggttgtgtagttgcctcttcgttttcctttgtccatttcaatacttgcacctcatacgacacgcaatctactccccatgctccaccactaggtctgacattacactgacaactatgtttggattgtaatctgatatgtcatgggaattagaagtaacttctagcttcagaagatcaactcaccactagctactatgtcctctgagcgacgtatactccacatctacactgtcaacaaccatatgagtgcgcgataaccgtttaaatatctggggcgggctttgtatgtccattagagctaccaacaactacatagatgagctaacagctacaaacaacatgttccgcctgagatccccaactaagc

SEQ ID NO: 52530 - DNA, 609 bp, Arabidopsis thaliana landsberg
tgatcgtcgcaatgctgctgatatcaaaacatggcagcttaatgatggtaacgtgatggctgctatggtgaacagcgtcaaaccgtctatgattatgagtttgtttaaatttaaaactgctaaagccatctggtctcatttgaaggagcgttttgttcaggacagtggtgctctattacacactctcatgcagcagacacatgttattgagcaaaatgatatgagtattgatgaatactattcagccttcgatcgtctgatgagtgctttgacatctatggtgcctgcttgtactgctgatccgtgtccggctcataagtttattgagaagttcttcacttacagatttgttatgggcgttcggtccgagtttgattctcttcgtgctcgtttacttcagggttctgacactctcacaatggctaaggcgttgtctgatttacttgctgaagagactcgtcttaattctctgtcctctactggtggtaatctcacagtgtgttggctgctgccagaagcctaagagtgtttttaaccttgtgatcattgtggcaagccaatcatcgatctgagctttcgtttgtcaagttccctgagaagttgactgat

SEQ ID NO: 52531 - DNA, 606 bp, Arabidopsis thaliana landsberg
gcagtctacagggcactaggaccagggcactacaagtcagaaaaatgaaacagcaagtgtactacgttgccgcccaggcacatcttaatggcctaatgggcctcctgtcatgacgccatattgtccagtgcactatttttttctttttcccatttcagtttttacatatacgatgtatatacacttgctggtattacaggtatgccgatgcatacccggcatactctataggtccatcactgagaggctcgtttagactcacgagccaccacactaagtcttgtttaaaatataaattgtatattttcattatatataaaataaaatttatgtaccaaaaatccagaaacatattttaaattatacctagcgttttgtctataaaaaataagaaaataaatcaatgacataataatgtagtagtgtaacaacatatcaccatattattaggccggatcgagatcgtttaggtggtgactcggctcccgagccaccactataagtctcgtttaaaacataaatcgtatatttttcattatatataaagtaaaaattatgtaccaaaaatacagcaacatattttcgttatcaatgatcaaagaatgt

SEQ ID NO: 52532 - DNA, 740 bp, Arabidopsis thaliana landsberg
taaatacgtcaaaaattaaccggacttaacatcccatcttttataattaacactcggctaagttttaaagtttctcacgaataatgttttatgtaatttgtatatacatgatattttgtggttggaccggtttttaaaatcaagatctgaaaactttatataatttccctttcttgtgcttcgttcggtgtgttctttgcatgtaacatgttagcacgataagctgaaacattatagtattgatcttttaatatagttaaatcttcattatataattgagttataactttgataaactaacaatagaatgaatgatctgttacaaacgaagttgtgacatgtcactttcgagccactaaccgcaaagttcggattcaaacttttgaagtgcgttaaagtgttcgtaaccaatatttaaaaccggattcaaattgaatcaaaccgttgaaaaactcaacatgaaaagcaaaaccggaattctattactagtgaactaaatccaattgaccgaataaaatccagtaaaccgatccataaaccaaaattggaagaaaacaatgcctgtttaataggtgttgaaactttgctgaaaaaaaacgaagcgagcaccctctaaaatgccttcgatttctctggcgccattgatttagttttctctctctgactacaaagtatccattcgttcaaaccagtttcttcccattttcgatttctgtcaaattcaccaccaactccaaaac

SEQ ID NO: 52533 - DNA, 1051 bp, Arabidopsis thaliana landsberg
gtattgtgcttctggaggactccaattgccattatcgctaagcaacttgttcaaccgtttggtgagtagtttacttttactcaggttaaagctcgcttttggtatataacacataggaaaaaaatgaatgtggtgtgtttcacagggactttgttatcttggggaacaggaggtcacatgacaggccatgtaatggtaagttccttcttctcaatccatttatttgggcttgttcttgattgagagtgttggttgggtaaaaatgcaggtcgggatcataccgtggctcatactctcaaacagagtgagcaaatatgtgtgtaggttcgtggagttctaaatcacatccctgaaaagagtgaagattggatggtttttgagttcaaagttgtagccttttaggagacacttgtggcagaaattgtgcttctctttttgttcctaatcttccttaacaatgtatatttatatgactctttttctctggttgtttgttggattttaccaataacaagtagttcgtttttgagagttgagcaggttgttaccgtagaagcagccccaatatttacccaatgtgtatatatacaccataacaaacacattgtctctattcctctacgtgttgtcaatttttatcttgtaacaccgactttgtaaaatcagattctaaagacgcgtgtacttattcaacacgatgccaatgcatgtggttcattaagatgtagcattatatcaccgaaaatggaagagagaaataaaaatacttactattattaaaagtgggtagcttggtgaaggcactaaagtttaatgggagaatctttttagcaattaattcgagggcattataatatccacttccaaccaccacattacttaattaaggaaaacaatttaaatcatagtatcttgtttggtttgaaaggaacgtgcacgtgtcacatcatctacacttgtctttctaaatcaaagaacttgattggatttggttaagcctattagtaagagttaataagacagaaccaaagaaaagggtttggtttgaggg

SEQ ID NO: 52534 - DNA, 990 bp, Arabidopsis thaliana landsberg
ttaaagactcaaatgtatggagccacgttttggaacatatcacctcctttgattttctttgtttttattaattcaatcttttttgtttttgacattaacaataaacaatctattggtcatcgcattaattctcaaacaacgtaatataaagatatctggtccatgtgagcataatttttcaagatattgttataaagactagttttcaatatttattttgatgccccaaaaaaactacttgtatccaagaacaatacttaattagttaatagtttaatgatgatggcaaaatatatacacaatacacttgcctattagtgtttgcaaatattgatgataaaagaaattagtgtttgtcatgtttcatataagatagatgatagatcactacaatactcatacacacataattcttaatcacacatatacctgttgtttatgtaattattaaaaagaagagaatttactctattccactacttttcttcaaaggtttttcatttctatcacttttgtttattatttttgaatctatcatatttgtatgatagaaataagacgatttcattattctcattttcataatataatattatatattgaatgtatagttgttaaaaaaaagattatctattgagaaagagaaaaaaaagatgttacaacagtattaataaaaatgatatatgtaaacaaaaagaggataatgtgatagatccaaaagatttagggaacaaaatagtaaaaacaaaaagaaatttgtaatttgtagtagttttgttaattttccttaaaccgcaaaatcatattctactatttatatcctcgtttagtgttcacaaaacttatcaagaaccataagctaaagagggttcggttctttaaacccctccatctctctctccttcattacactgtagagtgttaaagtaccactctatagccatggcttcactcttcttcatctctagctttctctctttgtcttcttct

SEQ ID NO: 52535 - DNA, 772 bp, Arabidopsis thaliana landsberg
cggccaacaaccacctccgctagttttaactaacagagaagaagaacatctcccaccatggaatgttacagacttggccaggtaagatcatctattttccataaatacttgaaaattttctaatgagaaattggaaaagagtcaataatcaagcgcattcccattacaaagaaaaattagaattggtctgttgcttttatacttaagtttatgtttttcctctctaatatatcatcataagtcttatgtctcttcttatggggattctataagaacataattctatattcacttgtcaaattatttgggttaattaacgcagaacttatactccacaaaatcaaagttcgacgatcctttctcaacctcaaatgccgtcaagctctaccaggtttatactattctttaatatattttcttatattattctattatatataattatagatattatctctctttagatgtggaatttgcttataaatttgtttcactaaatagttgcagttatatatttatttcttaaattatttgggtaatgcagtacttaccatctccaaaatcaaatttctatgatccctcatcaacctcaaacgcggtcaaggtctaccaggtatatacattattctttactaaaaatattctaaattcaatctctcttgtatgataatttaattgatgtctctctttacgatatagaatattgtcttacatacttgtttcacgaaaaagttacaattatacaagaacataactatgtatttgtttgggt

SEQ ID NO: 52536 - DNA, 1880 bp, Arabidopsis thaliana landsberg
  unsure (1)..(1880): unsure at all n locations
aaagctttttgtcatcttattcacaagtgttaaccaactaaatcccccagtttttccaggtaccattagaggcttattatatttaactttatttgcatatacaatatttggtcataaaacatttgtaactctaaaccgttctgacagaaaaccccaagaaataatccactacgatcaaatctaccaaagtttttaataacataaaatgtctaattccgttatttaactttcaataaacttagtaaatctaggcttcaatgctaagatgagagggccatccatattcctccaagaatgctaagataactccatttgaccatccgaatccggtctgcattttttggaaacatgaagtcaacattacaagaaacttttatttggacccctaaaactcatgaaatcaaaagaaagttgaagaagaaaagttgacctgtggcatatattctcctccaccaccatattcaccaagctctgtaactttgagcttctcatgtatagtcccacttttcttgtagacaagatagttgcttttgatccatctccttgcaatatcctctgccatctctttagcttcttttacactcgatcttccgagccctgtgacgatcatctcttgttgcggtgcccatccattcggagaatccctgttccagtgcaaccacatatgtatcaagataatatgcttagtgaagtaaatttcaagattccaaatgaaacttgaaccgcaagcttcatttaccattgttgtcctgagtttgtcaaagaagttaggattccagcgggagcaatgagccctgagttcttaagagctgtcacaactttcttgacaagattttcatctacatgttgcaaaattaaacgttcaaatacataattcaacatataaagtgtatacatagacaagtagagatactttacctgaattgatggaattaatccagattggtgcaaagttagacgcaaagacgttggtgttttggttctcagccttccatgtctcagattcctgaagacacagacacgttttcaaaagcttcctcatcaagaaatccgaaattgtattcaaagattctgtaacagcttacctcaccactggaggaaagccagtaatccagccattgccctgctttctcgttccaaaacacggtttgaaacgctttctctctcgcttttgacgctttcacaaaacggtctgaaccattttgatctccagaaaccttcatcatgaacgctatatcgagttccatctacggtaaacagataacattcatcgtttatctacataatatatgtgcaagaacagtaatcaaagagaattatgataaagaaaagtggagaccttgagaagaaaaacatttagatcaacaggaaccactgatgttgtagccatcgctgtgaaattaggaggatccctgcattatcattttgagaatttaagtataagtgacagtagtaacatgaactacacttgattagtttgttaagtaatcgaacctcatccatcgcgtgctgaaatcgcatcctgattcagcagccgtggctatatctcgatggaaccgttgtttctctaacatagtcgagaaccctgaagcagattcnttanctctgtggtaacacatgaagagaaagagtcaacattttttctcgcaataaaattagaaaacatgtttgtaaatagacaagaaacatacgaaaacagaggattcaggccttggcttgttcacatagcataataacggctcaaaacgtgatcataaccattagcgtctcgaataaccactttatgtttcctacanagaagaaaacataccattattcaatctaagaattaaaccaaactagtgttactaaactatctaactaaataactaacctgagtt

SEQ ID NO: 52537 - DNA, 893 bp, Arabidopsis thaliana landsberg
  unsure (1)..(893): unsure at all n locations
aatctgaccttttaattgtcaacatttcctaattttatccgcaaaacttctataggcttcttccaccaacagcagaaaagagcgctgtgacaaaggctttaaccggttcgtttttgcttttggttttatgcaggtatttacttgtttgtattgaaagttttgatcgtgctgttctgaaacaattgcttccactttcttttctacagatgtttttcaagatgcaatttctagaggagttcgcaatataagcttcggtgacctgcttggcgacttgggaaaaacaatgtagtaacactttacttcaactaatatgtggcttacagagggacattaaaagaactctacttagaatttgtgcttacttattagatgctgatattcatttgtcaaactttcaggtaccgattcaaattcagaatacccccttatttttctctagttatccgcaggtacttaatctcttttttttgctctagtagccacttaaatgttttgagcttttgagatttctcaaatatttaagtcatgtagatatggtattgtttaaataaacatagaaaaatgctcagagcttttgcacaagattgtaggtccaactggtctatgcgttatgctttattcaattatttggcaagtactcaaccacggcttatatgtgattagccattttctgtctactgaggcagcattcacataattttttggcttctcatctttggttccccagtcttgctgttttggagggcattgccatcggtataagcccaaactacaaggttctaggcagtacatacccttggattgctagaaagattctaaccgacagctctccacaactgaaaagctctctgcanaatcttttatatgaggtaccaaactatcttgtctaatca

SEQ ID NO: 52538 - DNA, 477 bp, Arabidopsis thaliana landsberg
gaaggccaagatgcatccagggaattattggacctggctgttagtggtatttattctttatatacggaatataaagagtggccggatagatccttacctgtcttacatgaacttattcttaaaaggcgggtcagaagtgatatttgaaatttcaggtgattatgccacctgggacaggcggacctggccccgcagtgccggatcctgggccggctttggtgtttttcagagtttggtggatgattattttatgaataacgggttacccattgatgcaccgggttccggctatgtggaaaatggattttctacccaggatctttatgataaccgcacagggtggacggtaagaaatagtaagtccggcctggttacagaaaaagggacatttaatatgtacgtcaacagggaaccgcgtttttatgtttccgttacctataataatgaaaaatggcttaccaataacaggagaacaga

SEQ ID NO: 52539 - DNA, 518 bp, Arabidopsis thaliana landsberg
  unsure (1)..(518): unsure at all n locations
caggcacggccggtttagcctctataaagtgatcgttcttccgtgaaattccttgccgggattccctgcatgggagtatatttgggactatggttacaagaagggattttatcaggaaagccgccatggtctcgggcggcgcagggcttttgagctcgcttccccccgcggtgcgccgggcggtggcgattaaccccgatcccggaacgacgttcctggacgccgagcatgtggtgatcctgatgcaggagaaccgctctttcgaccacnnnnnnnnnnnnnnnnnnnnnnnnnnnnggtttaacgatcccggcgcgatccgtacgccggacggcaacctggcctggctgcagacggacgataagaaacgtacttacctgcccttccgcctggacatcaaagatacccgggctacctggatgagttcgctgccgcactcctgggcctcccaggtggcggcccgccacggngggcgccacgaccgctggctgcaggccaagcgttccgggtaccccgag

SEQ ID NO: 52540 - DNA, 294 bp, Arabidopsis thaliana landsberg
aacaacatacacgaattaggctctttaagactggccataacaacacatatgaaacgaattaggctcttaagattggttataacgaaacatatgagaactcaacaatataaacgaattaggttataacttgagagatctacaatatgtttaccttaaagctgatattataggcaacgaaatttgctgaaaatataccaaaagagaagctattggcagttcctcctgatggatgcgcagtatcattccactcaatgatcgttcttgtgatatcctgtgcctttcatcaatatgtgg

SEQ ID NO: 52541 - DNA, 561 bp, Arabidopsis thaliana landsberg
ggctagcctcattggcgcataactcctcaggcccctgtttctcgcggtcggtgtctagggttggtcagaaacccacttcgtcgccacctccacctcgaccaatgggacaatcacccatttagtcgacttctacgcctcggatcatggcgccgacgccttgagcctaagccgctgacgcgtctatcccattagatggctggtacgatgggcccattaggggcagctcggaccaaggcctcacctttgggctaaagctgagccagacctccatcccgttatcatcttcgtcgccatcattgtcgtcattaccgtcggacaattctagggatgcctcccgcggtagtccctccttctcctgcgctcgatgatgcttctcaagctcgtcgcgagcctccatcttctcatgggctcgcttcctctccttgtccatcttcttctactgctgctctacacaacctatgtgctgcccgacccgccacgtcctccgagaccgaaggaagggcacatttgtaaccctgtagctcctgggaataaatgaaaaacgtagataatcaggttaaa

SEQ ID NO: 52542 - DNA, 577 bp, Arabidopsis thaliana landsberg
tcataattgatcttgtacaataattaagatattatattaagataaactacattattttaccaactataaagatatagttagccgtatagcacacaactcattatatcaagtagaaacaaaattttcagctggctgtttaaaataatattttattcactcatttttgaatataaaaatatataacataattgtgtatatgaatgtgtctatatgatccttatttgataaatggctttctattaaaatattatgaacatatatatcattgaaaatagtgttaaatcccacacacacatattgtgtgggagaggagtttataatcttaatcggaaaaaagaaaatcccgtttgtcaagggagacatagaagcagaggaaaattaccaattagaattagatcttgggtatgtgtataattaaagtgatattcataaaaatactgtaccttcttggcttgtggagacgtcacgatcggaggagggatggaatttccggtgacggagatcgaggcgactgatgagagagctctaggcgaatatcttagggaggctgatgattggtgaatacgcagaatgtttg

SEQ ID NO: 52543 - DNA, 555 bp, Arabidopsis thaliana landsberg
gaccctttcattatacagatacacggaaaagcctattagatttttacttcatgaaataaccttattgattatgctaccaaacaacagaatcaaatgaacaaaaaatccaaacttcacttctaatcatattcgaaatctaatccagagaactgagattagtgaaatgtcttcactaattacgcggattcagctggcttgtcccttttaacttgtggtgtttcactgtaaatctacagttaccaccacacttatggaattaaaatttaaaagttgctactctgttaaggaacactagaattgatttggaagtcacaagttagagtcaaaagtgttagataacaagttcctaagggggaaacaaaagttacccgagaagccatcattttacaaacttaactaagacactttcaatcttcattgctggtaagaaacagagcaaacaagagacaccagaaatatgtgacgtgtattgctgaaatgatgtgagtattcaaatgagtacccatgctcacaattatgcatctggaatagtttttacacaatctgctagctaag

SEQ ID NO: 52544 - DNA, 986 bp, Arabidopsis thaliana landsberg
tttacgtgtcaactatatattagtattaccaatagacttatattcttttaccaaccatattgtaacaaccatttaaattgtattgatttaggaagagtcctaaagaagacggataggttaaaacaagtatgaccacatgcagacatgtgactcaacgactctcttttcaaaagtcgtagagaagtctctcttctcgtctctcgacctcacgcaaaccatatgagtaacttataacttccaaaatagaaatggtagataataaacggcggctttataagtccatgactttgcattttcttcatttaattcaattaatattctatatactatactaaacatttcacaagcagttcacacactaatttttttttttaaagagaatactcctatcgtttaacaactactataccttctaccgttttcacgtaggattttgctcctttttctaattagtaaagttcattcaaaagaatagatttggattttcttcaaactgtgcacacaaaaaaaatacaaacagctactctcttttttttatggcctttttttaaaaaaaataccagctttatgattccgttttcacatattttactaaagaaaagattattcaaaaaataccactttataatccaaaataaaataatgagaggcatctcggatcggaagcagatcaaaacttggtttttagtgcaatttaaaattaagcataataaagacttacctgtattaaaaaaatgcattattggcaaatcatgacccccacgtcatctagagttgcacggaaagtcaacaacgtacttttgcgtatcgcttccttccaaagcttgagatattattccatctatttacaatattattactccacagtacacagatttaattacgtatcgaaattttaataattttctaccccatcccctatttttacttcataaaaatgaaaaaataaacaaagctaaacttttcgttatactgttgccttcatt

SEQ ID NO: 52545 - DNA, 455 bp, Arabidopsis thaliana landsberg
tgccaatggactaggagcgatgaaggatgagcactaggacttgaccgagggaccagtgatgcgtcacgatgcccgatcttcacgacgtaggatcaatcttcagataactagcttcaaagaaaccaagataacttgctgcaacagcgataactagtgcaacctgacaaataaaactcgaagccaaccaccgtctttaaccggcagcctaaatcgaggattcgcccaaccacactctcaaagaaccaaccaacacaacctacaatcaatcgaggagacctcgaagggagtaggagcaccaattgggagcggatgaagccgccgcttctgcaatcccgcgaaggaattcacaagagcaaaggggtagagatcactctcaatatttgttagcacacagctgaacaaaagggttctgttttagattatcataagctgccttacatcttagacataggggg

SEQ ID NO: 52546 - DNA, 1513 bp, Arabidopsis thaliana landsberg
taaaaaagataaaaaaacctctatagctaaaatggcattatcagattgctcaattaacattgctctacttcttagaatcggttatagcagctaggtgtctgagagtattttatttaaataaaaatttcgtaatattttcaagcgattttgcctagataaagacattataaataacaaaaacagaaaagaaaatacaatactacacaaaatcttaaatttagattttcaactgaaattttattactttttgtatccatctttttaaaaattatgtttattttttgtcaacttttagttatgaaatttgtgactattattatattggtttagtataagatcactaattttcaccaacttattcaatatgctccactacctacctaaacacctagagtggaatccgctcctcttatatattggttagtgcaagatcactaaattttcacctatttaatatgttgaaactactttgggttcaaaagttcaaagccaaccaaaacacttccatttttgcaatcattttgagaagtgatagagcaagtggaaaatgaccctaactcactaacccatgatgttcatttcaaatttattttaagaagatcaaaccattattatatctcgagaaaatacagattatttaaagagcatgaatatatgtagtctcaagtgtattcgagtgatccaagagagaaaataactattatgataattatacaagtgctccaagatatattcaatagggtttaaatatatcaacgggtgatccaagaaattctacttcgtcggctactcatcaaatttcgtagaggttcttgatcttatcgacactataatcatctccttgcaaatacaacaatatttcagtatgattattggtttctttaaaggattttacatcgctattacaagttatgtgacatgacgttttagctgtttcgatatgtctccaaagtttttctttgttttgtttttttgtcaacaactccctttaattgcttattgattgaatattaatattgttggatccaccgagacacatagctttcgcagcacaacaagtacacaaaaaagttgatgaagataccattattaattaatggtttcaaaatataggtgtctattgtttatgaagtagtacctagtgaacttgtaattccttcttcttacaaactttttagattagtgttattactattatgatgatgatggtatgaatgatgctataacgttggtaatgatttttcggattgaaaagtacacaaaaacttaacccaaaaataagaactagatatatcttttgttaagagtctttataacataacctcaaatttttgttgttgttgtcagcaagcaaaaactcttttctttttgcagaagagggagaaatcttacttttgagcctcatgtggtaatatgtacaaaaagacttactcctaaagtaaagagttactatgttgttgcaatgctcctctcttgatgattctcttccttacaccagccaataccctaacta

SEQ ID NO: 52547 - DNA, 772 bp, Arabidopsis thaliana landsberg
ataacgaagcaaatactgtgatctgagagagaagctgagctctgcatatctgatgcatagagtgtttaaaggaggtctttcaactctgttgagagtcattacaagtataattttacacatcatgtacaaagcagaacctgcatacataaacatattcataggaaaaaccggaaaagacatgatttctgactatgtgatctaaaaccaatgaacttacaaagaattttggtccaaaaatcctatacgcctcatgcattatccatagcttccaaccttcgaattttcagggtttgactaggatgctcaacatcagatgcaccaactagctgagaatatcagaactagacatcataaaccaatatgcctaagtcccatcagatgttttcttttcttctatccactgaatttcctgcaaaattgagacaattaagtaatgaataccagaaaaagtaccaatctgcattatcactgctcacaatgatggagagaacaaataaacaatataaactaccacggtaaatgccttttcttccactagataattagctctagtcaaatacacatagattcaagtgaacatcgcaaagaaataaagcttgacaaacattaacgactactgcagttttcaaacttagaagaaagagtcagagaggacaaaccatatgagatatgaaatctagaagcaatagtgcttcactgatcttgctgtttcggaaaagtcccttgattagactacagaatgattgcatctccggaatgacacctttctttg

SEQ ID NO: 52548 - DNA, 632 bp, Arabidopsis thaliana landsberg
cggataacgtttatttcccatattctcattggccacctgttgacagcaaatttggattgttcctgtaatgtttttatattctctgcctctttggtcgggttatgggcttcttctaattttgcatgtttttggtatacacacgtattatgttgttaggcacacttttgtgaaaagtctttttacaatcttttaaaaaacttatcttcatcattattaatgcagattaaattaaaaaaaaaacttcgtgcgtcgtcgtgatatgcacacgcgagtgagataagcaagcttattgttttttttttggttgttgtcatggcactgtgatgtcacagtgagcactctatgtttttttgtcctctttaaaacaacgtaggtcttacgtcacgcgccacttccctctcctaacacggcaacttttagaaataatattccacgcgctcgtgtcggatcaaatctcagccatccgatcaaaaaccaaaacccaaacgaacggtgcatatcaagggtagaaacgtagttgtaatggagatgggtccaggtgatcttggaaccattggttaagaaaaaatgcgggacaacgtcgagtggtactaagaattgacacgtgtatataaaaaccaaaccgacaatga

SEQ ID NO: 52549 - DNA, 334 bp, Arabidopsis thaliana landsberg
ccattttcatttctttaatcactcatttacacacacttttactagtcactacacaaacaaacgttgtttaatgtgaataatttcgtttcactcttttcgcgcgtgaatctacttgttttgtttcttcaaatgtggagcaaaaagatgtttaactttaccgcaaattgttggaattttcacagacataaaatgctctcctattaatttgattcgtccatgatgaaaaggtgaaactctcggacaaaatagtgctatgtacttgttagattagaggaaaaaaatcttggactggaaagatgacacatttttattaatagcgttattaaaatgcaac

SEQ ID NO: 52550 - DNA, 800 bp, Arabidopsis thaliana landsberg
taaattgggcggttgtctcatttatacgtggggcgttccttcttaacatccaaaaatgaaaagctggaggcatataaataatcaaattaaatagagagttccgaaaactgtatatcatcagctttatacccatctatattggagactttctatgtggctctagaattgtcaaacctaattttgtgttatatgaaaagattaaaaaataggttcgtaagattatatagaaagtattatagttgtaaaattaattctatgtttcacaaacgcaagaatcctataagagttacacaaactgttgttattttgggaaagattagccatagtgttgtcagctgatgaaagaaaatgtatcgaacctatatatcctattccatatagagtaatttgtccaactaggtagaagatcatttgctcgaattcaatatttgatcacttcatattcagattaatttgaatccaataatttacatagaatcgctcgacatgtaagtaaagttaaacgctacagatcaattttttcgatggataaatacatatggaaaagaataagagtatactcgaagtaagagacaaaaaggccgctggtttcactcttctctagtctctacacatacgtacccaccggaattagccctaatcctaatatagtaatattcttttctttcattttcaaaatttcgagtcaaacactataatttgcgtgaacatgaacttctctgcttgttgctatagttgaaataaacaaagttaaaaaatcctttaatgctaaacactgacgcattataaaataatgaaaa

SEQ ID NO: 52551 - DNA, 1303 bp, Arabidopsis thaliana landsberg
tgcctcattctgagctgtagtaaacatcctgaagggagaaattgtagagtctagagatttgatgtcccgtctcatcctgatgcttgtatgtataaccatctctgtcatagagaatgaatattttgtgagtagctcttatgtctgtatggtggcccttgcagtgctgatcgatatttatgtggaagaaatgtttgatgatagattttttttgtaagctcccttttcgctaatcaagcctttgtgcttgcaaggtgcaactgttattttattattgaatttcctgttctactactccatttagttctgtctctattttgtcagtgtgaagaaatactagacgatgaatggtgtgtttgtacgtgcatagttatttataaattcttgactttccaagaagttattatttctataactgctacacctttgtggatggcagaacaaatgcatctgattgtggtgacataaactagattccatacaactctttcttcagccttgtgaaatattattatgttaggtggtgcaaacatatggaacgaacctgattgttttagtttcttagaatagtttctgatgttaatacagcatgttgacttcactctcttgcccttgatcaatcagcatcaggcaggggcctaattatgtattacatgaagcaatcgtattcttttctgaattagatttttttccaatgagttatcttgcccataactgtagttctttatttgaagtcttcaaatgcttgatgtatggtgacgaaaatgtgtatatgttttggttttgattatccgctactcatcaattattgagattcttacatactgaatccgttactttggacctatagttatgttttatgttgctaattaacttgtacatgtttctagattttctttcaaatggatcctgcttggacaaatgcagccaccctttgtctgaaaggccctcttgtagatatgttatctgcagatactgactgtgttcaattttttaatatttgtttttgccatattctccatttgaagacattaatttattctctccaacaactttacatcaatatttaagtggaggctgtcagacatgtcttatgattttcctactgaacttatgtgctttgagtagtacatcttgttactagtacaatttgatggtagaaggaaaagttgaaccctgaaacagatagcttaagtatcagtctttaatgcaggctgttgttttgtaaaatatgcaacttcgaaagatgcggatagagccatcagagcactgcacaatcagatcactcttctggggtaattaccct

SEQ ID NO: 52552 - DNA, 574 bp, Arabidopsis thaliana landsberg
ttgctgatctataaggaatgaccatccacttttcgagccaatgggtcttcatcgggctatgctgagaaagccaatccatcccaataatcataccataagaagatagggccaaaagacgaaaatcagtggcaaaggaacaccgttgcaccgtccaaatcgcgccccaataattgacgagaacaagacaatctgcccccatcggctacttgcacttgaacaggagttgtcatcggtgtaattcctgacaattgatcagccactgtcgtcgaaaggaaagaatgtgaacttccggaatccaccaaaatcaacacctccacaccttgaatacaaccgtgaaacttcatagtattaactaattctcctcctgaaatagcagccacggacaacatcacaaagacttgttcggacacagttgactccataacagtatcttcaggtgcagcatcttcctcagcgatatggaggtcagaacttcttgaagcacgtgaagctacactgaagaaggacactgatggtcgcgcgaccatttttcagtacacctatgatagagaccgcgagcccgtcgatacacacg

SEQ ID NO: 52553 - DNA, 553 bp, Arabidopsis thaliana landsberg
cgagagtacaagagaggacacgagatttctctgcaaatgcgtgcaatcagcaccaatgcaatccttgttccttttatagagggattcccccgtgttccccaccgcaacagatcgctgcacggtgcgccgttatttccggaacgcccagtgcgacatgcacgcaaatctgctgcgggtgggtcttttcctgacaaaaatgcggtcacggcgtgagattgggcagtctccagctcacccgcgattctacgccaaatatgcatgatttgttactaaaacaaactacctacatgcatcaaaatgagatacgtgttcatttgacacgattacaaagagattaatgcaacatttcacccccttaatctgtcaaatgttaaccacccctagctgcctccgcatctctgcaaagcgaatccttgcaagtggttttgtcagtatgtcggcgagctgatcttcagtgcttacatgctgcacctccagcaccccatcagccacacattccctgatgtagtggtcctggtatctatgtgctttgatctctcatgaaacactggat

SEQ ID NO: 52554 - DNA, 904 bp, Arabidopsis thaliana landsberg
aaaacatatttaaatcaagatggatttaaactgcttttttagtcgccttggcttgaacatgcttgagatggttctagctatatttaaagaagaatagtgcttggatagggtagaggacatacgaacgcgaatgtggggctcttttggtcataataaggcgatctgcttcgtggaattcattcggtgtttgattaaacaacatcttcattcgcattgtgatgttaggcgttttacagatacatgaaatgatttgtcagtttctcatgaccaaaacatggttcatccgctagaaaattagaaaagtgattttgagacacgttttaaaaaatctttatgaagattaaaccgtttggactgactgtatgattaacttttaagaagttttttgatactttttatatttttgaacagttccattaatgatttatcgtgtatcacggtcacattgttactttgttagtaagaaaaaggtaaaaatataaaaaaaacatacgaatttttgaatttgggacgattaaatcataaactacgaggaagataaataaatttaaaatcgtaaaattttggttaactttaagtttaaatgataaaatttgattgaacagtcacttaagcatggtgtttagtaaactaattaaaaacttttacgatattaaactcccgttactcgtctctgttgtatctaaacgacattgttttgtcagttgaaacgagacaaaatcgccaaatcgaaactcaaatcaaaatcccaaaaaaaaacatcagttcaaatttaccattattattatttaaaataaatcacttaattattgaaacacgggaatagactctcaaccgaaacacctactgccaaccatcttaactggccatgcattggatactataagatgatatgtcaccaccc

SEQ ID NO: 52555 - DNA, 631 bp, Arabidopsis thaliana landsberg
caaagattggtacttgcgtgtctattctaaaaacccttgacaaaagcctgtggcacactttaatcagttgactttctactattctcgtctctgtaggttcagtcacgccatagattagcacgcgtatgtggttatgcacacttcgcagattatgctcttgatcgtaggatgtcaaagacatcaatgagggtttgtgaaagaacctttaagtgattaatctaacattcttcatgactcctttgtactgacgcccttcttatgccaggtgatcaggttcctggaggacatttcttccagtttaactgacttggctattagagagttttccattttggaagacttgaaggtaatctaatgttggtattatataattacaggttatgcctttctcactacttaacttgctgagttttaatatcagaggaaagaagaaggggagattccatttggcgtagaagatcttttatactacataaagagggtagaggagttgcagtttgatcttgattttggagatatccggcaatattttcctgtcaacttggtcctttccgggatctttaaaatatgtcacgacctttttggtgagtttaacgtctgtaatctaaaatcttttgggggtattaataaa

SEQ ID NO: 52556 - DNA, 486 bp, Arabidopsis thaliana landsberg
tgacttccttatccacatcttccattgatcggtgagagcgaaggtttcttatctttgaaggagatgtgaccataagatggttatggtcatcatcaaaaacactaactcaccacactccatccttcaatgccactctaagacgtgctttgcaaccggttcgggggagagcaacctccttttgggggctttgttgatttccagtagtctgcattaattttacagcttccttgacacctttagaaaatcctgccttggagcaaaaccacaatctagatgtgattacccctgatttcgatgttgtatgtgtagcggcacgaatactaaaccctttattgaaggcatatttattatagaatttctttgcgtcgatctgtgaagaaaattcttttcccacaaatggagtccactgtaaatgctcgtatggatcaattatgtcgtcgttgccatcaactgtgttggccatgttcagtcctattagaaagaata

SEQ ID NO: 52557 - DNA, 764 bp, Arabidopsis thaliana landsberg
cttttctatgttaaagaacatgattctgcagtggttttttatcaattcaaaacattgatataagttttaatcttgctagtagtgaatgcgtaggaaaaatattacaagaacatgttatcatactgttcatactagtaaaaagttgcattctacatagtacataccaacttaagtgtaagagaacgaagattgggagcgtcattgagcatacacgcaagtagattctgccatcccgcagaacatgtacatagctttagatgtacaagattggagaattttgtgccattaggatatggattctgtagttataaagtttatgttatttttcagtgatgagaataacaaaacataaatggagacatgatttattggagtaagaaagtttttacctctgaagttggagaacaaagacaaagatgtcgggttgaggtaagagattctatgaacttcacagattgcgattggtcatgagcaacctcgatattcgctttgatcatcgcaggcatagattcaaatattgtttggaatgtatccttaatgttcaaaaacatcaaagaaggaacatttatccaaaagctaccgagtggcacatgtccccttctcttgttatcgatagataagctcctcaaagtaggcacattgatattaaccagatctttatttctgttttggtctacaaccaaacgttcccgcacagagcataatcttataagacttggtacaaagttgctgcccccggtaaccgatgaaagctggagagtttc

SEQ ID NO: 52558 - DNA, 1311 bp, Arabidopsis thaliana landsberg
atagatttgatgttattaatatcatccaccaatattaatttaggtaaataatattaccttttggagaaagaaataatccaaatatagattagtcgatgattcatgtaacactttaaaaacttgaaaaaaggttcataggggagaagagagacagtgtcaaacaaagagggagagcataattatggcattctctaaattaaagttgacttattaaattgatacatgaatacactctctatttttttttcacatttactgataagtgataacattagaagcacttttacattgttcttttctttgactcgaatggatttttttaaaattaattaaaaccattggatatgcttcattggtttgtattcaatcctttgggattttagtgttatgtcaaagattttgagttatctaactttttacaacaaattcattaattatatgtaacagaatctgtgcatatcccatgattatgaaatgaaatctacataagattaaccatgcatataatgctatttctagaaaaattactataaaaataccaaatgaagttccattgattcattgtactatatatggtaacttaaagtaataaatttacagtcttagactcatgtaattagttaaaatataatatggtagctatttttatagcctatcagaatcaaaataaatttagattctttgactaatctgacgggaaaggttaaaaaaaaacagatagagagttttggcgtaaattacaccggagtcaaactttgttccaatttaaaacgaacttaactaatttaattctatccaaaagatatgtgtatcttgcttaagtatagaagataattcacctaaattttagcatttggtagtttttaactttctgttaatgttaaaaaaaaataaaaaatagtgcttctttttttactgtctaaacttactaacattttccaaaacaactaaacatagcagatagcgttccatatcatttatgtaacccaaggtctaggcccaagcccaagcccatatgagggcgatacactgaaatggcaatgtatgtggggacaacattgtgaagctaagtccgagtagtcacttaaccggagatcggagactcatcgttgcaacaacaacaaatttcagaagatccgaagacgaaacgatgcctataagtgcgacaatggtcggagctttgctgggtctcggtacccagatgtactccaacgccctccgcaagctcccttatatgcgtcgtaagtcgtccaccaatcgaaaaatgctacaacaaccctaatttttgttttctgatttcgattgttgaga

SEQ ID NO: 52559 - DNA, 1036 bp, Arabidopsis thaliana landsberg
gaactacctaaagataacatacaatactgattatcctcaaatacttcgtgatttgtttgtcaaaaaactggcataaacgtttaaaagttaggtgataatacccaagtgtctcggatctatcagaccctatttttcaatttgtatactacttgatatatgttctatgaaactaaaatctttttcaataaaacggatcacaaatccgaattttgcattctctcgtagctaaaattctctcttttttggtattacaaaaaaaacaccatcttggtttttatatttggtaaataattcaaaaagtgcaaataagatatttattttttttaacattcacaaaactaaacttaactttgttcttttctcatttatgatcaaaacttatggtcaaaatctgaacttaaatgtcagaaagcttacagaaacatgacaataatgttcctgacatatgatgaacctacaaataaaatttccctccaacacatgttttgactggtagacacaataatatcgatctttagagtataacaatattacacgattcacttgacaagatgttaacttctcaatttaaaaagatagccagcaataactaggttgctttttttagttttaaatttctgtgccaacaacaaattagcgttaaagcattatgacattaacacaattaacaccaaaaccataacgaaccaaaaaatattgtgttactaattactagcattaactccactaccctaactgtgtatatgagtgtaccattttaaaccataagattaaaggttctagctatcaatttattccgtgaaaataccgaaactaatgtaaaaagttttactttgaaatcgagtacaacagttccacgttgtagaaagaccagttgtaatcaataaagtcacatcaaaataaatactttattccctcaacacatcattaactaacctcacacaactcatcaaaatattctattacaaaacaaaacaactattaaacagctaattacttaattagtaaagttacttataactccactaggctccat

SEQ ID NO: 52560 - DNA, 903 bp, Arabidopsis thaliana landsberg
catgtgaagaggcataggatgttagtagaactagacatattttcaaatctaccctggtcttgattcacttgttctgacatgattttgcagttgctgatacacttctctggaaggatttaaagcagactcttattgccatattcattctaattagtatctattataactttgttgcaactgggtctaccgtcgtaactgctctttcgaaggctctattggtagcatctgtatttttgttcctccatggcattctaccagagaaaatgtaagattcctgagatgccaacttttgatagattttcatttatgtgcaatatgaactaccttaacctagttctctaataatggaaaccagaaggtatatgccaaacatttttgaaacactgtgtatcgtactcttcaatcaggaacaagtaatataagcaattgctgtctatttcagtttacgaacaactgaatatagatgcttattttgcagatttggttatacagttgaaaagattcctgcatcgcaatttcacctctcaaaagactcatcacatgacctctcattgtcagtgatctcttcatggaacaccactgtaaaagctttaagatctctttgccaggggaatgattggagcttctttttcaaggtatttttccttgaactagttactgctggcaagttccagtcgtacgatatcttatcccaacctgaaacagaaatagggacaaaattcgattgctgaagttctctttggtaataatattgtaacaccgctttggtgtttttaatgtcataggtggtcttcgttttgttagcattgagtttggctggagccatatctcttcacagcatatttgttataggtacacactcactctctatctagttttactacatgccaacgctacggttgt

SEQ ID NO: 52561 - DNA, 1261 bp, Arabidopsis thaliana landsberg
aacctgaaagagctcaagaaagttaagagtttgaacacaacattttttctgctgtgtaataaaaaatattgctgggggtttggaaggtttcaattggatacatcaatgtcattgattcaatgacaatcaccagtggacaattctttttatatgcatgcctaatgacaaaacaaaatgcaccaataaaaacgaatttatgagagactctttccaaaagagacacttattaataaataattaaagattattttgctaaagcctaaaggtcaataaaatatttttgaagaggtgtatacactaagtgctaatttaaagttttgttttacgagtttattaattgagtttgatgattagtttagtttggatgtggatctaataaactcttgtttacaaaagaaaatataaaaaaaaaagtacggtgacagcactattagtggtgtaaagtataaacaaactttaacgaaacaaaaagcatgtttataattaaaaacatgaatggggaacaaacaaaatttaccgtttgaacaaattgtttaacccacttaaataaataaaaattagattagtgacggggttttttttttataagttctttctataatagacagtatattggattaagtaacccaatcaaatattgattattttgtacattctgtatttgattgttgatcattatcagaaaaaaaaaaaaaaaaaaccatatcttacaacgatgtgatataatcccatctcaaaaaagaaaaaaagaaaaaacatgtttggtagacaacaacaaaaatgaaaatacatgattggtccacgactttgtaatacattgttgacttaattatactttgcgcaacgtggaattatataagctggttaggcgagatttatttataagttcaagcaaagctatcagtatttaaccaaactatattgtcactgttttaatagaaccagttctctgtttcttaattagatttttcttgatcgatacctcttcttggtgaccaaaaaaaaggaaaaaatatgcataaacctcttactatcacaatttatatattttgttcaattttctatccgcaaatgggggtaaagagttgactccacacaatagtatttgttttatgtcttcaataacgatttttcttttcgttaatagataacgaattatttgttattatagatcgttaaatgatttttaaaaaattgtaacatctcgttaatgataatttatagttgacaatagacatacgtaaactatactcatatgtca

SEQ ID NO: 52562 - DNA, 430 bp, Arabidopsis thaliana landsberg
ttatacctttgtagtactgttttggttctatgagtgatccagttagatcagagtctttagattttgggttctcatggtcttctttcaaagtttatatacctttgtggtccttgtctgaaaagggttcttgcagatggtaatagaaaaaggagttatcatagtcttctttgactctgttgtttgaatacttggtttaagctatgaaactgagatagttatttttggtttgtagggggatcttgggacagagtacttagtgaggccagttggtagagctgaagatgaggaggatgcaagtgattttgagccggaagagaatggtgtggaagaggatatagacgaaggagaagacgatgagaatgataactcgggtggtgctgggaagtcagaggctccgccgaagaggaagagagctcctgaagaagatgaa

SEQ ID NO: 52563 - DNA, 639 bp, Arabidopsis thaliana landsberg
agtagataccaaatttgggaaaactctctaccagcaaattcaaatcaaaaaggtcaaacacacaacgaattctgccacctcaacccacagctcttaaagatcaaaacaatcatctcagccaccaaactttaacctaaagatttggcctgtgctcattgagctttatcgatcacaacaaaaccactcaccgcccattgaccatgcccttaatctctatgttcttcaccatccaaaatattcattgggtacacaaaagggaaagcctttcttgtctccttgctgatgaatgaaaacttgaggcttaacaatgacaatgagtattctaacttcctcttcgaatcacccaattagatagcaaaggagcttcaccgtctttcttccttccatctttttattgcttccatctcagagaaccactaagctttacttgttgaatagaagataccctgaattgatcaagatcaagccaagagacaaaacacaaacaaatacttgtgccctgtgtggttctcttacatactatgtaaatgcagcttcctacttacatcaggggacactctatgaataagtagaaatctaaagataatggatttgaatcattcagaaatcatcaccagctttagaatgttatatatatgt

SEQ ID NO: 52564 - DNA, 1148 bp, Arabidopsis thaliana landsberg
aaggcaaacaccttaatatatttcaaatattttaatttctatttttttttttaactgttagggcaaaaaatatttaatttagaggacgtgatttgagaggatgaatgtagtagtattgtggaaaaacgttctatttttcacgaggactatttgtttcgtggagaaatatgtatataacttttgtttcggagatatataaatcgagatcatactttaggttctatctggcgtgatgcgatagttctcgtaggaaaataaaccgtttccaatgtatattattaatcagaagacgccaactcaaacagaggtttctcaaaacagagttgtttgttatactttaccaatccatggatctctctactctcatctttgttttaaatattgtttgtctcattactcaattaaaatattacatctttactgatctatcacgttgccaacacttgataaaaacatcacattcgcaatactctatgattattaccgaaactgaagacaaaccaagactccattaactgtaacttcttcggttaaaactcttagaactaacagtagtgttctcctcgaagttgtagaaaaaacacataaagtattggtcggataaacggcttcgcacgaaaacaatttcacttgtattgcatcctcaaaaactcatagctcacaaggagaaaagtggcgtggttaatatatttgtatgtaaaatttgtttctcaagtctcggcaatctttaagtgatgcatatatacattaaaatgtagtagcagtagaagatcaacagtaagaaaaacaatatgaagaaattaagaataataaaatcaatgttactgagagtttagataacatccaaagcaaggatcaataaaagtggaaatataaaaagagttaaaaacgatcaatcgaagacaacagttatgaccaaaaccgtgatcagcctcaatgttattgtagaaacatcagattctcaacataatttgtgaaggtgactaatgagtcaccaatatctctcgataccttgtctttcattcctttgatttcaacttctctaacactctgactctccagattgtagtagtaaacatataatggatggctcaaaggacttgataacgtccaaacagacaagttctccactatcagttgcccatata

SEQ ID NO: 52565 - DNA, 808 bp, Arabidopsis thaliana landsberg
gaagaacaagttcacgtctggatcatgttcggaaggagttatgaaaactttgttttaatgtttttctaaggtattcttgtttgtatgaaaatgtgtgatatatgctttaatgttgcacttctttgctttgtaagtccatgttttgatatgtacttcttgttaatgtatgaaattgctttaaagttgtaattgtttgctttatgagttattgtctttttctgtgttttgtgagttattgtctggatatgtgattgtttcttaatccgtatactattgttttgatatgtcataagttgttatctagatatgttgtcgtttcttagtctgtatactttttgtcttcatatgtcacaagttaaatataacacttgtttgctttgtaagttcttatcattatatgtggttttctctattatacacgttagtggatgagtgaaaacatagatgaaacgactacatgttcaacatgtgtagacgatatcataggagaaagaacaaagcattttgtaccacaaatatttgtggaatcaatttgtaccacacataaatagttttgtatttctcttgctattgctatatataatggatgcaagttcgttctctctatctcaatgtataaaaattaccaaatctgaaaatttgatattatccttctaccacaaaacaagctaccaccaaaaaaactgaaatccacaaacatagttttcttcttattcgtaaaattttttgttcttgttctcattctttaaatttcttgttctctcttctttcatactacaagctataaaaaaatatggctttctcatca

SEQ ID NO: 52566 - DNA, 641 bp, Arabidopsis thaliana landsberg
ggctctcagtgtcacattagcctcaaaatcaataaccaacaaccacataatcaaatgcaatgagtaaaacataatgtgacttactctctgaaagccaggttccatactttcagagagaacaacaaccactggtgattcactgccagtgacacatatcaatgccttccaaattatcaatgcagatgtaacgatcatacctaaacccaaaaacaaaaccaaacccattatatacatattaagcttctcaagatgtgacatttggtgagatttagataccaatttctcgaaatctaaaacgcaaatgagagtaaaatcaattgatatcgaaacgaaccgagagtgatagcctgagtgagaacttgacggatcttgatagatttgatggaatctacagtttctccgatgaaacccatgattgattcttccttcgatttcgtgtttttcccagcgaaagtgataggatcagatccctttgacccttctccttcaaacgcgtttcagtggagaagagaatgaaacacagatttgatttgattcacgagcgtttctgcaaatcggtttaaatatcgaaatgtcggtttactactgttagttaaacccggttaaatattaatgaatatgtttgaatttaaacctttgac

SEQ ID NO: 52567 - DNA, 683 bp, Arabidopsis thaliana landsberg
attaaagagtccagtgattgtggtcaaagttatacttacgtggaaaggaggaccatagcttccacggacttcagtagttgcgaaagacgtctttgaacctggtttcacaacctttattctcttcctgttcatttctagcattcgtctctcgagatttccctctcccacaatctaaatcattagcagttccttttagaaaccccaatttaatgtacacgaatcaaactgtaactccagaaaattatgatgtacatacctttttgggataagggtccttgtcacacaacacctgattccaattgattgaggaacagacatttaaaaaagagaataaaggatagtgaagctaagaaaacaaaacacagttaatcttacctcaaacttcactaacccagtttctaatttctgtctcacttccttaagaatatcaggttctgcaaattaaacatcaccgtgaaatcccattggaaaatagaaaagaaaagtagtcgtggaaaaggaaacagaaatccctcttaagtcttaaaggaacctagtaaagagttactgtatgtaaaactgaggtcatatttgagagacttggtgactatagctagtacacagacattacaacaaacaacaacgacaatatttatgacaatgatgatcatgattatgatttatgatgataactggaaaactta

SEQ ID NO: 52568 - DNA, 1253 bp, Arabidopsis thaliana landsberg
  unsure (1)..(1253): unsure at all n locations
ctgattaaaatatggcgaagagatatacactagtttttaaatttaaaacaatagaatgaggtaaagcggaaattcagcatgtcgtggacgtcttcggattgtttttagttctttttttttggttttatatttcaaaacttgttgaaactgcataaaagtttttttttttgtgtggatccccgtaatttttattctacacacgtacaagacaattttttcttacgtaaactatacaaacatataaagtgcatgtgactggtgaatgcttataataaaataaaaataaaataatgtgtgattggtggaatatttagagtaaaagaagaatgaatatagaggaatattgatattggaggaaataaaaatatgaattagagtacccaaataactggtattccctacaagcagtcaacaaaactaaggaaaaaaaaaccaaggaaaaaagaagaaaaggttgttttgtttctgttgagtggacaagttatgagattagaattcaaatatccgttcaagttaaagcatggaatcacgaatgctccacatctcaaagaagaaattgaactctttctaatcttagaattcaaagaaacgtagaggagtctgatgagatgtggttggttgctattacctctgattgaatttgatcacatacaaaataacattcgatcttgatgtgtttcgtaggcttttgtgtaaaatcagatgcatatatttgtttcaagggtcgtctccactagagtaaaatgacgcatatcatcaagaatgcttttccaccacattactnnnnnnnnnnnnnnnnnnnnnnnnnnncataaacgaacctatttcgcaaattgtttatgagttattcaaattatgtaaatttaatatactatcatatattttataaagatgtctattaagtaaaaggatgaaaacatatattatttgaaaaaccggatttcagatgaaattactagtttaaatcaaaatatgctttgatttatatagtaatacaagtatttttttgaacttaaattgttatatgattgatatgtcaccataaccgtaaatatttgcgaaataaaggtaatttcttaccatatgtttttccaaatattaagagatacattaaacatgtcatactgatcaaagatctctaagtagtagtaaataaggtttacgagtacttttttgaaacaaacctagaaaatagaagggaatagaagaaacttcaaaagcacaaaaagagaaaaatcccaagaataatttat

SEQ ID NO: 52569 - DNA, 1450 bp, Arabidopsis thaliana landsberg
atttttcctaaattaagcaaaatatttatttttatattttgttttaggacttttcttttcgaaaatatgcgcaaatcatcaacatttatagaaatagtttttgtttttccttttcattaactcttaaatcttgtttattcatgattttcttaacaaattgagcaaacatttctttatttttacattaaaaaaaaaaattctctcaaaaatataatatattaggccacattttaaaattttgcctcaagcctcaatagaccttggcagggcactgattatatctgtcaaatatcatatataacaaataatataattgcatgtatatatattatctctatcaactataatcatatacagaaagaaaaaaaacaggtgttacatcacgcttagcttaaaagtttcgactttttgcaccgtcatatttcacgtgtaagcaagaaatacaaatggtaatagattataattaatgaattctctcgactctctcaacatagtatataaaaggaaatctacacatgaaccgtatctttctcacttttgaaatattttgatgttttaaagaaactttttgttttacaatataagatgttttcaaaattttatataaattataaattaatttaatattttttgattatttatatttttcatcagtcttgttcatgattggttgaattgttttaaagtaaatatttctttagctaaaacatcttatacaattaaaagaaaaaagtgtaatcaaataaccaaatataaattagtatttcaaattatacttattgcagggtgataaaccttttgtcccaagtgaagttaaacctataaatatataccccatttagagggtcctatataactaaactaccacatatttggtggtttatatcattcaatttttttgtaactaacttaatatttgatatgtaaaattatgttaaaataggatcagcagatagaatatataaaaaataagtcgtaaagtcatgtacaaacgtaacgttctttataattttaggtaacgtatctaacaatttttgttaaatattattattttaaaaaattgaacatattatttggaaacttttcttttgataattttgaaatggcactttgtaattaagagtttaataaagaacacgtcacacacaaaaacgaagaaagagattatagaaattaagttgtgttttcaatcttcgtgtatacaaaacaaaaataaaaattagaaatgatatttcatacgatgttgttaaataatataattatgaaaattagttgtgctttatattattatttttgttggaagctctagaaacgatcgacctaatagtatatttttgtcactaaaaagtgtgattaaaaatatatatatatatatatatatataatattgtaattttcaaccaattctcggtttaggtggtttattattatattgatttttgaaaaaatc

SEQ ID NO: 52570 - DNA, 494 bp, Arabidopsis thaliana landsberg
tcccatggctgccgagcccttcttccacctctggctggcgcccagcagcagcgcccttcctcccctcgagccagcaatggcgctggtgccccctgcccctcttcttcttcctccagcagcagaccaccagcgccccatcttccaccttctttggtcccgtgcgagcagggagcagttcccttggccgacgcccagcagaggagccatggccgagctccctgggagcacgccggcgcccctgctctccccttggccgccagcagcctctccatggtcgtcggccccacgcgagctcgggttttctccctcacggcgcccctccctgcgagctctctgctccatctcctttcttagccatggcgccctgtcctagctcggccctccctatgtagcatcccaaatgccgcatggcgcccaactccctgtccctggcgcggcactccgctcttcctccacgagcgccagaaattccagtagagctagcgcattttttt

SEQ ID NO: 52571 - DNA, 137 bp, Arabidopsis thaliana landsberg
cactcgacgatgggaaacacaaacccaaagctgttcttcacttttgacaagaccaatacgccagaacaggaccgttgggcagacagtcaatactggtcacaggtgcctactattaatcaatggggacaagcttatgt

SEQ ID NO: 52572 - DNA, 834 bp, Arabidopsis thaliana landsberg
ctgcaccactgaaaacaactcgaggattgagtcaagaagaagttcttctcctcgagcactgcagccttcttgccgtacccggcttgagtttaccaacacagaagacttactggaggagaatggatgttgtaacgaggaggatgattcgtctgaagtgattcaaatggcagctgagtcattagtccacatatcggagatatcgtatcaaaaccaagacttgcaatcaaagcttgtgttaagaaccaacagctcatctgaagatcaagattttccagataaaccggagatgggtaaagcgaaaccgggatgttcctacgattcatatgagcgacacacgttaggaataagcgaaaccaacactgaagaagacttctgtgtgtcatcaatggctctagatgaacttaataacatcacaagagataataacaaagagattggactcaagctgagaagagggagaagaatgaagaacttccaaaaagagatactcccgagcttaacgtcgctttctagacatgagatccgggaagacatgaacatcttggaagcagttttgagatcaagagagtacaagaagatgcagggaaagacgaaagatgtcaaattcaaagcaaacccaagaaacaaacgttcaccaccacaaagatgcgttggtaaaagaaggcgaaaaaccgaatgatatcgataccttgccggtttctgattctttcatacatttgcttcatcatgtaatcctgtaacagtctttgttttcgatttatttgattataacttatgacattgattatgataagaggaaaggctagtagacgattatatcatattctcaaattc

SEQ ID NO: 52573 - DNA, 871 bp, Arabidopsis thaliana landsberg
gatctctctagcagtacaccatactgcaaatccagtcttataccggttgcggtccaagcatataaaacgtagcagccacttcgttaggaaaaaaggatagtcttgtgaattaatgtgactaagttcattcccaatcaactgaaagttgccaacacatctttctttccacgagcctgtttcgtctcaggtccctcgattcttcacaatcctttctaaatgctagcggagtaaaacagttatgtaacaagtcagcctttttaattcaaggagaaacagttcatctatgaacaatgctaaaaccttacaagttccaatattttaaatggttataatataacaatcacaggctattcaaacatcaaaaatagagctgtcaaatgaaacgatctgtttttattttgcaagacataacttttcaatgtaaactatacaaaagagaaattgattcaacaggaaaacacaacaagtagaacaaacaaacatcaggtaagttcaaactcaagatctcataaaaatggaggaaaaaaactcaaaaaatttaaaacaagtagcaaattttgaattatgaaaacaaattgaagctgaactcaattttcaaaaactttgtacccacaaaattattcaaaatcacctcatcagcgacaaaagttatttccgattacatgaaatagttaacgaatccataaactaagcaattcaaagacaattgacaagaggaacataactcattcctaaaagacttggccagattcgtcacaataagcacccctgaacgaaaaataaaaacacagaaccaaaaacctagttcttaattcctaagctcgtgtttttttctcgattgtgattgaacaacccattaaagaaaaaaccc

SEQ ID NO: 52574 - DNA, 550 bp, Arabidopsis thaliana landsberg
aaacaaaccatacaataatatcatatgcgtcgctacgagatcttatgtccaagaaccactaaaaccggagttaaaacggagttatggatagaacaagatttttgggcgcaattgatctaagagatgggatctaacagatgttgcatttaaactaaatagatattaaattgaaataattgagttggtattaatcactttaacaaatataaaagcataaaagcataggttataactataaataagattaactagattgcctagctaattagcattggataaataaataaataaacatttatgtatttggcccctgtgttatggttgatataatgttattgatatgtgcgcatgattactatgacctgttcgcactttgactgcattgcactgtgtttttgatcctgaagatatcgtatttttcactgcttcgtagggttggcttgcctaggtgacctggcacggtctcgtaggtgcttcagtttgttccagatgggcaatgcttgtttcatcggtctgtctgattgttgcgtcttctgtgattgtcctcgtg

SEQ ID NO: 52575 - DNA, 480 bp, Arabidopsis thaliana landsberg
tcgtgtgccaccatcgccgtgagcagagagaagagagagtgacccgccgcaaaaatccgggcgtgccgacgaccgtgctcggggtaaggaacccaggggctccttacggacgtgttgaaggtggccgcaaccgaatttcagaagacaagccaccgacgacaccggaatgtgtcgccgtcgactcaacaccgccgcagactcgcaatccgtcgtggtcagctcggtgtccaccaccatcctcggtgagttctccttcccatgtttcgcttgaatctctagcacgtttagagtagctcggaattggcctaggtgcgttagttcgcgtggccacatgcgatggcatgagcgacagcgcggcacgccgggggccgggtcctacactcgacctcagccaaaattagttgtagcattgagttctgggagtcgtcaattgtacgtgggatgagtgaatcgggttatggcgttcgtactgaccagaaa

SEQ ID NO: 52576 - DNA, 595 bp, Arabidopsis thaliana landsberg
  unsure (1)..(595): unsure at all n locations
nnnnnnnnnnnnnnnnnnnnnnnnnnnnnnnnnnnnnnnnnnnnnnnnnnnnnnnnnnnnnnnnnnnnnnnnnnnnnnnnnnnnnnnnnnnnnnnnnnnnnnnnnnnnnnnnnnnnnnnnnnnnnnnnnnnnnnnnnnnnnnnnnnnnnnnnnnnnnnnnnnnnnnnnnnnnnnnnnnnnnnnnnnnnnnnnnnnnnnnnnnnnnnnnnnnnnnnnnnnnnnnnnnnnnnnnnnnnnnnnnnnnnnnnnnnnnnnnnnnnnnnnnnnnnnnnnnnnnnnnnnnnnnnnnnnnnnnnnnnnnnnnnnnnnnnnnnnnnnnnnnnnnnnnnnnnnnnnnnnnnnnnnnnnnnnnnnnnnaaaatcatcccccctccccccggggggggggggggggggggcccccccccctctccccccctcttttagtaaaaaagacacccaccccctctgtgtggggggtggggggaggacccccccccccccacccaaaaaaaaaaaaaaaattattttttttttttttttctttcgccgccccctttttttttttttttttttttatttgagggtgtgggaggagggggcccccgcccccccc

SEQ ID NO: 52577 - DNA, 537 bp, Arabidopsis thaliana landsberg
  unsure (1)..(537): unsure at all n locations
tgttgaaaagcggccaccaagctagcctaccctattcgacaacaaagtagtcaccgcaacggcaagtaaccaagtcagccgtcgtgtttgacacgaacaactatctagcaaaaattcgcctaagggtgcagtcggatacacacaagaagtgtgcaaaggcgtccaatagacacatcaactattcgagcaaaaagttgcctaagggtgcagtcggatacacacaannnnnnnnnnnnnnnnnnnnnnnnnnnnnnnnnnnnnnnnnnnngcatcactcatccgagcaaaagtcgcctaaggatgcaactggatatgcacagaaaaacacacaaaagacaaaccagcaggtataaaaagccaaaagttaaaaatgcgtgaatacattcaaaaaccgaagacccgcatagtcgtcccgcggcgaaggggcaagggcagcgtttcactcaaaatttgcaagccacgataatacaaatcttctaaagattacaaaggctccgcctttaagattagacgagcctcccaaaaattgacaacata

SEQ ID NO: 52578 - DNA, 1246 bp, Arabidopsis thaliana landsberg
  unsure (1)..(1246): unsure at all n locations
gtattcaatattatgcagagttttggatcgtcagttcatccagtttcttaactattttattatctggctcactaaactcgagtgacttcctcttcattactggcattacattttctgtgaatcgagttaaaggaggagctgacggatacagaaacttcttgtcaactgcagatagaggctaattgtcaatatatcacagtatgcttctgaaaagttgcttaatttaacacatgtattcaaaatgttttcgtatcgcctttggatttggacaagagattctatatacactaatactataatcttaatctcacggaagtcccatacaaagaaacacaacaataaatcatgcatgttgcatgtaatctaccagacacatataagcctgctcaagcatgtgtctctagatattgacataagagaaaataattttatatagcatgttccatggttatgcaagaacttgactctgtaacaactgttagaaagatgtagggttggtcaatacctagttgatcgaaaactctctgaagataagtatccaagctatggtaaattaatgagagaagagcttggagatgtgtgatatcaacaggtagatgtaaaccaaacagctgagacacagtctgcagagtacgtgaaatgagatagtaagacggcaaatatattgtgtgcagcactaaaaagtaaaggtaggacgaatcatactagaagtaaagcaagaacgtaaacaaaaacaacaagtaaatcaagaggtaacacaaagcaaagaaaattgttttagcatactgaactcccacagtttgcacactattcagaataatcatgtcatgaaagtatgtaggtctacatacctcttctatgatcctgaatatttcaacgattgatgcagcatgtctttgttgaactgatagaggctcccactcctgttcatggaaaagctttacgattaaaaaaaaaaattccatcttttggacattcatactttggatttgattgattatggaaagtgatggaaagtctgtatatgttaaatatttctgacttcacggatccttcatttcattcagtctatattatcacttcaaactatatatgatgcaacttttgtttgcttcaaacattttctcaatacagtgatccatcanaatagtttcccttatggccaaactttaatgtctatctactgtcgacagaaatcaacatgtgaatgttttgccaagaatatataaccttcgatttcaaaagc

SEQ ID NO: 52579 - DNA, 1426 bp, Arabidopsis thaliana landsberg
acctggcaacgtctttgcttgcgtaaccagatccacgtcagattttttcttcaaagcttttttacattcacctttaagcaaaagcaaaagtcctaaaagatgcatcaaatctaaagattaattttggtaaaagattccatttattttttgtcatttttagataatgtaaagatttttattaattaattcgaattggagtacggatggtttagtactgtttaattatagaaaaagattagttaacacgcttttggaatatttcaatttcaagtgtatcaaaactttattcatattaataaaaaaaaaactttatttcatgcattgaccccaaaaagaattcctctatcattcacattatgtttgaccgacaaatccaagagctttttattggacactacacattgacacgtggaaatgatattcgaataatgatattttttttgcaaattactatttcctcagtttctttttaagtgatgtttaaggttattacacacagattaaaaaatatatataatttttctcttttctatacaaatattattaaatagaatgaatttaaccaataaaaataattgtttaaaaattattaaatatatttaatatttgcataaaaagttaaaaacatcacttaaaatgaaacaattttttttgaactaaaacatcatttaaaaataaagaaagagagtatcataaagcattgtttaccagaacaatcactaaaactagattatcaaatgagtaaaatgtgttatttattcgtccattttatggaattgtaaaatttgttaacacaaatcatgattccactaaaagttgtcatagaagaaaggcaaaaaaaaaaaaaaattatcattgtaaacatgtaatatacggggtagtgttgaaatcatccattatgagttgatgaagttaaaatacatatcatggtggtcagtcatcactcatcacaatttaagtttacattttactttttcagtgagacaagttacggttgtgccgctcagattactaaaattgtactataacaattcttttgtcggcaattgaatagcattaaaagtttaatgtccgtattttgcaacttgatacatatatatctccaagtgatttatataaatatcctaaggttttaacacgaagcatgtgaatagtataaacacgacaaaaagaagcaatcaatagtaatcttttgactatttcaaacacttcttatatatagatttgtcaaccatattatctatccatgccatcgatgcattatgatatttatggataaaaaagatcatggactaaaaaagtagtaaacgcagtttatagagtatgtttgagagcatattattttatctgctaatatatttatactttcgatcttttctgtgtaacatgtttatctttgcttacactctatagatcttatcatctt

SEQ ID NO: 52580 - DNA, 587 bp, Arabidopsis thaliana landsberg
tgacttcatgagccaataattagcacttgtgttgtgacttatacattcattcattagtcagatgaaatctcttacatatttttttaaaaaacaatcacaacacatctatttaagaagaagaagaaaaaaaagtaaatgctcaacataaagtaattgatttagagaataaaatccgggggaaaaaatgtattatttggaagaaaaaaaaaaagaagcaaatgggaacacaagcctttttcatataagagggtcacaatcacaaatacataacctcaatgtgtgaacaaatatgaaaactcaaatgcagcatttagttttattaacatgaaatgtattatgtggaaatttaccaaatcaatcatataatgtatcttaagtttaagtacaagcaattatacctaaaaagtttaaaactatagacaaagattactaaaatataatccacgtttaacacaaactatcagaagtctatttggctaggtataacgaaagcaacaaatccctctttaaaaaagaaagcaagattattaactaatgtaattatgaatacaatcaacgcaaattaaaatcatagaatgtaaaatttg

SEQ ID NO: 52581 - DNA, 547 bp, Arabidopsis thaliana landsberg
  unsure (1)..(547): unsure at all n locations
ttccaacacatgataaaaaaaatttgcatcatgttggagttttatagtttgtgcataaaaaagaaaaaaaacaaaaaaacaaaacaattctaaaggttgaattgaaccctnggttaaaatttagggttttggaattaagaagaatagaaatgacatcgtgatgagaaaaagtgtttgaatatccttaggcttactgcttttcactgtctcggcatcgtgataatgtggccgcgaggattgacttgccatcttgaattcggttggatttgcaacgggcgcgcataggaagccggcgataacagtccaggagtaaccgccagctgggcctcggattccgtggtctggcccgacaaccgtttccacccgcacggcccacgtcttccggtgggcgccgacatcctggggtccctctgtcagtgtcctccacgcgcgcacggtcatcccctctctcgctgtcgcgtggcccctgcttttcttctggcgcgcgctcccctccctgcgtgtggccccgcgtgtagaggctgtcctttcccgcttttcgccgcgt

SEQ ID NO: 52582 - DNA, 670 bp, Arabidopsis thaliana landsberg
gacaggtcttccatcattccaccgttatcgggtcataagcagtttcacgaagtaattggtcgctttgtggagatcaccaaagataaaattgaaggtatgactggtgcaaatgtcaggacagttgatcctcctcagagataagtattgattctcttagaggatggaaattttcaatcctctaaccatttgaatctggcaacttcaagtcgactgcctgatcgcggtgtgcaatagtttcacgtaatatctctcgccccttcacatcttctaaaaataattcagcaggatcatcatttgccttaatagtagataaaacaaactttggagtccgcaactgggaataagctgaaaatcatccaccatgtgtatctctctctctctctatctctctctctctctctctccctccctccctcatttgcttctgttctgttttaactttttttgtttttgttcagtttgggtcattgggtgtatatctgttgacggcttgatgcatttcaattgtaaaagaatattggggtttatatgtttgggctaatgcctgttggaataaaagatgaagtgtaagttctatacatgaattacgaattctttttggtcttgtctgaaaatgatttagctctactaccacaggttctaagagcacttgctcttagaaaaagaaatg

SEQ ID NO: 52583 - DNA, 1442 bp, Arabidopsis thaliana landsberg
ctggctgcctgcaaagatgtatgggaatgttgcttgaagagacgttgggatggatgctttgttaagtctctgcaatagaatgcaagcatgtgaacaacaaaaaacaataaaatgataacaaatatttagacaaatagtttcctagtcaaatgcttaccaacatggttagattctgaaccaacaacttatgatcataaggaagatgaacgctggccctaattgccatcacacctactctagttttccctgttaagtcacagccaatttggagatatttagttttgacaacaaaacagaaaactcaacacaaagagagctaaagctaaaagaggtattagctaccttcatttttaagaccaacaaggagctcagtctcttctccagctggaaccactgcaggaaacaaagagcattaaaaaccaaatctttaagatcacaacaacggatagataaatacgtaagaaaggaggagtaaacacatacatttggcactgtttttggggaaaacacaaacagtctcaactcctggaaatgaggacaagttcatatccaaatcatggtcatcttcctcaaccgcatcatcagtgttttctcccacaacatcgtcaacaagacttgaatgatcctcggcatccgattgacatctagcaactgatcaaaagaaacaacatgaaaacacatcaggtcactaaagcataacgtcttcttcagaaaatgttacaatttgcaatttttcctctacccaagaacaatggcgagtgtaaagtaagaaaataaagacatgcaacgaagacactattgaagaatctattactaggggattcgatctacgttttaaagtttgtatctttgaaaccacattgctctaggattggcagcaacacacaaaacacagagctacaatgttcgaaggcaaagtattgtataaaggagctcaatttactcggatcgatgaataaggacataacgttaccagatcctttaagaaccagatcggaaacagagatcaaatgtgaaattcagtcagagaattctaagtaatcaaaacggatctagatatacataatcgatggataaccaaatagagatagagagatggagccttgccttcaagcatagaagatgcaaggagaaggagagcgaggaacagaaccttaagattgatcatcgcttgattctatgtaatatggtcgatgaatttgcgaatgaatgagagcagtgtgtctatagatgccatttatgtctttgctctgtgacagtgagtttatgtatgtgtgaaaaagtgaagattgcaacacaaccataggaaccctcgcgaagtgacagaattgtgtctggtctctcaattaagtacgtgtgagtatgttgccttgtatactgcaggggatacactaattgggttcggtcttaattgaaagtcaatcaaaggggggggggggggc

SEQ ID NO: 52584 - DNA, 1309 bp, Arabidopsis thaliana landsberg
  unsure (1)..(1309): unsure at all n locations
ttcttcttgcaagcttgccctaaagccgttgaagagcttagggtaagataattataacagcataagttatttactaccaaattgttacgtattatataagttattatagaattattctattagaatatacgatgaaaaaagtatgtatatttaattgtcactaattttatgtttattgatttatacttttgaaggaagagcatcttgagatcgcgagggccaagaaggaactaggagagtcagaattaaattgggatgattacaagaaaatggactttactcaatgtgtatgttactatcattctcattatttattctatgttcatatgatttatgatgaaaccaaaattattgattttttttttggtgtgtgtgaaggttataaatgaaactcttcgattgggaaatgtagttaggtttttgcatcgcaaagcactcaaagatgttcggtacaaaggtaaaactttacgtacaaaatttttaaataatgaaatccggaatattgaaatcttattggatgaaaaatattaaaataatttacatttcttaatgttggaaaaaaaggatacgatatccctagtgggtggaaagtgttaccggtgatctcagccgtacatttggataattctcgttatgaccaacctaatctctttaatccttggagatggcaacaggtaaataaaaagtttctctcgttaactatcgaaaattagtgtatagntttttcatctattgcatgaatagatacgtcctacgtgatttacctatctatagatactatacgagaactattaatctggcaaaaactatttattattattatctttcaagttagatcttaacacgtcatggatcattgatcacatgaaagcatataaattaaaaataagagagagaaagagacgtgttggtgtaagtgtacgtgaagacaattaattagtaggatggtatgtctttaatgacgtaggagctgcctaaatattcttataatcgtgaccgttgatttattattagtcacggctttgatacaatttaagatttgacggacgatggtaccacggctttgacggatctcacacgcccgatgacttgtacgtgcgttagattctgccacgttgactggttttaatacttagatttataactctattaattataacaactatcaaatcggcgaattagagaaatatactatatagtattattatgattattatgagataatactttatgaaataaaataataatggtagtcatgatgttatagtgagtggggaaggtaagaggtggtgagagatgattaatgacc

SEQ ID NO: 52585 - DNA, 581 bp, Arabidopsis thaliana landsberg
gtgagaatgtatcattattttttaagaccaaacgacaactatccaaaagctcgactaatatgtcttgttagatatgctatgatcaaagagaaactaatttttcaagtgggaaacgattctgatttcaagtactgaaacaatgcaacattaaaatatcaccactctatttatcttattatacaagctagtgtaaagcttgtctatatactcaagatatacctatatgagtatatcattattttatgatcgttgtgatgcgtaaaaccaagaagattttgtggttcagttatatagatacgggtaaacaaaaacaatggacttaggtcaatttgagggaacgtacggtatctatcctagccaatagggaggggctagtcttacacttttagtccaagctcgatcacgtgtacctcaattgatagtgtatatgcttacgatatttatttatatgtaatgcctaagtggaatttcatcaattgtcgaacccaatatctttgagcacttgttctaaaaaacttagacaggtgatttccaactaacattcgtcaatatgtaattttgtacaaatactttaattttaa

SEQ ID NO: 52586 - DNA, 790 bp, Arabidopsis thaliana landsberg
aatgtccctctgattgttccagatcatatcttgacttcaacgtttatctctctatttggtaaattaccaacacaaactactaaattttcaatttttgttataatgaaaacctttttttttttggctcaacatacacaaaactgttcacaacataaataaaacccaaccatccatgattatattaaatccaaaatggaaataatactcactaacaacattaaaacagaaaccttaagcgttcttttgactcaagatttgaatcaaagataaatgagattgtattaagttcacacacacacacatttatatagatagatattattataagccaatgtttatttgattagagggcaaaagccttttgagacttgatgcgtctctttctaagacgttcggcgatgatgaaggagagctcaagagactgtgaagcattaaggcgaggatcacagtgcgtgtggtaacgtgaacccaagtcgtcgaatgtgactgtgcgtgaaccaccgatgcactcggtcacgttctgaccagtcattcttaggtgaattcctccggggtggctaccttcttgctcgtgcacgtcgaataaagctctcacttcagcctatatattttcaattaacattagatgatttgcaataatacaagaaaacaaccgattttgctttgctagtatactaatccaagattattttttttaaatcaaaatcaaataactaactctactaaaattgcttagtttggtatttaatttgagcaaatgtgtcacctaacttttataaaaacatttgtg

SEQ ID NO: 52587 - DNA, 490 bp, Arabidopsis thaliana landsberg
ataatgcatgcattaatacatatagaactaataaagaacgaaagagttagaaagttttcgtaagttggctataggtgttctttatcaaaaaaaaaaaaaaaaaaaaaagttggctaagttgttggaatcgtattggaaatggcaccaactagcaaggacttccattcttccttcgtgtccttatttctttattataaaattttgtcctaaacacagcacaacttattcttttgattttttggttaaagttaaaataaataaatttacagagggatgtgattttgttataacttataagttataagaccaatctagtttaccaaaaaaaataaagtactggcaaaaaaaaatcacaaatgatgagacagtcgatcgatcctggttaccgttttaagccaacgaaaaaaaatcacaaatgagtaagtcttttggttaccgtttttttattaagttttgtttaacaaaaatattccaaaaatcattaaaaaat

SEQ ID NO: 52588 - DNA, 1251 bp, Arabidopsis thaliana landsberg
ggaggagtttggctactttagcattgggttgatgtgtccttgtgctggataaggtatgcacactgcgtgacgtttctgtgagctagaaccgccatgttgttccattcttttgacgatgatgatggattccgcaacgttgagtcactcaacttgagtgtatcgtcccataattgatagtggaagaagagagagtgatactttggaacctcttggtatagttttggatgaggagggaggatacttgtcggtttgtgattataatagccgccataaggctcgtttcaaaaaaaaaaaaaagccgccttaaggcccataattgaaagactacgtgtcgttttagttatccgcgtcgtaaggcccataattagaaacgtcgtcgttttatttattgaggttcccgagttttgcgtttcctctttttatccttttagaaacgatttgcgtaagctaaacgcgaggttcttatcagattctatcgttgaaacgacgccgtaacttaattcgatatcgttaacgcgtacaacgtgcgccaaagcatttacgcgcactcggtgacgaaacgaggactcggatcatcacgcgccaccgcgtggagaaaaagcttgagttttcaaaattccaggtagtaaaaaagcaatcacatcgcagagagagaaatcgaaattccattgaagcttatagccaatgacgacgttaggacaaagagatcgccgaccagatgctctcggtagtctcagtgttctaccagatgagaccatctgtgttcttctcgaataccttgctccccgagatattgctcacctcgcttgtgtcagcaggttttctataattctcttcctaagattaacttattgatccaattaacatcaaagaattgatcaaaactagagtctaactagatcaattcgaattcttagcaagtcaggattttggtcttattatgaacagatgaggatttgttgaggcattgtttgtgattaatctgttatgtgtatatgtttgatgtacagtgtgatgtatattctatgtaatgaagaaccattgtggatgagtttgtgtctcagaagagcaaaaggtcctcttgaatacaaaggttcttggaaaaaaacaacattgcatctgtaagtactttgaaattaccatgttcaatgatacatacaaattgtctttagatatgtgacttttgctttgcttatctttaaattgtaatgactgattggttttctgatatacagagaaggagttactcta

SEQ ID NO: 52589 - DNA, 615 bp, Arabidopsis thaliana landsberg
tcatgtcatgtgccctatttgcatcataaaaagagaacacatataattgagattgatttatttaaaaccaatgatattaaaataaagagaaaatgcatcatattggagttttgtttgtgcatttaaaacaataataatatgaataaaaataagatagtaatgagttgagaatttggatttaaccccaaaagtgcaaattggggaacttggaaataacatagaaagagggaaatactatacaaaacaaaataaaaattatacataaataaatagttaccatactatgtgtaattgaacaaaaaaatgtgaagatgaattcaccacacattttgaacttaaaattggaattcaaattgaatttgaaaagggaaaggaaagaaaataaaaagaaaaagattaaaaccttgattgggctggcttcatccatttcggcccacctcgcgctagccaaaccccccctctcactgttacactgccgtgcgggcctcccttagctggtcgtcttcctcgcgcgaaattcgcgcgtggcggggctaacggcgtgcgcatcgcgggcgcttcttccctatcctcgcgctagatcccaggtctccgctcaccgggtctggaagatat

SEQ ID NO: 52590 - DNA, 1025 bp, Arabidopsis thaliana landsberg
caatcatacataggatatatatgaaagtgcatatgtaatcatatgtttcaccgtacaacaaaggaaaatcaaatatcagtccattgtgaaatgtcaaagatatattaatttcatttatctaacaaactaaaattgtacttaaacacatagaccaacaacaacaaaaagtcgacttaggcttttcgcaaccattccatgtacattttccacactaataagtttgttcgtttggcgaccattgcattaacctacgttaataaaataatgttttaaaataaagttttctagtttcaaaatcatgacatcatgtaaccatcactaacagctataacttcaatgaaattacaacacctaacgtaactagcttgcataacatatgtgctttaaattaagactgattagtaattttttgttaccccatgttgagaaaaggagatggctgatgagagagcatgtaaggatgctggatttggtgctgctgcggtggcagagggggaggcatattgtggccttggttctgctgatcccactgctcctgttgagccctaagaattttttccctctccttgatctgccagcaaatttatttcaaaccatattatcatcatcaattttcaaagtgaagaaactatatatatgcaatggttacaaatagttatgttcacagttgcactcatgcaatgaactattataacatttttataattaggagtagtgtctatattcatatacatagatatgagctaagtagaatgatgggacaacatttcaaagtttcaaatatattcaatccgagagacaaccttaaaactgaacggacaaaccgatatctacgtacaggctggtgattatatcaatcaatagacaacatctatgctatttcaaaccatttgcaaagattttctatttgtatataatagtgcagaagttaagtggagatatgaagatatcgtaggtatagcttggcgtggagtgtggagcagaccagtggaatggtacagtaatgcaatggccacatgttgatg

SEQ ID NO: 52591 - DNA, 546 bp, Arabidopsis thaliana landsberg
tcatggaacaagaaaaaaccataacattaaactattaagatcttattgaatatgtaatttataaatttctagtaggtcggggagataagatttctagtgtttttctccaattagcaggtttcatttgcatagctgcacttactgggatgcaaatcccacagcaataaatatgtcaaagacgtactcttaaatactacatgtttatatcgtggtcgttgcgttatgtcataggcgacatcatgtgggttctagggctagctatttatgccgacagctgtcaacgtgagagaaaaagaagcggtggcctacggcatctgattttagaaaaagattaggggcatatattttagtaataatatatagtttatccttaccaaagttatataaatatgggcaagtaatataacttaccatgttgaagtttacatataacttagaaaaagatatgagtttccactttcatctacaattaaatttcaaacattagtttctaatacgttagtttattaaaggaaaatgtaaatacatacgcttataagttataac

SEQ ID NO: 52592 - DNA, 640 bp, Arabidopsis thaliana landsberg
  unsure (1)..(640): unsure at all n locations
tccgtagaatttgatgtcaacggttaagatcgaatccatccatgccgatgcgtcgagggaagctaagccgtcggatgttaaacggaggggtaagattagatctcgggggaagattacctcagggtcgtccgattcttgttcaacggtagagattagtttaggagtaccttttcgtaggatcggatcgtgtccacagatcggtgggnnnnnnnnnnnnnnnnnnnnnnnnnnnnnnnnnnnnnnnnnnnnnnnnnnttgatctgacagccaggattgcataccgttttcggtgcattccagatctaatccgtgccctcggctggtgatccaatggctaaggtttgcagataccccttcgaccgaacgattttgcagagaggcccttaaaggttttaggaatcaacccgccgtccatctggcttgattctgagtcttaggacttttatgcgttagacccctgaacttctctgaaattagtgtccagtccagtcagtgaataaaacttgtaaaatcatttataaaatgatttttatgtanaaataattattagaaattatttaaatcatataaaattcatattaagtcgaaatgagttctatttaatctctataattttgtaatattattgttcatcattagt

SEQ ID NO: 52593 - DNA, 550 bp, Arabidopsis thaliana landsberg
ttttcttatattattcggaacccaaatatatttagttaacacaaaagtaaacgatcctatttagggttgggaatgtatattttcttaagtagactataaatcatgtaaactcccctttgtatttttttttatatagaagttactttaaatatattgatcttcatttctcttaaccagtcatcttcatactaaaaccatgaaaatgaagtaaacaactttacccttttcttagtgaaatcctcttcattctcgtcttcatcttcatactattcttctattagaaccagtctcttagtgaaaggccctatttctatctttaattacctttctattgattttttttttttgtcaacttggactctatatttcaattttaaaccacacatgaaataaattcaattaaaaactaaatagataaaccatatatttctcatttcttcacatatgtttcttacaatttctaacaaatcgctgctgtttgtatgtttgccgaatgttcatagatcagggaccatatatggaatctctatttctctcattatcatcaact

SEQ ID NO: 52594 - DNA, 567 bp, Arabidopsis thaliana landsberg
  unsure (1)..(567): unsure at all n locations
nnnnnnnnnnnnnnnnnnnnnnnnnnnnnnnnnnnnnnnnnnnnnnnnnnnnnnnnnnnnnnnnnnnnnnnnnnnnnnnnnnnnntnnnnnnnnnnnnnnnnnnnnnnnnnnnnnnnnnnnnnnnnnnnnnnnnnnnnnnnnnnnnnnnnnnnnnnnnnnnnnnnnnnnnnnnnnnnnnnnnnnnnnnnnnnnnnnnnnnnnnnnnnnnnnnnnnnnnnnnnnnnnnnnnnnnnnnnnnnnnnnnnnnnnnnnnnnnnnnnnnnnnnnnnnnnnnnnnnnnnnnnnnnnnnnnnnnnnnnnnnnnnnnnnnnnnnnnnnnnnnnnnnnnnnnnnnnnnnnnnnnnnnnnnnnnnnnnnnnnnnnnnnnnnnnnnnnnnnnnnnnnnnnnnnnnnnnnnnnnnnnnnnnnnnnnnnnnnnnnnnnnnnctcctcgcgcagtattcatccttataggctaagggagatcctggtaggatcacaatcctccaatttggtccagagacttcgatctccgagcacatgagtcttcgtcgaatcccactggctcatggcgcagcgctcatcac

SEQ ID NO: 52595 - DNA, 675 bp, Arabidopsis thaliana landsberg
ggaggagtttttcacaccatcgctaaagagaagacaccaaaagaaggtacctttatgcaacctagccattcccactccaacctcggtatgcgacctgtttctgagcaccgacaacgcactgctatctctaaagagaatgtctgagaaagcgacttctggtgctgcatacttagagctgcagccgaggatatggccagttatggtaccaaaagtggggagttctacaccacagtttggggcaaacacctgagtgaagtcgtcttcagggtgttcacagctgagagtgttgttgacattgcaattcccctcgcagagctcaacatactggagggccatgcagccaagaccgggactctcatttagtttgcctagtttccgagctgttctgttctggttcaagatgctcaccatttcatgagctgagtttcctgcaaccattctaactaacacttagtccgcctaaaacgaatcaacataatataaactgtcgaatctggttctgactaaagaaagcgaactcgagattaaatcagagggagtggctgtaaattcaaaataaagcctggccaaatgctgaacgagaaatccaagtctatattcgcatatgttatgaggggataaagcaaggagttaccgtgcaatttggagctagctagcactgatgagagtgacaga

SEQ ID NO: 52596 - DNA, 822 bp, Arabidopsis thaliana landsberg
accaatatcattatctactcgaaaacatgtctggtaaatctaatactataatatagatctaataaccagtttagaattcaaagaacgataaaataaaattaaaaatcactttttcacataatcagcttttgatattttccgttggtgaaatttgttgacggttacatttcattacaatactttttttttggataaattcattcatttcattacaatactttatatactatttttttatattttttttcagctacatacatatgaatgtatatttgaatccaatgatatagtgagaacactagcacacaaaccactaatacttgtcaattttcttgaattaaaacctaagtttataatatataaatttttaacaacttaaactataagccttataaaaaatccaaccacccgattgtaaacatatgttttaagactgtgaattgggtcatttcaacttttaaacgcaagtttcaaccatttacatcaacaattgtttcatcggcttctacttggaaatttggtttaggtaactatgcacatcttgaaaacgaagtgttttctttcatcatttattattattcaccaaacccaaatcactacttcttttaggtagctttaatgcaatcttgaaaaaccaaatgtttctaccaaaactacatctgaccccactctggtgatggtgcttattcccaccgtttattgtgaaaaattgatccagtgaaatagctctaaattttatattcttcctcttttttttacatcatcatactaatcagtaaatttgacatttttgaacttgatttttttttccccaataaaaac

SEQ ID NO: 52597 - DNA, 1204 bp, Arabidopsis thaliana landsberg
  unsure (1)..(1204): unsure at all n locations
gctgttttgcaggtaacatacatacatatgttcataatagtactgaacacctttagcaaaaaacaaaaatacataagttcttgtaaccatattataacttttcattttatggtgtatagataatattttgtgagtatttataatgtttcatttgaaagatgctaaatgataaagtttgattttgtctttttaagggtgatcatctcgttatagcaaatgcgggtgactcacgagcagtaatagcaacaacttctgatgatggaaacggtttagtcccggttcagctctcggtagactttaaaccaaacattcccggtagagttctagaagcctttccatattttacagttacttttactcagatgaaatgacgaattaacaattggtatgtgataatttccggttaaaacagaggaagcagaacggataaaacaatcggatggacgattgttctgcctagacgatgaaccgggagtgtaccgggtgggtatgcctaatggaggatcactcggtttagctgtttcaagagcgtttggagattactgccttaaagacttcggtttagtctctgaaccggaagtaacataccgaaagataaccgacaaggaccagtttctaatcttggccaccgatggggtaatatatcaaacttactcagcatttaaatcaaaatcaagattgataaatcatataattgtgtaatgaactaatgatgtatgtatgtatatgtagatgtgggatgtgatgacgaataatgaggcagtggagatagtaagaggagttaaagagagaagaaagagcgcaaagagattggtagagagagctgtgacgctttggcgtaggaagagaagaagcatcgccatggatgatatttctgttctctgtctcttctttcgtccttcttagtttaactcttctttaacctctctattacttatatacatttatcaatgtattttgggcgtcattgaacaacaaaaatgtgatatatatacatttttacatagaataatagatgttgtgaggagtggttgagaatggagagataggtgagtaaagagttttataatggttttgtttgtaagtacgacatgtaatggttcatatattgatcaaagcttggaccttgatcttgattatgatctctatagacgacaaatntctaaatctcaattctataactaaactatatgctggtcctgac

SEQ ID NO: 52598 - DNA, 181 bp, Arabidopsis thaliana landsberg
cgaagcctaccagcaaccgctaccagcgccttcccggtggacacaacgggccggttcgagaccggacgaggtctgagtggccggcccgcaagccggatggcaccgagtattcgcgtaacccggctagacagaaggagcgatgacgtgtactaattattaaaaggatcaacaccatcatgta

SEQ ID NO: 52599 - DNA, 592 bp, Arabidopsis thaliana landsberg
caaacgcttgatggttctcacacaccaaggaagggacgtgcttggtcaaacgtccctccccactctccggtcgtggtggcatcatgcaagcctccatcctggtctctatatctggactccccctccccctctttcagggcctcgaaatctcgcccctcgttgcagttgtccatatcccttcctctcttcctcgccaggccaaccgctgattgttgttcagacagaggaaggaaggaaggaaggaggagatcagaagcatcagccatggtgagcacatctgatctatttctgtctcacacacagtatgttgttcattcaagacatgttccctgatgcggcgggttctgtcctcattgtaagtcgaactcggcgtcgggaatggccgtttgtgacgaatgcaaactcaagttcctggaactcaaggcgaagaggagcttccgtttcatcgtgttcaagatcaacgagaacgtgcagcaggtggtggtggacaggcttgggggacaggtgaaactacgatgcgttcagggctgcgtttccgcaacgagtgctgctaccgtgtttgatttgctttgtactgatgagactgcagaag

SEQ ID NO: 52600 - DNA, 628 bp, Arabidopsis thaliana landsberg
ctcggacggcgccccagatccaaccgctggtggtcgggcacgggcgccgctcaatcctgcagtgaagtctcgccggagacgagaggactggacatagcggggctctaggggcttggggaatagctcaagcgtgctcagggcgatctggcgaactcgaccatgggcgcaaaactggcacgagggcaccagagggtgtagaacacgacgaggtgggctacggcggcgcggatcaactccggcaaggaattgcgcgggcactgggacgatacttagcgaaataaaggcatgagaaggttgctcacctcgactgcgaacttcgggatgcttggggaacggcgggggtgtggtggagccttgggtcgacggcggcgggctccggctacgcaagaaatgctccggtgtgcgtggaccaggaaaaccagagaggggaagggcaaaccaaagggtgtcccgagtagctgacggtgaggcggaactcacgctgcaatggatggggcacgggctcgacggcggtcgtaaaacgaatgatggtcttcggtgagcggcggcggacgtacctggtcgcgtgcgcagagcgagagagggggcaagagggttcggttgagggtgcaggtgaccggggggaagt

SEQ ID NO: 52601 - DNA, 538 bp, Arabidopsis thaliana landsberg
aagcccagattttggaagcggtctagtggtgtaatgtagctcgaaatcttttgggttgttcaaaaaagcccaaacaaaacatgctataatccatttttaatcgaaattatttttccgcaatactattagaaaaaacaaaaaatgggcccaataaaaaggcaaaaaaggacagataagaaaaggagttgtcagaatgtgcaaacacatgcttactttatttttagtataaaacaatgacagctgtttacttcggttggttcacgtgaatcggattttgtatatgaacaaattcccaagcctaagtaagcggataaccaaaattcgactcgatttgttgataaaccatcaagtttttttcgactaaactagtagctttttctaggacgatggtattctgatgtaaaccgaaaaaattgcgacatccaacttgacaaaattaagaacatcattttctatgatttttataaaaaataaatattgaaattgttttggttaaatgtatgtaacgtgaaagttggacaattttgctggattatgt

SEQ ID NO: 52602 - DNA, 535 bp, Arabidopsis thaliana landsberg
gtttcaaattccaaattcaacttttcaattgcgcaattactactagcatcatcacgttacctgagtccgcatcaattgcgggattactactagcaccacacgttagctgatccatctgagtccgcatcaattgcgcaatttttaaattcgcttcttgttcccaatatatatattaagactattatatgctagagagaaatatatttgctaccgagagagattcttcaagatgaagatccgtgcaataatgtacagtagtccacagctaaattaatttgcgtgcgtgcacgacttccatggtaagatcctcgtcaaattaatcatgtcacatgagcttatgaatgcgtcagtgtagtttactcgatttgattcttccatcatataaaagagtatcctagtcgaatagtatagtcaagtactgatatgatagacactgcacatatataggagcatcggaaacagctagcggatagtactcaccctcccatgaagtccgctctagcatttcgaggctacaaatcgggtctaattaaca

SEQ ID NO: 52603 - DNA, 599 bp, Arabidopsis thaliana landsberg
tggcggggttctcctcggggctccacgcacacccttaccgttggggtgcttactctgacatcgagcaccagtgcggctccacgctcgcatagtccccgagcacaatcctgtaagtgcggtgaagctcccgaccccgtcgatgaatccctattgacggcgtaggcacgcgaccacgacggcgtccagattttctccgcggcggcctgtggtgggtgcttctcggtgtgggtatggacctggataaccagggaataaataggggcacgagggccatcttatatgctcgagaatagaggaaatcgccacggttgtagtggttgaggatagcggaaatcgcgcggttgtcgtcaggtttccccgtgctctgcaacgactccatgaacgggatgagtccgacctggcggccccactcatcagcgataatgtatggccaactaaagctgtaagaaaaaacaaaaggccattttatattcatgacaatgtaggtcatacatggaggctccacatgggagggttgtgggacagagagaaatggagaaagccttcctccacaaacacagagaggctgcatcgaaccagtgacctagtgccttagtaaa

SEQ ID NO: 52604 - DNA, 955 bp, Arabidopsis thaliana landsberg
tgttctttgttttcagtttttgtttccattgtgtgattaagaagaacaaaaaaaacagagcgctctgtttttgtctgattgtagaaatgatcgaaaatttgaagagatgaatcacacctgaaattgtgaagaagatttaaacagaaacttatgagggtttgtttatttatatgatgtaataaaaaataaacaagaataacaataagtctgaatgaagttttttgtttgtttgtttgttcgttgttagctagctaagctaagattgctagttatctaagcgggaacgatttatgaactaaactaagggattagttgcaattgaataaagttagtaacgagattaagacaagaacttaattcaattgtaatgaaatgtgttgttgaagataagtagatgactaaccagagtttattcagttaatactagcttccctctatttttagcctgataattcagcaaataaatcaacaatttcagctaactacagttgtcaaataatttgtaagttggaaagtaaatcacaattaactattttttttatttgacggtttaatcttaacaaaacagcaaaacaagacaagagtaaatcaatttcttttattatagccgagaaatacattagatacatgcaacaaattcataatgtcttcacttttcagcaactgacagatgataaacccgattccggtttgcgtagttcttgaatctgaaaaaagttgttaaaatgttagtaaaatgtatataaaaccgggtttgattttggtatataaatgaaattgaccttggtttggttaaagctgggtggaataagagaaccggaagactttctggtccttgcgagaagacctttagtgactggagacatcattgcatcagttgggctcctgtacctttctgggtacattgaagcttttgtgacttttaaacgctcctgagttcccactttcttttatt

SEQ ID NO: 52605 - DNA, 744 bp, Arabidopsis thaliana landsberg
cgctatcctccaagccaagaaatgtgagccaactcatttttgatgaagctgaaaacatctcacggtggtcggagtaacatgcgagtctcgggtataccaacaagaccgtgcttccaagacccatcagcatctgaaccactgggaaaaagatgtgatcacctgctataagaacatgaacatgtttgtccgccacctcatccaactccacatattgcgccataagatccttcacgaaggcttccacattttgatcaatatgatagatcatcaaatgatcggctgcgtcggattcagcttcagttgcttgatggaaacgtgacacctttagcctccaacgcctttgtatgcttactaagcttgggccctttaatgccccagaatgctcggaactcgatctcaccctgataaccaaattctctcaaccgttcgaccaccacattgtagagtcttaaggctttccaacctctaggaatgcacacattctcgaaatcccaatgtataattatacgagctcgagaatcttccaagccagccatagagaacgttggcaaatccatgttcctgaaatttggactgcataaacaaaagcccagaagcttaaaaatcagaaatttcaaattagagacattggctgagaggttataacaatcaaggaagcacaactgattacaaatttcagcaaaggatgcggggaaggttcttcctctatcacaaatcacacacattggcgggttcagcggtgga

SEQ ID NO: 52606 - DNA, 721 bp, Arabidopsis thaliana landsberg
aaaataaagataagtatataactagtttaatatttaataaacttttactataaaaaaactttaactatttatcttttaccctgttgttattatttaattattctctattttcttcatgaatatgttctattctattaattgttagtcaatgtattacaattgatcccaatcaccttgattactggctataatatctcaattgtaaattatggtaaaacaaatttcatggtggttaaagtaaccgacggtaaaatgaaaaaaaaaaaaatgaagatcgtaatgacgctactgcccttttaaggctttgaccctaattttccgatagtgtaaaaaaaaaaaaaagaacgagaaagaaagagccacgaggcctttgaatccattaaagcagtttcttaaatcacgagtgtatgtgtgtctataaatgtacataccatctcctttctccagattttctctccactctctcaatctcttaacttaaacaaaaccaacaattatcaatcttcaatgacgcatctcaacaaaaaacagaggttagagaataaccataacaatactgtgaacaaccatttcgaagacttacatgacgatctcatcatctctatcctccgcaaactcgctacctccgcttcttctccttccgatttcctcaccgttctctccacgtaagtctccgctccggcgaatgcatcttctcgtttttcagcaaactatttttttt

SEQ ID NO: 52607 - DNA, 1153 bp, Arabidopsis thaliana landsberg
cacttacattcatcatccactaataaagataaattcagatagattagaattaagaatttttcggattcggacatacgttgatttgaagggtgcactggtgactccaacaggtgtattaaaggcgacatcttggaatggacctgccatctttccttgagggaaccatccaagatctcctccttttttccctgatggacactcagagtactctgctgcaatctgagatcgttccacacacaaatcgtgttaagattctccacaattcataacacacatctatcgaaatatatctaaccgaaaactgaaacttgtagatgtcgggaaagcaatgaactatgaggtattgaatgtgggttttctataagcggttacgtacatatcacagttagagatggaataaacaatactatctgaactatcttagattgatgttttgatctcatagacaaataagaagaaggatattcacctttgcaaactcagcaggaggaaccttgtctccgttgctcaaccaaccatcctgcaactttttgtaggcctcgttgatctttccttgcttctcgcacaaaacatgtcttgctgaaacaaaaacaattggagatttgactttaatgctattgtactaatacaaaagttgtaagagaacttttggatccatatttgtttaccagtattttttactcatgaacaaaggtaacaggcacagaaacgaatccaaaaaacacacctttaacataagtgcatgtcccaagaccatctgcagcttttcctgcttttcctttacccttggagggagcttcttcactaccacttgcttgctttcctttacccttcccaccagcttttgcgtccttccccatcgaattaaaactataaaaaacaaccacgattaaaactttattatcaccatcagattacagggttttaacttttaacatcaccacacacatcttgtaaaccctaaaccctgaaataaatccagtgaacttttcaatgcagatttaaagccaaatgcaagtgacttggaatctactacactggaagcagatatacaaatttgtaaacttaaaaaaatgcttccagccgcaacttttggggaatttaatcaaaaacttagataagttaagatccatccaattcagaatgatcaaaa

SEQ ID NO: 52608 - DNA, 606 bp, Arabidopsis thaliana landsberg
tacttgcaagatattgatggactaatcagattgtgaagagtcatgttgtgctaagcatcataacattagaagacgtgaattgaagccatcggtttaactcatatgtgatgagatggttcaaatcataaggctcaaggtatgctagctcaagtgaagaggagaaatatggtcacaattccaaagatgaaggtatcaaagctagagaaactagaagggcttgctattgagcaaactttggtaaagagagaaaaagtgagaaataaagaaatcaaacttttggtcattctagttgttggataggttcgtgatgactatagcaacatattggaactcaatggagtagcgtgattgcttatattgaagattgaggtaccaagtgtctattgcagcaaaaaggttgatgaaaagatgaaatttgagttggaggttgggacaattcgaaagagatgacttagaatgtttggatggaatcaaggaacatttttctaagtcaagaagtcccaaaagaatagctaagtaaagacaacaatgttctgtcaaactaggacatggtctagctactgagtgtgtatcagctagagttgcagaggccatttttgggcacat

SEQ ID NO: 52609 - DNA, 1074 bp, Arabidopsis thaliana landsberg
aacccatttaaacaaacactacgcaggcatgtaagtaacaagtaagagtcctcaaaattctatcaaaagttaccaactttaataaacccacaaaagctttgtatttgcattttacgattaagtactcagaccatcactttttccacattttctcgagcaacccatggaccaagaccttaagactgaaaatagctgagaaattgattgagaaaatcaacagaatactgaacccatgcctttgtttatagattcctaagatatcaaacgaaacgagaatcggcaatagagagtgaaaactggttttggagaatcaacgatgcgagaagcgagagtttgttttgttgtttcaaactctctatcgactgagaagtaacactcggagactttcaattttggtttgtttacatgtcgatgggctgaaaagacccattattactgagactatattattattggcccattagtattcactttttctctattttcttttaaatatattttcagaaactaattaatttttcattttaagattactaatttcatatatttaaaaactttgaaaaattgattctcaaatatttaaaattagattaaactttttaatcatattcgaaaatatactttttcttctctaaattgatagaaaaatacaaattaatatatatttccttttaattatttaatctaattagattaaaaaaatatctccattgaaatctggtcgtctgtcacgtgttgtgattatgttttttttttactcaaatatgcttctcatattaaatagggattaaaatcccggtataatgcgtttgtgattacattaggaatgaggttgtaaaaatgcgacaaagcatcagatggtattctatgtttcgctaagatatccgagtacaaatggggtcattcctcaaaatccaagtccaaacaataatcttccaagatcgagtactactccctttatcaaatgggaccattcctcagaatctatatcttcacatactccaaagactgcattttccctcagtaactggaaactttcctcaagatagtccaagtcttgtacggttttgaatc

SEQ ID NO: 52610 - DNA, 1106 bp, Arabidopsis thaliana landsberg
ttggtcatccattgtacttgaggaagataaagacagccatagtttgcgtaggtaagcatctgcgatatttttctttctgattgtgtttcatatactttatatagaatgaactgcaatcctgacactagctcactgttcttaacagcgaagaatcttgctcgtctagtgcaggtattgatttttctgaagaattcttgagaatcatatgtttggattttgaaaacatttcattcttcctagttattgaaccgtcactgcccctaaatcttgtcagtttggaccaatgaaacccacaattcacagtttgagaccaacacaagacaaaggaaaagggaaactaataagtttagcaaccttggagacaaaaagtatatcaatactgaccttttccaagaatcgtgggaagactgggaagtggatgatcaacatatgaagagacaagttaggtctggaaagcagggcagactatcaaactcaggaaagttaaaatctaccagtcagagaaagggtggtctagacgcgtcttacgattggtttgcagaaggatttacatcagcaggcataaactcaggtttgtttctcttatttatatttctaaaacatcttcaaaggcttgtctatcatcctgtcccaagccacggtgcagagatcttatatctagaaccatagaatatatttggatatggtttcagacctaaaacataatcattatcttggcgttctctctcacatgtaaactcctgttttaacttctgtcacagagattacaagtgagaggaataagccatatcctttcctaaaccctgagcgtggttcctctcactggcgttcatctcgtgcccctgattctattccggaaacatggattcccaagttttcagtaggaggcaccggagatgatgatgatggtgaccacgatgaagaggactatgtaaactgtttatcagcaaaccataaatctaaactagcaggagacacatgcggttttgagaatgacacgttatcagagaacgataatgagcaaagcagagaagtaaatcacccaaaaaatcagggagatgagacctcatcatccattgcaaagagcctctcagacgaaaatgagt

SEQ ID NO: 52611 - DNA, 911 bp, Arabidopsis thaliana landsberg
ctctctctcccacgttacgcagagtcgatagaggagcaattaccaaatgcggtttttggttctcctcaaaaagtgaagctaaaagggcggtgctttgaattgtcttgcctgtaacaggaaaaatctcacaacattacaggaatagaaaacaaaggccccttacaatggatgaaaagatctatgtgaccacccaagtgggacaattgaaaaattacctagtcccatttcatcagcaaggattacatgcgtctgttttgaccacgagaaccgcaaaaaattaagtccctcaagctggtatggatgtaacaagccttcaatcgcaggaaacaaataaatcataacatctataagtaccaaatataagaaacatttatagtatatgatttaaggtgatccaaatacctttgaggaattcaggagtatgatcaaactgttgaaagtctctgggatttcttttatggtcaacatctttacttctgcgagttctagaatttacatccttgaacctttgaatttcattctggaaggttgagatgtctgattctgactcccaataacattcatcataggatagctctttatatttgacaagatattccagctccccatcttcctctctatatcataaaagaaaccaatgcaactgtcacaattcctgatttacgaaacaactaagaaaatggtaacttaaaaagaagaaaaaaaaggtaagcaggtcatttatcatgtttcagagacccaaaatcgtgataacagtaaatttaggttaagcagcactctatcaaagatacgtgtttattagagaatggattatgctgaaaacaaggatattaaaaaaaaagttggcagatagataaataaaggaattaattccattctctagacctgcaggcaagaattcgatcaacagt

SEQ ID NO: 52612 - DNA, 602 bp, Arabidopsis thaliana landsberg
tcactgactgatttttatatggtgacgaaaccgtcaaagatgggaaattcaaaacgtattgaagcctgacgtccttgctaattatattatacattacatctactatattggtatgaaataggttggcatgaaagaactccagaataaaaggccaatcagaattatttttatttctcgctcgaacgaactctctgaattcttgtgtataaacacaaggatcattcatttcacaaaatgttttatagttctctataactgtccaaatactatcattctctttgctcccattaagccaccatagttcacacatttttccatcaatgattttgaagatagctcttacttttctattatcttcatgaaaatcgacaccatcagcgataatatcaatataggttcgattggttgggtgagaatcaatcaaaggggttttcattccatcaccgtataaacctgcccaaactaaattctccacatgagagaacaatcatcttcgtctccgaagtagggatcagcactgattgtgttacgcagcctattaaaacatgagggattcgctgtattgtcgatacttctatacccgacggagtttcatgataacg

SEQ ID NO: 52613 - DNA, 547 bp, Arabidopsis thaliana landsberg
taatgatgaagaagaagaagaagaagcctgaaaaaaaaaacaacacttccacacaagaattatataagcatacaagataaaagaaagaaaaagtttcacaaaatgtgaactttctcaatcaaagaattcccagttaaacctgggcgggatcgcgttatttttcgcagtagtcgagctcaatggcgtcacgggatgatgatcgaatgtttcccatttagcagaagaatctaacacaaatggtccttcccctgaattcctaggctcctcttcaatctcttgcttcttctctttgtattgtatcggcatgtccatgagcgattgtatcggtttctgttcttgtctctcttcattgttatgttcttgaatcggtgcaagtctctgagcagtacttgactgtttctgttgcccattagccatggagtttttgaccttcaaggcatcaagtgtttcgacataattctgcactctcttcacctgaacaaacatataaaccaaacggttacacctaaggaacattgcgaaaattgtcagtcttgagatgattttg

SEQ ID NO: 52614 - DNA, 304 bp, Arabidopsis thaliana landsberg
  unsure (1)..(304): unsure at all n locations
cgnnnnnnnnnnnnnnnnnnnnnnnnnncttctcttctcttttagaaaaaacaagacttcttaattccacgcagctgataactttgacgacagccactcaattcaagcagccatccatcatgaactacctctcttacaaacaacacccataagtacttaaccggacgcctaaccgacacgtgttnnnnnnnnnnnnnnnnnnnnnnnnnnnnnnnnnnnnnnnnnnnnnnnnnnnnnnnnnnnnnnnnnnnnnnnnnnnnnnnnnnnnnnnnnnnnnnnnnnnnnnnnnnnnnnnnnnnnnnnn

SEQ ID NO: 52615 - DNA, 638 bp, Arabidopsis thaliana landsberg
  unsure (1)..(638): unsure at all n locations
cccccccccccccccccccccgccccccccccccccccccccctaatcccttccccccccccccccccccctccccccccccccccgcccccccccccccccccccgccccccgcccaccccccttctcccccccgcgggtgtaacacccccacccaacacccacccccccccccccccccccccncccccccccccccccnnccccccccccccaccccccccccccccacccccccccccccaaaaccccccccccaccaacccgacccccccccccccccccccccgccccccccccacccccccccccccccttttccccccccccggtgggtccccccccccccctcccccccccccccacaacaaccacaacccctccccccgccccccccccccccccccccccccctcctctctccccccccccctcctcctccctgtccccccccccctccttcaccccccccccccccccccccccccccccccccccctccccccccccccccccccctccccccccccctccctctccccccccccccccctcccccccccccctctccctccttctcccccccccccctccccccccccccccccaccccccccccccccccccccccccccccc

SEQ ID NO: 52616 - DNA, 540 bp, Arabidopsis thaliana landsberg
cttccactgcacgttctctggcagccgcaccacatgcagatatcaaagatgacaaatctttttgtaatgcagatatagtgttctcctgttcacgaacaatattttccacactcctcacctgttcttccaaggatgaattatgacccacgatatttaacacatcagccctagctgctgtcatgttttgcatcaacgtcgctatgagagtatcaatggaagttgagaaaccctcaaagttattctcgagggttttgtttctcagcctgaccccctctgccatcttcctaagggatgaagaaatttcgtcttcatcagctgcactcccttgactattctccggctctgtgttcactgaattatcaaggtcactcaacaacgattttgcctcagtcgaatcatcctggaaatataacagcgttatcaagagaacagcctattaacaaattgaccaagagagaattcttaaagtctagcccatctatactgacaaatgtttcacagaataataatttcataatatctccattaatcaactcccac

SEQ ID NO: 52617 - DNA, 566 bp, Arabidopsis thaliana landsberg
tataaaagcaaacatatatattatgtctatatatatctttttggtcaacaagttcatactgtatatgttcgaacatatatgttaatgggttatgcattagcggaatttaatctactattaatattactaccatatccactaatatttggtattaaggacttgtaggactcagatcttaaacttcgatatcgatttagagacaatgaaccataaatatggttcggtccggttcaatttaccgaagtcattgcgtgtctctataaataccacacttcaccttcttcttcacttgcacctctcactccctttctctaaaactagtcttgtgtgcacccatttatgtgtacgtactattatctcataaataaatatttttaaaattagatgcatttattgatatgacaaagttacaagattagtttggtgtgtgtgagactttggatcgacagatcgaaaaaataactaaccggtcagtattgaatatcaactattatatgctgcatgcattcgcttatagtttcacacaatatgttttcttcacgtctaaaatcagagattcatatatt

SEQ ID NO: 52618 - DNA, 730 bp, Arabidopsis thaliana landsberg
attgctgatgggtgcaggttcgtttgtacactaactccgttctctcttggttgaatttggtgattttcctttatttttggggagtctgcatattcttaagcttgcataatatatttgcagagcatcagtattcgtcccctgtctatcagggtgattggaaaaatttgtggagtacggttgctaggattggtgaaaccatagctggctgttcagatctatggagaaacagtgatagagatgttgcaaagaagagggccctgtttgaacttctcaagttattagaaagtagtggtttgcagaaacacaagtttgaaaatatagaggtaatatacttttgcttgtcgatacttctgtgtatgtttcttctagtcatgctctgtttattaatcatatatattctctgatcatcttcttatgtagatgtcaaatcactttaaagggttgctttatcagccagcatacgatccaaagcatctgttactgctaacacataccaaaagtaacatacatccttccatgggtgtagaagatcaaaacaaggaaaattcactagttgagtggagagtggcaaatgagttttactttaagagcttggcttcagtgcaactcatgttaaatattgaccgaaaacactccgatgtaacagctgagcaggtagacttagaagcttgtaatttatatctgggcttcaccgattctcaattttaaaccagttgtttctgcaaaccct

SEQ ID NO: 52619 - DNA, 313 bp, Arabidopsis thaliana landsberg
  unsure (1)..(313): unsure at all n locations
nnnnnnnnnnnnnnnnnnnnnnnnnnnnnnnnnnnnnnnnnnnnnnnnnnnnnnnnnnnnnnnnnnnnnnnnnnnnnnnnnnnnnnnnnnnnnnnnnnnnnnnnnnnnnnnnnnnnnnnnnnnnnnnnnnnnnnnnnnnnnnnnnnnnnnnnnnnnnnnnnnnnnnnnnnnnnnnnnnnnnnnnnnnnnnntcgccctttgatgatgccatgcctaatgggacaccatctctgctcgaccgtgccgtctctaaagcacatcaaggtcgggcatgatgatcccaagattgctgatgctatccctactgggaagg

SEQ ID NO: 52620 - DNA, 539 bp, Arabidopsis thaliana landsberg
cttcccttgacatcgatatgcactactgtgattccacacaagtacaaatcgatggtgctgcagcagggagaacatgacgacgaggggcaaggtttgacgatgccgcgacggggctgtccaaacacaaaagacgatggcgtggggtgagtggcgcatgacgcgtcatagcaaaacgatggctgttcaaggcttggcatttcctcaagcagagcaagggcactgagatggtgatatccatggatgaagatgagtgcccgggcgagcagaggtagcggccgtggacatcggcgagccggagtactgggcgccgagcctagagctcgagcatagagggatgggcggccgagcagggagtcggcgcgacacgcagggaaggggatccggcgcagggaacaaaagatgaccggcaacagacagcactgggggagaagctcgccagcatgattcggagccggcacggacgacgccgctgcaaccagggcgtgagggcgagcacgaccgaggaaggggcgtcacaacttggatgagcagggagggtg

SEQ ID NO: 52621 - DNA, 558 bp, Arabidopsis thaliana landsberg
  unsure (1)..(558): unsure at all n locations
ctggctgccgttgaaaaggatatcgtcaggatgctccacaataccatacgcatggttgagcaggatagcttattttttcaccgcatcatatccctccacatccagcttgggattgctctccgcaaatcctaactgctgtgcaagcnnnnnnnnnnnnnnnnnnnnnnnnntgtcctcgaacattttggtgaggataaaattcgtagagccgttcacgatggctttgatggaatgcagcaggtcattatcataatattcctccaggttcctgatcaccggtatggaagcacaggccgcggcttcgcagagaaagggaagaccggtttcctgctgcagttccagcaactcgggtaaatgttcggcgatcatttttttactggcgctcactactgctttgccgttgcgcagcgcggtagaaacgatctcgaaagccgcattggcatcatcgatcacttccacgatcacattgatctcttcgtcctgcagcagttcttcctttttcgtggtaaacagcgatgccggcgcattcctcggtttggaggggttcttgatacatac

SEQ ID NO: 52622 - DNA, 397 bp, Arabidopsis thaliana landsberg
cacaaactgcatatattcgggactgcgctcgcgtgacatacgctaaatcaatcccaccatgttatacgttactatcaagccattactgattcatggccaggcaaatacaaactcaactgagtacataacctgagagcaccaccctcatttatgtattgatgctacccgcaatcaaggtagtgtgaagcccacactcgtaatgaacagaaagcgcgcaatgaccagtacttgctgaactactgatgctgacaagcggccagcgagacatatgagaatcgtgaaaaaggaccccacatacgacgactgacaagaaggaaaaattacatagttgcctcacgaactgtggccatgcactcttcaacctatacagtgttatattagaactgagcatgcccac

SEQ ID NO: 52623 - DNA, 1113 bp, Arabidopsis thaliana landsberg
ttgttaaatagttacaccattccagatgcctcaagatgataaatttttatttgtggatttttttttgttggatatcacagataaacaagtggacaaaaacatcgattccatcacaagtccggagtttgcgtaagggaaatatggatcaagtcgccattagtatagatgcagatcaaactgatcaaagcggtagcttagaagaagatgatgataaaggtaattaaacttgtctctgaatatttagtacttttaacaacatttcttagtaacattcccatttgtattttttctgttttttagctcatggtttcagatcactctctacgtcaagaatcattcctagattcacaagacccatcactaacatggtcgatggtttatggtcagactcttttcatccatggatctcgttcagtgtaaagttctttaattatgatctaacaaaaaacgacccttttatttggtttctgaacttttcagggtctcttgtgatcggacgctcatgagacaacctgctttacggttagggatcatgctatactgggcgatattgcatgctcttttggctgctttcgtggtctaaccaaacttccaatttcgtaagctcattactgacttttttttttaaaatcccaaaacaagttgcaaagagtagcttgatttgctaagcttttaagacgtgttttaatcgtatattggcagctggtttctcgttatagcatgcatgggctcatcgaagtggtgatgtgttgtcgtctccaacactattttttttttttttttgtctttgtttttaattcattgtttagcttatattaaccaagcaaactgtggtttgatcatccacactgggactgatacccggctgattgtgttttcaaacgcatcagtggggaagtttatttagtagctgtggaattgacgtgtgatttaactagagagacttgaagttctattatttttctttttccctattctgctattcattattttcagaaattcaaagcaaaatacgtgaaatgttcacatttaagtatttaacaaactatacagtgaaaaaattaatatcaccgactctaacatattattgaaaaaaggcatttttaggctcct

SEQ ID NO: 52624 - DNA, 837 bp, Arabidopsis thaliana landsberg
  unsure (1)..(837): unsure at all n locations
ctacgttaactgatccattctgattccatcaccatacatataattgatgacactcagtgccatttcatgcttgcccaactcattaaaccttgttaccaagctcgtgtatgtgatattatccctccttttcatcgacctaatcacattccaggcataatccaccttcctcgagctggcatatgcatcgacaagtgaattccctactaccatttcaccatctacgtgtcttctgagtagatatccatgaatctctaatacccgccttacatgtctcaatttgctacaggctcggagaacaccggatagggtaacaacatttggttctacctctcgttttaccatctccatcagcagtccaaaacaatcttgcacgaacccgtgatcaacaagacctaagattaacgttgtccaagagacgacgtttggtgaaaccattgctccaaagactctcgaagcttctacttctgatgccgagcacttcatatacatatctacaagtgcatttccaacatcagtgctatcctcgaagccaaccttaattgtctgtgagtgaatctgtttcccaaaatccagcgaacgaacagcagaacacaagctcaagattgcagagtatgtgaagttatttggttgcaaacccaaacttcgcatctcaagaaacgtgccaacagcttccttggctctcaagttccttacaaaccctgataccacagacgtccaaagaaacacgtcttgttctccactcgaattcaacaccctcacagcatccttcattntagaaaactgcgagtagaaatcaacgagagatgtcttcaataccacattcagcggaaatccctg

SEQ ID NO: 52625 - DNA, 1150 bp, Arabidopsis thaliana landsberg
atgtttgctaaaccatcatcttgtaataccaaggacatgacaaagatagaaaagagcagcaagtgaagccatatatatccatggatgtgtgacaatgatgactcaatactgagtagagttgttggggattttgccttgtttcaattgagaaagagcatattcaccagtacggatgagatcagcgacattgtgtttcgaaatctcctcagagccaaacaagaagatggtcctaacctcagctttcttcgcaagtcttgaagcataactaagctgcaattttggcgagttaatgctcctaagtaattgtcgatacaaagaaagaacttttcctctgttctttgcagcctcttctgctgttaaccatatcagactcttcatggcttcgtctttaacaaaattggaaacgagaatttcctgcacatgttcattgagcaattttgtcaaacacttggtgcgcaaagaaccaaaacaccaatgaaaaatcaaatcattaacgttacataacctaagcaatttgatagctaaatgaatcataactaaggaaatgtatatatctaaatctcatatcacaatttgttcagggtttaagtccatttttgagatacaccaacaaaagcaattcaaaccggagaattcagtagtaggaaattcacgtgcgataggtatccaaaagcataaagaagaaagaagagactcgatgacttgccttcagctgtgagagattttcaccggacggcgatgatccagtgagcgagagtggcggaagcgggaggcgaaggactaaagagtaaatttgctaagttattaattggaaaaggaaaaatttgcattaaaaccctttttggtctgaacaaattgcaaaacaaactttcaactaacctcaaacttaaactttgaccacaagaaaataaaaattgtaaaataccctagactaaaatttccatttgattttcagtctcaacactaaatatttacttcttttcaaactttatggttttgcatctttttgcttttttcagctttagttgataagagaagggaacaaacttaaagaaaaactattatagatagagagacaagtgtggtaaggtaaacagaagaccagtttgctacttttacgttccaagcttctatgagacacccaacattt

SEQ ID NO: 52626 - DNA, 507 bp, Arabidopsis thaliana landsberg
  unsure (1)..(507): unsure at all n locations
cacaaaccctaaaaccctaaattcttcttctcaagcagccacatctttctcttttactagctatggagttttggggtatgtctctctcaaaatcatatctttattaagttctactgaatacctcaatgactcctattgactgttttcgccattaaagttaatcattttggtattcctaagttnnnnnnnnnnnnnnnnnnntggtctttatacaaaagcttgcctttcttctgtattgaattctctctattactcaatacgcattttcttgtgttcaaaactatacaattgtttgggaatattagcattcttagtgtttaggtttcaatgcatctatctttgtgaggttatgtttcaaagtatctatctttaagagtttatgtttcaaagcatctatctttgtgagtttaggtgtcaaagtatctatatctttgtgagtataggtgtcaaagcatctatctctgtgagattttgtatgaatttgtactcaaatgtgtgatgaataat

SEQ ID NO: 52627 - DNA, 1072 bp, Arabidopsis thaliana landsberg
atggccactcaaatgatgcatgtggatgcctcgtcaatacaatatgtgcttatttcatgtgtttcaaactttaaagctcaccacttgactcggtagctaggtctcatactaaaatcatctattttcttcaattctgaacacgagaaagaaagtgattatgtttttgaaatcaaacattggcgccgcatatattttgaaggtatcaaatttataatatttatggatttgtatatctttttgttttgcatatactttttttggatctcttaattttaatatcgttttgttgtgaattttaccattttacaaatcatctctggttttctaccggaaaaagataagaagtgatatatcttgatgaaatgaatacaaattaagttgaataacaaaaataaaaatgactgaaaaatattttttctagtctatcattcctctcacattttaagggtgttcaatttttagctaaattatgttttctttcatctattacaaaagtttgtcaccagatttttttaaagttgtacataatttgtaaaaaaaaagtgtttctaaaaattaaacacaaatgctagtctagtatctagattgagcatttatgagagttgtaagtttttaactatgatatttcggaccatttgaacagcctctcttgcaaattgtatcacaaagtaggtactcaaaaagaaacaagttgcaagtgttgaaatcaaattcttttggtgatctcacaagcttcactcattatttgtggagagattgacatgatgtaataaaaagattaacatgatggtattccatgatttgattattgttgatatagttgagcatgatctccttttctcatttgttgaatatagaaggattagggaagcttttgcatatgctaattctaatattgaagaatggagtagaaatactacagctgctgatgttcttaaaatatttgagagggagaaaactaagtttagaaatattttgagtgaaattctgggtagaatctgatagactactgatttgcggagagcactcacagaggaggggtatttatgtttaactgctcactacatagatg

SEQ ID NO: 52628 - DNA, 616 bp, Arabidopsis thaliana landsberg
tacgttactttatgttcttatagttaatgatggttagtgcgtggttaaaatgttcaccttatcaattgagtgctcgaagtttaaatctttctactctgatttaaattatggttggcaattttagatgagatgacaaaaatacttgactcttctacaaaatacgatgaacacaaaaaagaaaaaatttatgatgaaaaataaaagataaaattaaaatattgaattatcttcacctattctttttaaaagaaagttttttaacacttctgtaagattatcaacatgcatgtctttgcgcttcaacgagaagaaaggagaacaaaaaaaatcacgagtattagactgaatttggttctgaatcttttggtcatatatttgattaaattatgtaatatgtaaaaacacaaataattagtgtaaaaaggttttgtgcttacctaatcatcacgtctacaaacacaaatattgggcccaacactccaacgcatgcctatttcattacaccatctacaagttcttctcacaaatgtactttcattttgtttcttggcacaacattctctttttttttttttcaaaatatacgttttactcaaaattaaaattctgtaaagtc

SEQ ID NO: 52629 - DNA, 887 bp, Arabidopsis thaliana landsberg
ggattcaaagtctggatcttacaacattccagcagtaaggtgtatgactggaactattatttgatctactttgttcccttttgcatacccttcgaaagcaatgaccatcgagaatgtgtggatcgtaacaaatgcaagagcaatgattgctgtaagacatggttgtaaaattataacatgagtactagtgcactagacaaaaatcaaaccactagcgacttaatgaagaagtgacaaagcttaatatgttgtacgaacaagatttgggttcaaatgactcaccagagatgagaaaaaatggcaccttcgaacatctttcgacatagaatgtggctggaccaaacgctggagttaagaggctcaaacaaaagaatacagcatgcgccacaccatgacctaaaccaccagctgcttgcaattgactggaatagtcttagatcatgtcaaatagtaagaaacgggatgcataacagctgctgggtgggttctaggttccatattagtttcaactatatcgttatccaacctattctacagcattctccttcttccaaaacaagaaactaagctttaagaacaaggtagacaaatctaaatcctattccaagatcaagatacttgcaacccatttacttcgtgtttcttatcagacagcaagagtccacaagtgtgttttcctacctaataatataaactaacacaaaagccgcatacaatctatgaaacaaactaaagatcttcgaaaaaataaaccggaaagcgtacctagagcaatctgcagcttatcagtgagaaacaggcggtgccttgagatacgatccgcaaaggaatccaagacatcctcaagccttcttcagtataacaacagagattacaggtttcaaaac

SEQ ID NO: 52630 - DNA, 578 bp, Arabidopsis thaliana landsberg
tggcggtggacggcgagggcactcggacgctcaatctcaccgtgctgcagcgcctcgaccacgccgttgaggacatcctcatcaccgcggctcacgtcacgctctacgacttcgacaccgacatcaaccagtgggtgcgttcccctgcgcgcctgtctgattcaccctgaccctgtgattcctgtgtgaacaatttggctggttggaccttatttgtgtgctcgtgttgcatgttttatgcagagccggaaggacgtggaggggtcgctctttgtcgtcaagaggttcgtctcgtctgtttctgatgagtttgcataaaaatagaaaaaaatacagtttgcatcataaacatattggttgtttgacatagtagacttaatgcagaatctgattaatttactggcaaaaatatgttcagagcagggcttttgttctttgttggtttaaccaactgtagtgatttgtttagtctgctctgcaccttttgagagatcatacatggatttgtatatttgtcatttcagagttcaatgtattacattgtcaggtagctttaagattctgaaattgccaaaatg

SEQ ID NO: 52631 - DNA, 811 bp, Arabidopsis thaliana landsberg
gaacctaaaaaaacatatcctatttatatgattttgatttttggccttaaaacccaaacacatcctaaactttaggtttcaatcaccattgacatatctacaatgttctatcgcatttcgagaagaatctaaaaagaaaaaactgatttgaagctttaatttattatacaattaaataatttgttagacttttaaaggatttagtcacgttgagggatcggccacgtcatttataagaataaaataatatcaaatcattatagttattattagtaacagtggtatagagggacaaggagataagcaggtatcgtttccattaaaacagctggatttgtcggcactcattcccattattgtatttatttcaccatatctgtcttatgaccaaaactacaataaacatataaataaaataatacgcaaataaaacaaataatcctcaacattttctgatttttaacaaaatctgtcttaaattataatttattttaaaatgttgatcacactcaatttaaaagtattacaattttcacaattggaaaattgttattagtgaaagtactacattatataaaataccccaattacgtcttgaataacctaaaaaaatacaacaaaaaatagtttgaagaaactcattattggttttaattaaaaaattgaaaacttgcttacaacagatttgatttgaaaatgtcacataaattttatgttcactttgtttataagcaaatgtatttataatcaaataatatggaaactcttaaactatatctgattagctatcttaattatatgctatacataa

SEQ ID NO: 52632 - DNA, 519 bp, Arabidopsis thaliana landsberg
  unsure (1)..(519): unsure at all n locations
tagaatcgtttctttttttaataaagagtattagaatagctataacttagaaaatatatataaaaaatagttagagatatggtatcatatttggataattagcctacaaattttggatagtaaagaaaaaactattgcaaatccaagaccaaaaacttaaggttctaactcgtcgttggtggctttggtatcgcaaattatgggaggaatttttaattatcaagtattccgtcaattggaatgggacctggtgtctgatgttgatcatgaattttccagaaaaacctttagttaagggtaagccacggtggttacccccgaaccatttgtgatgggaaaccttttttccaaccccaatttaacccattgtccggatggtaacacccatttttttttttaacagaaaataatatttttttctatctatttgatataatttaataaaattaantcttattcttttgcatggcgctgacatctttataggtttggataactaggaaatttcgtggaagtcta

SEQ ID NO: 52633 - DNA, 607 bp, Arabidopsis thaliana landsberg
  unsure (1)..(607): unsure at all n locations
taaaataaataaatgactgattttggacaatgttcaaatgttcttctcttttaaaaatataaagatagatcattgctcgctgaaaattgttgacaacttgacatctaagcgatcggtgtgtgccttttgtaagttaggttgattctacagagtgagattaactctggtgactaatagaattgtggagaatgagagagtgatgagatttttgaagtaagatgcgtataattatttatactaccttgaagggtttatttgggttataattagaattgtattgtggtctctgtatagtcttgggctttatatgttgggctaaatattgttaatcccacaaaaaacaaaaaatccgacctnnnnnnnnnnnnnnnnnnnnnnnnnnnnnnnnnnnnnnnnnnnnnnnnnnnnnnnnnnnnnnnnnnnnnnnaggtcggatgctgcaatacattcgctttgtttactttattaatcaaatgtttacaactaagaataagctacatgtctacaacaatgcaaaagaattggcattatagacattctcattggtttggttctcactgttcacatttcatttagcttcaacatctacatggccagtttctaacta

SEQ ID NO: 52634 - DNA, 625 bp, Arabidopsis thaliana landsberg
tacgacctagtcggcctcatggctcggcctgcctggcggcccgactttggccttttggcatgtgcaatggaggtaggcgtgcctaggccataacctgggcccaggctgccattttgccacactggccggctgacgcgcgtggctctagtttgcactatcggatccaacggatagtcatgattgagctgatacctattcatgtctataaaagcgaaaaaattggccaaccctaactctatccctccggttttctcggtcgagcgtcgtagggcaccgctcgctgtccagctcagtccggcggcgctcatccattccactcttctctctgtgctgtgcattggctggcccgagctcgacggaacagggccctgcgggtcgtgctgctggcgtgcgcatccccttgagcgggtgcctgccgccggcatggcaccgtcggtggtcccgatggtgaggtaaatcacggctctgtggcgtctcctctgaaccttcctctccccagatctaaccctattactcgattcactcgtttctgtaatgaatgtttgtaagaaatgacacctgatgtaataggtggaatcgagttgttgaggtgaacacatagatctgggcctatgctatgatttgt

SEQ ID NO: 52635 - DNA, 723 bp, Arabidopsis thaliana landsberg
tctctaccttttttttgtcaactttatcgaagaaacatgtcgttgaaccaggggaggaatacatgtatgcccaattatgtttttctatccatttcagttacaatttgtgttttcaaaaaagtaataaaattcatctgtaaataacttatttggtttaactatgaagaaagtatacagaagaaaaagtataaaggctttcgaaacaaagaaaacggaagtttaacttaacttgcacaagacgcaacaacagcatcgacgacaccaacatcgtgaaacaaggacattttactaatcgcgagagcttccccaaacaacgatgccctcgttgatttctctatctgaacctcaacaaaatccccaattccaggattcctcttcagatcatcaccatcaagaagacacgctttatcaaacagaggcttcgtgacaaacgaaactctgtgtcctttatcagtttttccaatgagttctgtctcaggcgctctcttgtttggtccttcgacgagaactaactgagttgatcctacctgagagtcataacacggacctgttgtttcgcggaatgcgtcgatgagttctgttaaacgtctctgtttcacctcctctggaacgtcgtctgtgtagttgcgatgagcgtgtgtcttttctctcatgctgtatgcaaacatatacgccatatcgtatccaactgctctcacaagcttagggtttcttgatgctctt

SEQ ID NO: 52636 - DNA, 978 bp, Arabidopsis thaliana landsberg
ccaaccatgaaatctctcgttccggtgcaatgtatcccatagtcgccttcatcggaatgatccgttgctgctgctcaacaccgttttcatctacaacgattttagtcgccaatccaaaatctgtcagcttcggaacaaaatctgcatcaagtaatatgtttccggccttgacatctctgttaatcactttcagctcctcgtgtagataaaccaggcccttggctacacccacagcaattttcatcctcgtgtaccaatccaaaaccctaattggtagtgttagacccttaggtcgcggaccctccaccatcgttttgtgtgctacaaaaaacagaatcaattaggtttagaagctaaaacagagtcatcaattagggtttgattgagttttctttaccaaagatgtgacgctcaagatctccgttggccatgaattcgtaaattatagcacggttcctttggccgtaacagttgccaagaagtctaatcacatttggatgattagttgcacgtaacgttgtaacctctgccaagaactcaacatgaccagttggattctgtggattttgaacctttaccgctccatcctaatgaaatcaaaagtttcagactttagaaactgggtttcgattattaagcataaaggacatgacctttgggtctatataccacattaagtcttgagaaatagcagcgatggacttcgccgaagttgcctttgccgagataaaattcgtcccggaagtttatggttccgtttacgagctcacgccatagaaatgattctccacaattatcaggtagaggtggagatactggtaacagagcagcagtcggatctgcaaatgaattaccaaaggttaaagattgaacaagatactactttcacttgcaagaatgtgacgagaccaaaacgaagaaagtagaaagaaactcttaaaatacagagttgcgtaggatacaagaaacccagaaaac

SEQ ID NO: 52637 - DNA, 318 bp, Arabidopsis thaliana landsberg
  unsure (1)..(318): unsure at all n locations
tatatatatattgatatattatcgagccctggccttccgttgagttatatcaaccccacgccagacagtacaatccgctcgatccggaccaggtccatacgtctatagaaggtgatccgtagtgctatagctccgttctcacgcggcatctctgagtcattatcgtactgttgccaccttcggtagctgacatggcgctcccaggcctcactnnnnnnnnnnnnnnnnnnnnnnnnnnnnnnnnnnaccgcacgcactttatgtaatgacgtcggcttctatgccttctgttgtggccacgaatcagagagccagcat

SEQ ID NO: 52638 - DNA, 880 bp, Arabidopsis thaliana landsberg
gaattctgaaagagattccaggtgttgtcattagcttcaaccaaaaacttgatcttattaatggtaatgccacacgtagcttggtggttaggttacatattcgcactctttttccaagtctaacacaaatcaagcctcgaagagcattcacgaagtagcctcccatcccggcatcttcagaatttcatcgaacatagacgtatctccgcgatcattaatggacgttgatgaaagaaaatcatacctgttctggtcttcctcgtccacaagagacatgagcaaacgtggtcgtttcgacgatgctggtgattcaaggaaacgataggtaaaatagctggaggagattacggaataccagtgttgtgagacgcgcattgccctcgtcacctgtttcactggtaatttcactagtatctccaacaatagatcctcagtgatatctaactatctccaactagttcactactccctagactaagtcacttgaaaatcctgataggtcgacgtagacctatcataactctgtgaaaccatattcctatcataactctgtgaaaccaaattctttcattgggtaaatgttagcaagagccaaaccaaattagtccatcgtagctttttttctttcttgtatctacatttagtctactttacacatcccgttttcgagaccgagctagtacgaaaccctcacgtaaaatagtatataactagctcattcaaattggaagagtaaatgtgtagaggttaaaattcaagaagctctgatgacgccattatggaggagcacgaaaatctcaatttgagattgctatttttacttttgttgtttttagttagtacttggtagagtaaataagtaaaggatagattagtcttt

SEQ ID NO: 52639 - DNA, 1015 bp, Arabidopsis thaliana landsberg
cttcctatatccagtcatcactatcaccatgcacattgcccttatcatcatcattaatagtaacatccttattaatcttatccgccagatcatccaaatcatcttccacctcttgctgatcatcatcatcgcactcatcctcatcatcacattcatcatcatcctcttcatcatcactttggtaatgagagggttcttgaggaagatcaaaaacatcatcgtctaaaggaacaaggtggagagtgagacgaccattggatctattcgcacggaaatactcatgatgacgaaccttctcttctctgagtataagcctgccgtcgcttgtcaccacacgcttgagaacccacggcatgtgcgggagaagattccccgtctgagcaagcaacggtatcggaggaggaaactcacgcgccgccgcagctctagcttctctctcttctctcctccttccaccgtaacgaaaccggctttttacaggctccgacgcaacggagacaacatcgttcccttcgtcagcggagaggatgtcgaagcagctctctgtcccgatgtagtctcccacggcggaggaagaagaagatgacgtgcgtgaaagcatggatgacgtcacaaaaggtgaggtttgatctgagttgatggaaagagactgaccagaagaagaagccatggatgatgatgagtcagaggaagaagaggctctctccatatctggattttccaagaaaataaaaataacaaaacccaacaaaaaaatatcaattttttttttaatgggttttgtttcttttattttataatttgaatgtgatgttgaagacttgcatgaagagatcttaaatagagagacagctaagagaaagaggtgatgtcatggaaaggatggtctctgagatattattgagaatctgtaacatttaatgtttttttcctgtaaataagaaaatatagaaaatattagacaaatatagaccaaaataatattttttgctaacaatatgttataattaccaaa

SEQ ID NO: 52640 - DNA, 508 bp, Arabidopsis thaliana landsberg
  unsure (1)..(508): unsure at all n locations
atcggggcggcgctggcgcccaggctggnaaaacggtaccannnnnnnnnnnnnnnnnnnnnnnnnnnnnnnnnnnnnnnnnnnnnnnnnnnnnnnnnnnnnnnnnnnnnnnnnnnnnnnnnacgggcggttgtctggacggtgtttatgtaaaacttggcgcgggcaccgatgaggacgccggtttatactgcgacgctttgcgctccccggctttgtcgtcgggcgggcggcgacatgttgaagagagcagatggaaaacagtacacaactgctgtggcgccaggaacaggcgctggccaaccgccgggtgctggtggtggacgccgacgatccggcgctgcaaggcttgccggcggataaatgccatagccatgccgatgacatcaacgtgggcgcgcatcaatgggcgccgctgccactgctgccggagggcgtggatctggtggtcattccgctgccgaaagcgccgacggcttgagctgctgcttcgcactctggcgggagc

SEQ ID NO: 52641 - DNA, 410 bp, Arabidopsis thaliana landsberg
  unsure (1)..(410): unsure at all n locations
cagacatgtctccctgatctaaacgttgcaattttttcgacgatcacgcctataannnnnnnnnnnnnnnnnnnnnnnnnnnnnnnnnnnnnnnnnnnnnnnnnnnnnnnnnnnnnnnnnnnnnnnnnnnnnnnnnnnnnnnnnnnnnnnnnnnnnnnnnnnnnnnnnnnnnnnnnnnnnnnnnnnnnnnnnnnnnnnnnnnnnnnnnngggaattaaatttccgtactaccgtcatctcccagtctaagtaagctgcagcatcatatcaacccagtgaacggtggccgagacaacttaatcatagcaaatcgctcatggtctggtgcacgaatacgacgataacgtctcccgattactcccaaaccttagtcgattacgtgcgaagcgtagtcgcaacggtgcatagac

SEQ ID NO: 52642 - DNA, 715 bp, Arabidopsis thaliana landsberg
aaaacccatcaaacggatgattattaatgtgcacaagacagcaggctatgtgattcaaatctgattctgagatacatcttccaagcgttcggccagtatagtctcacatacatttccccagccatagattccagcagcatgcacatgtttgagttgtaattcaatcccctgcatttgttcttctgtgatgagcaaattatgctgaaataatcttgaagacgcaggttggaaagttttgtttcttaccttccagggtacaaggttcacaagctctgcatatttccctcctgttagtgctgctatatcaacatgatggggactgtaatcaactcgaacattaacaggccatatgtcgaatttctgcaaaatgaatttaattagtcagaccttcctcaaacttcgaattacaaacaccgaggttcataatttcagctgagtgacatcatatatatatcagaacattttcttatgccaatcaacatattagtatcacattaatctgaggatagagactcgccctatcattatacataattatacacgtcctcggtgggtaacacgtgaatgcttctcatctgccatcatactagcttatagatagaaagaagctttattcacctgaaaatatggaagaagcgcttcttctatgatattatgtccttgtacggaaaccgacatcgttgaaccacctgagtctcccatagaaacaacaggc

SEQ ID NO: 52643 - DNA, 567 bp, Arabidopsis thaliana landsberg
  unsure (1)..(567): unsure at all n locations
cccccccccccccccccccccccccccgcacccccccccctccccccccccccccccccccccccccccccctcatttcccccgcgcccccccccccccccccgcctttcccnacacaccccccccccccccccccccccccnccccccccngccccccccccctccttccncnnccccccggggtgtccccccgcccccccaactcccccccntcccccccccctccccccccccccctctccccctccccccccccccccccccccccccccccccccccccccccccccccccccccccccccccccccccccccccccctccccccccccccccccccccctcctccccccccccccccccctccctcctttccncccccccgggttgtttgtccccccccnncnctcccccccgcccgccccccccccccacacaacacctcctcttctacccccccctcctccctcccccctcccctcccttccctcttctcctttccccccccccctccccccctccccccccccccctctccccctcccccccccctcccccccccccc

SEQ ID NO: 52644 - DNA, 168 bp, Arabidopsis thaliana landsberg
  unsure (1)..(168): unsure at all n locations
annnnnnnnnnnnnnnnnnnnnnnnnnnnnnnnnnnnnnnnnnnnnnnnnnnnnnnnnnnncaagcatttgaccacgatatagcaagggtaaatccatatcctaattaccttaggttcaagacgatctctactccacgtatgaatgtgtgctccgatacaagtcaggt

SEQ ID NO: 52645 - DNA, 808 bp, Arabidopsis thaliana landsberg
gggaagcaacccatcctctgaaaatgcagttgccttcttcgtccttggatttttatccagcaatatgagtacggcatgagccatctagcgtttcaagaaaagctctctcgcatgaaatcgctagtcttgtttcctcgcggttcagtgaggctaagtaagttgcctacagatgtaaaacaccagtccgatcatttactacaaatcatagatgccaatccaaagatcccataaatagaaacatcatcaaataatgtaaattccaagagagcttgacataccattttatcatcatcagttctacaggcaattccaatagctccttgagcaacagctggaagcatttcatcgagagataagatagatgcgacattctctgtcatactcaatctcttaagaccagctagtgctaatagagttgcttggacctttcctccttgtagttttgatagtcttgtctgcacattacccctgaagttttcctcaacctgcaaaaggcaataaagacatgtatcaataaatagaaagacaaaactgatccataagaaatggcagtttctatgttgtgatctatgttgtgaaaacttacatgtaatgcaggatatttgtggagaatctgcgattttctcctgagagaagctgttcccacaacgcttccagctggaagctcagctaacgtggctgcagttagacaaataaacgcatctcgaacatcctcacgcggaaggttacaaggtaaaatcgttttttctggtaagtaagttgggacatctttcattgagtgcacagctatgtcaatatgaccatttat

SEQ ID NO: 52646 - DNA, 595 bp, Arabidopsis thaliana landsberg
  unsure (1)..(595): unsure at all n locations
aggatggccaccgccgcggtaccggctggattggtgatcggcaggttgactttgaattcttggccttcggtactggtgctcgtgcccgagcgattgccggacacgagtcccgtcggaccattattggacaagttgtcgatgatattgcccgcgccactgccggcattgggagcgaacgcgatggtgttgttattgttgtgcttgaggcccatggcgccccacttgacgcccagcgaacgcgcgaagtcgttcgtggccgccacgatgcgggcctggatcagcacctgcttgaccggacggtcgagcttggcgacgaggttcttgatctcggtgaccttctcggccgtgtcgttgaccagcaaagtgttggtgcgcgcgtcaaacgacacgctgccacgcggcgacaggaaaccgcgacgaccgccgttgacgccggtaccgccgncaccgncactggacttggcgccactggtcagaagcttggcgatatcgccggcgttgccgtagctgatgggaatgtaggggtcaccagcggggcgtcgttgccgccttgatgcgcgcctcggcatgcgctgtcgtactggccagctggtgt

SEQ ID NO: 52647 - DNA, 639 bp, Arabidopsis thaliana landsberg
  unsure (1)..(639): unsure at all n locations
gagtgcgggcactacttcatcaccgcatttcgcacatcggcaactaagcaattgactcgagctcaccggaaaacccacgtaaccccaattccctctctcttcggttcttagctccgccgcgaagaactcccccgtggccagcggtccttgggtgattacctatccaattgtttcatgttcttgcttgctgttagcctcctattgcccccagtatcaactaatcgaattgcggccgaagcctttcaccagaacgcgtgcttgctctgtagaacgtcgccttaaccccctcaccgttgacccgctcttcgggccttgttctgcccaaaccaaagtgtgtccatggaccctggtgaacccgtgaacctttacccagcctcaatttgcccatcctcgtcgctgtttgatcggaacacgttcatccccttgcccatccgctcggtcaccgtgaactaatcaattcaatgccccttggtgaaattgatggtggggaagtgttcggtaaaggtttaattgcgccctgtcacacgagagctcagccatggcggcatccggccggaataagctcgccggagtgcagcggggtctagtcttcgtcgggggattggtcggtgtaaagagtagacccggnggaccttttta

SEQ ID NO: 52648 - DNA, 1132 bp, Arabidopsis thaliana landsberg
aataatagaattagtaagatcatgaaattgtatgtaagagagattgttagtgtagaggtgtaaatgagcgatggatgacgattgagtttaatcaggcggtagggaatatagcgaacgctgagataactgccactcgatcatttccagcataatcatacatatttatacattgatttacctttcgtctttgtgatattatactagttacaaagaattgattgtgattgtcttgtgaatgcatatatatacatgtttacatacatttgtatatatagattccaattattaatatatctaccatgtttttatttttggtcaacaacctctacaatatagtaaagtattaactattacataataaactttccatgacaaatatataaattttaaagttttaaagggattcataattttataatctttctattttatatggtcaatatttcttagattattatgttaatatttttaaaaaatattatttcatttcctttacaaatattctgtatattgtagactagtacacaaaaaataatattgcatgtaatgctatgtacaataaattcagatgaaaaagttaggaatataaaagcacgtgcttgaaaccacataagcaggagattacggagacggggtccattatatggtttccgtgcgatctctgatagtttcaattagatgaactataagtgctggctggcgttctatgttgccaagacgtctatcattcctttctttccatacatgatctatggttgtttggaaggttacccaaacatgtatataggttcactgaccaaagcgctgggctgagaccagtgccggctttggacatgtgcagaaggtgctgtagcaatacaatagaactcgattatgaaatttgcggggattttctctttaatatctagtggtcttggcccaagcccattaggctcatagatactaaacaatattgagttttcactttattgggctccataacaattaggcaaggtttgggggtgagaaaacaaattagttcacaaagaactttggaatttgtagttttcgagttcatggaactatattataaagaggcctttccgggatcaatctcagagatcaagatgatttttgtctctatagagttacg

SEQ ID NO: 52649 - DNA, 862 bp, Arabidopsis thaliana landsberg
atatttcatgattattgggttgtaacacaaatgataaagaaaaattgatatcttttacaggaaaaattaaagtttatgtgtattataaacggaaaaatctttgaaacaatataacgaattgacatctttaaaatggatgtcatggacctcatggttactagttcaattatacttggaaaaaattataattaatgttttaaatgcaatatcaacaattgatttagacatacgaaattatagaccgaaaatctaaaaatccaaaaatttatcattcttagaaaaaaatatattatgggtttctttataattttatccgcacatgcaccatgcacgttatagattcattagttttagttaggtatatgattggtattttataaagacaatataaactttagagaataacaaattaagttgatttcatgtataatttatgtgtaaatagtctatattttgttttggtttttgttccaatccatcgctacaaaaattgcgaaagtgtaactaatctaattctccggatcaaggcatatcgataaatgatccacaatatgaaaaaaaaaaaatctagactaactgaatatcggatattcttaaaacaatgttaacaatttggattattatagttaatttattcatcgttgagacaaagaattctgattggtggcctatattactaattaaataataataatatcacgtatgcttactatgtcactcgtcataaatatatttacgtgtttttcatatgcttcagcttcacgaacgttctcttattgtttcgaaatttttataatatgatatatttggcccaccatatcttcattgcatgatactactatgtcttcaattatgaatcgtt

SEQ ID NO: 52650 - DNA, 715 bp, Arabidopsis thaliana landsberg
cgactcattagctcctcgtgggaacaacaattcgttaatcccatccctcagattttactgttccagagggcttcaaaagggttttaacgaaaccaagacgaggaagaagaaacccaaaaaaccaagaggaggaacagaaatgctatggaacgaaatagtcttctcatcaacgtgacaataaacacctatttggacatgaaaagtctcattttgtccattttcagaccaaatcataattttttctattttattttgccgttaaattttaatatttaaacattgcatttagattttcatatttatttattgcctcaactataaatttatgatattaaggttgaccaatacaaatatataaagtttttaagtttgtatttgcatctgaaatcatcaaaagtcaaatcctttgtataatggatttctctacctgtttgttagtctctttgaaattgtcaaataatttcttgatttaggttttgttagaattggctgcaatagtctctcccacaaactatacatgcattgaatcatttgaatgaagctttactcttctctacttctgatgaatcccactaaaatatgtactgatgatccattgcttgatataacttgggtttccacttttgaggttcgtaatatccccagtttcaaactcaaatcttcacattatacaacacacttgacttaacagatagagaaatattgttttgaaaca

SEQ ID NO: 52651 - DNA, 413 bp, Arabidopsis thaliana landsberg
tatgaaagctggagactcagagtatctagagagtctgattgaggatcaccgagatttgcctagtaaattgttgcgatgatatgctctaatgtcgactgaatgctctgtcaagtaacgcatgcgcatctcacaaagggagcagtatcacagtcacgacgttgggaacgctttctctatgttgctgactcgcactatccggccaagatgactacaggatgtaagagtcatccgttgttgagttaggcatactacactcgactctggccagaacatctggccaacaggaacttccaggcattgtgagagcccctggatcagaatcctcgctatccagacggcgtgtgcttctcctatagagtcaggctgttgcattcgaagtcttgctcgcagagagtttacgtgagtgattagac

SEQ ID NO: 52652 - DNA, 642 bp, Arabidopsis thaliana landsberg
  unsure (1)..(642): unsure at all n locations
gctcattgcatgagcaagccgagctccgctcggcnngtttccacccctagcgacgaggctggaggctgggagcaaaggcagatgttgctgggacgaggtcagggggcggatggataagttgaaaatgtataaggtgtggtggctgcttttatgggcctttcaatccaacctagccatgtagtctcttgttccttcttttcttttgaggtaatatgtgtatacgtgcatatttgcagaacgcctaggaaatgccttgaaaacgcctaggctcgcctaagctctaggcagaaggtcactgcctagagattgcctcgcctaatgcaaccttgtagttgacaatgccaaacgtgttgacagaacactaacattacagtttaccatactaaatcaatgcaaattcactgtcctagtacagcactacagcatatacataagataacttatcgaacgactgtttatgaagccttatctacatgaacatgagctttacgtggaactgtccatgtccaaattattaaacattttactattatagacaagttacttgaggaatgagaagacaaaatgatcaagtatgctgggtgaaaaataaatcatctcaaacacttgtagctactctggagtactataatgaagtgagag

SEQ ID NO: 52653 - DNA, 593 bp, Arabidopsis thaliana landsberg
ctggacgttcatagaagccttatcagtcttaacattctctccaggatttagggttctgatcctatcaatgagaaccagagtctgggttagtacaaaagaagaccattgtaacaaatatgtcatcgttattcctcaccattctccatttgagaagaaagtattctcgtctggagttatgaaggtagctgtttccccaataactgcagatacaaagattatcacttatagcatagccatcaatcactcaatcagcaaaacaagatgaaaatgctgcttcaataggttacctatgacccatgtgactagaaaatcaaatcggttagcaccctctctccaataattctcaaatccatatgtatagatcttcagagccatctccaacacatatatccaacctgtaaaaacattcaaagatagaaattaaaagaagaaaaagttaagactctgaaaaggtggtcaataaaattcggctgttacaatctaatatgatccatagaagtactctactcagcgtaataacacaggaaatagcttaacttctatttcattcttcatctttcatcatatttctcagtaaccatagactatacact

SEQ ID NO: 52654 - DNA, 436 bp, Arabidopsis thaliana landsberg
cgttcataactcttattccaagtttgatgccatatttagggaccattttctgcgtgctgtgtatctactgctctattggcgtacaggtaaatcagactactgagttttttgtctgaaaaatgcaagcttatgatgaagccttggtcaatggtcattctcgtcgtttttgcttattctaagcctcttgaaattcttcatctttccgttcatctgaatgttttaggaaccgctgaactgctactctcatgtgttttccctgtcttctctcacgggttctatttcccaaatcagatataaaaatttcttcatctcatttcttcgtaggtctttggagggcttgtgaatgctgggaacaaaaagctctttgaaaccgaattggctgaggatgagtatcctttttaactttctgaaaaacttttaatgcactcaacacagt

SEQ ID NO: 52655 - DNA, 692 bp, Arabidopsis thaliana landsberg
agtttgtataattaggacgaaaacgaaaatagtgactctgtttttttttgtgagaagcaggtattgtggtaagaaccattgtaccgaagaaacctgtgaacgagaacattagtgaaagcgaaacaatgaagaagatggaggaaacggtagagcctatggttgccttaagtagaccaccaccattttcaccatttgtcggtccagtgctcatgtattccctgcttcaatcatggacgtctagccgcgacgaagacggctagttgtgtcagccaaagtttcttaacaagaagctcttaaatcttgtctgatagacaataactgagtttttagtagaaccttatgagatgtttattagagataataaaggtttgatgttgtttatagtaagtcgatggtttgtttgttacagtgaccaattctctccaataccttaaacactgtaagaattgagtcatgattttacaatttgaatgattatgtgctctcaaactctcatcaaatgatgggaattcaaaacgaaagcgtttgagagtattgaagtttagataatgagcttactgtttcatcaaaagcaaatgggctttggccgatttcaggtccatcaaacattaacctaaagtttttttcctttcttataaacaaaatagcaagcaataatgaacaacaaattcatataaagtggacatagaata

SEQ ID NO: 52656 - DNA, 583 bp, Arabidopsis thaliana landsberg
gaaaataatgaattccgagtgttgaagataaggtctccactggttcacagccaatagaactgcaaggtattccttttcgtaagttgagaggccttgagtcttggtgctgagtgccttactgacgaacgccagaggatgtccttcctgtgtaagaactgcacctatgcccttgccagaagcatcagtctcgatagcaaactgtttggaaaaatctgggagagcgagaaccggtgccgtggataaagcagcttttagtgcctgaaaggattgctcgtgttctcccgtccagacaaacggcgtgttcttcttgagaaggctggtaagtgttttggcgatgactccagaatgccgtacaaacttacggtagtaaccagcaagtcccaggaagccgcgtaattgtttgcaatcagtgggttggggccaagtggtgacagcagcaaccttagaggggtcggtggccacacccctgttggatattacgtggccaaataatggatttgttgcatgcgaatgaacacttggagagcttacttgcactggtctgtggacacaactacaggacttgttcaggtggtggagatga

SEQ ID NO: 52657 - DNA, 1542 bp, Arabidopsis thaliana landsberg
gtaatacttcttagtggttacaccttctatgtttatcgatgttcctcatgaccacaagtgtcgttaataatgtaatttttatttgggctaacttttggaaaaacttgggcatgtgaactcaatctactaataatcatgttatatttttaggggttggcaaaccacaatttgggattttgcgagaactggacgaaacaaatttcttaaaaagaaaaaattatttatagacagcaacgagacatgacggaaatggaaatgctcgccaatatttcttgcttgttttatttttcaatttatacattttagtttgtttgttccattcaattatttgggtttatggtttttattttattcacatataatggatttgataaaaaaatttgaaaaatagtttggacaaaagaaaaaaaacagaatgataaaataaaagctaaaaagagaaatgaaagctaaaaacaagaaagagcgtaaatgaaaagcgacctataaaggagaagacatataaagacatgaaattgggatcagacacaaacagtcgttatagacattgactctctcttgtccttttctttctcccattttgtcttcacaaaataattttatttttcctcttttaaaatatagataaagatattttaatctgaagttgtatgtttgtccgaaaaaaaaaatctgaaatattaaggctttttagtttcaacttgtacccaacacaattgggctgggcctggttacattaacatggcaaactaaaatttcccaatcacatctgtatcaatgtgagaagatttacaactctcttcttttcttctcttctctactttataaaaaaccataaactatgaaaactgaaaaagattgttctaagattttgtcactacagagagtcaagagagacctatagttttgtagaacacctctgcttcaacttcttcagccaatagatatttaactattataagtctcagaaaccagaaaggtatatacaaaccacctgcaaaagatatttcctccatttaagtaaccatcttttaataggaaccaaaacgaatgatatatatatcgattaagtgaagtcacaaaaacctttttgatctcttcaagttatagtcctattgtatcattggtgaggatgtcggcgtttggctctgcggtacccggtggttggttcttttttatggttgtgtctcttcttccccttaggactgttagatgcaattctgtaagtactttctgatgcaacagattgaaacttataagtaaagtttagactattgttgaatgatgttcaaagcttacttggagactgcagaaagcaatttgatgatgaatataagagggaatccaattaaagctgtggcctgttgaaaatttaatagaagaagtgagtgagttcggatttgtagactctatagatggatagaatgaccagatgttgttgaaatcacataccccaacccaagctaagtccatggtagcaccggtttggtgatctcattgttcttcagcatttcttgagccttggtttcaacagagtgaagc

SEQ ID NO: 52658 - DNA, 1050 bp, Arabidopsis thaliana landsberg
tcaaaatgtatcagctcaaaaagtcaaaacagtcttcctatcgtcatattccgaatatattttttcaacagagtataaaatcaaacaaacacgaaactccagtaatcagttccaagcaacgatcatcaaaaagcagtcaatgaaaagaaccagaagctaccaaaagacatgaatttagaatcttacgtagaagaacttgggaaatcggagggtagaggaagaggaaatgaaatacttcgttttctcgaaactgtttggcgatagagattggagattttcccgagaaaaatgggtttggaagtaggcaacaaggaagcaaggcgattccaaaggtaactcgaataaaatggaactagctctccgaagtttgacagcgccgtcgacggggttgactcgttaaccggaggttgcgaatccattgtagtcggctatcaattttctcagttcaccactcgccgggtttatgaccggagacggagtcgttagtgcccttaacgtcggtcaagagattctgccattctggagtcttaacaaattaatgaattgaattccttattgggcttttaatggcccaggtagtaacttcaaatcttgggttttgcagactgatctgttaacatcgacacattatttagatatttgattattttaggctcttaattgtttttttcttttacataaatgcactttttattagatttgacataaacctatgcttgaaattacatacatccacaaaaataagactttttccggttaataaattataaaaattggttgagggaagattatgggaatcaaacatagaagaagctaaaatgttaaacaacttatttgcaatgttgttgttgttgattccattaaaagaatgccctgctaccgtaaaacacacgagacccttcttttttcttctccataccattattattagcattattattctgattctgaatctgtgttgcagtgttgttgttattgttactgtgatcttcctcgtgtggtttattatgaagatccatgggaagtttcatctttgccaaagactcagtg

SEQ ID NO: 52659 - DNA, 643 bp, Arabidopsis thaliana landsberg
aggtaccctactctaattcacatcttgaagatgtaagccacataaactacacacgtgagaatatactataatgtaaggttactgaaattccaataaaccatgtgatactaaatgaatttctatattatatcttaaaacaagtattatcaacggctaatcttatgttcttcaaagatttatggactaaaagatcgaaactttctcataaaaacagagcaccaagaggcaaattacaaccaaagtcaagccaaatcaaattggcctttctcatctaaacaaataatttagttattgtttaaaatgaattcaaaatcctaaaaataatatctaagtatctaactttcaatctcaagtgctgttgctagatacaaaaaagccacttatcacacacccaaaacaattcgaccccttttgctatatgctttataaaaaaaaaaaatctccttttttgttcttctttatttgccttttataagcttctacagtgatatttaaattaacctttaataaagtcaagagacacactgcaatcataaactcaccaaaagagtagaaaactaaatgtctagagccttctctccctcacacacacacgtttatgtatgtttctccacatggtaaaactaaaacgatataagaaact

SEQ ID NO: 52660 - DNA, 532 bp, Arabidopsis thaliana landsberg
  unsure (1)..(532): unsure at all n locations
gcctgtacgtcgatactgatatgctggatagcctgtgcggcatccaacagcaccggtatatttcgtgcnnnnnnnnnnnnnnnnntgtcctggaccgggtgaatggtgcccattgtattggaaacataggtaaccgctaccatcttcaccgnnnnnnnnnnnnnnnnnnnnnnnnnnnnnnnnnnnnnnnnnnnnnnnnngttgatagggatcaccttcagcgtggcgccggtttcctcgcaggcgatctgccacggcactatattgctgtggtgcnnnnnnnnnnnnnnnnnnnnnnnnnnnnnnnnnnnnnnnnnnnnnnnnnnnnnnnnnnnnnnnnnnnnnnnnnnnnnnnnnnnnntgccttttgtgaagatgatctcgtgtgaatgggctgcattgatatagccggccactatgtgacgggctttctcgtatgcatcggtagctacctggctcaggtgatgcacgcccctgtgcacattgctgttatatgtttcgtaatagcgggctttcgcatctattaccacct

SEQ ID NO: 52661 - DNA, 557 bp, Arabidopsis thaliana landsberg
tatatgcagaaaagctcattcctttttgaataccaaataccattcttgcttctctatgctttgcctatcatcaattcttctttgtctgcaacaaagtttgggtctctatatgtgggacattgggataattatttgtagcagtcaatttgtttgttacaatgcctgagagagtcctttaataccaatatgaatcgtatattacaaggatcactacaacttagttttgtagagtagataaaggttggtacagtttcatttcaaaggaaaccactaatatattcttcaaacttcttaacagaaacagaactttttttgttatttaccacaaaactctgtcaaacagagcttcttgttatttacatacaaaaaaacaaaagacctttttaagtaaagcaaaaacacaccaaaacatttctccattatacattacttttcaaagttgtccatgttcccgtctcatatagtcaggatcagtagttccatgctcatgtgtcctcacaggcgcatcaccaatcactatgttctttgtcgtctgtgcaatctcagctatagtctcg

SEQ ID NO: 52662 - DNA, 926 bp, Arabidopsis thaliana landsberg
tgggtgtgtgtttgtgtcttttgggtctttcttgttcccataggagagggttttttggacgtgtttgtattgttttggacagctctctactaaatacttcaagacagaggaaacaatttttcttttcttttttttcttctcccttttatgaatgagaacaaaatggttccaacctttaatttctgacacaaacaaagctttaattctttactaagacatgttctaatatttggagaattattagaaagtttagttattttcttttaaacgtaattcaagccgtgtatttataaactactagagtttggagcaagaaaaattaaaactaatgaagtatgttggaactaatagatatattttactttccagttccacttcttattctaaaatgttccccaatgtcaaacaaatagtggatacatgatgataatagactgaaggaaatggaccttaatatgagatatgataaataaatatataaaaataatgcaatctccttcctaattgagatttcagttgggtcatgcaatctcgcttttggccacaacggcaatggaccccacttgcaacctcctaattccttacattttttctcaaatggtcaagggtatttatgtcatttttgactccagtttggtaacatttttctttttgacatcacagtttggtaacagttaagcaattaggaattaggaatggtaggttaagtatacaacctcataaaatggttttgctctcaatggaatcggaaggggatatgcggaaacaagaaagaggtttttttgttttgttttagaaagcaggtatatgatagaactattatacatacaacttaaattttactacaccgaagaaagtgagaaaaagaaaccacaaatgatgagggaaactttacacactaccactttctatattgttcgcaagga

SEQ ID NO: 52663 - DNA, 487 bp, Arabidopsis thaliana landsberg
taagtattatacactaatattctgcaactgtccagattatttatcatttaccaaagaaatatattaaaaattatatttatctttaaattcaatatttataatggatcaaacatcaaacaaatttgtataccgaaatttttttaaaacacaaaatataagtttctccttaattttcttttatgaaattttcttctaaaaatagaataacatataaaataatacataagagagaaatcatgctttattttacagagaaaaatagagatttacattggagataatcttatatgaaaactgtaaaaaactataaaatcagggcgaaaaatgtgtatggtaaaaaaacttaacatgtggttaaaggttttaaaaagattacagaatagttctctattgggccttcgaaaaaagcccaatacccaacaacaaaaacgcgcgtgtatcacccttcaatacactagtaagagcacacagtgatcgtcccggtaaa

SEQ ID NO: 52664 - DNA, 1003 bp, Arabidopsis thaliana landsberg
gttttacttcattcatgtggcattgccaaatcgaacattttctctccgcaggcttgttgttatttttaaagattcattaaaatgtcaccaaacaaaaagaaaaaactttctagaaaaacaaataaaataacgtaaaaataataagaaaataaccaaagagttgattcatcatgtctgaaaaaaaaaaacagcaatcaatctttgtggttcaagcaagccagtcgtatccatccatgccttcaatttctccaatctccatactgtaaaaagaatatcgcacatcaaaaatgtttcattagaacacacaaaagagatatataatttacctaacaagtaacaaccaaatttgaataatgcaagtgcaatgataacataacaaaaatataatttatatcgggtgacgtcaagacggttttgggacagttcagaaaaatggggtaaggatagtgttttatagatgtcggcgatattatttatcattggaccatatactaaaagaaaaaaatggacagcttcagatcatgcaataaacctatgtggatccttctcataccacaagctttcacatatttttaatccaataactccgatttaattatcaaaaccaaacaaaagaacgattctgtttttttctgtgttctgtctcaaactcaatcactgaatttatgcaagagccgccgcaattttcgccaccggtgattccggaggaaaaacaacaccgatcaaaataactttaattctaagtaatgaaaaataaatacaaaataattaccaggataatggaggattatgaggagatgatgagtaatgatcagtgagattataaggatgaaataattcttcctctgtttggtttaaccacgaaggaaattccatgacgtcactaaactttggaaacacgtcatcttcgactacgatgacttcttccgtttccggtttaatctccggctccaccgtcttcaacatgagttctgaccaccaagctgacgtcaccacgttgttt

SEQ ID NO: 52665 - DNA, 997 bp, Arabidopsis thaliana landsberg
cgcctcttcaagctgagaaacacacaaaaaaagttactggaaagcatatctctagtagtggaccagatacattgccctgttctgaactaagtggcaaagtaactaatagatattaaaacaaccattgtatgcctttgttcagttaaaaatattttaattcctaggtgacaactatttgttgacagaaggaggcgtgggtaaatgagtgatcagaaatttagttgtaactttggtctcacgttcataaacgtgaataaggaaaacgtccccgtatagatatttacaattaaggaagaaaaaagcaggctattcaaattccacaaaagatgcaagatgagtcataaaaaaattacctttccaagccagtctggaacgggttgttgtccattacttcttgcacaaagaaacttgaactcatgcagagacgcagctgcatgagaaaaccttgttccctgaaagcaacaagataatgtcttggtcctctgcattttactacaagggaaattgtagcttttcactttatacataccttgcgaagtaatgaagcagactgcaaaagatgttgcatggtacatttctcacatcccaagatttggagaagaactcgcctaaatgcgataaatggctccaacaaattcatgtgcaactgagtttgcgtaataatagagttccaatccttattcagccaagacaactgtatttcataattaaacatggactcagataacaagattatctcacttagcttctaggtagtttgagcatatatgtgcactcccaagactaataaagaatactaataaaagtccctaagcagcctcgacattttgccaacttattacttattatactaataacataaattcttgaagctttcaacgattcagtagaagcaagtgaacaaaccacttgaaaacgaagttacagagaaaatacctgatccattgttggaatgatggggtctacgcatgccatttgtttgactagatagccatgc

SEQ ID NO: 52666 - DNA, 608 bp, Arabidopsis thaliana landsberg
ttaaaacatataaagaactaaaaaaagatccaactgaatctggtaggtattatcaacaaaatagcggggagatgtgtcggtagattaagaagacttttgatcttgtaagttcagcagtcatgatctcagatattaaatttaaccctagttgcttataaaagttagatgatgaaagttttgcatggaaagacggcaatatatagtataaattcgtttcgaggtgcacatttaaattgttataattggtatcaagttctttaactttaactttagtatcataaaattccatttattaacatattaatgaaggttatagtacgtactgaattaggtagatgacgtttatatgggaagaaatttgatgatatataaatttgcaaatagagtttttgattcctaagactatctccaatctatgtctccatttttctctaagatagagagttaggttttgctcaaagtcaattccattatggagttgaaacttaaaagtggaggtctctaaacttattgcacattgagataataagtctccaaatatggcgtaaaaatagagaataaaaatggaaatagagatgaattgagtaaatctacttcaactctattta

SEQ ID NO: 52667 - DNA, 179 bp, Arabidopsis thaliana landsberg
aaagatcatgaacggttgtaaacgatttgcaaaagtttaaaaatatcgcatcaagggttgtaatatattttttaagcccacaccaaataatgaaagaggtctatcgttcccatcgcgatccacccccccacccccccccccctccccggcccctgaaacccaccccccccctccctccc

SEQ ID NO: 52668 - DNA, 768 bp, Arabidopsis thaliana landsberg
  unsure (1)..(768): unsure at all n locations
atggccgcaactttcacgtccgctcggtttcacagtgaattaactccattttcgaaacaaatgcatcgtggggacccgaagtaataccgtctctagaagcgaaagagataacagcagagacttgctcatagaatttagtctcgtgctcgtaaaaattatcaacaatttcgactatattcctacatgtccctctaatcatatctgttacttgttcttgtgtaacccatttgggtaaacaaatcctaagctcctccacaatctcctccttaccacaagtcaaatccattgaaaccttctcatccagaggcttgtcagaaatactttcatcacccatattaccttcactaaggacacaatttttcacttttctaatgacccagctttctctttgacgtagattgattcatcaaggattgaacacgatcatcctaaaaccctaaatcgttattccggaaaacaccggcgccttcgaaaaagataaaaattgaacctttgcaatagaaaagttggaatcgtgatacaattgaaatcaccggcgagaatcttccttctgggcacccacggtgttcaattttggtgaggatcagaaggcattggcctcgccgattgtttaaatcccaatacagagacgaacggcgacgatcgacggcggcgtcgtgtcgaggaggcccaatggacacgtattattctggctttaagaaagaagaaaaaatacgtgattattgactagttaattatttgagctatngataataatataataaaatg

SEQ ID NO: 52669 - DNA, 291 bp, Arabidopsis thaliana landsberg
agtgcttcgagctcttctacttgtgtcactgtgcatagcttccatgaagacgacttagctgctcctttgttgttactctttgtttccactgctgccttatcaaagaacctgaaatgatttgaagtgagccaaaagttaacctaacaacacaaaattacagaccggacttgcttgtgccttacgttaatattttggtgtgttcgagcttgcggcttcctatgatactgctttcggcgtcttggtttttggaaaagaaaaaattaattttaaggatttttaatttaaaatttt

SEQ ID NO: 52670 - DNA, 714 bp, Arabidopsis thaliana landsberg
cgttgagaagcggagaaagcagaacagagcaaagtgggagcttctttctctttcttttctcaattgtgttcatgtaacaagaaacgtgatcaagcagataaaattataaccaaaacaaagaactttggtgttcttctgtgctgtgttttcaccttccgtcaagagtgcgtttgatcgagtttaaagctttttcttatgcagagcaaatatatgtgttgctcagctcgtaaaaaaaaaacattagtgtaaacgaggataatgttccgttcaatcgaaataacaacaagacctactacaaatagattatagaaagatcaacaataacaaaacctaaaaatagagagaaacattgccaaaggttccgaagttgcccggtcaaagagaaagacacatgatgttcgactattatccattgtggttgccgttgaccacacttacgttttcaagtcggtcaaaatcttgatctcttttctcttccaaacatgttcatcgactcttcttattatagcctatagtaggtgtcggtgatcccttagactggttcaggacaagatcagaagagtagtcataattattagaagaatagaggtaaacaaaataatgataataatcatcattaaacgactaacccgaagatcttcttcgtgagtttttggctcgactttgctcttattattagccatgctaccggcaccgggtgagagatggcgatca

SEQ ID NO: 52671 - DNA, 670 bp, Arabidopsis thaliana landsberg
atttatgttttttttgtttgtttcgattctcttggcattttttgtcttcgtgataaaacacactcaaaataacgtaagatttgtttggtgtggctcacgtgggagtaaccaggccccacgtgccatcttttacccggttgtaatcccaccgaaagattctcttgtcgacgtaatacctcacacgcttcaaggtcaaattcgtcattttccccactaaacacacggttatcttcaatatccgcctcatctgttcatcgaaccgggctggttatcatagataaaaccaatttatacgtcgaataaagaaattttcaaaccaacttatctcgccagtaatgaaaatactattcactagtaatatttaattgctaatacaataagctttagtaaacttttattagtttatatttgaaatggcatggaaatggccaaaccggataatccccaacgtaaatgtcaaacttaccctcaaggcccaccgtttttgaccattcttgctcttttgttcaatctcaacatcgttaaactcaagaatttgtcgtcttctccatcttctgtcttaaatctgatatcaaatttttggatcaaattctaaataaagctcatttattcgtaaagccattatcactaccaatccaaaagagcttttattaatacaccttactcgtga

SEQ ID NO: 52672 - DNA, 756 bp, Arabidopsis thaliana landsberg
  unsure (1)..(756): unsure at all n locations
cccctccccccccccacccccnccgcccccccccccccccccccccccccccccccagatttgcgcgcccccccgcccccccccccgattcccccnncccccccccccccccccccccccccccccccnccccngcccacccgnccccccctttcnccccccccccggggtgtnaaccgccccccccccaccncacccccncccnncnncccccccccccccccccccccccccccncttccntcccccccccccccccccccccccccccctccccccccccccccccctcccccccccccccccccccccccccccccccccccccccccgcccccccccccccctcccccccccccccccgncccctttttttctccccccccccgtttgttttgccccccccccccccccccgcgcccgccgccccacacacccacacaccccctcccccccccccccctcccccccccccccccctccccccctctccctccccccgcccccctccccccccccctcccgccccccctccccccccccgtncccccccccccccccctccccccctcccccccccccccctcgcgcccccccccccccccctccctctcccccgcccccccccccttcgccccccccccccccccccccccccccccccccccccgcgcccccccgtcccccccgccgccccccccccccccccccgcnctctccccttccccccccccccctgcttcccccccccccccc

SEQ ID NO: 52673 - DNA, 651 bp, Arabidopsis thaliana landsberg
gtttctattgtcgactgtttgacaaactgaacaaacaatggcttgtattggtgaacaaaatcaaagcactagaagttttacaatttataaatttatcaatcacaaaaaagaatatcaaaattgttacactgtttttttacagtttttctgtactatttttttttcttttttatacatcattatgtaccatcttaccattataactaccaggtaaaaaacttgtaaatttttatattattaataagacccaatatatatatatatatatatatatataagttagcaatccaatggtcttgcagtctttcattattgtaatgatgcttattaggttttgtactaaaattaatgctaatcaatttagaatttacataataatatttagaatcatctgtttttgtaactatcttagttttagaactaaaaataaaataacccaaaaaaaaactggtaagtactagtctctaatagctatgctttcttttctacatattatggtagtcaaattataaaaatatggggatgtttcgaatctttctaccgtgaaactggttgtggatccaaatgatattttgggattgaataaattaaaaatagacttttaagccatgaatcattatgaggcctaattttaaacgataatgggctcta

SEQ ID NO: 52674 - DNA, 502 bp, Arabidopsis thaliana landsberg
ttaaattatacatcaattcatgatactatctattattattgctagagatcgagatctatcaaccatccttccctcaaggttattttgtcacctgattttgccatgtgcttatcctattttcctttttagatctattccacgcaatcatttctctatttaattcttttgaccatcattaagtgttattaccatcttttaatttccatgtcgacatactattaccatgttaaaatgggtaaattctttcttttatcctttcattacaccgacatatattccttaaaacccattcagataaaatatttgactgatattttacttaccttatatatatcagctttaatgatacaatatctttattaattgcaagaagaggtttaatgttacagttgtacccacaagttttagtgcaacgttttcaattgacttggattaacttaacaaatattattacttcagttagtctatatatatatttattgacatatgtataagaaccaaa

SEQ ID NO: 52675 - DNA, 1730 bp, Arabidopsis thaliana landsberg
ctcacatggcgtaggacggggtttcccgcaagatctgcattactgtctctatatgcatgaaaaaatacatctcctttgttgaatgctgtcccagaagaagaagaaagaatagcgcaatgagtcaagtaagccagaagcatatcctggtccatcatatcatgaagtccactagagaatttccccagcattgcaagtgaatatgaaaatgccagaggtggtatcgaagtgatgctttgtttgtttgagagaggggctgagattatcagcgtcagagaagcagataactgccggctattgaattccgctttacttccagaagctgtccctaactgaagagcatgcaaaagtgagcaaagaaatgattagtatgcctatagttgacgaatcctgaaaaagagtgaaaaaaaaggctcgcttaccttttcactaaatctcttgaccatactgactaagaaatttgtgtggttttgtccgaaatggaacagagcagacaagatatcaggttcgtcctaggatgaaacagcaaaaaatttgaggttcacgaaaagaaaaagaaagaaatgatgaaatcagaagctaattgaactttataggtaagtgtgccaacctgtggatacatctctaaacttttcaggacaccgtcaatacatttgttgaccagcttcagatcaggcagctttgccaatttaagaatgtttctagcctcaactcttatgttttcagaagtatcaacaatagcatccaaaaactgcaaagtcaagtaatagctcttcatcacaactcatagcaaaaaaatagccaaatcgaacaaggtgacaacacatggagttcatgacaccggggttagtttagtagcaaatcaattaatgtcctattaagcattaggccctagagagcaaacaattctgaagctactccattgggcataaaccgataggaggtgatatgcataaaatctggataactcgagacaagacaccaaacttattaagtatagcaagagaagtattgcagctgcattttcattagctttttacctaaacagtactatagcaagaaaaaaagagcaaaaagaatatggtgacttacggcaggcatataagtttcctgtatcttcaggttccccaagtctgctatatgatgcaatgcctttaaagctttcaacctcacaaccatataatcatcgtatagcatatccatcaataaatacacagcttcatctgggaatttgatagaatttactgagagggagtggaaggagtcaaccgcagcttcccgtaccttcaaaatgatgcatgcaaatgctgtatgtattagtccagcaacaataaaaactcaactaaacttcttaaacacctacttaaatggtttgcacataatggaatcatgttgcacagacaaaacgagaaaggaaatttatcataagagtacctcgtagaattcatcttcaaaaccatggatgtaaactccagctgcagaactgacatcagctgatccattagaaagaagattctgcggtttcttcccttttccagctcccaatacttttttagaaagtgtttgcaatataatgctttctgatgcagttcctattatcccaaatgccttgaagacctcaaccctcacgtctacactcatatctctcactacagaacaaagctgagagcaagtgtataagaaaacataaaatatttggttatttaaagttccaaaaacgaaattggtattcg

SEQ ID NO: 52676 - DNA, 1541 bp, Arabidopsis thaliana landsberg
atttcttcccaattattccatccttctcaatctctctcttttccactgtggcccctctcttttttttcatcattcactttattcttttgtcggtgatactttttttaatacaattattctaggcaacatacactatagttccattttattgtaataaaaataaaaatgtttctatcaagaataaaacaaaacaattttgtaataaagaaagacgcgtgctttggtaataaattggtaactatgggtttttctttttaatttataaagaggatcattcaggttgcggcaattatactaaatcatggtttcttccacctttgcttatgatatatattttgtaattagacaaagaagatctaacttttttttttacttttaacatatttaaattacggatttaacgtccatcattttatcttttgatacaattgtgtatcactgtttttactgcatttcggctttttacaccattgagtgagtgagtaagtatgaaaccaaattactattatatcacgacttcatttattttggaaccaaataactctaggtaagaataagacaacttgaatcttatttttgtgtcatcatcgttagaagaagactacgaacaacttgattccaaaagtttattttatttgttgtaagaaagaaagaaagtcactgactcaatgtgaatcgaatgtaataaattgcatgtgcataattttgccttgttctctttttcttttggtgtaataattatatttttcaaaatcattccacagagaatgtaatgtactcgtaaagcgtgggggttcatttttctcatgccatcaaatatgctttggtcaatcatgtcacttccatttaacattgcaattacctatatattaaagattaatcatgatttaactcatcataacctgtctctcttttgttctttttctcaaactattcttacatatatatggcccaactgctataaagcggtaaaatacaagttattggtcaagaataagactaaagagagattgttgtggttcagttataagtatgattggtaaaagataaaaaggtaagtgattgaatacaatagttgatagattcttcaacaatgaacaagtttttcatatcatttgccaagtaaagcatataataagttcaaattcggatcaaaagatatattgacggctacttatcattattgtgtctcctaactcttggactaagttgttcacgtcaagactctatcacgggtaccttccaccaaccgcatggtgtctctccctaccaatccatcagccgaatctattcaactaaactcttcacagatcagatctttcgttcaccgaacaatttggccgagggaaatagtttcaccaattcaacgttaaatagtttaacggagcttgtatttggtatcaagacaatagtaaagagtggatattagataaagactcaaaaaatctttcaataacatgtaggcaacagaaagtcgtcacattctacagtataagggaaataaagagacaagtccgaagagaagaaagtgatgattcatc

SEQ ID NO: 52677 - DNA, 624 bp, Arabidopsis thaliana landsberg
cctggacggtgcgcacagtgcacgggcagtcggggcgtcgggcacggcaacagcaaggcggcaacgcaagtggcgatggcgcctggcgggcggcgggccggcggctggagtgagcctggtgggcggcgactgcgactgaaaaaagacctaatgggtcagatgggccgagcacaaggaagtaagaataaagcctaaaacaaatttggatctacatactcagtatttatgtatttttcaatatttcagattatatatagcatatacatgtatatataattttttgccaaaaataatagtattcaactgaatatcctttatcaaggtgagcccgcccctgtagatgagttatttgaatgccttcagctaattttaacatttaactattagctccggtacatttagacatagccttaatatgattaatcatcttgcaaaatctaaacaaacttgcagatgctagtgggtaacgaatttagaactggagagggccattaggcaggctcaggcacctacaacgggtcgctcatcccgctctatctcgtttctttcatggacatagccgcgctcgcttgcataacatacgaacagcttgttagagccagcgtcagatggagattttgaata

SEQ ID NO: 52678 - DNA, 174 bp, Arabidopsis thaliana landsberg
taatgcaataacgaaacgccaagttagaaaaaggtcaacgactttacagtctttacttgtgtgtataatatcaataaaggagttatgttattctacaaataaaaagcttcatcgtttaataattcttccacttatagaattctcgtatccaaagaggacagattatttgatgaa

SEQ ID NO: 52679 - DNA, 620 bp, Arabidopsis thaliana landsberg
tactatctttagtctttatattgtggactaaatcttgtaggatactggacaacaataacttgactgtgacattgccgctagagttagctcaattgccatccttgaccatactgtatgcgccatatattgttcccattgactgtctttatgtttgcgtttacaatattttgcaaagttgctaagctaagattccgcttaagcagtcagctggataacaacaacttcgaaggttcaactattccagaggcttacggacacttttctagattagtaaaattgtaagactttacaagaggtttctgcaataagattcagattggtttgtattactccactagtttgaacatgctcttgtgcttcatctttccaacttggcagaagtttaaggaactgtggactgcaaggatctattcctgatttaagcaggatagaaaatcttagctatctgtaagtatctatgtctggtatttgtaacattgtctgattcttttgactggtcctggacttcttggacctttttaaggaacaatacaaatgcatattttcatctcttgtacagagacctaagttggaaccacctcacaggcactataccagaatccaagctttctgacaatatg

SEQ ID NO: 52680 - DNA, 315 bp, Arabidopsis thaliana landsberg
ttcacgggtagtttaccccctgaacttggtaacgcttcaaaacattaacaggcttcaagtagatgagaataacataacaggttcagttccattttcatttggaaacttgagaagcataaaacatctgtacgtttaccgtgaagttattacttcttcatagcaaaaccagcagtaattttgtggttcatcctttactcatcagtggccttttggtattcagccacttaaacaataacacgataagtggagaaattcctgttgagctatccaaattgcccaagcttgttcacatgtgagttttgtttgttttatttt

SEQ ID NO: 52681 - DNA, 1313 bp, Arabidopsis thaliana landsberg
aatgagcagcgttgcattaattgttaatgcatagagatttgatagatatatagcgaccagacagtatgtaatgaaagtcaaccagaccagtgatcgagtttttttacacgagctctttcgtcaatgtaaatatgtaatgatcagatcgtgccgttaaggatcatccaaagccaccgtcgcaaggaaaatctaaccccgttcgttggattaaaagctcaaataaagaattacatgtcctaaccaaatctttttctcgaactacacttttaaccacttgttgtttttctcgaaaccagaaggacaccaaatgatcatctatatacagtaaaccaacaaatgatataaatcgtacttcttttttctcgtggtcatcaatcaacaattcaatatcaaactgttacaaaaaataccaatctcaaactaataatactaccaattagttcggccatgatatattttcatcactattgtcggtgagaaatgagtgtcattttgttttcgtgtgtttggaaagtgttgagattctaacaaatgttcagctgttttctttttggtgtgtgaattgtgatgaactgtccattactttctcttttgttcctttattctttttacatctctcattgatctttacttctttttaagtggcctgacgtgcgatcctaataaaaagaaggttgtttatttacaatttttgacaaaaaccaaaaaagtgttggtgtataagaggaattatagaaaccatgcatcaccaacaccaagtagtaaaaagtttcatcccaaaacaagtgaccgtcatcgtagtaagttaaaaaaatggctgaaaacaaaagttttcaagttcaaaatacaaggttttatcagaagcactcaaaaccaatattttgtcacagcttccaagtttccaagtaatcatgatgaaaaaatatactattttctaaaaacaaaaaggtaagggaagataaaatgcgagtttgcaagcacatcacatgcaactgcctttgtaataagcgacactgccaaagtatcaattaatattatacaacatgcatttcttttcaattttatatgcagctttattattaaaatcctttgtcagataacttacaaactgttattttttgggcttataggcttattaaaggttagaatttaaacccatatatgtatccaactaatttaaggcccaaaatatgcatctttaggtccatataaattaggcatgttcaaaataaattacccaccctcccagcatatagttgaataaattcagaaaaaaaaaaattatcataaagtttacactgtagtttagttgt

SEQ ID NO: 52682 - DNA, 699 bp, Arabidopsis thaliana landsberg
ttatactacatacttcttagcaaccgataggacaacatctacctgtcatattgtcatccccagcatacaactgaccatgttctgcaaaacaaaaattgcagtgttaatcagaaaaaacagataatacattcagtaccacaccttcactgattacaatgaaccaaacttaaaaggtgtatcaacatcaggcacatatcatagaacgcaaagtgtttcacgaacatgtcacatgttctaagaaggaaagagctagctttatctcccctgaaagagagaccacagattaaaactgaaaacaatgcaaaaggagacctgaagacaagttgcagcatctcacaagctagggctctttagtttcttctcgttaaaacaactgaaaacaaatgctagggctcagatcggtttggggaggtccctttcggccatcaacatttgaaataacatacctgccaaaaccgcactatgtcgcgcgccgcaactaactgcttttgcatgtttgccctccaaattctggccatccagcaacctcggtaatatctaaatcagaagagaggagataaaatatttgagaataccagatctttcaggtcatgaatggcacaaaatttctggaaatcttgattatgagagatacctcagcatgatcagaccagttcccagttgcccaaattggtttccaccgaaggcatacactttacc

SEQ ID NO: 52683 - DNA, 473 bp, Arabidopsis thaliana landsberg
aacgttcttggcacaatcagccgggaaagaagaccctgttgagcttgactctagtccgactttgttataatgtcttgagaggtgtaggataagtgggatcttccccccaagacatataccactccttttaacctccctttacttactacttgaatactatcttctactcatatcttgtctcttgcacccactatcaactcagctaatcgccatactttctgtgaattgctcaatcccctgaaccatctattcttttaactcatgttgctcccccagcctttttgcccagggcccctctctcttggtgtaacaaatcccctcccctcaccatccttttcttttactggacccaagcttctctcccctttgttaccctcactccgttgtccttaattctatcccctgacccccttagccgttcccacctccccttgtgaactttacccattacattttatctcctccctctcttc

SEQ ID NO: 52684 - DNA, 1059 bp, Arabidopsis thaliana landsberg
gaatcattccaatgaacacaaacggagacactttgagaaagtaaaatctggatggagaacaaatttgaactcatttattatcaaaaacaaacatttgcttcttctttttcgtgaacaaaaactcatgtctatcgatccctacaaaataagttatcctccatagatcttataagactccaaaaggtcatcttctaactctttggtgcagtcttctctttcgccttctgaagcttcaaaaccttcttcacaatcttctgttcttcaaccaagaaggccctgacgatcctggaacagagaaaagtgtaagattagttgcaatactctaaagaaacccatttttgagaaatctagataatatacttacctctccctaacagcgactccagatagaacaccaccataagcacgattcactgtcctctcgttccttgccaaccttgaccttttgtactcagcaggtctcaaatgtggaatctgcagaaaacaaacatagaaagtaaagcttaagaaaccatgctaataatgcaaaaaaaggaatgtgtttttgaggttccattgagattaagcatatgtgtaacccttgattattcaattacaaccaggggctgatccaagtaactaccaactcattatataccaggtactagtcttcgacaaacacaataggaacagagaaagccaaatgatgcttaacttaaattcaggctatcaagttattgaaagaattagctgaaaggaatactaagtctactaagtcgagtagccatgtaaagtttgtttctctatatcaatggaatgaaagtatgaaatttttacactattttaccaacttaaggaaagccttcaatcaacacattcttaaattcaatccctaaagtgtctatgttttaatttaagttccaaatttggtctcaatgccaaaataaccaatgtgtaaccctttggtctccaagacacattaattcgaaacagaaacaaaaacacgactaaaaattcacaaacttttttccacactggatgagatgagaaagcagataacacaccacaagggacatgaac

SEQ ID NO: 52685 - DNA, 812 bp, Arabidopsis thaliana landsberg
ctcatcatcaagatcccagcttaaatcctcatcttcttcaccagaaatagctctcttcacaagcttaaccctagcttcttctacttgctcaagcttataaactttataataataccttctccaaaaagtctcagcatcaacttcaacaggaacaatctcctcatagatctctttaacacctttgttcccattaatcaactcaacaatctcattccttttctcctctaacttaaaccctaaactccaattctcaaaatcacttaaatcatcaggttctctaacaaacgtgcctttatcagattgtaacgcaagtaacatcatctcaaaacgactataaggtttcaacgacaaaacctgatttgtacggtcacgattcggttttaaagattccttaccacgagaaataatcttagccgttgatttccacacggtggcgccgatatcgtcgataacttgacctaccgattcgagagattccgaagcgacggaggcgccaatttcgagagaatcaggtaatcttgaagctactcgtcggattattgaggtttctttcttcaattcggatccgaattcgaccaaatcgcgacggtaggatccgattacagattcggattttgtcgatagggttttgattagattgccgaaactccatgaagaagaagtagaaattgtgggttcatgcataggtgaatcggagctttgttgatgatccatgaagaagaagcacaaggaaactaggtttttttaggaagtttatttcgtacggaaactataataaataatgaaccgatgattactggttctgttttaaa

SEQ ID NO: 52686 - DNA, 456 bp, Arabidopsis thaliana landsberg
  unsure (1)..(456): unsure at all n locations
cactctctagttgcagctccgagcctacaaaatggctccgaacatagaaaataccatctacgccttaggtagnnnnnnnnnnnnnnnnnnnnnnnnnnnnnnnnnnnnnnnnnnnnnnnnnnnnnnnnnnnnnnnnnnnnnnnnnnnnnnnnnnnnnnnnnnnnnnnnnnnnnnnnnnnnnnnnnnnnncgggactgttgcttatccatgcaaggattcggtgtcgacacgtggccagacgcccctgacataatccaccggacgatgcctgatggaaggtgctgacatagagccagccagcattaattgcagatgggatggatacttgcccgcgccggtagcaagtagtgtatcctgacattaaatgtgtgtcgcgtgcagggcctgagacgtgtgggtttttactgttacccgcacattaccaaggcatggggcattgacctagtgtgctgttta

SEQ ID NO: 52687 - DNA, 1024 bp, Arabidopsis thaliana landsberg
aggaagaaaacaaaaaaaaggggcatgttattgtgtgattaccaggtatatatttctcctgagaagccacattagactggctttgcgaacccttagtcgtactttccatattagctattttctgcaaaaacaaaaattctagccatgacgctaactagagaaacatgtgcgacaattttatgagaaaaaaaaacaaaaataaatataatcttaggttgggagggaaattataatgggaactcttagtcaaactgagctcccttttaagagtaacgaaccaacttaatattccagactcgactagttactagtaatcttaatctgtccaagcacaaaacaaagtgacaagagtgaccacgttacaacaaactcttagagtgtaccttcttcagcttagtaacttctaatcgtagctcagcttcagttattttccattgaacttctttgttactccaactcgcagtctgcatgacaaataagaacatattaaaagctacaatactagtacgacgggctacacacatatgttcctgtcatctaacacagacataacctacatagacgacttatataatgaacacataaagaggttttagtactgaggaaaatcttattgcgaatgatttgaaagcatttcaaataacgaagcccaaaataatgcggactaatactagcaatatcatgaactatctgagcagtaaatttatcctaccttctgttcaattgaccttaacttggcctccagaaataagattctctgcaaatatcaacaaaagaatatcagattttgatactatgatttgcttttacgaatgtatttcggaaaaacaacactcattgtaagaccttgtgtgcttcatcatctactgcagcaacccgtgatgcatagattttccggacatctctcaagctacatattttgttgcacaggggacactacaaaagaagaccaatgtgattcaatgagcaagataactatatccactaacagcaaagggatttgaacaacttcataacagcctta

SEQ ID NO: 52688 - DNA, 873 bp, Arabidopsis thaliana landsberg
gaaataaatataaagtccacctcaaatcagcactatatatcaaaccaaaattgtatcaaatctataatacactaaagaaacaacaatgattgaactaattaacatttctcgacactgaagaaactaaaaaatcgaataaagcagaattactctaccgggttaaacccggtctggattatcattcacccgacctggttctaaacccgttttaaaagtaacgcgctcgggaatatcagtacatgggcccaaattactatgctgatacattcagttaatgataacgttaccgtcacagtaaagctaaacaacttcgattcgattaaaaaaaaactcgccgcttataaacggcgtctgcccaaaaaagtaggaaactcagaagtaaaaaaaacccaaaatcgcacctccatgaccaccgtctcctccgctttcgccaccgtagcggaaggcgcgaaggttgtcacaccgaggtggaagaagaatgaaagaaatggaaagttacgggtgatgtgtaggtatggcggtagtatagtttcacctccgcagacgaaatcgccgcgttatgtaggcggagatactcgaatcgtcgccattccttcttccgcggaaacgagcttcgcttctcttgttagccaccttacggttacgctcaaaatctcttatcctttcaaggttaaatatcagcttcctgatcaggaactagattcgcttatctccgtcgaggcggatgaggatgttcagatcatgatggaagaacacggttatctctcctccgagtcctcgattccccaatcgcgtatccgattgtttcttttcccattgaaatcacaacaatcgaatgaagctggtgcgagtcatggaaattcggatcagtgt

SEQ ID NO: 52689 - DNA, 958 bp, Arabidopsis thaliana landsberg
gattacatgcgttacgcgtcaccggggtggcattctcgtcttatgccagatctttggtctgttcttgctatagccgtcgtcactcgtgttctgttctataaacactggtctaaagagctacgagcagctattcctttccttggttctatcgtattccttctctgtgctcttctctttgaagctctttgagttcgctctgttactgctgttcttggcttagattggcaccggtaatgctttagatctgtttcaatttagcttaaagattgagtctttaacctcaatttaggttaaaaattgactcttttacttcaaattagcttaaagattgagtttttgacttgaaatagctgaaagaatgaatcttttacttcaagttagcttaaagattgagtttttgacttcaaattagcctaaagaatgagtcttttacttcaagttagcctaacgattgagtcttttacttcatattagcttaaaacttgactcttttacttcaaattagcttaaagattgagtttttgactacaaattagcttaaagaatgaaccttttacttcaaattagcttaaagattgagtttttgacttgaaattagcttcaagaatgaatcttttacttcaagttagctcaaagattgagtctttgacttcagattagtagcttaaagattaagtctttgacttgaaatttgaacaaagtttagatttttgagcttgttggtggtacttgatctgattgttgaactcttagtctttacttggtatcttcaatttgaatagtacatggtttgatttggaatcttcaaaattgttttaagttgattagagttagcatgtagttaacattcattgagaatcatttatgctttttagtgataaatggttttatctttgatagggaaacgcctccacttcctgatacaggccaatggttcttacttgcactaaacgagaac

SEQ ID NO: 52690 - DNA, 1022 bp, Arabidopsis thaliana landsberg
taatgggggtaataaagttatcattgtaattttgttcttagatacaatctctttttagtatttttggcattttttgtctcaaaataacaatctcatatgattttacaggagaaagtggcagtgcagcaacaggtggagaccttggtgaaggacaacacagtcctcaaacgtgctgttgctatccagcatgagcggcagaaggcattggaggatgcgaaccatcagctaggacttttgaagcaactggttcctcagtatcaggaaaagcttagaaatctggaggtaagccttaggcgacagagagcttctgcatatcccttgctattgctttgaatggtctggtgttggttgttttaaaattgaaccaaaaacagatgttgttagaatttgatgatgcctcataaaagaaagagtgaatgacaaaaggtagaaaaaatgcaggtgaacaattacgcgttgagaatgcagctgcagcaagtggaacatggcaactcaatgccagcaagattcaatccggacgtcttctaaagctctccaagaagacaaggacacttgcagaggaggagaaggcaataaacgaaagtagagggagagagagagagagagcgatatcaaactacaaaacaaaagtgcttttgcattgtaatactgtgtagtcaggacaaacaaacattctgtttcctttccttttttttttatatatttctttggtttgctgctgtttgtctcaggcgcatttattttggaaatcaaggatgtgttttggtacatagggctgtataatttgacattgttctgaaaattcgaatcggatcaaccattagtagtatatgatatgaatgaatgattttacctgtaagaaataagcaaacgagacttttgggttacggcaaaagaagcgatggaagagaaaaataaaaaggaaagaaaggaagaaaatccacgtgagcgaggttcgcaccacaaaatcccgaatttcactctctttagcctaaaacgcttttggaatcatcgtcatcatc

SEQ ID NO: 52691 - DNA, 984 bp, Arabidopsis thaliana landsberg
aatttcttaaaatagagcatgtaaaatacaaaacccatgaaaagaactggacaatatatatcttagtttggtatgtaagaatattgatgtaatataattttttttgtagactaacataatacggttattgaaatttaagaaattttataagaataatatagttaagatattatacagtcaagagaagctttacattaaataacttaatctcttatgaaataaaaaagaaaaaaaatctatttgctaaaattataaataacaaagtttgatgtttaattttcatcagataatatgaaacttattaaaattatagaaagataaaccgtgaaaagcgaaatgtgattaagattttgtattatgtgattaaaattttgttaaatgaattggagtgtcagaaaaatgtgaataccgattttatgacggtaaaaagtgaaaaatagaggaaaagagagggggtaagagtgagaaaaagaagaagtactatgagtagtcaaatcaaagatgaatcacagcccatagagaaacaaaacctcaccacccacttggttactcacttttatgctttttacttctgagctttctctgacacagcccacctgcttctcttttctcattattacttacttctctcctctttacttcattttctcttcttctatctttttttttacctcagtcagaaccgaatgtaaaacctaaatcaacccaaaaagaatgtaattgttgtatacaaaattgaatagaatacaaaatctaaccgttgataaaagatgaaagaaattattggaccaaaagtttgcctaccttaaccaaatttgaaccagaaaattttggtttcagtctatagtaaaactgtaaaagatataataactcataagtagtcgtttgttctataattaatacatgactcctaagactcttgagacatcgttctactattattttaaagcttcggggtttgtggttagccaaacattctgacat

SEQ ID NO: 52692 - DNA, 1023 bp, Arabidopsis thaliana landsberg
catcagatcatatgattatatcacggtacaaacaacttattgataaaaagtcacctcgctaaaacagaagaaatccatcaatcccaccaaacctctcgcttgatcacgacctatgtgccgcgttccatacatgctttctatttccttcctactaagctgcagagttatagatattctgagggctcaaagcagtagatgaggagacaaaatcattcgttaaacaataccttacgacgaccaaaataacacccatctggctcgattgaaccgaagaaatccaatttcatgaggcatccttttagtttatcatagtacaacccacggattggaaaagtaggatcatactcaaactgagtgcaaacatcaggatatctaaactgcgaaaaccaacaaccaataattctcaaaacaatactcagccctaaaacaagtttggctaaaagagattttacctcattaaccatatgtttcttggcaagatcatagatcaaactctgtaagtgagaagagtaatgtgccaaagtgtaatcataatcaaatccataaacttgtatattatccaatctcagattcttattcacatatatccctacacaaagtatcatcatcagtgactaagaagaacaatcacaaaaccaaaatcaatagcaaataatacctcaccttgaggattcatcttcggcatactattaatagcttcagggatattaagaaacctctgtttcgctaactcgaattcatgacggatcttcgtgatctcgtcctctactgttgaacattctggcaacgctacggcatatttcgcttccagattggctaaggccggttccgacgaagttacggtggcgaatccacggaagtttcttagaaatccatttcggatttgatcggaagaaaatcttcctctctgtaattacaacgaactcgatcatcattttcatcatcccccccgatcgcgaataaatagaaatgagagagatagaagagatttacagtgagcgatgctccgagaggaagaacaag

SEQ ID NO: 52693 - DNA, 1465 bp, Arabidopsis thaliana landsberg
ttgaataaaattgtcctgaactacttctagctaatttgtcaaacaattgagtcgatcgatgaaaaaaaaaacttaaaatacaagtaagaaatcatgaaataataaaaggaaaaatgattaggggaacatggtggagtcatacaccaacccacagacaatcccaaactctcccaaccgcccaaccaaactttcccgtgtatgatttgtatgagattttataacttatgcacatgtcctaatggacctactcccctctcaagtgttttccctacaatgaccaccacctacctaatctggacccctctccatcatcaccattgattcctagtgtcaccaatccaatccaacgaccaatacgagcagtgagttttctttgatccaacggcccacaatcagagaatccgtactcgttctctctcggctagatagatctttgaaatcgtctacgagcgattggtgttagagtaaacgacgaaccgacttcgatattataagtacgtcagccatagacgttacgacacgtgaagtgggacacatcttaagccacgtggaatacatgtcgcgcatgagactcgtcactaacacgtgggtcctctgcgcaaatcgctcgtctattcttgctttgcactgtttttacgcgacggcacggctctctcgttttccgtacaattccctctgaatcttttctaattcgccactaacatatctcaagcctatcatcaacaaacctaagattactctttcgagttatcttaatttatcgttaatacaaattaactaatgctataatagtatatcattagttttaaatcgcctagtgcatgcttttgatgtggaataaatagttgtttatattcgatattatcatatgtttccgaagatagttaaggtatcataagaaattgattttactattgtttatttaagtgctaacacggcggagcttagctacactgaacctgttcataactactaaatgactaatgagtcatacgtacagaaacacattaacaaaggattaaatcaaaagaaaaacgcataatctaagaagcatgaagacaagaggtttttgtatgcccaatcaatatatatataaatttattagatacatcaatgaaaaccaaaaaaaaatcccagaaaattaaaatcttatcaaatatgatacaacgataagtaaaacggccagttccaaaactgaaccgaagccaaactaaaaccatgccacataaatttgcactcttgggatattccaaaaactaaaaaaaaagagaggtaaatttgatatttgggaaaaaaatttacaagcagtcatataattatataataaatcccgttttaaacccatcaaataaaaattaaaaaaaccacttcatcgaactttaccttatgtgtataaaatatatatttttgggttaagaagaagaatctatgatcagaatcaaggaaggtagagaccactctgatc

SEQ ID NO: 52694 - DNA, 896 bp, Arabidopsis thaliana landsberg
tgggttttagtaactaacgttactagcagtctagcatgatatatattttttacaaattaaatgttgtttttaatttacacttgtcctcaaatcttaagggttcaaagagtttctcttctttttccctctgttttcacttgtggccttgtgggtgtctcattctaacactttttcaagttttcatcattttctactgattttcttctaccttcggaagaaagtaaaatgggcttcaaagtgattaattaattggctcttttcatttagcatattccagctcgttttagtgttttacttaggtgggttagtaaacttggcggcaaagtcaaagaatgaagcacgtggaaccactaaaccagctttacccgccaaagtcgccgtcttttaccaagtccaccagagaatagaagaaataaatttttcataattatctttgttaagtaaattatgaaaaatgaaggattaggaaatcgagagaggctattggttaaaaaatgtaaggcctaggcccaaaccaaaagaatcgagagtatgcagttattgagtgagatgagtaacggcaagctgagtaaatatgtgctaattattcaattattatgtctaattaattattcgcattaattctaaaaatagctgccaaataactttaaagtgacggttactcttaaatttgtagctcaattctcagtttctcatatatcgataataacttacaattaaaaaaaaaaaacttacaatctaaatatgttatgaatatatatattataaataacatatatgttaacataagaatatttcttaattgatttttcttatctctaatttttactcagctaattatgcacgttcttatacaatacacacttcttcctactaaaaaaaaatagatttgatta

SEQ ID NO: 52695 - DNA, 443 bp, Arabidopsis thaliana landsberg
agtataaatcaaacggccatactaagagatcagggtattcttcggtttatcataaggatttaccggtgccgagcccggtatggtgtcgcccttggaatcaagattcgggtaattataattagtggtcaggttgttataatagccgtatcctgccgtggcgttaatgttacttttaatagcaggaatatcttttacataattaaagctgaattcactgaccgtgttaggtgtcttttgcagatactgagaattatacccgtgattggctgtggtggcccactcttgtgccgcatctgccgaaacgtgtaccgtgccccatcccttggagacatcataacctacattccagatagcatgcagctcgggaaggaaaggaaaactataattcaattccacattcccaaagctcctgttggcctgccctgcatcatgtcataacatca

SEQ ID NO: 52696 - DNA, 1008 bp, Arabidopsis thaliana landsberg
cagaaggccgcctaggtggggctgcccttgatgtgttttagcagtagcctcacgtgcccgaggagctctttggccttgagaatgtggttctcctccctcacgttgggagtggcactgtggaaacacggaatgccatggccgatcttgtcgtgggtaaccttggaagcgcacttttctgggaaatcacttctgactccggtcgtctgagtcatgtgacacatttgggatttggtttcacttcatttgaaaggtttttatgttaacgaactcatgaaaagggtaatttctcttccaaaagaaagttgcactgtcgtatataaggaacagatttgaacactaggcgaatcctctccgttttatgtctcttacttatctttcttttcacaaagtattggtctagtatacgagtggcgcatacgacaatacgtcaagtcattaaccatcccagaccaaaaaacgtttacaaaactactcatagatgtcagtcaagtgaagcaatatctattttgttgagaatcagctgaacctaaaaaaacgtagagaagaggatgacataaaacaaaacccaaaactttaattagggctcctttcgggccttcttggtaggttgcacgttttcaaaacactcatctttgcctttttcctttttgtgaccttctttcctgatgcacattaacaaagaatcttggagttaggttggtaaacaaccaatgaagtaccagcaaggagaacaaatgagtggtggtacaagccaaatcccaagtatgttccctacaatgaagaataaacaaggtttggtttgatgtcataccctccttccagctcagctgatgatagtcttttccacaactctctctccatctcccctgaaggccattagtacactagtcattttcaacgtttctatgattaactccatttctttggtataactaacaccatggaattgccaccttaccattaattgcttctaaggctactgagaagttattcttcacaactaaacct

SEQ ID NO: 52697 - DNA, 999 bp, Arabidopsis thaliana landsberg
agacgtacagtatagttatatcgaaatttgtaattttttcctcattattgtatcatctttttcactatttctacttgtatgttttagttttaggtattttctttctttctttctttttctagcattattgagtggaatatttttgtggaaccactcatgactcatctatagtgtaatcatatatgtgactgtgatggatttacaaacgtaagaatattctttcagtgtataacatactatttgaatttgaagacactaatatttgaatatattttctcacatattagtttaactatatacgttgataaatcaaacactaaaatgtttgctcatatgttattcctatgatctaaattgagaaaagtagacaaattaaaaagagttttatgtatatcttaattatcgattttattcgtaattgaaattgtatttgtttacggcaaacatggcatatgaagaattctgatacttcaattgaaatgacaaacacttgaagaaaaaaaagtcgagtttacgtacgtataagaacacgcataaatcgaatatttaagagatgaaaaaacgttttaatattctctaccaactatatatatattttttttcctcaatatataatttgtttttaaagttttattaaagatggactactttgctactctattctcctatattattttcaaaatattggatcaaaagatggaaaaaaaacgaaaaataagatgtatacatttttaaaacaaaacgtagctggtgctatgtttacgaagtatgtacgatactcttctgtctcttattctcagccgttcaatgtggacacagtggggtccttctctttctttgtactaagttcgtcacaagtgtcaagtggaaaacctactttaaattattaattaaaagttattattgaattgaaatgcctgcgacaccatttgattaccaatcaacaaatcagttaattatggttttgggggtgggaaaaaatactcgaggtctttttgg

SEQ ID NO: 52698 - DNA, 632 bp, Arabidopsis thaliana landsberg
  unsure (1)..(632): unsure at all n locations
aaggnnnnnnnnnnnnnnnnnnnnnnnnnnntcctgcagtacgtgctgcgccagctggccggccgcaaggcggcctgatcgcccgcttcacggcacaaaaggccgcccatccgggcggccttttgctttctggcgtcagccacaacgaaacgccggacgagcgagcgggttctctcgacttggagctcgtggacggcgatgaccgggcgtgctgcatatggaccgttgcgtcgaaccgtggccgacgcgcagcggtggagcgcgcaccgaagtggctcgggccgtggctccccaggcctcgctgcgctgccgcttgcctccatgcgccggcgtatacttcaatggaacacgcgatcgcctggtcgcacggggaacaggaaacaccaaatgagcaacgagcgtccgtggctggcccactatccggccgatgtgcctgcgcagatcgatataaacgcgtacgcctcggtggcggcggtagtggaggaagccttcggcaagttcggcgaccggcccgccttcgccagcttcggcaagttcctcagttatggcgaaatcgaaacgctcagtcggcagtttggccgctacctcaccgcgtgctgggcctgaagaaagcgaccggctcgcgatcatgc

SEQ ID NO: 52699 - DNA, 974 bp, Arabidopsis thaliana landsberg
ctagtcttggaagattcatgaggaagataccaaatgtttttcttttttttcttaggttagatacttcactagtaacaggaatttttatacctttttccggtttcaagaggagttgccatctgctttgtctgaaaactctagagctggtttctttgatgcacttgattcaatcgaggttgtattcatcaaaactctcttcactcctcttccaacaacacccaagtgagtaacacctgatgctgctcctcctcctgctgcaccggtatgagcggttgagactgtaggagactctaaatcttttccgaaattggtattcacagttcccatcctggaagagctcatttcagcagcagcaggaacaaccttgtcactggcatttggcttagctgataccatgcccattagctcagcaagaacttgctttgggttctctgcttgttgtttcaaatcctcaagctacagaaaacaaatgttggacattagtatgggtttaggagttattttaatgaactgataggtttagtttacttgccttcttttctagatcttcagcgagaccagctaagtctccaatctcaacttctttgtctgaagcagttttatcaatgtaaggaacattggatgattgttggatgccttcatctatttcagagacggttgaggaagttgctgaaccagatgcacctttgatttcattactgagtctctccatccgagctttgcatattaacaaagctatttgacaatatggtattgcttccttaggctgacatccagtctcaagacaaatgcagatgcggaagtttctgaaacgatcaagttaagtttatataatccaacaactaaattgacagaaacgaaaatcagatactatttaagaaatcaaaaggatacaattcagctgtgcgtcgactgtcgggctcaaccagtcgttctaagatggataatgcattcttgtagtcagtcagggaaga

SEQ ID NO: 52700 - DNA, 1129 bp, Arabidopsis thaliana landsberg
tgtgtttggatgttatactgtatccatcgtgtttttgatattcttctattttgaacggttttttgagattcaaactttattttcaagcaagatctgaagaaatcgttgaatttttcaaatggtacgctcagtgtcgtgctatgagaaatgatataccgtatgatatttatcatatcgcatatgtttgggataagcttggtttacatgttattcatataaagtttgtgttttcaaatcaacattacttgtacactacaccatggaacatttcaaacccacaaaagaaaaccaaaatcgaaacaatctgtaatatttattatcctactgcaaacgcggatttacaattttggtggtattgtgtggatacaaatttatcagtcgcaccatttggattaaaacatgagtacgaactaaaagtagaaatctgaaataaggttttgtcattgatacattgtcaaattggaatttaagttatggacatgtaactagccaatcactagacctcactgaaataaatgataggagtcatcgagtaactggtagaggacgccagttattggcttggtgtatggcatggtgtacggcctgaccaccaaaagttgcagaaagctgttggtgtacaacttctttgacgggagtagcagctgcttcgccaccacgttcggcaagttctaagtaaagcactgacttcagcatctccccttcctgcatcaacccattacattcattacttacatatccaaaccttctcataacctaaaatcgaatgaactcattgcgtaatatgtttgtttctggatatacataagtcgataagttatccctattactactaagagaagatgactctcagaagcagtagttgagttgaggtgcttacagaaaatagagcaaggccgtgttcaaactgagctttactgtggccgtgatcagctgctcgtttcatccattttcttgctagcttgcggttttgtggtaagccttctcaaccgaataacaaagcgaaatgtatacatcgctcgtacatacccaccttctgctgcctttaggtaccatttagtctgtcgaaaaagagaaaaaaaatccaatcatcatatcgatacaaactttacttgattctagaaagatg

SEQ ID NO: 52701 - DNA, 973 bp, Arabidopsis thaliana landsberg
caatgtctacgatcaattgcagcagtgatttttcgtggcaatgttcttcatgtaactcttatgttaaccttcttgatcaaatggatttgtgagattgcgcttgattgcgcttgattgattcatgttgtgtattgtgatgagtgaacaatactgtctgaataaaacatgcccggccttgtctttttgtctgaagattttgagattatggtacaatgccaaaattttaagctgtaaaaacataatgaaccaaaaagagacagcgaaatagaacgagcaaaaatgtaaattccttggatagttagatacaaactggtttaactctaaatcacattcacaagttagttacaaaacttacaagaaactcaacaaaacgttagcaactctgcctaggcttttatagactggtaatctctgcgtttgtggtgtaatgaaactcgatctgtaaacggtgatgaacaggcgcggttgaggctaatcctttcttgatatcctcttgcaactccctaattggtatggccgccaagaaattcttaatatactctttacatgactccttccctctgctcaaaatctctgattcaggttctgattcggatcctgcttcctctgtgtgaagaatcttgtggatgacggttttatggtcgaatttcaaaacgtaagcttgatcacaaccctcgtaaagcctttctccaagtgtgtcaatgatatagtaagcttctttttcaactttgaggacaaagaagtgatcgttccaactcactatgtaaacgtgcggtggcgaatcatcatcatagctatcaccattcgccgagctttcctccagactaataatttcagcccaaatactatcgaaagacattgcgccttgtagaaactcgaatctaccctcgttgatcatcccatcaggatggaaaaacccaacaaaggaatttccggggataacggttagaggcctgatctttgcttgtagcac

SEQ ID NO: 52702 - DNA, 866 bp, Arabidopsis thaliana landsberg
  unsure (1)..(866): unsure at all n locations
atgattgtgaatctttaacttttattttgtgtgtgtgtgcagatggtcaaagattgcctctcatttaccatgtagaactgataatgaaataaagaaccattggaacacacacataaagaaaaagctcaggaaaatgggtattgaccctttgacccataaacctgtcnnnnnnnnnnnnnnnnnncaacaagctcaagggagaaagaaaagtttagtgcctcatgatgacaagaacccaaaacaagatcgacaaaccaaagacgaacaagaacaacatcaattagagcaagctttggagaagaacaacacatcagtgtctggtgatgggttttgcattgatgaagtcccattgctcaatccacatgagatcttgatcgacatctcttcttctcatcatcatcattctaatgatgataatgtcaatatcaacactagtaaatttacttctccttcttcctcttcctcttctacgtcgtcgtgtatatcatcnnnnnnnnnnnnnnnnnnnnnnnnnaagttttttgatgaaatggagattcttgacctcaagtggctttcatccgatgattcttcaggggacgatattagcaaagacggcaagttcaacaacagtactgttgatacgatgaacttgtgggacatcaatgatttgagcagcttggatatgtttatgaatgaacatgatgatggtttcgttggaaatggtaatggatgttcaagaatggttttagatcaagattcatggacatttgatctcctctagcttttagtttttttctttatgtttttaattagatttttttttgtttgttcttgaagtagtggggggatttggggtaggccttggagctacaacttatgaaata

SEQ ID NO: 52703 - DNA, 797 bp, Arabidopsis thaliana landsberg
taagtcaggaccatttataacaacccttatcatcaagagctgattttattttcttagagatcaaatcaggatcacgtcccaaaacacacctgtgttaccctctgcaatcaaaatattcaatccattaaaaaaaagattgactatgatcaaatattagttaacaatctgacgaaactaaacaacttcgagagatatagcgagagatcttactggcgtatatttcggacaaataaggagtatccacgttagaactgtttcggcgggaagatttgccttcgtcggcagccatggtttccgatcacgcgttaggacaagtaaattaaagacgtacagatcacgcgtgaaaacattatttattaggggtttaaatctgttcttagatagtatatcttattgggctgggccttgcagatattaattaggcccattcgtccttattcaccgaaccttttactccggaattttccaaacgaaagggtaaaaaaggaaacaacagaagagtaacaagagaaaaggaaacttgagttgaaagaaacgaaattacacagaagatgggtctataaaatatagtctcatcatcacaattcacaaatcagagaaagacagagttacagagcgagaattgcaaatacaaagtctgattttatagcatgatcttcttcgattcctgcttcctttacttcttctattatatatcttttgatttggtgccgttgcttttcgccaacaagaaacgagagcgtgatggaagatgagcccttcgtttacaataactagaagcgagatcatagatgtat

SEQ ID NO: 52704 - DNA, 997 bp, Arabidopsis thaliana landsberg
cattattatttgagtagaccatctttatccatccggtacaggttttgaccaatacggaaagagagaaattgtttcgcaatccttttttttttgttacgaaattaaaattatataattagtgcaattaaaagcacgaatagtaagcgttcacttaattcctcgattaactgattagcatattacgattatacccttcatcttccttgttgtgtctctactctctactttcaccttcctttccttccattctcctctatatatatcgaccctttctctttctttcttcctcacacactaaaagcttgcaaaaaccataagcttatctacttactcatctctctcacaaatcattttctcagacttctctcttcctcttaaaccatgcctgaggcaccaaagaaagaatctttagaggttttcgatctgacgcttgaccaaaaaaacaagcaaaagcttcagttgatcgaagaactcacctctaacgccgaccaagtccaaagacaagtcttggaggagatcttgacccgcaatgctgacgtggagtatctcaggcgacacgacctcaacggtcgcactgaccgtgagactttcaaaaacatcatgcccgttatcacctacgaagatattgagcctgagatcaacaggatcgctaatggtgataaatcacctatcctctcttccaaacccatctctgagttcctcacaaggtaaacattctggatactctgtttttgtttgtgttattttgctcgatgctctgtttttttcttacctggttctttcaaaaatatttttcatagttattggttgatcatatagtttgaagatccataagttgtttttgggcgatgagtactctagaaagttgattatttttcttctgggtacccaaaagggtggaactataataactttctcaaaacttaaagaggctaacaaggttttatatatatgttctgtttggcagctctgggacatctggtggggagaggaagct

SEQ ID NO: 52705 - DNA, 949 bp, Arabidopsis thaliana landsberg
ataagataagagatgaaaatgtgagggtgtttacgtaattgaatgttagcagaggttcagaggggtggagatacgaggaaactttggagatgaaaagtgggagacatgcacgagaaccacccacagagatgataccgacaaaaaaaaaaaaccaaaagaaaatctttaagtcttaaaatcttctgaaagagaaaataaaaatattaagcaaaaatgaggcacgtgaattacacacacgcgagacaaaactccttgttcatcttcaagcatatttctactccaggttttagggaggctatacggaattggaccgtatatttacttgggggaaaatacaatatttagtatgaaaagacaaatttaagatttttttctctcaaaaagaaatgacaaattaaagaagcgttaataatttaacaagacaacaactaatgtgaaacaaaatttaatttctaaaattgttaaataagttacaatttacaaacgttacagttttgttttcgggaagaaaacaaataacaggggctgcctgtcgaaaattttgccactcgttctggtataagaaaaaggggttttgatgtttattggcttatagccttcttacaaaatgatttaaggattatttaattttcagaaaatgtttgttacaaaaaaggtttggaatctttttttttttgtatttttttcttgagtctggtttagcatcgttttacatcattaataagaaatataaatgtttaacttaagaacatgtttttgctatatggcccacgtccgagttcactttttcaaggtgatggagaaagattgataaaaccgacgtgtgattgatagtatactcagtttttagttgtacattagttccatagcgcatatcgacatcagaaaaataggattaccgttaccattttcatcaaattggttgattttcttgaaaacaaaaatttca

SEQ ID NO: 52706 - DNA, 2429 bp, Arabidopsis thaliana landsberg
aattaaaccactttttgttaacgttttacgactattcaactagaagctattcgaccattgaactatctattctgctatattaattcgaagccctactccaaaaaatgttagatgctattgttatattgggttataatataaaatctgctaaaagcaagccataaaattatgtattagagtattaaatgcatgtgctctgagtgaaaaaaaaaaaaaggttgagttagagaaacgactccagcttcaatggcgtacgaacggaatttgtttagacaaattaaaatagacaattacttacctcgagagccagcaagctatattgcttgaccagagacttctctgactcttcgtgcgtagctcatggtttttcacttctcaggtccgaagcccgaaagggtaacgtgctgttcaagataccttctttctgtttttgtttttttaattgagggtttcacaaattcctaggacataaacaagtattcacaaagttatgaaacttcagaaacagagtcagagactcccaagtttgtggatttaggtacaatacatctttttctttaagattacttgattttacaagtagtagaaattttactaagggctaataagatatacattgagatttacactatcgaaaccgaaatgaaaaatgatatattgtaagtagagtctgtcctcactcctctctggggatccatcggttccaccaaacggtcttgcggccatcgctaatctcatctatggtctcagtgactgttttcacaagcttcctctgaagcctaagtgctgatgcaagagcatttctttgcgcattcgctttctttcgaggctctttctcctataatattacaaaaagagaaacaatggttaaggcttgaggaggtactcgaagaaaatgaaaagagtatagattgacaacgaaccctgagttcttggagttgtgtttctgtgaatccaccatctttttctgtcccattttttgccattaactgtattacccaatttgctgcttcactgtagtcctgttgtgtagccctgaagtattgcattctcaagttttgcatgacggacaacgcgagcaatccttgtctatcgaaatatgggtgagcaagagctgcttttgcgctgattctttgtcttgctttgtaccggaccatcgatgttagaagttcccatccgattccaccgtctagatctacaagctcgaaccctctacggagatcagcgcttgcacgaggctccactagttttctccaagctgttaagtcatagtcacatcttttcagctggcggttgaactgaatgaggttgctgtcagatcgtaaggatgggaatgcctggaatggtaaagcatgatgagaatattaacagatagtatgtatgatggattcgttttccatcacaaggaagctgataagaacgaaactggtttctgctctgataatcgaagaagggatgataaaaaacaagaacaatcaaaacaacagaaccaaaagtaatccagggcaatgaattctagagcattccctactctcccaaggctcaaactaacacccctagaaacctgaaagagctcctattttactctaatcctagtcactgactgatgaacgcatttttaacattaattgacacaaccagaacacacggactatgggcttgtcaaaagatagttgaacatgcgtgagtcgaaaatccagagaaaactaaagccaattggtgtatcgctgcttaccatttgaaggaagatgaggccaatgctatagatatcgaacctatctggcaaattcatctgtttggacaaaacaataagtatcaaattccaacacttaagtttatgaaactaggatagctttatatcaactaaggtcgcatagtcaaacaattaagtttgcacctgccacaggacaggggaaagtgcagctgcaacaggtgctgaaggtgcagatggagtttgggtgctcatgatgtattgctcaggtgctgcatacctgaaagcaacaacccgaaaagaaagatacttattaacggagaaacgtaaagtttacaacaacagaaagttcacatttatgatccttgccagagaaagatacaaattttgaaaagaaaaagaccttggatcaaggagaaactcttttggaatgtagttaattcccactctcaaatcagctgcagctccaagatcgataatcttgaaagaacgagaacctgctcaagttttagtcgacacaaaacatgagtcctcatcttttcattgggttcattgctcaaaaaggttcaagaactcagatgattttaccttctgagaaaataatgttctgaggcttaacatccctatggataatcccagttgagtgaagaccatccaatgcaaacaagagttgtctcatgatagtctgaataaatttgttttcttgttccaacccttt

SEQ ID NO: 52707 - DNA, 603 bp, Arabidopsis thaliana landsberg
  unsure (1)..(603): unsure at all n locations
aaactgctatctagtggttccatgtaccgtatcatttatgtcctctcgcgatttagcctcctcatctatgactatgcctacatattggcaggttaaaaaataaaatctacaactaatactttttccttaatttgcacgaagtaaaattctaaatcatcctgtatactaaaacacagagtagcttaattatagacgaagtaaaattcaacgccgacaatgtatcacttttttagaaaaaaaaaatgagtattatgtataataataacgtttttctatataatagtatatttcttattagatgtatactatagttaaatatccatgattggtctcctcttacatacgcaagcaggacattaagggacaagtgttagtcaactttgccttttggaagatactttagccattgtcactctagttaatcatagaggttaaggcttaaatttggccttaagtacactggtacagttacatattctaatcacttatacaaacttattcgtttntatttcttttctcgaatataaaaaagaaaaacagtaatacttggagatgaagaaccgagagatctccaaccaaaacttataatttatatactatcta

SEQ ID NO: 52708 - DNA, 654 bp, Arabidopsis thaliana landsberg
ccatacatacccataatttttttctgtgcttaaaccctcatgaacttcaatataatttgaatttacaacacttatttttaaaacagatttcattagtttttaacagacatgacatgagaacttcacacacattcaataagtacgacatgcaaactaaaaaacagatactttaaacaatttttgtaacattaatatctgcgtctattacattttcatatgtgcttgtgttggatcgatcatataaaaatgagccacaaataggttttagttgggccaaaaataagcccaattgaattgggcgctaatatgaatttgaatttgagcccatatacaatttcaaacgaaattttgtatgtttgctaattggtagtctttggctctataacgcacttcttcgaaaccagaacacaataatagatgttagagttggatgattaatcttaatagaaagatcactttaaaacataatcctccattgagccaaagtgatgtttcaaacataaaatatttttcaaacacatcaacactaaggatccaaataatagatgttttacacatgtttctctttccatccataaaaacaaatatcaactctaggctatactatactatcgatttatgaagcagaaaaattttctaacatatatatgctga

SEQ ID NO: 52709 - DNA, 910 bp, Arabidopsis thaliana landsberg
ttcaaccttattatcaacttccagagattgacatgctttgccatggtcatactgagatacctggctagagcttccagtccgtatcttctcaaaagaagagaagacgtcttccacaaccactttattgcttttaccaggttcaggaaccttttcatgacttgattgctttgaactccgtggattcacaaagcctcttttacttggattgatactgtattcctcagagtcagctacaatatcagtagaggtatggttccagggaggtaaatcgagctcggtatcctcaaatccttcagcaaacgtgaatctctcctcccaaaaatctgcattaccactttgtgtctgaacagaaacatcattcataagattactctcgtgtaagttattggcagctccacattgtatctctttcacaaccaattcatcagaaatgtgactatcgttgtgaagacccaatgcttggctactcccgccttgcttcttcttatccaacaacttgctcacacaattatcctcaaagttaagcttttgaagagacccatttgaacttggtttcttagaaagctcactaatcaacgcagcttcagctctcataaaatgattcttccgcaaaaattccaaaatcgaatcgatagagctcgaatcctccatttccccaaatctctagaaacaatttttcacaaaacctgagaaacatttacacaaacagaaactccatgatttatttcttcgaatctcaaataattcctccctccaaacaaaaacccagaaagataaaattaagcaacttagtgactagtacgaaaattcgttagacagaaccctaacaaaagcatattctcctatctctcatgaatattaccccataaaaaacaaaacaaaaaacccagaattcgaagtcgagcaatca

SEQ ID NO: 52710 - DNA, 624 bp, Arabidopsis thaliana landsberg
acgaaaaaagacgcacgtagtaactagtaacgagaattattggaagctagtatgaaggtgtaaattgataatggatgaatcatgtcgacggaattttcaaaaattaattagaagactaaattattactaacttggatgaatgtcaaccactgaccaatactcgtgtatgtctgacctatacaagtgtcctgaagatttcgagaacccgaaacttgccaaagtctttaacattttaaccaataacattcgaacagttttcacagccaaaaatttacgtatttagaaagaactactcgagaagaagtctgtacacgtatgtggctacgaaactacttgccatagcctctacaacttttttgagtttcgtttaatgagcaccgattagtctacactctacaatactaagggtacgtccatcgctaacaatgttaatttgggtactcaggaatatctatgcattgcatcgagataagttttgcatatatggaatgtctttgtcacaatttattttaattaaaaatctttattggttagtccattttataacattaacaaataactagccataattttgctgacaaagtactttgttggtttgtcaacccaaattaacagagtaatttt

SEQ ID NO: 52711 - DNA, 1399 bp, Arabidopsis thaliana landsberg
  unsure (1)..(1399): unsure at all n locations
ataattacccaacatgtataggtgagacaaagaagcaaaagattgaggttattcgttaattagcaaaaccattagaaacctttgcttcatctgcggcttctttggcaaccaaagagaactcttgtatcgccatgcttaagggattaacagagactttcccttctaagagcttgctcagtttatctctatgtgcctgaatcattacacaaaacataaactcagttttcctactattctacgtataaaaggtgtgagtaaaagaaatctacctgcaattgttctgcataagagatgtaatcgaatggtatgagtggctcatcagccaagagaattcctaaaagtccccaaattccagccactgataaatatagaaagcaaagaagagagagtgaattctcttcataacatccatgaaaaacagaacaaataactaaaagataataatagatcaaaagagagaagtgaaatctttactagcaacatgacggtgaaacaatggatctgcgttgtggatcatccaatcataggagtcaaatgcagtgtgatagacaggataatctgaaagaatgtttaaacttcatacattattggtattacttgcattagaacatcacattatagaatattttgcaagacttaaggaatcatgttctcattgacctgctccatagtacatgtttatagacggtatcccggtggatgaagaaaaccggaaaatcagaatctactctacttagcctctgaatctgcagttcattaaaacattacatagttttacattacaaagacaatgtatgagctcttttgaatagtctactcacaatgttattttgagacttaaatgtctcttccactgtcaagcctactgcatcaggatcctgtacctgaccacgcatagatgaatacgagagactaagacatttcctacgagtataagttttcaacaacgcttgagaatgccccggttattagtattcttaccagcttcaagacatcgacaagaagaccgtctaattgaggagttgcaccagcaaaaaaaccagagccttggactgcacaatctacattaagataagcaacagcacttgcacctaagttaagaacattttcttcaatccattcagttgatccaatctatacaacaaaaaagagaacacaagtaatttagtgaagccatcatatatagattcaacttttcgaagttactaatttactaaccattccaaattcttctgcatcccaactacaaaggagaatggtcctacgtggtctccaaccagatttaagcaaaagagcaaatcgtcgactaatgtcaagtaaagcagaagttccactgttgggatcaacagctccatatgtccatgcatctctatggntcccaagtatcacatacctatcc

SEQ ID NO: 52712 - DNA, 873 bp, Arabidopsis thaliana landsberg
tatcacaatcaagattcgggtttcgatcaaaatgattcttaaatctttgatttttttgcaggagtgttttattgcggagtaccggttttagggaaggagcttagcaaactatgtaacacattcaatcaaaaaggttcaaccaagtttgaatttcacaaggagcatttctaaaagacaaggaggaagaagccaaaagccctctagattctttaatatctcaaatttagccacttatagtataaaggcaatctcttcactatttaattcaaagtgattaaacgttaacacactgtcaaaagtgagtgtgttaacgtttagctccacacgttctaggtttatatacaccgaggcatacgtgtaaatatacgagacagaagaaattcaagggggtttgatagaagcatatagtaaaagtttaaaatttcttgtatagtaagcaaatgagatggagactctagaagagaggtgaggtttggtgagggatagcgacagtaatacgacgtcgtattcgattgtagaggaagtgcaatacagctgcagggaagataaatgatggaagcaaataatgcgttgataaggtccatgtgattaggaagatgacactctttttgggggttatttttttctatttttttttttagtggagtcggtgaaagagagactagagtttttagaatattggaagaatatttgggaataagggagttataatatttttgtatcattgtattatataactaatgtaaggtgtacaaagcataaaatttgatagtttctttcttctatatgtttcctctcttttaaatcttaagaatgtgtgagtgtgatcatctctgcaagaatgtttgtacttcgtttgtctcctttggaaaa

SEQ ID NO: 52713 - DNA, 989 bp, Arabidopsis thaliana landsberg
gtaattatgctatttttttttgtgtgtataccaaaattagtatgttattaacatagttaaatgtgggtcacaccacttttggttaactttcaacttgctatgatcatgtgaatcatatctcgtgataaaaaaaaatgttcctcacaacttcagctatacaaaagtccattggtaccatcaacaatagtttaatgagattgtcaaaaagtcggtttgttccatcaaaagtgtttcttttcaaatatctattcattttaccttcggcattaccacgcggtagggtctcacaacagtctctaaacgtaattattaattcatgaattttatagagtttttcaatggttatgaaattagtctacagttgcggaaacatttcaacaaaagcttcttcgaagtttacgtggatgttatagtggacgcaaatctgttttcctaatttccttattagaaattagtaaaaaaatattgattaataatgtgtgaatttctatatgataagtgaaataagacatataatgatatgtaataatcacctaatgtgggttagtttttggatgcttagaagacagctaatcaatacatgacatgtggtagccaccttacaaaactacattgggtactgacatggtgccaaacactctcaagaatgcgttttttttctttctggaaggcattcccatttcagtatctatcaaaagttcctaactatgcatataacaaacgtacttgtacaaataaaaaaaagtacatatatatgggtccatgaaacttcttgctcgatctgccattattacatattcgaatctgatccgttcaaggtgtcaccctatcaatgtgggtcttggtgaagtgtcaagctgtcaaataattaattggtataaactataaagatgtcattttttttaaaggacattttaatttcgatttttttttcttgtatcaaactttaattcgagctagagatgtgaagtcaaagtatagtattgatg

SEQ ID NO: 52714 - DNA, 101 bp, Arabidopsis thaliana landsberg
aaacagttaatactcgccaggacgccaactctctctgttatgtagatactgtaacaatttaattgtctttttactcagttgggttacatctcagcgtatgt

SEQ ID NO: 52715 - DNA, 1008 bp, Arabidopsis thaliana landsberg
ttccttttaaaacattcataaattgcgtcaatcatcatggattcattttacatggttttatatcccacgtctagatatggtgtaacatattgatatactgtggctgattaaattttttacattaaaacgagtttagatccaaaacaaaattggtattctcaaacaaaaattaaaaattgaatacgaaaataatagaacaaaacttcaatgttgtcgaatagataggaagcaatagaaaagcgacacgtacatgtccattttaaggtaggagaggcttttctgcggcttgtgaagtaagaaaaagaaaatgatgatagctgctttcgtttcattcattgcagaagaaaccaatgtttccccaatctcacgcgccttctgctatctaccaccacttggacaaatcccctttgcagtattcgtttttttttccggacattgtacattcaaaagcattccaagtgtctaataaacataactaaccactccaagatgcaaaatctagctacgacgaacaaattttaaactatagagatgaactttaaattcgggcattaattagtggaacttgagctattgatgatcgagttttctgactttttgaagcttaattgagttttatatacactatataggcttgtaataatatggatcaaacaagaaaaatacaaactacaaattgggaattgggttttaaaacgttatcgttctattttaattcaggcacgtacctttagaatatcaagatccatgtttcaatatttctgttgacaaataaataaagatgtctcaaatatgaagttgggcaacgtacgtgtagacctaaaagagtcgaaacattggtatctaagttatattatctacatggattatataacaagacaacgtttgttttaaaaacttcattgatttttcttaattagtagcaactagcaactaactactcatggcaaataatggcgtctgcgtggcacgcacttgggagagaaggtgtgagaatgttttttactt

SEQ ID NO: 52716 - DNA, 243 bp, Arabidopsis thaliana landsberg
  unsure (1)..(243): unsure at all n locations
nnnnnnnnnnnnnnnnnnnnnnnnnnnnnnnnnnnnnnnnnnnnnnnnnnnnnnnnnnnnnnnnnnnnnnnnggcatcggaagggtaaagccaattccatagtggatagccttcccgtctttccttaattcctggataaatttgggcgcacataaatgtcaagtttttggggtaaatcctgaaagttataaggaaaattcgccaagccaggttggagatgaagtttgcgattaaaccgccaag

SEQ ID NO: 52717 - DNA, 726 bp, Arabidopsis thaliana landsberg
agaagggttttataaagaaaaaagttcaatgcagtctatatacataaagtgaacgatcttgccattatacatttctacaaacgcgacgaacactcaaaaactaatcccaattcaacaaggaagatacttttatcattctaaaagtctaaaagaagataaagaataaaattgcaatcttatgataaagaaagagatcattcttgtaaaatgttatatctgcttaatatgatataggcaatggatgaaggcgatgtgataggattcaaaccagtaaactacttctttattcacatccccaatgaagagacagatttgaccaagggatgtagttgatgctgctgtatctgttggcaactagacgaaggaaatgaatgtaacagatcaaacttatgatacagctataaaatctgtcgttataatggtaactaatgatcatagggatagaatcactaaacaaaatctatctttgtgattcatcaagcaatacacaagcctccaaaaactagttgttcatccttatgcgagaaaataaatttaacttctaagtagtatttaatttcgattctgtgacttaagccaccaattccaacgaaccctaattctaaagtccaaagatagcaaaaagagcaccaaagcaaaaccgtacagatatagaacaattggaagaagaatgtttcaaatgcaaaaataggggaaatttcggagatggaaaagaaacctagaaga

SEQ ID NO: 52718 - DNA, 1220 bp, Arabidopsis thaliana landsberg
aacacacactcaacatgtggatgacaactcaaatctttttagatctcatttagtaagtgacttagtcttaaggctgataatgagaggcttaatatacaatgttgtatatgcacacaccttatcaaaaatttaaggttaatgctatacccatatggccatatttgcatcatcaagagtaaaatgctgttctcatgcatatagagaacctcaaactgtaagacattatatactgccacaagacagcatgatagttgtatctttctacaaactaaaaacaattaacccagtccacagattcaaaagaactagtacataaagctacttttggttctcgatttgttcacatattcagataatagtttgacagatgcttgaatggtgatagtgaatgtataactttggcctaatctaaaccaacactgtattcctctccacaaccacatttagcaatgtaagaaattccctgcaacaagtggaggtggtcatgatcatatagttagtaatcaaatcacgcctatataaaatcagtgtaaccttcagtttctcagcctgactctgtagcgaactgagatactctgcctctccggactcatctgacaatagagctgtgtattcctcttctaggatcttaatatccactgacattaactctggctgcattgttgacgaattcagaaaatagtatagtatcagatgcaggacaaaatcttacatgactgaactcatgcaacagcaacatcacaatgctagcaaagattacagagggtaattaccttaaactcattaatcttgtgcttcacattctcaattgatagcttgatctgaaatgaaattatataattcagagttgcttaaagagacaaatctgtgcactccaaattgtttttcttcttatttaaggaattactggaaagggaaaagtaactaagtttataaataggaaacaacacatatcccaaatacaaagtgctagaaccaaaactaccaatagtaaaaagtggatgtgaagtaaataaccttcgaattttcctgaagaaggttggatctcatcagttttgcttgatcaagctttgctctagcagaatctgatagttccatcaggttattccttgtctcttttttctgaagtatcaaggatcctaacctcagttactatggaaatattaaaagtgtcttgtaatgaagtaagcttataagtattcataggagaacggacatgt

SEQ ID NO: 52719 - DNA, 960 bp, Arabidopsis thaliana landsberg
tcatcttgtatcatgtgttggtttgaacacgtacaacggaatatttttgtcaaacaatttatatgttttagattatatttgtacgtcatgttttgatctaaattctaacatttggactcaaacttcttttagtagcactgaatagtatcattgtaactaattgattgaacaatgaactaaccaggatgtggataatgatatcgagatttttttataaaaaagcttttgttaatagtttaatacattgcaaatatcttacatcaaaagtctaaagactgaagcttaaattgattaaaatagacttagaacgttaaatcccattggccgtgaagccaaagcttccactggtctcctttccgatcccaccacacccattaaataaactctttacaatggaaattcgaaactttttctccaagtcatttttatttttagctttccctaacaatttagttccatttgtggaaatttacaaggattatctccttgactcctcatgaaatattttttatttgttactttcatttgtctaaaaccatgtttcctaaagtggagcttagactgatccacataaaaataatgttataaactcaatcatcggatcgatcaaactggtgactcatgacttacaaggatcaatttcatcttatcgtttcaacaaaatttaataatatatcataagaaagtacgtgtatgatagaatctcatgaaactacgcaacagtgtgactgaaatttgatttttgaagctatcttataaaatataagtacacatgacataacaaaatgggaaaatatacaagcaaagtgaaagctgtaatttacagatcatattgaaacagcattacacaaacatttttcgtaacgataacaacaaaaacaaaaagaatgtaatcttagttttataatcgctctaattaaacgaagagccttcgtatatagtagagagtctcagtctaaa

SEQ ID NO: 52720 - DNA, 1074 bp, Arabidopsis thaliana landsberg
cttcctttatctgttcctcttcctcttttttccttgcagcatcagaattaagtcgctcagcagcatcacgcatttccgctatctcatgcgacatgtctttgatcttgttggagttaaccatagacgtacactctgcttcctctgccctctgaagttcagctagtctctcttccacggagaggttaaactgttgttttaattccgcgagctcgtatttcgccatgaacagctccgcggtaattaaaatgtaatcctctcttgtgctctctgtttcttggttttcagattgaagttgttctaagcgttgattcatggtgtgtttggtagagatagcacatttccttgaatgtttgatggattctagtttaacccttaaatcagcagcctttcgttgagcagagtcgagatcagagagagcttgtgctttagctgcgacagagccatcaagacatatcttgactctatccatttcttgttcggctaacagaagttgcatctccttatccgacacatccgttgttgtgtccttaacgaagaaagaaaagatatttagagagagacacgttttgtaaaatgagagaaagaggcatgcagagaggaagaatgtgtgtatacctgagactgagaagaggaggaggaggagagacgaggtggttgcttcttggaaaagctaacttgacggaataaactaagggcgtctctaacggattggaagggagcgcgggtgtcaatctctcccacctcactgctccgaggaggagtctccgaaggcatcaccggagcatccgttctgatcttcgccatcaatcctctcaacacaaacttttacgtaatgaagcaaagagagagagggtttgatggtgatccttaggatctttgtcttccaaataatgaactagagggtcgccatgttttgcgctcatgtcttttgtcactctaaggtcttcctttatctatttgtctatttttagacaacccactcttcctcttctattttcaattttgattaaaaatcaaaatttcttttgttgaggggcatgggcattggtaaactcaaaacatcaatatcttgac

SEQ ID NO: 52721 - DNA, 477 bp, Arabidopsis thaliana landsberg
tcaaatgctatttatgcactccttaatactagtttcttctattcaagcaatgtataccaaagaaagcccattgcataccacttagatctgcatacatacctttgattaacagaattcatgaactcaatcatatcacttgattctacctgcacagggtccttcaagaatgtgaccatgccttttatgtggaggataaggccatgtatctaaccatgctggatctgtgcgttagacatgaaaaaaatgatgttgtccaacataccagttaaactaataaagctagcttccaaaaatcatgtgcttgacacaataccatctgaagcacatgcattttcatctccttagcattaccaagctggaccatgtatgctatctctggaagcgacacgttcaagtacttctgtgtcaatcgtataacgtaacactggtaaaagcatgacactgctcgcttagctaatccaccgctcttatactgaa

SEQ ID NO: 52722 - DNA, 750 bp, Arabidopsis thaliana landsberg
gcactcaccacggctttaccactaactggaagacgaagtgtgctttctttcaaggcttcagttgctccggacaaagaatttgagtgatttctgtccaaaagagaccattcttctagataacacatcttcaattcccaaatacaattatttcgtcagtctcaaaaaggttacaacattttaaaaaacatttctatgaatatgtcatttttttttctatgaatatgtcataatctctcttttttacaagtgaatgtcagcaattaaaaaaacttttgaattttgaaataaatatgctttcatgtttcttaacgtgcttccttgtctaagattcagaatgccatgagatgatgattttaagcaatcaagataataacttccacagaagcagaactaagaaaaatgtaccacattcacttgtaagatcgtaacggtgcagttatcatttggcagtacttaattgtattcaatttactttcccattataacaagaagtttttttagaaatactaagccacattcctgaagatacttgtttagtctcaaaacttgaatggtgccactaaatttaagctaagaatataaacatgaaaaagtttcttgttcaaagaattaaaattatgaaggtgctagaagttcatattctcacctgctccttcaagatggaagatagtttcagtttcggcctcatcaagagctacttgatccgtttcagagtggcagaatggcgcaattccgagattgatgcccatg

SEQ ID NO: 52723 - DNA, 1106 bp, Arabidopsis thaliana landsberg
  unsure (1)..(1106): unsure at all n locations
aataaacaaacattatacgtgttagaatcaggatgatcagtaagcacgtgggttgacttcaaagtaaacggattcaaacgactttgtcttccttgtagaaaaaagaggtttttttttttaacttcttttttgccatgtaattcgtgtatatcaagacaaaatgttactagaaactaatgtccacattcaacgtacgtagaaatgcaaatatttctagaaataattagacagttgcagaaacttttagaacaaagttgattttttaagaagtaacatcgtacttgtatattatcaaaaatcataatatcgtatattaatttatacgcgatgattgtgacgaatggaaaatctagagctgttgatacgggctcattcttacatatctttatcattggaaaaatagccaaaaagaaaacccatgtcaagtaagttctacgtcgaacctgtatatattcttctatacgtcttgagagttatattaagttctttttataaataagaaaattcgcataactccttaaatttcaattttattataaaagaatatggtccaccaaaaaattcaaatcacattttatagttttctcagatttctttggcaattagataggagagacgccaatggtagacggacaaatgcgttatgaagatgtgacaatttatcgatgaaagcattatcatgttttaaccaaaaaaaaaaaaaagaggtatcatgttgggccaatgcaagcatgtcgagtatcaaaaacctatgaaagagtcaaaattctgggtccaactttgatgttaaaattcatgttcgttttgatatctgtaactgttattatcagtccacaatatcaattgcacttcaatatattttttcctaaaattgttttggtgattatgagatgagatttctcctaaaattgaagaccgtagtttgaatattttttcactacgacttttaatcctataaaaaaaataaaaaaaattatgattcgatcatcaaaatcgcgtcacatactttagtctcgagaagtcagcccattatacaactaaatgggctttctaggtccattaagtctcactgcttccccaaatctgagaaaaatatcttncttgga

SEQ ID NO: 52724 - DNA, 801 bp, Arabidopsis thaliana landsberg
  unsure (1)..(801): unsure at all n locations
tcttatcctgctaattttccacaattcatcgaaaagaagatttcctagtgaaccactcaacacaaacaaaaatgaacagtcaaccagtaacatcatttctcaaatctgttaactttggggaaaatagtgtttatacgttttgaacaatagttttccactaccagcaaaagcagataagttttttttgacatcttttaatagactgacacataaacttaccaagatgattgtgcctaggaccccccaaataaatatcttgatttaggatttgatttgtgacccacattgatcagttttttccctttaccctttagtgatagacagctttttatattttcacgtttgtttatcaacaacttggcccttttagtatggcacatgtatatgtatcttgctcattctgttgaagtcttctatcgaattagcgaagacttcacatatcattttcaatttaaaaacatctacgcacacagagactaagataagcctaccatgaacattatcacaaaaaatatatataatctcaatatgttccattaactacataataaatatttatgtatatatctatcactggtggtagtggtggatcctgaggggtgacctccctcgctcatagtgggaatgatgaaaaagatatcactaacttagattctaaatagatgagtttagggattataaaactatatgataaagctttgctaaaatacaaaatataaagacccctgaacttttcaaatcgttntaaagatcttggtaggagcagacacagatgaacttttcaaggttacagttatgttg

SEQ ID NO: 52725 - DNA, 1001 bp, Arabidopsis thaliana landsberg
tttttttatctcagtcttatttttttttttttttatcagtcttaaaattatttgattttgatccttatatattttaataatctacataatgcgtaaaaatacacttttcacttgaaacggttacaagataaaataataaaatcatatgtaaatgtattaataatgaatgttcacaggtaaagaaggggtgatgcatatgagacgtaaaatacaatataggtattgctaactttaagatttcttgtaatgtttagtatcaatagctttaaaacaagtatatatattaggttcgaaagtaaacttaaaaggggttatacaactaagacgtataatgaaatataggtgagtttgttgaagactaacatcacattctcacaatcgtgcagtgagatcttctcaccaaatttttttgactcttgtgaatctacattctaagatctctctcatctcaatattatttaagaaaccattctgtaaacaatatatagcaaaacacaaactctctatactcacaacattgtttaactcatctttctaagttggtttcgattcaagaatatcacaatgactaatgttcgccttcctattctcgtctcctcggtcttgttccttgtctttatttcatcgtccctcttgttccctacacctagttttgctgctagagtaagtcattctctggtgcaagaagaggtcaaaaaggttccagaatacacagaacctgaggagccggaagttccagaagagccggagctgccctcaccggaggagcctgagattccagaagagcctgagattccagaagagcctgaggttcctggagaacccgaagttcctgaagagcccgaagaaccagaagagccagaagggtcaacatttgaatttccatcatggtttccgagctttcctattcccggtgttaatggcggtttgccaaagactgaaaagacaaaacctacatcaacagttgaaagagttaacgtttctaacaagaacccatagat

SEQ ID NO: 52726 - DNA, 574 bp, Arabidopsis thaliana landsberg
  unsure (1)..(574): unsure at all n locations
aactatnnnnnnnnnnnnnnnnnnnnnnnnnnnnnnnnnnnnnctaaactctttgattccactattctactgtttagtagtaaaaaaggtagaggagtcaatattttgggtccgtgattcatttttgcgatatttgttcattgcaatgttcgttacacttattaattagtaccaaagaaaaagaaaaaagaaagaaacaaagatcggtcgatatctaccaaagtggggacataacctgaaacttgacctaacctggtagtggtaggtttacgttaggcccgttttgtcttattaaaagcatttctcttttttttctcctgaccttacctgctcaataaaatttctatataattagctggtctgggggggggggttcttctttttttctttttttttttgtgcttcttctatcttacttttttttttcttctctttatctttattattttgttttttcttctttactttctttcgttttattttatttttctttttactttttcttctttttttttttttttctttttctctttttctcttcttttctttttttctatttctttacttttttttt

SEQ ID NO: 52727 - DNA, 438 bp, Arabidopsis thaliana landsberg
ggaaaggaggcatgtctagaagcactgacaagatttagaggactgtgcagtggaatgacattaaaggagacaatcttgctgaggttttagtttatgaaccaaggtcttgtcatccttaacaacactatacttgtcgagcattatttcacgtgcttggacatagcgtgattgtttgctgttctatcggaccgagctgttacttaaatgttaatgatatgcacatgggggattcgtatcggaaaccttaggttagttacgttacggcatatttgcgtgctaaaggagggagcatagtgatctttgactgagggtcgctctgatgccgaatggatatcatacagaaattcttatagttgctctagccatattgtaaaccttagattagtattgatttgactatttccaatatttttggtgatgagcctatgagaaacaatt

SEQ ID NO: 52728 - DNA, 423 bp, Arabidopsis thaliana landsberg
gattccgtagccgtcgtcaactagtgacgtagcgacaccagcgggcccacgtagcgcccctgctttgcgaccgccaacgctcggggaccaccatttcataattgaatagcactcacgtcctactacatgacctgtatccattagtgaacacatatatcacagtactggcgtagtatcatatatttcacatgtgaaacagtccatgcaggcttgacactgattacgtcgcgaatcacgcacatacatcggcacgccccgtatagaagacgcccgcgatacgagggttccgtaatctggcacgcacattgaactcagcagaattctcggttcgatgctcacgcggggatccgcttagatattgatctccgtcggttcaaccagaagaaaatgctcgtacattcgtttggagagcagtggaagacg

SEQ ID NO: 52729 - DNA, 526 bp, Arabidopsis thaliana landsberg
cgcctgtcttctctaaccgaaaacatgtttttcatgtaatgttgaatgatgtttctatttctgccataagactaatttcatgtttaaccttctttgtcaacatatttcataaagttttatcaacataccacaaggcctaatggtcgaaggaggaaactttttcctgtacacgaacaatctaaagtatcctagttatcataacattagatgtataaaacttattctcctatggctaatgattaagtcatcataacattagatgtctaaaatttattagtcgagtttcattgaggattattttgacggcaaattatattatgttatcaaaacgaccaatacaaggtacacactcttttattgtttccctctcaattttctttactcgacattttccacaggccaaatgagccatcatgttaaaaacaaaatcatagtatttttaaaattaagacaggccatttctatcgggacagaaagaattcaaattgttgaaatttacaatattcctcacataactcttattatt

SEQ ID NO: 52730 - DNA, 908 bp, Arabidopsis thaliana landsberg
  unsure (1)..(908): unsure at all n locations
acgcttgatttatatacgaaattgccaaaaacatttatttaaatttggtttttgccttcaatgacccgacagaccaacatgatgctctttcctcctcggccaccagaaacgtttgggcggctctcaacgtcagcgatccctacctttcttcatgtgtggaccttctccgatccttcttatattgttatacataaatttaaatattataaacgatatgcctatgtgatttattgtgattagatttagggtttataatataagttcttataaatattgagaagagtactgcatttctgttttcaccacaaaactatgtgcgattaaaacgatgtgctagctggagttcaatgttttaattcacaatttacgagactcctttactgctttctgttctgcattctctgttgcttctcgttaataattcttctgagatcatgcctacacttgcacaaccacaccaaaagaggagtactatatgaaaaaacctgtgctattattgcctacatgcatgggacaaaactatatttaatgtaatttgatattcttggaataagttgatgttgttgtatgggcaatagcgatttcaatgatgtcaatatggtttgtttaataattcctatattatatgccattatatattaattcatagtcaactgaaaagaaatgtgcattgtcaataatactctgaggaatattactgcttgcataaaataacattaatagtctaaatgatgagcccagtctcatcaattgcctttagcaccattacttcttgcaagttgcaatgcatgcacttgattagattctctataaactattattntgtttgttgatatatataccaaatatcttataatacaaatcacagaacgaaatgaaacgatatatatgagtttctaattactatc

SEQ ID NO: 52731 - DNA, 357 bp, Arabidopsis thaliana landsberg
ccggtagaactgacacgagacatcgttgcagtaccttaatatcagcaatagcttgtgaaactggttctttcacgttcaagtaggcgtaagagaatacagaaccagtgaagagtagaattccagtaacattctttgcagttgatgcttctcaacattacaccgtaatattagatacaatcgtccaaagacaagcctcatagcaaaccaaatcactgtgtctaaattagagtgagaaaaacataccctcagcacgagtatctttcatgaatgggaataacaattcaatttcatgttcaccatccgtgttacaaggctcgtcgttatgcaccttcagtccaacaaggtttatttcaaact

SEQ ID NO: 52732 - DNA, 296 bp, Arabidopsis thaliana landsberg
tttgtaacttgtttcctttgtatttaaatcgaactttaaaataaatcaagcatcgaggtaggttcgaaacacatttatgtagagagcttatatatactataaagactataaatagagcttatgataatattgaaaagttcatagatgttgcattaactcatttagtgaaacactcgaaaaggtcaaagttgaatttgagaatggaccaagccatgacacgacaagccactagactgattcaaacatacgttaaaatagtaacttaagacgcacgttaaacagctaatggtaattca

SEQ ID NO: 52733 - DNA, 431 bp, Arabidopsis thaliana landsberg
caacctgacggcgtcccaagagacccttatgatgccaccattcctcacctccgcctcctggaacgtccacccaaatgcctccgaagggtgtggggagctccctccacttctcggtcctgagctcagtgacatcaaccacgcaaacgcagctcttcgttgtgctcttccctggcgcttggaagatcttgcccctgccaacctccttcccatcgctgtcgactaatgatacaaggcggccgggctccagcgagaaggatctcgtgaatggacgtaccatcatcgtcgtgttcggggatagctctgcctgcgacgtttgctcagtgctgtccgggctcaacaggctaccacctttggatagagcagtcatcacacctgcagggggtagatagttgtcctccccggcactttctgaagactcaccgggaatgggg

SEQ ID NO: 52734 - DNA, 216 bp, Arabidopsis thaliana landsberg
cccgggctccggcattgaccaccgttcgtcgtgacgtgtgggagtgggagggattatgcatgcatggtagcgaagggaactcccgcgcgccggacgcggagcacacgtacacactcgtactacgaccgctggccactgcggacgcgagcagtataggtccggactcccgagcccctcgtgttgtcgctgccccgaagctagccagagggggtaggc

SEQ ID NO: 52735 - DNA, 123 bp, Arabidopsis thaliana landsberg
actaatagaccaatctggagttaccttatcgatgtttgcgatctgaatgccgaccctcagatgtaccaattaaatcatatcacaatgctaatgaccttggtgggagttgcttaatgccccggc

SEQ ID NO: 52736 - DNA, 704 bp, Arabidopsis thaliana landsberg
ctctccttgtgaaagaccaactcatattgggaagtcagttggatccgaggtattatcacacatctctttctttacatggatactgtctttctcaggctcctctggtttctccatgttccgagaaattagttttgctttggggattatatgagaagtaaatggtatatgaatggtaacatttctaaatccatggttcattggctatggatttgtggtttacagggctgatgttgccggtacaatatctggccatggagtagcaggcacacttgatggacttgtgtatatgtgggacttatccactggcaccaaactcggctctctccatgatttcaaaggtatacactgattgaagttttaactagatatatccatgaaaataacgaagtcaattctcaaaagttaatattgttacatggattttgtcaggtcaaagagtttcatgcatcagtactgatgattccagaaatatatgcatcgcaagtgaagatggtcagctcctagtttattgccatccggaaaagtaaactcaaaatcaatcaaggagggttacaacaaaaagatgttttgccaaaatgacttcaattggcttggttacatttttaagtcaactaagtttttatgcttgtaaacttttaccatatggcttacaagatgagaattttctactctagttgaaaaaactgtacaaaatgttaatgata

SEQ ID NO: 52737 - DNA, 2184 bp, Arabidopsis thaliana landsberg
  unsure (1)..(2184): unsure at all n locations
cacttctggttaatttttttggttctttgtaagtgtggtccgagttaagtgtatagaaaactcatctctcgcctagtttttggttttgttcagcccaagtcttttggtttcaggtgtaattagtcgggttttttgtagcttgcttatattacctttgttatttccgagtttcaaatgaagctaagaaatacgatcataataaaaaagttcttttgcagtattcattttctttcatggttccctccttattcatagtcattgttgttctttctaatacttttcctgagctttttttttctattggaaaaacttttgtcactgaaagaaatttcaatgtgattggttcttttcgcaactgtaataagcactaaaagttaataatttgctgctttttaagtcttgttgctgaatgatttaatcccaaagacgttaaaaaaaagacatgtaaatagtctttgttccaaaagtaccattttgagcgctttctttcgacaattgatgttgaacttgtaccaaataaaccttgaaaatcatacatcattaaatgtagttttttgttatatacttatattcatatggtccataatatatagttaaccatattatggaccatataaattcatgcagtcaacaactttttttttcctcattaaaagctactaatactgtagaaaatttttatcttacaaaagaaaggagaattattgtatttttattttaatcacatataaagcaaccaaaaataacatatactagtatttagtatttttaaattttttgcttaggattcaggttattaatactctataaagaaataattaaatctatccatcgaataaatcacacagcttattggatcagttaaatattctaataatattgtcgtgtagctgagatctgaccactgcaaaaatgaaaagaaaaacatagaagtagagagaagatcgcatctcgaccgtcaacttcagtgtatgaaataatgatcgtcccacttgatcctcaaaaatattattaaccaaacaaaatttgattccatcgtcccactttcttcttcttcctcccaatccgcctcttcttcctacgcgtgtcttcttctccctcactctctcaatctctagtcttctccgattcaccggatctttcctttcttacttctttcttctcactctggtggttatgtgtggatctgcgacctcgatttcaattcgaagtcgtcggtttcttctctaaatcgaatctttccaggattcgtttgtttttttcttttgtttttttttcgatccgatggaggatcctgatatcaagaggtgtaaattgagctgcgtcgcgacggttgatgatgtcatcgagcaagtcatgacctatataactgacccgaaagatcgcgattcggcttctttggtgtgtcggagatggttcaagattgattccgagacgagagagcatgtgactatggcgctttgctacactgcgacgcctgatcgtcttagccgtcgattcccgaacttgaggtcgctcaagcttaaaggcaagcctagagcagctatgtttaatctgatccctgagaactggggaggttatgttactccttgggttactgagatttctaacaaccttaggcagctcaaatcggtgcacttccgacggatgattgtcagtgacttagatctagatcgtttagctaaagctagagcagatgatcttgagactttgaagctagacaagtgttctggttttactactgatggacttttgagcatcgttacacactgcaggtacacttacttctcagtatcttgtagctactttggctcgatgcttttgaggtttagcgactccttatcatttcctactttgactagaactctagatgcatttggctctttttaaaaaacttaataagtcgtcgttgtacaaagaaccatatcttgagtttgtgtttgtaaagatttgatcttctttagctcaattgggtaagttgtaactttggtggatactttttgtccttaatgaaattggtgaaccttacttcatttgatttcttagtacactctacactaagagtaatataagcagaaacatttatttcagaaagtttcagtatttagggcgtcatgtttgtcttatatccctaatngcnnttgcactggtatgcttgctttaaagcagaaatngcatgatctc

SEQ ID NO: 52738 - DNA, 451 bp, Arabidopsis thaliana landsberg
  unsure (1)..(451): unsure at all n locations
tannnnnnnnnnnnnnnnnnnnnnnnnnnnnnnnnnnnnnnnnnnnnnnnnnnnnnnnnnnnnnnnnnnnnnnnnnnnnnnnnnnnnnnnnnnnnnnnnnnnnnnnnnnnnnnnnnnnnnnnnnnnnnnnnnnnnnnnnnnnnnnnnnnnnnnnnnnnnnnnnnnnnnnnnnnnnnnnnnnnnnnnnnnnnnnnnnnnnnnnnnnnnnnnnnnnnnnnnnnnnnnnnnnnnnnnnnnnnnnnnnnnnnnnnnnnnnnnnnnnnnnnnnnnnnnnnnnnnnnnnnnnnnnnnnnnnnnnnnnnnnnnnnnnnnnnnnnnnnnnnnnnnnnnnnnnnnnnnnnnnnnnnnnnnnnnnnnnngggggggggtgggggtggtatatttctttattttcttattctttcttttcattttacttatcttttttttttcttttttctttttttttctt

SEQ ID NO: 52739 - DNA, 337 bp, Arabidopsis thaliana landsberg
ctaaccaacgcaagaatgtgaaaaaataaaataaaaagttgaatctaagtaagaatttaataatataaatggtgaatattggacaatacagaaaataagaggtcacaaaaaatagcactgtgttcatgacggccgcacataccttattctcatcatctattaaaactatacaatttctgaccaaactaatgaagtttaatgttatttttcgtcaagatttaaacatattttagtccatccaacaaattcattagtcgtttcttactagggaatcatgacctagtgttttgtttacaagacaatcagacatgtcatatcattcgttgtacatctttac

SEQ ID NO: 52740 - DNA, 483 bp, Arabidopsis thaliana landsberg
ttgggactaagatagaagaaagggaacggtgagcagtagtaccggaaacgcgactgagaatttctgattgttccgtcataattcttcacagagacgaaccaaaagccattaaatgatgatatatacagggagatgatgattggcaaagatgatccaagccgaatcactgagtatctaaatcgttaagattggtttctggaaacaaggaacaactattttattttcaacgcccagcaaaattatctagctaggaaaaaaaaaacagatatttttcccaaattctacgattaaaatctatctatttaacgaaaattaccaaaaaaaaacttataaattacagcatattcttcgcataacagttattttaatttttgaggggaaataatattatccttattttcttttaaaaatatattaaaatggttcatattaacctattgatttggataccctaaaatcccaaatcgagagctgatagaatga

SEQ ID NO: 52741 - DNA, 539 bp, Arabidopsis thaliana landsberg
tgcattagatagttgatatacattatacagattgcaaatatagagtatcgattatggtgcaattaaataccataaagaaaactacgttccgttgatgtttgaccagtctttaacgcaatactaatgtagtctactttcataccatcgatagtgtaatatttagttgactttaaaagtctttctaaaatcagcattaattggtagtgtgtggatcacgaaattcggcggtcgactattcgacataaaatatataaaaagcttcattctcgtttggatcggcttagacgtgtaatagacatcgattcaactttgctaaacgctcttaaacccacttgaagtcttggacttggacctcaaagtcagacaccacttggtttagtagctactagctagtgcaactctatcaatttagttgactatcaaataaaatacaaaagtattccactaaatccaaagtgtatttgaatctacatgactaaaatcgtaaaaagtataactaaagatgtataattatgaaaaaaaaaaaataaacaaaaatt

SEQ ID NO: 52742 - DNA, 335 bp, Arabidopsis thaliana landsberg
  unsure (1)..(335): unsure at all n locations
cagtagctatggccaggggtnnnnnnnnnnnnnnnnnnnnnnnnnnnnnnnnnnnnnnnnnntaacgcctcctgaggcaacgtgcgatagaaaggactcagtgcgccacagacccagagcacagccctgtccgaaccccgcgagctataacctgcattagtgcagtcccacgccgatatctgcgccgaagcacgtagcctactgtaacctcgatatcacgactaacatataaggcagcaagcgaggaaacgacaagtcgaacttcgcccgacagactaccgagatttattatatgacaatagcttgcgccgggatgaagcccttctgcaacaagg

SEQ ID NO: 52743 - DNA, 389 bp, Arabidopsis thaliana landsberg
  unsure (1)..(389): unsure at all n locations
tagccttcttccactagtaagatttttatttagtttcaaaggcacaaaatcaaatttgggaggggtctaggtataataacaatgaaagattggtcttttcttactaaatcaagagataaaattcaaaacttaacacaattctctaattagtaatgaaatgagaaagaaccctaaattccaaaaactgcaaagattcaaaaannnnnnnnnnnnnnnnnnnnnnnnnnnnnnnnnnnnnnnnnnntagtgatactcttagtcataaaaggatgtgattcgagctttctcaaataccatcgtagaaacgcagggttgtttcaaaatgaaaaagacgaagccttcgtcgttagatttcgtgaaacggagaaaacacgaaggattacgaaatt

SEQ ID NO: 52744 - DNA, 624 bp, Arabidopsis thaliana landsberg
gttctgaactgagcgcttctttgctttgatgtagtgggcgggggtgcaatgtgaaggaaaacctcatttttgggtcgattcagatggttcttaccgagaagaaggtcaaaagcatcccatcgggaacatctggagtaaggtatggtttcctgatcaccagcttttctcgttcacaacattaaatataaaactaaagacaacgaaggatattatttttacagaagagagcaaaaattgcttgcgctgtgttctctctgccagttcctccggcttcgtctgcagtagaaccatatgatgtgcccttatatgagcagaagatgcttaacaagcttcttttgattggtagcgaaaaaggtggcgccactacaatttacaaacaagtgagctattcatcttaatgcctcccacttgaatgtttcacatctagtaaagaatcgggaattgacttcttctgtttcaggcaaggtctctctacaacgtctcattctctttagaagaccgtgaaagaattaaattcataatccaacacatctctatacctatctggcaatgtttcttgaggcccatgaaagatttgaaatagagatgagcaatgaccagtcttcaggtacatattattgactg

SEQ ID NO: 52745 - DNA, 949 bp, Arabidopsis thaliana landsberg
  unsure (1)..(949): unsure at all n locations
tataaaatccaatcgagctgtaagtgctaagatatatttgaattgtcaatatcacccagctaattaatagatttagtaattaatcttcatccaactaaccactagacttagtttttaattgtcatctaataatgcagtattaactaatcaacatatatatattaggagacgaagagagaaaactaaagaggaaaaatactataaatcaataacgaattaagggaaacgtaatctacttttaaccaaatttcaaatattagtacaaagaatactgtaattttatacggtttttttttactcatatcatcttataagtattacatgattcctgttttttttttctacaccacagtatttttaatgtgttacatctaatttatcaaataaattttatattttcataatatgtttttcattttgaatgttgacatttattattttggggttctataaagaataaaagtttaacgcattttcaattatattatctcatagtcgatttaatatatgttagaagaaaaaaaataaaacaaaactgtttaatttgactgtataactaactacccacatagctcatttaaattaaacccaatttcattatataatttgcttacattctaccataccattatttttatcactggtcatctcccttaacttctgaaatggtatgccacatactcatcttaagatcttttatatgattcactttttatgtaacactaaattatcggttgtacttttctggaaacctttcaagataaagttgtcttaaaatattttggatttgcatataagtggactaatcttttcctttcgctgtagtggtaagaaattgtatataatcagcagcaccccctagattcttcactcatgccatcaaaatttggtgctggtaatantgattcatcgttcgttaggagaatggaaatggactcataaaggcaat

SEQ ID NO: 52746 - DNA, 719 bp, Arabidopsis thaliana landsberg
gaccactaactgaaaggtaaaaaaaaaaaaaatcaatttgcttcatattaaccttacccggaaaaccaaacttacaaaaaataaaaataaaatcataagatcaagatttatcactacatgtcaaatactctgcatgtacattaagacacgtgaaatataagataaggagaaaaaaaacgaaatagaagcctttcggttataaaatttaattatatgaaaaggaatatttagcaactaataacctagcataaaagttgtaaaccgatgattatgggaaaacacatggtaatgactaatgatgaaatgcccattgccattgtgtgtgtgtgtgtgtatttttgtttttattaacactatagggcatttgaaaaaggcatagctaatcatagccaaagaggtatggaacatgttcgacttttatcattgtttatactaatctctcttaaatatttttaagcgacgcatactacaaatccaaatgggatttattgattgtattaaattgtgtcatatttaagatccataatgtatataattgacacgaatcccatgatgtaatggatatatgtatatataaatgttacaatattcgaagaatgtttaatgcttcatattcttcaatttctttttacttatttctccatatattgctttgattgatgagattgtacaagggtattttcctcttgtcatggcatctcatttattcttttaagctt

SEQ ID NO: 52747 - DNA, 756 bp, Arabidopsis thaliana landsberg
gcgcacacggataaatttgacataaaacactaatcttaaaattctacagactttgcagtgacatcttgaagttctttgtatcaaatcaaattgtctgtattcgaaataaaaaaaattaacatgcacattctgtcacacaagtaatgtacctcatgttcgcagcttgtgcggcttggactccagcaagcgcatcttcaataacaacacactacaaaattgtacaaaagaaaccacttctgaagtagctttactgaaaaacaagtaaataagatctgtaagtctagcagatgaagtaaacgtatactttacttgattttcagcttcaagaatgcgcatatataccgctaattatattgttggcacaataacaagtatattcaaatatagagttctctaaggcatgctttgttctctattcatgagacttcctagtgactacaaatggatagccatcgatatttttctatttcatctatgatttcataaaaggtgtgggtttgtgaaaatctttcaataaagcctcatctcgatacgatattacatgaagttttgactattacctcgctggtaggcacacctaagatctttgcagcagccaggaaaatatctggagctggtttcaaattctcaaaggcatctgctgaaacaatggcatcaaacctgaaagttaacatcgctaacatgtatttagaaatggaacctggacgcgcataaaaatctcgatgacatattaaaagagattacacagcagaataa

SEQ ID NO: 52748 - DNA, 211 bp, Arabidopsis thaliana landsberg
aaaaacaaaaaaaaaaaaaaaaaaaaaaaaaaaaacaaaaaagaaaaagaaaaaaaaaaaaaaacaaaaaaaaaaaaaaaaaacaaaaaaacaaaaaaaaaaaaaaaaaaaaaaaaaaaaaagaaaaaaaacaaaaaaaaaaaaaaaaaaaaaaaaaaaaaaaaaacaaaaaaaaaaaacaaaaaaaaaaaaaaaaaaaaaaaaaaaaaaa

SEQ ID NO: 52749 - DNA, 670 bp, Arabidopsis thaliana landsberg
  unsure (1)..(670): unsure at all n locations
ttgattgagacagtggtgtcggggaccggggggcaggccaggagttgtcggtggacgactacctagtgggcggagtcactatgtttgatgcctagactgggctaccgcctactggtgagttgaaaaacttagttcttcttagtcgggtgattctatattatctaacttggtttcgatgtagggggcgaggctgggcagctggcggtggtaccgtctactgtgctcgcgggcctgatgggtgcagcgaagggtgacacagggacctcgctggacccgtggtcaaaattttgtgtcgtcgctgaaggcggagagaacttgcctcggcactgcgctgttggcgtagtcgtgtctgtcgcacagcagctgcgatatgtgagtttttttcttttttttctttttttgttttgttttactgagtttggannnnnnnnnnnnnnnnnnnnnnnnnnnccgagtaggttgattcgggggcgctgacctcgcaatttgtttccaagaggaaacaacttgagggtagggttgagcgccttcggacgtagcatactgaggcgatcagggataagtcggcggccgaaaacaagagcagaaacattctcgagaagatgacggcgctgaagaaggaaaaaagatgacctcagctgctgacttaatgatgaaaaagagatctgag

SEQ ID NO: 52750 - DNA, 557 bp, Arabidopsis thaliana landsberg
gattatataatctaaagcctagattatgataatatcataatctcctcaacagtagcttatttgaaattatttttggtaaaagactcactacacatggttatgtaaatagaaaataagatatatgccatcctttttttttctcacctcaaataaataaacaagcgtactgttgtctttgtgaataatctatatttgtataatctagataaccaaacagctacatgtagattataatctgtttaaattataatctagattatataatttataagtttaaattataatctagattatataatttataaggtgaaacaaacaggactttagttaagcgatattccttttcccgaaagttattgccaaaccataattaatatcacgaaataaaaccttttggagggtaaaatgtcataaaaaacgtcgaagacattattgttgacgatgggtcggccgctataaaagtgaggtcagattcgaccaacactttctgaattcagaagattgaatttggacagatttcatatcttgtcgattactataactgtgacaaaaagttg

SEQ ID NO: 52751 - DNA, 814 bp, Arabidopsis thaliana landsberg
gaaggtttcttcaaaaggtctccatacacaaattctgcttccatggaatgtgcgatattgcttattgatgataatggctgcttccaaggttcttggctctttgtggtttcttccatttgcaagagctgcatttcaaaagttctttctgcagaatcaccacacacacatacaccgccaagtaaggaaccgaactccataagtcaacattgatgcgaataaaacataaaactcggttcaaaagtttcaacaatctgtcctgtaatcagagaatagaagtaccttgcagttttggagacgacgtcgacgactcttgattttgatccaggagcagaggaaaaaaatcatcacgaatggtagctctttcaatggctaaacaagaatctgattctttctcagtgcatggactgtaagaatcatcaggatcaagcgggtccaaaagctctcccataggagactcctcgccactagaagactctgctgatagaaacacatcatcattagagagggaaacaaaatcttctttcgtcttgacatgttggttagacactccagcagaatcgcagggtttgcttgctttatcgccattctcataactgatctctgataaacactccccgttagtagaggaatcaagcacagactttggggacgaatttagtaaactcgcttcaaccaatggctgcatctcttcatagacactagaaaaccagcgagttccttctcgtgcataaaaaagaatatacgaatcctgtgatagcaccatatcttcatctattctagtgacctgcggttgtcaaaagcacaaaaaggaaaa

SEQ ID NO: 52752 - DNA, 381 bp, Arabidopsis thaliana landsberg
agcgtgccttattgttcacttatgtctcttcgttttcctgcattttctctattccttttattccaccgggactgttgtgattgactgatttgcctcacaatgtaattatcatcattttaccccaaacctcccttgttatcactcacacacacacagactagatgttgttctttttatccaggtttatatgtccaaagataactcttagttttcactcagaactcagcatgaactctcacactataactgaaacttatctttcgcatcatgaaatccctttttcctatgctgtatatacatacatgtatctatatccaatatgtatattaacgcctgcctatctatctatgtatatatatgtatgtctacgcctgtatacgc

SEQ ID NO: 52753 - DNA, 1414 bp, Arabidopsis thaliana landsberg
cattttatgttacgtataataatatcgtccttatctcatatttgttttttgataaattgtatattcaaaatttaaaatagtaaatacgtgatttttcggatcatctcgagtctaagaccaaatcttagaacatggataaaaatctcaaattttagatattttgctgatcgggagagttgcataaaaaaagcaatatataaacttaaaaccttatgatttattacgtgtgacatttttgaccgaggaatgggataaagaagtggatggaagagaaagaatggtgagtcaccgtgagtgatccctaacctctagagatgtgtgaatagatgataagatgcaagaaaaaacacaagccacttacttgtactggtccgtgagaggaccacgacatcaacttgactatgatgataaacatacatactgtgaatgaaaggaccacaataatatgataacagacttaacaatgcaagcaaactttttcaactaaacataaacaaggattagcagaatagaaggaaccaaaatccaaaacacttattattgcttttttaataggaagctacctaaaaatatatctaaacattttgctgaacttaaaaggccatatttgagcttgacttatactttggtgaacttcactcttttccatcagccgcgcggagtgagcctagctgaaccggtgcttgagttccaaccacctttgatgacccgtaaagcgacacatcgcttccctttgctttctctttctcgatctgttcctttatccagaagtaggttattctaagcccctcctgtttaacgattatggtcaaaacaatatcagtaataaaagaattagattattatcttgtctttgagctacttaagtaaataatgttggtaccttcaatctcatattaggagcccaaccaagcttttctttgatcagattgttgtctgagttacgaccacgaacaccttccgggccaggaatgtggtgaattggaagcttcttttcctcaaagctgagaaccatctcagccatctcattcatgctcaccatctcatcgcttccgatgttcaccggctcacggaaatctgattttgtcaacctataaaacaaaaatgacgaaaatatcagccaattacgtctaacatacaacttcatcaacatcaggagataccctcacctgagtacaccttcaacacactcatcgataaaggtaaaagaacgggtctgaagcccgtctccccacatctcaaacctatcagtggaagtctgagccttcctacagaaagcagctggagccttctcccttccacataagttgatccaagcaaatattaatcccaatagtaaacaactaatcattcacacaaagtacggaaactgtttatctgtataccacctttccatgttccaaaagaaccataa

SEQ ID NO: 52754 - DNA, 652 bp, Arabidopsis thaliana landsberg
gtagaaagatacagcctcagtgatttcaacaatgctgcttcttactggagttacaactatacttcactgttacttcggtactcggcttccgttggttcaaggaagctcttttgtttacttggccccggttttggttgtcatcaactctgaggagttcagaaacctcactgagcatgtaagtttgcatatatagaaatcaaaaggaggattttgagttcttggagactttgcaataaactgatgttttagcttcgcacagaaatttcgggacacaatgagagaactacagggggctataattgttggttcattattccagtgcatattaggattcagtggtctcatgtctctccttcttaggtaattcgagaatcaaaaaaacggtggtttcctagatgtcactgatatcagattagacatcttaatgatatgttttcttaaattctattttcagatttattaatcctgtggtagtagccccaaccgtagctgcagtaggattagcattctttagctatggatttccacaagccggcacttgtgttgagatcagcgttcccttaatacttttgcttctcattttcacattggtaagaatttacctcagcttgaataatagaagcatggttctatctctctgataagggattgt

SEQ ID NO: 52755 - DNA, 1062 bp, Arabidopsis thaliana landsberg
  unsure (1)..(1062): unsure at all n locations
cacttcaccttaatttaacctcacaattaatcaatacgaacataaattaacattctttaactcgatctaacacaatgaagcaaattaccaaactattaaaccaataacgctaaaaattaacatctcatgtggtcagacatcgatggttcaatatagatttgtaacctcattcaccgaacaaacaacacaatcttaattgacgttgttcagttaatttatgaaaccaaacagtagtacattgatcgagtaactaataattcacatagatattttgttaatgtacaaacttgaattgaataatgaatgtagtagtattaacattgattaaaacagtatacaaaaaaaagtgacttctaacttcaaaacaaaaaaagtcgatccaaaactaacaatggcaaacattaaccacttttcaaactaaatgtacctttcaactatacttaccattaaatgtgtcttaactttttttttcttagtgacatacagccatgaaaaaaagttttaaaatgtatgaaccgaaatgatttaagctttgtaatttcatgatatttgacatgattgcctatatattttagatcacatgatggtaacgatcgatttcacattgcaataaaacaattatatatatatttcattgtcgtattcattgtggttgtttaataattaaaccaaattaaaacgacgaaattagtccactttctaattatgttagcatataaacaaacaaagcagacaaatggccaccaccacgttcgtcctccaaagacaacgatggtacgtctcttttgaccctactcctcactcacccaattctgtctttttttcccttacatttttctcctcatttgaaaaaaaaagctaaatcatcaaagtttaatttattctccatcaactatacgtacgaatatttggtgaaatcaccgacgaatacaatattcgaaaaaagtaaccaaatgattcataagttaaaaagcaataatcaggaatattgcaacaanatattcattgagtataataaccaagcaattcaacttgataatgtcatttctctctatttcttac

SEQ ID NO: 52756 - DNA, 407 bp, Arabidopsis thaliana landsberg
aaaaaaaaaaaaaaaaagggagaacaaagaaaaatataaagaggataaaaacagcaaaaacacacaaaaaaaagaaaaaaaaaaaaaaaacaaaaaaaaaagaaaaaaagagaaaagaaaaaaagaaaaaaaaaagaaaaaaaaaacaaaaaaagaaaaaaaaaaaaaaaagaaaaaaaaaaaaaaaacagaaaaaaaaaaaaacaaagaaaaaaaaaaaaaaaaaaagaaaaaaaaaaaagaaaaaaaaacaaaaaaaagaaaaaaaaaaaaaaaagaaaacaacaaacaaaaacaacaaacaaaaaacaaaaaaaaaacaaaaaaaacaaagaaaacaaaaacaacaaaaaaaaacaaaaacaaaaagaaaaagcaaaaaaaagaaagaaagaaaaaaaaaaaag

SEQ ID NO: 52757 - DNA, 286 bp, Arabidopsis thaliana landsberg
tggagatgtcactgcggttcgaagaagtgcgttcgcatctgcgcgaggcggttccctccattttggtttcgtgcgctttctctgcttggccgtgggagtgtgagtcgcacggttcgatatccgttacattgagcatctatacgattgtatcgccggaacacaagggttgcaaaaaaaaaacgactaataagccgggaacacatcagaactcctttataacgcatgcttgtgcgagcctagttcttgtgtcggttcccgggctggaagttgtcgcgttggcgccctc

SEQ ID NO: 52758 - DNA, 761 bp, Arabidopsis thaliana landsberg
gacagattgaggctatgcaggtaaattattgacccatatgttttttctgaaagaacttctcctgagattagaatcttacattaaattgtaacattgcatgcctcttatctgattggcgataggaaacttcatatagaacagcagaagcttgggctgctgtagaaagaactctgaattctcgattgcaggtgttatgaacaacactgctctatgctatattcagccaattatttttgttttctctatctttttgttcactttctagaaatattcaggaagcagaaagtacagctgcaacagctgaagaacgagagcgctctgtgaatgaacgcctctctcaaacattatcaaggatcaatgttctagaggcccaggttttctatgctttttgacactgttcttcatcaattttcgcagctttctctaaattttagcttacccagttctcctatccagctttcatgtctcagagcagaacagggccagttaagcaagtcacttgagaaagagaggcagagagcagcagaaaatagacaggagtatctggcagctaaggaggaagcagataccctagaaggtcgagcaaaccaacttgaagttgagataagggaacttcggagaaaacataagcaagagttgcagcaagtgctactccacaacgagcttattcaaaaggttctacactgctttatggacataacttaatctaataagagttagtcccatgaaaaatgccccatcagttacggaatttaaaggac

SEQ ID NO: 52759 - DNA, 649 bp, Arabidopsis thaliana landsberg
  unsure (1)..(649): unsure at all n locations
acaaagtattttttgactcatgaatttaaattttgctcgtataataatatagtcaaaatatcttatccgactaaggacatggaccccaaaagtgacgaagactgtatagctctatggttgcgatatgctagaaacaatatggttcattattataactgacaattctcagggttattatggtttaatggatgattgatgcttaaggtaatgcaaattaaacattgaacgataaattcagatagtatataattatatttttcacaaatagtatattaattttattaaaatatttcaactactgatagaataattacatatacaatttatcatataattttttttcgatcaactctcaatgaagattaaccacattaggaacaaacaatgcatacatatcctttctttgaatctaacaactataacaactaccgaatcattcacgtcttgacaactatctaatcgttcgcctctgtgcttttcataaatacatatacctacttataaattacaatcttctacatgtaaatacaatgtccactcagttttatagtatatacatgttctaaaatatatctccattaactatataggtatgtgcatatcacatgggtgacgaatngatcctactacatctactattttatgggat

SEQ ID NO: 52760 - DNA, 660 bp, Arabidopsis thaliana landsberg
ctatatggactggaacatatttttagtatttttcttttgcacaatactggcaaatcttttgttaatttgttgaaacattacattcgggtacatattcgttttgataaatggtacgcatttgttggtgattaatttaataacgcgagtaagatatcctgcccctaaccaaacattagtaaaggcttctagatttaataaaaagataaaacatagtagatgttttgtgatagaataaagagggtacattaacatattgatgcattacaattattcagtcatgagttcacatattcgatacatattctgcaaactgtaatacaagtagggttaagataagtgagcgtgcgtccaaaaatagctcgaccttgagttggttcctagatggaattagtggctgcaataattaattcctacccacaaagaaactttctttaagaaaagaaaaacacaaagggatagcaagaagataaacatgactagatctctgttataatgcatatatagattatagatatatatgtatatatatatatatatgtatatgtgtatatgtttaagtatcttgtagatgaagatcatggacatctatgggagttagtactctgtaaaccgtagacgttgtgtttcctggaaggagcagaatgtggaattggcaatgtc

SEQ ID NO: 52761 - DNA, 521 bp, Arabidopsis thaliana landsberg
  unsure (1)..(521): unsure at all n locations
ataatgagatcctctttcagatctgatgcccgggtttaaatttaatccgtcggttcagatcatcgtgcccacttagcaatactgctcaaatgcaccgatcaggctgtcggcgatcatctgtgccgggcggccctcaatctggtgacgttcgatcatgtgtaccagcttgccatctttaaataatgccatagatggtgatgaaggcgggaatgggaccatatatcctcttgccctgtctactgcatctttttccatacccgcaaatacggttaccagtttatccgggtgtttttcattggcagcggccagctttgccgccggacgtgcatttgcagctgcgcagccgcatactgaatttacgactacaaaaacagttccttcaccggtaatggcctgatcaacttctgctgctgttttcaactcttcaaaccctgctgtggtcagttccgcccgcataggttcaactaaatattctggatacatatatttatttttttctgctntgagtttacaaaggtact

SEQ ID NO: 52762 - DNA, 678 bp, Arabidopsis thaliana landsberg
  unsure (1)..(678): unsure at all n locations
cgnnnnnnnnnnnnnnnnnnnnnnnnnnnnnnnnnnnnnnnnnnnnnnnnnnnnnnnnnnnnnnnnnnnnnnnnnnnnnnnnnnnnnnnnnnnnnnnnnnnnnnnnnnnnnnnnnnnnnnnnnnnnnnnnnnnnnnnnnnnnnnnnnnnnnnnnnnnnnnnnnnnnnnnnnnnnnnnnnnnnnnnnnnnnnnnnnnnnnnnnnnnnnnnnnnnnnnnnnnnnnnnnnnnnnnnnnnnnnnnnnnnnnnnnnnnnnnnnnnnnnnnnnnnnnnnnnnnnnnnnnnnnnnnnnnnnnnnctctgtaatttagctctcttttgatcgttatttgtttttcatttctattctctccttgtttttgattctttctctttttttcctctttatttaccttttcctctcttattcctatcttcttatcttgtactttttttatattcttctcaattttctttgaatttctaactttacctttttattattcttttctattctttttttttgtctttttattttttactctattcattgatctttttttattttcgcttctttcacatttcttttttcaattttttctcttttttcttctttttgctcatttttctttactgttccctttttattacttttcttttctttccattcttttttctttcttattcttttcttcgttta

SEQ ID NO: 52763 - DNA, 417 bp, Arabidopsis thaliana landsberg
tgcactgttaaacactataattatgcagcataaatatatattcttactcacaatttcaaatttagaagatattggattccgtaattatattgcaattttgatctttgatttatctatagtgtgtataaaagttaaaaatcacgtgcattaatagatattcagtatattttcagtaattgttgcatgtgtgagttatgcaatcaaaaagccactaaatacataaatatattatgatatatgggccaatatgacccattagggcattagaaactgaaaaagaaaaaaaaaaacattgttaaatttagtagccgttggggatagacttgtcctgagtttcctcagaggagacgacgaaagggccaacggtgaaaagctctctctcaagcttgttttctaggagacgatagtctcgggaaa

SEQ ID NO: 52764 - DNA, 212 bp, Arabidopsis thaliana landsberg
  unsure (1)..(212): unsure at all n locations
tgctctttagctataaacacataagctttggcaagtgtcatttnnnnnnnnnnnnnnnnnnnnnnnnnngaagcacttgtgacctcttccgtgaagtttaaatggggaggagataccatttcggttctcgtgtctctctcctgtcaaaagatgagattatccaaaagacacgaacattagcagttataaacactcacccaagtgtcgttatc

SEQ ID NO: 52765 - DNA, 882 bp, Arabidopsis thaliana landsberg
gtttttcgtgtggtttggtcaatttttggtactccgggagatcgatgtttcatcataaacccgattagttacccttcagtttcggatctcgcatccacattcggtctaattagagaaacaatatattagaagaaaatggtttcattgcctccaagttaatatatgaagattaaggtgcgtgtagagtttaaacaaagtggaaacacaattaagagtttgttaagaaaggcatgtgatgttgtaattctcgctaaatcgctatagccaataaatccttctcccacgcgtctcttttgccacacccttcacttgttttcctccccattctccttatacttcccacgtggcattaacatttcatctgcatttttaaaaacccaaagctatattcctttttttgccatttggatgacctatctatttttatcagtaaatatagcttcttcactttgtccttcttcctattttaaatgataaaacacatttgtgtgttaaatcaataatgatgaaaacacacattgaatccccaaaacaaaacaaaatactttcaaacacaacttttttatttccttttaaaaaatatcagtaaaaaacaaattaatcttagtactaaaaagttgtatatatatacctgaaaaaaaaagagtgatgtgttttttttttgtcatcgtttcttctttgttaatatctaggtttcacgtctataggtataacaaatgctctttaaaaaactaaaaaaatcagagacaaaaactctctctggtttaatcatgcaactatgttattttaacaattttgtaagctcaatttcatgattcatttcctctctaaaaccctctccaaacccaaaagatagtgacgcatttgaggtcagccaccacc

SEQ ID NO: 52766 - DNA, 488 bp, Arabidopsis thaliana landsberg
agggtcaattagacaatttgcacatatacttattcgtctcacctgcactactcaatgtttgtccactaattgatgcccaggtccgaagctgttcttctttaccctctttctttaaggcgtctaaattatcacatcccattcgctcaagaaagtatttccactcatctaacaattcaaaaattagaaccttgcaacacaaacagagaagacagtcacaaatcaaactgaacacgtattgagacttacctggaaaaatcttctgcatataaaagatgattgacacactaaacttggtggaatgtagttagttcgctgaatagtctatatcctcctgataatgcggagtcaagacactgcaaccaaagcgttagccatcaattgatgatccaagcatgtactccttttctagtatactagagactaaagcaataatcagtatatctatttaacagaaagttgcgaccgcagacctgaatgacatcatattg

SEQ ID NO: 52767 - DNA, 1752 bp, Arabidopsis thaliana landsberg
  unsure (1)..(1752): unsure at all n locations
gacaaaaccaacatagaaatatcagcacagtgcagcattttcgcagggttggatcatttaagaacacattgcagcacgctcatatggtacctgttcactcaatgaagcactatctggcagcggaaaatgaatgcatctccattctccgtaggattcaaacaactgtggttctataaccctcataaaaatacctgtgtcttctcctgacccctcccgagactggagcaaatccagaattctaaacattcgaagaattattaaggaagtttagcctgttcaatccttcacagaaagagaactaaaagcaacaggggtttcataacttcgaaattcactaacctgtcaccatgtaccatcatatcatttgttactagctcaaagatatcctgaagagcctttacaagtttaccatgcagttcttcgcttttctcaacctggagttgctcggcacttccctcaacctggaatgtacagaagaacttacgtattaaaaatacccattggaactactacatttataagaaaacagctgacacaacgccacaagataattaccaggagttgaaccagctcaatacatttgtcatgcaacgctgggagctcagccatcttaaattcttcaagcaaacttgactgtctgatgctttcctctatctcgtttattataccagatataatcctgagccaatatcaaatatataaattaaataccgcagccagcagaaaaaaagcaaaagttgtaactagaggaggctactagaaggcattactttttctcaagatcaccaacaacaagaatctgaagaatgtacttcaaagattcatagcactcttttactgcgtagtacatgtactcgtctttccgaatccttcgatagagaacctcatccttcccgacaaaatcttttgcaatgctcagagctgttgaaaactagtaagatggggcagctatatttaccaacaaaccgaagttccaccaaaacaattgtgtagaaaatattttaaaatgtaccttatttgcaaggaggaaaatgggccaacggatgattcctgataatacctccgatgacagcggcatcgtcatcaaatctaattccctgaagataaaaatatacacttattagctatgtttatatgtcagaagtttctgactcagaactttacatgcaagcaatacagaagggagcaatttacttgttacttatcagatcttctgttctgaaactgttaatgacttggttccagaccaagacaaacttggccatactatttttctggccatcagacccctgcaaagcaaagtacacgacttttttatgaaactcatatatagtccagctcattaaaagatgtatagtttagtctttgggcatatacacatggtcgattcacacaatctcttaccctgcctaaattgaaggggaaaaaacctctttgttttctccttttctcatcttttgttgagtgtggaataagggatgcattgaaagctgaaggtaaagtatgaaaccggcctctcaacatgcctaaagttcgaatctgaaaagaaatagaggaacatgttaactctggaaacagcacacctggcaggaaaatgcaaaaaatgacaactcacgcatagcagaaacatgtgcttacctcaccaaggtggtgcagaacaccatacagtccaccaaagatcgtacagtaaactgaataccatatttgtgtatccatgaaatagacctgaaagtttagcatnagtctcagaat

SEQ ID NO: 52768 - DNA, 212 bp, Arabidopsis thaliana landsberg
caacaatcaaaggttaacgcttatatataatacaaataactctctatcagttaataaaaagaatagaatagaaaagaagagagagagagaggataacacctgaattttgagagtagataaaagaaaattttataccctttttatcagggtgttacatgttcactgtctggtgcgtgccacgtcagcacgcccgttggggtttcggagcaggt

SEQ ID NO: 52769 - DNA, 814 bp, Arabidopsis thaliana landsberg
ggtgatgcatataatagataatttatagataccgcctttcttttctggatttggcatgtataggaacctggactagtagcttttctgtttttttttttcttgtaaatcaaaattatcactcggtaactacaacccccacagggatttgaagaaacatgttttgatgattaatttctgtatattattcccaatataaaccaaagttggcagaggcaaaagattccattatttatcctaaaacttttttattttctcgtaatatttagtaatctttttattacagcattcaaattatagcagagtatgtacaatacaaggagaaaagattaaactaagatcagtgatcatcagctgtacataaagaagaaagatatgaaaataaaagaaagttaaagaagagacaaatgaaacccacaaatcatataaaggggctgtctggttttagattgtgttatttgaattcaaagtatttacattttttgttcttttttggggggagggggtttcttccatcacgtctatctgctgccttaggaacaagcaaaaggatcaggaagcttgttgatgaatagcagtgtcaggaagcattgctattgtcactatgaagtattcacatcctgaagagagaccataagggtttgatgttgttgttgctgaagttgatgttgagattgaacttgatgccagagttctcgagccctggtctgagcagagatgatgtgtcttacccgcctcaggagaagaagaagctgaaagttgtgatggcagtttcactatttggcgctctatgggacaatctgtccaacaatgtatg

SEQ ID NO: 52770 - DNA, 817 bp, Arabidopsis thaliana landsberg
ttcatggaagcagtacttaatcatggttttttattaatggatatgttctataaactcattttggcgaaacagctaatttatattttacctctttcatcatcttgctttctgtctcattctcctctacagccgtctttaagctaatttcgctgctttgcttttcatgtggctgaacagaataagaacaaatcacttttaaaaatctaaaattgtccaaaaccactggtcaaggcgagttcatggaagcagtacttaatcatttctatcttaccactacaacgaaagaagaatcgttttgttccagatactgttgactttcatctgtgggtgaaggaaaagagacattttcctgttgaaattcctcctggttgttattacatggggagagtatgttttgatttgtagcgtcaaatccgggtggaacagtgtcatccaaagtatcttgaacttcatttgtttcagtgttgttctccatgactgcttctggtccagaatctcctccagagactgtcttagaatccccaggttgtttcacgctctcagtctatcatatataaacaatggcagccaaatgatcaatctccttgtaagaagtttagtctctgtaggcatccagacaatgttcatatgtgtgaatgaagcaagtaatagcgatttaccttcctattccgcagtgccatataccgagtatttttaaaccatttattgacctgtaaaaaaacgatattgaagcacacgtagaaccaataaaaataaactaagaaacccaaatgttcattagctgtatgaatgagtttcataagcctcgattgatcta

SEQ ID NO: 52771 - DNA, 820 bp, Arabidopsis thaliana landsberg
tcctaaccctaaatcaaaaccactacataagcgaggtttcaataataagtagtagtaataataataatgataggatatgagtactaagcagagaggaaacaaaaaagcccatcctcctctgtgtctctcctcaagtctcaaccaaatacacaaacacacactcggaagtcttgtttaagcttggatgggaatgtcctgatgggtgtaaacaattccattgtctccgtcgacaacttgtccttttcctctcattatcctgcaaccatttcaccatgaaaattaaaagaagcataggaaaaaaggcttattgtgggtctttattgacataacaatggtgctttgagtaactaaaattgtaccatctcgttgtaagtaatccttcgaccccgactggaccacgagcatggatcctgcccgtgcttacccccacctatataccacaaccaatacttttttatcactcactcttcctcttttaatttgtttttaatctatagacttatgtgtatgtctctgacttacctctgcaccaagtccaaatcggaaaccatctgagaatcttgtgctggcgttgtggaacacagcagcgctgttcaaggtcgcaacatcttacagtcagtttccaagaaaaatcaaagacagataataagcaagttaaagattcagtactttacctatccacttggcgaaggaatagctctgcaacttcgtgatcctctgtcacaatgcagtctgtgtgtgcactgctcgtaacaacatacaagacaagataacgagtgaacatttccactacatatgcaaagaatttctaaagtcaatg

SEQ ID NO: 52772 - DNA, 1167 bp, Arabidopsis thaliana landsberg
gggtgtggaatctggatccccttgagaatggcttttttttttgcatttgacaatttacatatcacacttttgaaacttaaatgttttatttttttgtattttacataaaaatagaacattaaagtttcaaaagtgtgatttaaaaagtaaaaaacgcaaacataaaagttgcatttgtaaaaatcaaaacctaattaaacatgaaatgcacattttgttgttttgtttttgcagataaggaaattcaaggaagcgttggagaagcatgggagggagcaatgtagcattggagaaacaaaggggcttgaggagaaagaacttgtcgccatggctgcaaataaagacttgtcattcgattataaacccacatcgtgtggaaatatccaagagcaaaaaaagaaagaaatatttctcccgaaatctccaacttttaataaacaaaaagaagtagaacattctctactactagttagtcctgctcctgcatgaatggtctagcattgctgttaccatttgcttgtgtgattcaatatagagtagtcatatgcatatgtgtataatgttaattgtaaatgcaggttcatttggggggtataattgtgttaaagtttcttgtttaattatgtaaggtgagatagactcgtatttttattttaatctcattatcgaaaataaaataatgtatgttgtcatgttgtttgaaagaaaagagtagtgtaacactaacacatggccaaactatacgtgtcgaagttacatgaaattgtgagatgtgataattttcaaacaaagttttaataagaagtcacaatccgatagtttcgatgagtttttgttagaatgggacccactcgtatcttacaaaaaccaaacactccgtgaagtgggtcccatgtaaacaaagttaattaatctttaataaactgattggtagttgtttaataatcgatccactcttctagatttgtctttttctataatttaatgtcggaaaattgacaaaaaatcttattccggatcattctctgattctagaaatatctctctaaactaggggttttttctcataaaccaataccggggctaattttcttatgtttaacccccatattttttaattagtttttttggctaaattcttaattgggttaatcccccccatttatt

SEQ ID NO: 52773 - DNA, 674 bp, Arabidopsis thaliana landsberg
cataatacccaaaattcagatttgagctaatttagacgaaaagcagagtaagaaaagtaccaagcacgtcgtcgtcatcggaaaagtctacatctccatcttctgttccttcatgtgttccatcatcctctgaatcggaaaaatcggagtcgaaatcgtcggaattcaaagaaccaggcaaactctaaaaatcacccaaagaaaaaaacccagaataaatcaaatgcagaataaagatgttacaaaagagaagaggagcaagaagaatacatctccgtcgtaatcagaatcagttccggatgcttgtagaaggtcttcctcttttaagctttctgcttctactggtttcttctgtttctgagattttccagaaacgtttttgcttttggtttctatcagcttatcttcgttagctcctttgctcctcttcgtcatcggagcttccagaggcgagttttggcctgagaagaaatttgttttaagaaggcaaggggatgcgtaacaagagatttagggttttaggttgaagtcgtaactctctaatgggcctgagaataattttttattgaacaaggcatgggaatgcgtaacaagagatttagggttttagataatggacctatatactaatgggccttcgtgaagacgataaaagaaaaaatttaaaacctttg

SEQ ID NO: 52774 - DNA, 226 bp, Arabidopsis thaliana landsberg
tggtgcaggaaggagacagagcggtcgacgaagtcccacaccatgcgaccaagggtgaccattcattgagtccccaggacgaggtcgtaccctgcgagcggcatgacgaagaggtcgatgaagaatggctcgccctcgatgatgacctgggcgcgacgaatgactcctgggcaggtgacgcgttcaccgttggccacagtggccgtgaggtgtcggccagcggctg

SEQ ID NO: 52775 - DNA, 640 bp, Arabidopsis thaliana landsberg
  unsure (1)..(640): unsure at all n locations
cgtatgaaatgaaaatgtaaaaaaaagagaataaaaccaatcatccaaattcgcaaacctccaaggtggagccttaactagtgttacggtccactgccacacatacaattatttcctcgttttgggcataacaccgttttgtcagggaatgtctctcttcgtagtactcttcagcgtaaccccatttgtttatttatttattaatttgtcttttatagccccacaaaacttaagtaatcgaattccatacatcatcttttgttactgacgcttaatttgttgttccaaaattcaaaatcctcactctctgtgactctgtcttggtaatatttttcaacaaaaattgtttcaattgagtgcataatctttttggattagttatcctgctctaaacatgtggaggtatggtcattttgaaattctttaatcaagaagaagaagaaatatagggtttgtgtgcccagaaaaagcgcgggacctgcctgttttcacgagggacgaggactcgaggaggaaagattcttgatgcgtcagcaagacaagacacgtggaggaagatgaatggataggcagctggtgatgatgacacatgttgattatgagggctttgggtggtcgggtaagaaggaagcanaacaca

SEQ ID NO: 52776 - DNA, 605 bp, Arabidopsis thaliana landsberg
cttttaggtgagttattttatcttgctttgattctaaaataaagaccaatgttgcataatgttccctagtatcatcaggaagtattaacttgaatgcatggtaaactcattgtcgaagctagaaatataaaaagtgtcgaataacaattagtgtttttatatatcaatgtattttatcatagtgccttccgtatcttaatgtatcttagtattacatgttgactccgtagtcacgctcggacatacacctagtatatatttatatcccaaataattcgtttgatttttcatgtagtactctaacttggtgtacaaaagtcaaacgagcgagtattaagatacatcaattcccatatacagcagactcttcagccagcaagaatcattcatgtcacatgactcaaccaagcactacataaatgttaacatcacagtgtttttccaaaaacctgaggagcacagccgcagctgcggggctgaactagcaagcagcggagacgaagacgaagggcgatgatgcctccgagtccacatggctggggcgcatcagagattcagagggaaagggaaccttcccttgacgagagggcgaagaggatgacgac

SEQ ID NO: 52777 - DNA, 222 bp, Arabidopsis thaliana landsberg
gattactaagccatcaccaaccagttcgtcagtgactcgaacaggtccatgtagctcgcctgttactcgaccagcaacgtaggggtaatgcgacactagtacagatgagcgagcaggactgtcactagaacagggaaacagtcgctcatacaaacagggcctgagcgtcgggagagctgacacaagagatttccataagatcatggcatagcctgaatgatt

SEQ ID NO: 52778 - DNA, 999 bp, Arabidopsis thaliana landsberg
catttttgtgacaggtttgtgttattatttagatacatttcaaaatattacatatagttgttctaaaagttataaatttgaataccatcttatatcttcaagatatcaattgaactatatgttatatagaatttgatcgtgccctaattatgtttctcctttctattccataaattgtggacttcatgatatacctagaaaaattgaacttaattacatctacgaaacagattctcaatttttttttcataatatatagttgttctatatatatattttggtaatttctatcatttataagtatatatatatatatacaatgaattattgtgatataaattgattttactgatttcaatgtttttacttgcttttttatttcaccaacaacattctctttttttttttttcgtgtcccatatatattagtgtgttaagatacaatttataaatttaatggtttatagctataaattaaatttagatgattgtttaaaattctctcagtatagttgtctttaatacaatgttgtggttttgttaaaaataatcaatgattttcttaagaaaatatttgttatttcaaacatttacatacacgcatgagatatatgctagtattctttttttccattttcatttcaaaaaactgatatttatttttcatatctataaataacagaagtggcgccagaaaaattaactacatgttctaggttgatacctaagaaacctggaaaatgtgttaacgaagattgtgatcgtatgtgtaacaaaaagtggccaggaaagtctacgagtggtgtatgctttgggccaggcttcccagcaacaaatcctacaaactgcatgtgtactgtatgctgcagagacagacgtcctccttaattgtttttttttagctaataaaacttatattatattataataaagtaatttaatattaaattatgatataaattcaaatttgataatttgtatgtgtgggttgtggatgag

SEQ ID NO: 52779 - DNA, 822 bp, Arabidopsis thaliana landsberg
aatctacaccttcagcaattccaaaatcaatatccagccagtcctgaaaataaaagattgaggtatcatcagtgaaaatgagtatgttttccctcagggagatattctatatgttttagtttttgagtaaaacatcatttctccttcgtatataacaacatcaacactcttagattcacatagactctagtttgatagagaaagaactcatattgtgatgtagctacttgtctcttttatggtttcttaacattatttatcctctgttttgctaacatggactcatctagtttccaaaagtgtacatcttcaccattgctttgatccctcccaaatttaccaagtaaagtgaatcataactcaaaccttaaagggaagataaaaattacacaccttggaagaaattgttggaagcatggcattacgctctcgtactagacttccatctctccaaaacgtcaagttagctcgaggaagcaacaatccaggatcggtacatagacacttaacatcaggaccaatcttctcaatcacttcaaatctcaccatcccaccatcaaccagaagttcatcaccaactcttacatctacatcacaaacgaacataatcaaattgattcccatttcttactcaatgacaataatattcatctaattgcatataccttcagcgaaaccatcgtagctaacactaatggtacgttcaggacgagaagaatcaaaagctctaacagtgaaagtccaaacctcaccatcctgtagaaatgtcatcaccacccaagcttaaacatttaaatcacaaacacaaacaatgtctacatc

SEQ ID NO: 52780 - DNA, 880 bp, Arabidopsis thaliana landsberg
tctttgcaagactaaaatggatcagaccactgttgaagatcttgctgagctctcagagttagagaatcataacattggccaggtttgtgcgtgtttagttatctatgcaggaaacatatttttgtctactctttcactgttatgaaccatgtgaagcaccttcttatatgagagattataggcgtattttttctcactccgtgtaatggatgcagattcgtcgttcgcgttctgtctcaaacattgataatactccagaatctttcttggcctttgtcggaaatgagagcgtacatggattgtatgatcttctgttaaattataggtgcgtttgaacatcttttagaaacaaaaaaaaaattcatattgtgcacatgtaaatcttgttaatgaactttgattatgattggaagtttgtaaccattgtttctcaatcatgtgtaggtcttcttttgaatttcttcctaccgcagatgttcctgtattatattcaccagtgccatttcagaatgctgcactgtcttctcccgaggtagattcacacattcgatgctttgctctgtatcctgtggttctcttgctgtgacatccttagtctatgataacacttcgaggttattttttcttcgatctccagatcaaatgctctgagatggtaaaaacagaacatacaagttgctacatggttgagattaaaggtgaatatattccgccgtggattattagcaatatatgtgcaaatgtgggtgctaatggacaaaactttgaagccaggttcgttgatgcaccctctctcctcttctcttccaaaaccaaaaaactaacagtcaaagtttggaaatgctaacattcgatgagtttgattcagctgtgtgaccga

SEQ ID NO: 52781 - DNA, 1067 bp, Arabidopsis thaliana landsberg
acgttataatagaataactgtcttttattttgcaaatgtttctaatacattaagtgggcttttatatgaggttggtttgagtatttggtcaataatttgtggcccactacttttgtatgattgcatattgttatgcgtcaccgacgtgtacaattctgtcgattaggtcaagcaaatatttcaaattagtataaatattgacgtagcgacgaacataatttagtaaacaaaatatgaacttcattccagatgcactagtaactggcataatccgtcgcgtcggttgacagggctttcggtaccttggcccattcattgtagattgcccttggcttcaaagccaagtctacacatttgaagttttagccgatgttgatctagacgaattcattttcaactctcggcttggaagagagacatccatctacagtcatttcctgttataatgcgcgactgaaggacacctgacagcatggtacctcgaagctctccgccaattgactcaattaggtccaacgcaagcacggcttgacatgcttgtagaggtgtgtacatcttccatttatgcgacgtttgctttagctatgatgctgatatgatgtggtgcttatgaccaaggtgtttacgtcaccaaagctttctttagaagagttgaaactcttcaagaaagagtagatattgcgaatgtggttgaaaggcagataactccaaagcactaagctaaagactactttatatatttatatactttccatgtaactgtagaatctatcaccatacattttcttcctacataagtaaattaaatttattaaaggtagccaccaaaagcaaaccatgccaagagacatagcttcaaaagaagtcgatgatcctttggtgttggcatggtttgagctgaatacttataatttagaggctaggaactttacattgtctgacgtagctgatctttttacttggaacagaaaagaaaaaaagttccaactaaggaaaagatctacaaaaattgttcgtgctagctatagttcacggaaaatcgaaagaaatgttgctttgaaaatgct

SEQ ID NO: 52782 - DNA, 1080 bp, Arabidopsis thaliana landsberg
cactattctataaccaacccatggagaaaatggctgatgctggacttgaccttgatccttgttaataatcttgagcaacaactctcccggttttcctcgctgttggaaattccaagtccatgatggttctcgccatcatagatctgctcttcaggtgagactaagactattgtttttggtcacatttgttacgccttctcttgatatcggcaatcttatggcaattagatatgattttacaagggaaagaacatatgtttgaaatgattggtattctttgggcagcaccatattggttatgacatcgctgggtgctctatcgttctatggtgcaagccagctcaagtttcactgggtggagcggtacgacaaactactggttggttcagtcctgtgtttggtaggtatcttaacccttctcttccatgatcatgaccatggcggtcatgaagcacatcaactccacaggaaaatcattactctttagataccgtttcgagtctctgttttgcctatctgtcatgtctgtttgttgtagagcgtcttaaggtctatgaatctttctgcttcgcgttgtatgtctataactagttgtaacgctctctgttgcacgtgaagaaacatatggaagcattaaattccttaaatagaacaactctttggaggtctagtgtaaggcttgtagcttttacataattttgtagttgttccgttgataaagttgggtttaatttttgtaatacaacatagttgtcttcgagtcataacataatttagatcttaagctcttagtggtcgacttttcctataactatggttgcaccaaacccgaagctaatctaacattatcagtttttacatatgtttgattcttcattcactccaaacaaagaattatttatgcaaacaacttaccgttgcatttacttcgaggaaataacttattcgataatgtgtataataagtattgaagaggaaaaaactgaaacacatgttagaatagaaaaaattgggataaatttaacaactaactaatcaagaggaaccgacggcttggctgtaagagaagtagtcggaagg

SEQ ID NO: 52783 - DNA, 1113 bp, Arabidopsis thaliana landsberg
catttgcaaagcccattcttttaccagtttttccctttggcaataaaactcccaactttcttccggtcaattctcatggggcttccagacggccccattatctttttaaccagcgctttcaccggtgactctcctcttacattgctatgctttccagatccagaaaacaactacaatctctgcaggaattacacacttttcttcgctaaatctaagtctggtctcatccatccattgcagcaatatcaaatacgatgagctcaagtgcataccatgtaaatccaacttaccctctaccgcgttccactcaattgcttcatctaaaactgatgactgagtcaattcatggaccagaagtgcttcgtcctcattcagaaaagtacgcagttcagaaagagaaaccggacagctatccaagtctttcaacattgatatgatggtaggacaagaattcaagaccgagttatacgtccttatggagaaaagaacattaaaacccttcaacttctgtaaccaagaacccatttggggcaatgcatcatgagctccataggaagagagaaccatatttgaacaaactgtgtcgattttgtgaccttctgttcccattctgtgtactactctgttcatatcgtcaaacaatcctaatcttccatagccgtatagaacagacttatattcaaacaatcccggctttattttttccattctcatctcctcgataactctttccgcatcatgaggctggtccatgttacataatccagaaaccatagacttgtaagcttgagttttgacataaactgatgatgatctttggattatctctctcaaacgaaaagatgcttcactgaaaccttgtatagacccttgtttagaatttgattcaaccaaattgcagaggaagagagtaaagtctctttcatttgacttcagtctcgaaaccgcagtagaaagtagcgtttctgattcatcaaatctttcttgtttattgagcaaagcaataagttcagcaatgagtttagccccccactccaccacgacgcttcagtaatttccaaatacagaaagagaagaaaacaacaaccaatataaagtcatttacctgcatca

SEQ ID NO: 52784 - DNA, 994 bp, Arabidopsis thaliana landsberg
gctctaacgtgttatgttatgtgtacaatgtaaacggcaatgaatattgaatgttatcatgaagcctgcattattatccaacttggaaaaatcaagagtcaagacacaaactaaaggcaatcaaaagaaatgaaaattatagagaggaaaaagtttgttactttcttaaatctttttgacattattaagcttatcttatacctttttccccaaatctttttgacatcaactttatggataatagcattcaaaatgttcattttggtcagttatttttaaaaatgttttattagtttatgaaacataagtttctatcaacaatgggtatttccgtatttttgcatgaactagttaaattatcttttgatcatgcatcatggaaaagaagaagcttttagctaatcttttatctttatgaaggtggaggataggattcctttaggcctttatagtgtcgctaaatttcttaaactttttgggtctaagtcaacttcaaaagctccatataatttttttttatttctttctctctttttttttttatcccgttctttaaatttaatacgctctgtgaatttgcgaaacatagttgacgtaaacaagtgaatctatctttttttagtgttgctgttaggcccaaacttggcccagcctaagctctttactaaatcagaccccaggttcaacaacaactgtccaactccatacgtttcttttgttcgtttgctatttacactccagacatttgttttatctggtttgacaatttaatttaccaaaattggagctaggttaaagaataactgaaatttatctaaattttagtttatacagtatttggtgttgttgggcctaaagcaaaaatacagttttggggatcaattataaacatatgtataaaacagtaacaaaaattttcaaaatttgggttaagactcatgaagtcattaacaagctgatctcatactgctcacaaaacatttcttagaaatga

SEQ ID NO: 52785 - DNA, 718 bp, Arabidopsis thaliana landsberg
gaaacaaaaccagaaaaggagaacgcagatacacgcagagagctcctccgacagagaaaaaaggatcctccgagaagagagtaagaagatatcttcacaaacccctagcatttcagccacgtcattgcaaattaaaggtgagcgagtgatatgtggattcacaatactcgatttatcttctcactttccatgtttcatttaacatatggattgatctatgtgtgatatgcatgtgacgacatgtgatgtgttgatacgctatttagatgatgtgattacaatataagatatagtatgatgatgctaatcatgaaaagatctagaatgtcatagtatggttgatgatgctaatcatgctatgatgatctgacgaccgccagcttctatctgaagtgaggaacataataagtatcaaaacctttgttaagcccacaatcttacatgaatggtcggtttataaattgtttcttttttttttcaaaatattttgaaaacgtgtcttagtttatggtttatagttttggttgtgaattttgtcttgtgtgtgatcagaatgggacctacgagagctcagagaagtgctgccaaacagagagtggaggttccaaccacctcagccgagagtgcaagaaatggagacaaacagtacagtatgttagtggaaatgagcatacacaagtattggtgcaacaggtagccggtgttctcaagtaggaga

SEQ ID NO: 52786 - DNA, 481 bp, Arabidopsis thaliana landsberg
aagctcgtggcttatgaattcaagtttaagcgaaaacaatgcttctttttctttgattattatctatctagttgagggaacattgtgtttttcatctgatctgtcttgtggtaaagtatgtcaataaagcattagttttgcaaaccgcatgcatgtgatattacaaaattcacggtgaattcgtaatgcgtcttggttcaaaatagaaagagactaaacattgcagatttcaattctcagctacagaaatgagtgtttaacggatacagaaacagctctcacaatcttcattcatttcatttagctactactttccaaaggaacttgaacgcatacctttttcctctccagaagatcatgtttgtctgcactctcgtttgcctcagtatctttctcctgatgctcttcagatatatgttccaattgcgaacaatcaacaggatcaagtcccgatcttttcctctgaggaatcacagtgaag

SEQ ID NO: 52787 - DNA, 529 bp, Arabidopsis thaliana landsberg
aaccaatacttttatccatggttgcctccacgttgtggcatttgtaaaaaatggggcatcaaacggaagtttgtcttgcagtaggggtgaaaatactacagcccaccacgggtgaaaatactacagcccaccacgaaaaaaacgtccaagtagaaatagtgaaggaagtagagaaggtaggagatgtttccgttaaggatactgagaaggtaacccaaaacaaaactctatcagcgatgcaaaaagttgatgttgaagggatgggagacaaggaggaaggttctcttgaaattgagcaggatggaagatggattactccttctaagactggtcgtagtccaggaaaacagatcgttggtctaaaatatggagaggtttccatattatctaactcttattcaactccgaatgacaaagtagctgctgaggaaaaaagtgacaacttcatagatgatctccatgcaaatagcactagtgatcatgaacaacatgaaactttaaatgcaagggctgcagatgtttcagtata

SEQ ID NO: 52788 - DNA, 583 bp, Arabidopsis thaliana landsberg
ggtcttctgcagctaacagtgcatcaagcataccaaattaaacttgtggagttcgcaaaagaaacgaagaagagacagttcagtaaacaatatttgcatgatgtgatatgcatgttacactcttgaggggcggggatcatcttacagccatatctcctaatgattttccacagattggacatgtgtagtgactgcaagtgtaagcctgaaagaccagagtaacagcaagtgttttgattttaggcgttaaaagttaatttaagtttaatgagagaaagagagatttgcaaacctggaagcaagctgagtgcatgtagtgaccacatggtaaggctctaactgcttcactcgatgtgaaaagaaattcgcagcagatggggcaatttgtctcgaggctcttctcgaggcacttgtggtttactaatttcatccctaggcaacagttacatgtcatgcaatggaaaaaatcgattcctagtccttccccgacccggcaaaggttgcagaatggacagtggtaaacggccctgaatgcagataattgtttctaacggttagaatagcttctgaagtttgatttttg

SEQ ID NO: 52789 - DNA, 1021 bp, Arabidopsis thaliana landsberg
catgtcgactctagagtatcccctcattaaggacttctacagtagccctctaactgcaaggtatatatatgtcccaattcccaaagaatgatttgtctttggttctgctcactgttttcaccaatgctgtatttggccatatgaatttgatagatgccattattaatgtttgctcatgcagtggtaagccccatgatgagaccatgctagcaaaacttgaaagcatttatactggctcaggtgaccaaggatcaacgatggtcagtctgatacctctgttggtacatcttccccttcttttttcagtgcctaattctatctgtatttttataccagtttgcgtttaacatggaacaagggcttcctgttttgcccgaatggttatgtttcaatcgagtgactggacgtgccaggaaaggcatacacattggaccagctcgtttcctttttaggtatgctaacttcctttgaggcatataattttcttgaggtctctatttaccttttgggattcgaatcatcatttctaaagttttatatagtgtatcttaccttgttcatgtttatagtctgtctggtggacatgtggtgggaaaattttcacctcatgaagcattcgtcatcggtggaacaaacagcgtaagaggttacgaagagggcgctgtaggatctggtcggtcatatgtagttggttcgggggagctgtctttcccagtggtgggtttttctttgaacattcctaagatctcatttcacaatggtgtaaaaatcatgactctcattcttaccctattgtgcagagaggaccggtcgaaggcgtcatttttacagattatggcactgatatgggatcaggatccaccgtcccaggtacagactaggctttcggtttttttttctccttctgagtctttccatatatgcttgtaatagctttagaataacaagaaaccttcatctttgttattttctgccctttaggtgatcctgcgggggcaagactgaagcccgaaagcggtta

SEQ ID NO: 52790 - DNA, 542 bp, Arabidopsis thaliana landsberg
accccacggacgaatccaagtgtttgaaacggtcccctttgttaaatagctatttattttttagaaatgatgacacatctctctcggttcttgatttcactctttcactcttttgtctcatttcttgtaagaacattaatcaaagcttgttgtctttttatgttgctatgtcgctctctcaccgatctgttcctcctcgttcagtccttttttctccacactctcttcagaaaatttcaaaagactttgcagagatgatgctattgacaatgagaatgaaaacggtgctagatttcaaacatccacatacagaagaattacagatcaagattgtacaaaacagatcgatatacgatcgcgacaaacaccatcactacattgcaagatgcaattactaaacggaccgtggtttgtggtcctgtttttctatcaataatcagaaaagaacaaagactatggaaaactatccttgagagttgagtctctctctatgttggactagttttggtatcttaatctttcaggcccatgagccatgcatg

SEQ ID NO: 52791 - DNA, 497 bp, Arabidopsis thaliana landsberg
  unsure (1)..(497): unsure at all n locations
atgggagcacccattgtaagatttactcagccgcaacattctcattgctccctccatttccagaatccggtgaggtttgggagatcggtgcgaacatctttgacttcttgaggaagattagtatccgaagaagaatcagattgttcttgagttacctctgtttcaccattcttgttgctttcctctttctctgatgtttcctctgattgcttttgttcagtatctgaaacgctattttctttgctagattcacttgtgtcttcgtcagtcttcttctcgttttcctcaacctgttctttcttctcactctcggtgtttacattttcctgtgattcgntggacgatgactcttctttctcttttgtctcgggttctttctctttagtttcctcttgcgatgcagactcttctttttcaatcttctcngtttctttctctatagattcctcttgcggtgcagactcttctttctcaatcttctcgctttctttggcttt

SEQ ID NO: 52792 - DNA, 1205 bp, Arabidopsis thaliana landsberg
ctatttctcataacctcattatatatataagaaaaagctaaggcatcttatatttatatatacatatatcaattgattgctaataatgttttgattaactctgcatatggcatgttttccagcgatttaagttcacaaagaagattttcgtttttgtcatcactaaaaattatcgagttctttctactttttcagcgtacaataatctttttttctatcaattggtacgttttttattttctcaattttaattttgttttctaggtacatttttaatcgaattgcaccaaaatatccaaacaaatcaataaaacaggcagaatgaggtattaccgtattagttaaacgagaagtggctactttcctcagcgtgattaaaatgcttatgggttcagtttcataattctcatatacggaactacgcatttgacctcatgctctctataaatattaagatctgatgttgagagcccattagaactaagtttacgaatgagcccatgatagtttaacttgggcctaattagtgtctaatctgcttctaacgttaccgagtcaaacgcggtctaaactaatttgtagagcagtgtctttgtccaaagcgtacccacacaattgctgagaaacttcaaaccctaagtgtgtgtctagtattttgcaatatacgacgcataaagaaatatcctaacattgacaacaacaacaaaaaatcttagcggagatatagacgtgtgagacaagagctcacacgtgttgcacattcgagacttgttgataatgacgacaacaagaggttctagaatattcttgttggtttcattattattagcaaataagaccaagtcaacaaactaacttaaacattgtggatcgtccacttgtccgactcttacgtcaaacccatcattgttccacatatctccacgcgtcaatctctctataaatacgaacaaatgaacacgtatcaattcaactcaaaaagtaacaatttgaattacttctgcaaatctaaaataatatctagtgaagcgaatatgtgtttctttgataatcggtgcgatcagaatctgacggtggtggtggatgtggcgtggtggatggaggctgttcctccacaaatcatttctccggcgaagccatcggtttctccgattctagagaccattttagaaggcggagagacccgagaagactatcagaacaag

SEQ ID NO: 52793 - DNA, 499 bp, Arabidopsis thaliana landsberg
  unsure (1)..(499): unsure at all n locations
gcggatttgcgcggaccggccgatcatgannnnnnnnnnnnnnnnnnnnnncagtactagcttggctttttccggtgtcgtgatgtcgccgggggcgatcagggggataccgacagcctggcgcacggcggcaatggtgtcgtattcggcatcgccggtatagccgcaagcgcgcgtgcggccgtgcatggccagtgcctggataccgatgtcctcggccattttcgccacggtgacggcattgcgattctgcttgtcccaaccggtgcggatcttgagcgttaccggcacatcgacggcgccgaccacggacttgaggatctgggcgaccagaggttcgtctttgagcagggcggagccggccatgacgttgcagattttcttggccggacagcccatgttgatgtcgatgatctgnnnnnnnnnnnnnnnnnnnnnnnnnnnnnnnnnnnnnnnnnnnttgagatcggcgccggcgatctgcaccgagatcggatcg

SEQ ID NO: 52794 - DNA, 1264 bp, Arabidopsis thaliana landsberg
tgagaaaaatacacaaactatagtgattgacgatgcttttttttataagccttactcgttaacagattgttggatctatttttttcgtatttgatcttacgcttatgcaaattatgtttctggatagcatttcttgcttaaacttccatatcgcataccgtatttaaaaccatatgcttctgataacagttatgaaatatcaacaatatgataccaaaacttccgtatcatagtcactttaactatctttgactttgttttctctcaccattatatcccgagaataaattatgacgtctcagtatagtatgagccatcttctgattgcaattatatatatatatcacattgttctccacatcatccaatgatagcatgtatccccaacatccatgtatctcttccaacaaatctatctggatcatataactcctacttttatgtgtcttggtttttagagccacacaatcctcaactagagagtttcccaaatcttcaaaaaatccgaaataagtatcaaacaatatctcaatttgattttcttctataagtaaaagaaagatgaaatgtcagtagagatgacaccaaacaattttgggttgaggaacttcaaaatgttttcaagataacaccaatcagttgaagggatggtgaagaaaacattctgacctgagtaatccatattataaatctcagagaagatagtaaaatcagtgatgatcaaactacttaccaatataacgctctctaaagacgaagagaaaaaaccaccatcgttttcaaccaacaaaatgttatagccatgtatgtgttcattagagacaaaaccaattgatggacatacagtttgtgagagcgacaaatgagatcgactacccagggacacacgatggagagcactttgatcgcgttagtagtaaagatagaatcaatagagaaccgtaacaaaacatgggaatccagaacctcgtcttgatggttagagagaaatggtgaagataagcgatcgagtaagcggataataaaatctatgaaaatcaaagttcaatcgctagttaccacattttacagttgtaactccgacaatgaaaattatttactttagaagagaattaaacaaaaaaaaggagtcgccgacaaaccaaccctcattaatggctttaaaaaaaagaaataaatataagaaaccaaacaaagaaataacaaaattaaatttcttttcacgaaatattttcgtataatttttattgaaaaaatattcttt

SEQ ID NO: 52795 - DNA, 1173 bp, Arabidopsis thaliana landsberg
aatgaattttttagaatgtacctactacatgcaagtaaatagtggattagacaaaaaccagaaacgaaaaatttaaaaaacgtgccgttgaacaaaaaaaacacgatgatgcaaatccataattttttaattagcagttcactatctttcgccagatccgtcactattgcgcaaatttcatgtcaaacagaattgatacaagaccttgagcttgcttcaccaaattgattctctgagtccaagttgcaaagcaataaataacgtcgttgcatgttgctcattgcatggcaagtctcaattgatccgaatgtccttctttaaaatatggttcggtttggctccaactcgatcgtcaaactcaaactatattaatgactcttcaattgtctgtcttttattttattttttatctaccaaccaatccggtccaagagccaaataattactttaccaaaaggttcgattttttcaaaatgttcgactaaattggcttttgtaaaaagcttatggcctactaggctgcataaactccgaaatcacaaacttggatattcataaagaggttccactttattcaacttcttaattagaaaaatcttatagagacgatcgaaccctcttatataatttaaaggttctagtgttaggcactagtttgcttaaggagatactcatctatctctttgaagttcttgacagcaaagtccttgatgacgtgtgggtcatcaatctcatgggcggtcttctcaaactcaccagaccatttcagaaggctgccaccgttcttaggaataacggtgatggttcctttgaacgttttgtagtactccaacatttcgccgccaatgatgctgtatgacatgcttttgttctccaaatccactgcttcgatcctctccgccgatatcttcaccagtggagatcctatattgcggtaaagagtagaaacaatgagcatttttaaaataaagatatggtgagagagtgatatatagtcattgatgacatagatcatttagggtttataatgagttattgaccattaagtaacatgagttatatattattatctttaatacatacaagtcttcctatctagaaccaccattgtttgtgtctttgacagatgtcttcatgaatgtagtgtcaatcttgagtgcgactagatttatg

SEQ ID NO: 52796 - DNA, 487 bp, Arabidopsis thaliana landsberg
  unsure (1)..(487): unsure at all n locations
cgttcacttcaccaccgcgcacacgaaagggcgcgcttgccgttcgccagggtcaacaccaagcagggaccctgcgaaaacgcaacgccgaccaccgaaatcatgaggattatagccactcgcgggggctttcggacaatcttttaacgaaagccggaagcccgtgttcagtcaccggttgtttcattggcgaacgttttgacgcacccgcgcgcggcttatgcgtttgccgacgccggcaggtccagggacatgcttctgtggcgaatgccggcctccatgaattcgtcgccgaaagcgacgaaaccgaagcgcgaataaaagccgatggcgtcgacctgggcatgcaacgtcacttgcggccagccgtgttggccggcccgttcgatgagccggcgcacgttggcnggcaccgacgccgtgcccacgccaggccggcagcacggccatgcggccgatgctgtgcgcgggggtcaggccggccgtg

SEQ ID NO: 52797 - DNA, 220 bp, Arabidopsis thaliana landsberg
gaatcgaccgggcaccgtgcaggcgcggcgaaccagcgcggcagagtccagcgagcacgaattcgctaaggcaaggcaaaatcagggcaaccagagcacgggaataggttcctctcctcggggctgcgctcggggaggcttgtcgcgacgtatggtgctctggggggccgcaccgggcgctcttctctggcgagctctggcgacggcagcttagcacgag

SEQ ID NO: 52798 - DNA, 432 bp, Arabidopsis thaliana landsberg
tttatttgatagcccggcgattaaaaagattccttttattatcactcgccggctaatggccacaacgaggacgcgtgtctccgtcggcgtcgtcctctttgttctcttagtctcgctggttgccgtctccgccgcgagaagcggtcctgatgatgttatcaaactcccttcgcaggcttctcgcttcttccgtcctgctgaaaacgacgacgattctaactccggtactaggtgggctgttctagtcgccggatctagcctatattgtcatgacaggcatcgggtcctgttacgactcgtctctgtttattagactctctttctctaatcggaaattttgagtttgcctccgattgctgctatgtggagatttggtgtgattctatatactaaagatgccgtgtagcttgataggatcagctgaatctactc

SEQ ID NO: 52799 - DNA, 972 bp, Arabidopsis thaliana landsberg
tgcgtaattccatgctcgggtgtgtctagatgtataacaatctacataactttatttgagatttttttttttttactctttcttaacctagttaagactccatggattgagaagctaacatggtgtaaaagggtttctatcaatataggattctgcaaaaatgcatcagattttagatgcaattagaaataaatttttttgggctttcactcttgacacataaatgatatattcggatttgtaattgtaattgtggctaattaaattatatcaagtgtaatataattaatatattttatatattatattttcggtacttcagatttttatttggttatcaattttgttcgggtccagtttttttttttttttctaagtatagaaatttaggattcgttcatgtatttcgttgatttctgatcggttcgatttctttttttctttaaatattgtttttttgttcgtatattttcggtctaagtccagtggcaatttaatcatcgaaatttaacagttgattgttacgttttgatttttgcataatattgaaatgatgcctattgtaatagtggaattaaatcttacataacggccggttcggtttcaaaaaagtgcattgatgcattctattaaaattggtagaccaaaacattcgggctgattttggccttctttctgatatttatttatctccgaaacttttgcttcttaagtctgtctctctcttctatcagattccacactaatcggaaaaaatggcacagaggcttaacttgcttaatctcgccgtccctccggtcacccaccgctctaacttcccttccaccttcaccttcggcgtcgcacttccgcttaccaggtctctctctcgctccaagatctgactctcatcttcttcattatagtttctccttcgttttctactcttctgtggtccaaattctctatttacttgtgttttctgcaaatgtc

SEQ ID NO: 52800 - DNA, 590 bp, Arabidopsis thaliana landsberg
gatgtcgtcggcttcttcggcgtgtagtcgtcggttatggaatgggctagtagtgctgatgaggcggagtacggcggaggaggttgttctggttctggttccggcaatggtcttggattctcattactggtttacgcttggattaagtgaaaatattctttttcgagggaaataagaagttactgttttcggttaatgtttttttttaatatgttcttctttcttttttacattaattttccctctgaaatcacgtacggacgagaagatataaaaatattggagtaaattttttattacaaagattttaattttcgtaatatctctggtgactaatttccagtatgattctatcgttagttaaaacttaaaagaaattcttagtacaatattatgtaggaaatggttggtatttgatggcggtgtcttgttgtattagttgagaagattagttgtcaaatgttgactctcggtggctttggataatttagtccgtattaagctttggatttagtacgatctttagactattattagagtttggtctactatatgtcattctgttcttggtggtccttttaaatagggga

SEQ ID NO: 52801 - DNA, 515 bp, Arabidopsis thaliana landsberg
atattaaaacaaaccactatattacatatgttggtcgctataaataatagttatatatgaaatgaaacaatatatacacctattcatatataaaaagatccttgagataggatcgaagatgaccaacgacgatgcaattaacgacttgcctaggcgtcattgtttcctccgtcgctatgtcttgccaacatcggtttctgtttcttggttctcctctctttatttgctctgttttaattactctgttttgttatcaactatgcatactcattactcttctttatattattgagagaaaaaaaggtccttgagaaattaactacacgtgcacaattcaagatatatggtgatactgtctgcatactttaatacaaagacaactcaaattatctattcatcatctggaaaatgtttagcatatcattttatagacaatgtagtcttctaaatttgattaattctctccatattaatttagaagaacgttcaaacaaaatggagagaattaataaaaa

SEQ ID NO: 52802 - DNA, 1222 bp, Arabidopsis thaliana landsberg
tgcatctagattataatcttctttttatatattcagtaagtttaactttctaggtacatcaaaaggtatatcttatatataaccccatgcatatgctttatagatttaaatcatgtgcaaacagacatttcacaggacatccaatttttttctttatcataaaagcgattttatacatctagtttttatattatactacgcaattaaaattatcacatcttgcaataactgatatattttgcatcagtcaatggattttatcagttgcaacaaacaaaatgattttgtagcacattggacttagatagtttacattttaaattttaaaatagtttgatcaatagtttggtttgaggtggtatagctcaagatacattttgaatagtatatcataaggtcagatatataaacatatgaataaacttacataagataaactttacatatgtaagtctatgtattacaaagtccaaactagctcagtactatgaacggttgatatacttcatatatatgtttatttaaagaaaaaaaggtgacctctgtacaatatatataaataaatctagttgatgaatatgagaattaatatattcacagttgacaccgagaaaatatatttacttgggcgttgtggtctgttcaaatcgttttaccatgtgaacatcaatgttggcgaaaacatatttgatattgctcagtataattatcaatattcggttaaattaatattgaaagtttgattctaaaaatccatttggtcgaggagcctgctttaatcgaatcttgattgaaaaaataatagttagacagttaatgcaccatgtgatgttggtctgctcttagttctgtttattcgaataatatagctattctaatgaataaaaaaaattgtatggaaaatatcattatcgactagttgacctatgtattgaaattaaacctcatgtatttaattttcgtacgtacgttatggatataatcgtttatgttggtgtcttggtgatctatgtttgttttccgtttagttatatctcataaagattgtttcactctcataaggtaattggtcaatccttcatagatgaaaatatcgatactcggttttcaaaatttattaaattgtgtaacgcatgcatttaagcaagtaaaaatagagaaatcttttttttgtcaagataggtatcaattattgcttgagaattagggtttgattggttct

SEQ ID NO: 52803 - DNA, 670 bp, Arabidopsis thaliana landsberg
cacattaaatgagatgattcatagttttttctgtactagccttctcaaattccaaacactaaaaccataccttctcatttcttaaaaaattacacaccaaatgagatgatttatggcgtcttctgcactagccttcacaaatttcaatcactaaaccaaataagacattaaagagttcaacattaaaaccagataccatctcacatttcttgaaacattaattaaataccaaataagacatcataatttttctgtgacatgaaacacaacaacattgtaaccgttgcaacacttaacaacatcacaattttatctttagataatttactctcctttagttgttaggcaaaagtggcgtatattctttaaattcttaatactaacattaaaagagttcaatatagtcgaaccaaatctaccctaaatacctaaaatataatcgtttctatgctccataaagacaaaaacaaaaggattccaactttcaaaatctatgacaaactcgattttacactagagtaccttcggatcgcgattggcgttccacgtttgcgtcttgcgttttgcttgtagcccttgtaggttggtgaagggggtaagtgataataatagcaacacgtaaaagttagttgtggagaggattgggacccgtgtgaactactctcttgtc

SEQ ID NO: 52804 - DNA, 135 bp, Arabidopsis thaliana landsberg
aaaaaacataaaaaagaaagaagaaaaaaaaaaagagaatacacacacaaagaaggaaaacccaactaaacataacgagcattgatgcatggaaaaattcgaatacaatgcatgaacaggtcattaaaactccgt

SEQ ID NO: 52805 - DNA, 107 bp, Arabidopsis thaliana landsberg
aataagaaatacagcaattatataagatctagaagatctaggagacaaaacaacaacaacaacaacatataaatcagaaaagcataaaaaaatatacaacaaaaaac

SEQ ID NO: 52806 - DNA, 977 bp, Arabidopsis thaliana landsberg
ttttctaccttctcccaagatggtttagtaggactaagacctgtctggtaagaattatgaaaggctatgaagttttaataagttatctgagactatcaagctcttaattataaccatcactgaaaggaaaacgtaaaaatataagaccattattacttacttgttttagtgtatttataatttaatgtctttagattggctacaacaactaatctgagtttgaaaacttttactctatcaaaactacgattttctgaatgtttaagccgtcttaattcacatagataccataatcaaattggcttatttttgtcaatttttttttttgctatttggtatatcattaccaaaaacgcacagttgcatttgtcaaatcgtcaggcttaagttaagatcaaacaaaagtaatatagaaaaaatcataaatgtcacatccacaatgacaaacaaaaatattgtgagacgcattaccataaagatgttattataaactaggatacaaaggagaaaatagaggcgggaaaaacaaaagaactgactataaaataaaacaaagaaaaatcacatttgtagtgggatgcctttccattaggaaaacgactctccgacgaggcaactttactttcatttctactttgttagttaagcttttccactaaatcattaatgaaggaatcaatatgtaatcaactaatcaaataacaaacaatagtctctaggaactatgacgcagcggatattaaaatggagatttatattatattgttgttattgttataataatcacatatattgtctttcttactaaaactacgttctcaagagtgactcttcaacatttttttaaatgtgaacaatggttagtgttaattacacggacttgctttcgctttattggcccgccataaatctgcttttgaggaatgggtttttctttaattagttatcaattcctcgctttgaggattctacttact

SEQ ID NO: 52807 - DNA, 532 bp, Arabidopsis thaliana landsberg
  unsure (1)..(532): unsure at all n locations
gaccgcccacaggnnnnnnnnnnnnnnnnnnnnnnnnnnnncgccggggccttttatttcgtcgtcttcaacctgcccgacatcggggtgaggcccagcgcgaaggcacagggcgcagccggcgccgcgggcctctccggcctgtcgatgatctacaacggcgtgctcgattccggcctgaacacgctgtccgaccagggcttgaacatcgtgccggtcaacgtctannnnnnnnnnnnnnnnnnnnnnnnnnnncccaaggcgttcggcttcagcaacgtgaccacgccggcttgttcgacgggaccggcgaccggccccgccagcggcctcacttcggtcgaatgcggccctgccgggttgggctcgccgtacacctacgccaagggcgcggaccagacctacctggtcgccgacggcgtgcataccaccacggtcgcgcacaagatgctggggcagtacgttatcgccgaactgaccgcgccgggacaagcctcgatgctggccgaagccccgctggccggagcacaag

SEQ ID NO: 52808 - DNA, 916 bp, Arabidopsis thaliana landsberg
  unsure (1)..(916): unsure at all n locations
catcttgaaagttgaaacattaaacatttatatctttttattaaattgtatatacaaatatttgtttgcgatcttttgttcgacgtgatatgtccggcttatatgaagttcccaattatggaatcgtttagggcttttaaatttgacgtcgcctcctataaacccaatgttttgctgctcactatgagatctgcaggaatagaaacttgcatattttggtacgagaaatagctacacataatttaaagatataagactttgatatcatataatgaataataaagagaggaatgcctcttttatgtgtctctaaatcccaatgtggtgttaaagtatttccaaagactgctctttttgtccaacactctttagtttacattagcacatgctattattttcctaccacatactacaaattacttctccttttttcaatacgtgacaacttttttctaaccattataagtttattacattactaatcattgacaatttcattcaattatttctaagcaattcttttgtctctaatgactgccagtttatcatgtttttccatgatagtctctcattagcatattataaaaaacctacctacgattttatattaaccaataatcaaccactaaatttcacatgtcgaatccatcataaatcagacatatccaatgcatcaagaagaaaaaaacacacaagatctttaatgtttcctcatctaagaatcgtatctaatatctctgttaacataataattaaaactaatctcccgaataaaattaatctaattcataatcacacactattcctgtttcatccgtcgcaggaagccaaaagtaagaaccaatgtggtaatctcgtaattatcagaanatcctaagggcagtatgttactctctttactatatataccctcccc

SEQ ID NO: 52809 - DNA, 604 bp, Arabidopsis thaliana landsberg
  unsure (1)..(604): unsure at all n locations
tgaactatccagtgacaactaaaaagaaacggagggagtaagtgtcagatttcgacgctttgctggtttgatgatggttggcttcagatggacgtcctcctacatttctaattgatgtttagattatctttggttggcatagggtggattgtcctaggactttaaaactgcaggtattacttgttcatctcaacaaatgtatgttgtagcacacatatatttaattagcattaaaaattaggtcgtagcattagcacgagcattttgctagtaaattaaatttgtgaaatcattttatagtgtatataactgaaactgtagcagaatgactgaaactgtaacgtgatggctgaatgatatatgtgtggaggcagggagctagctgtggatatatggaatatcaagaagactaattttacttacatactcgctgatcttgtagccaacagccatattgttgcatccgagaacgatgaccttgttatccttgcgcgaaacancgaagggcgtgctagtaatgtccnacatatcgtggatggttattatctccgttgcggatttgttgtagcattgctgagatataggagacttgatccagaccttg

SEQ ID NO: 52810 - DNA, 979 bp, Arabidopsis thaliana landsberg
aaaatggtggggttggtgaagaaatgaagatttatcgtcaaatttttcaatttttacttggactattgcttcggtgatatcgtcaacatgggcccactcttccaccaaagcccaatcaatatatctctcgctatcttcaccaacccactcttcttctcttaccaaacccatttcctttatttccaaccctacccctttatttctcaagctttacacttttagcccataactttctttttatccaaatggatttgactggtctccaaagttgaattaaatggttgtagaaataaaataaaattatacgggttcaattgttcaattgttcatataccgttgacgttcaattgttcatatacgggttccgtggtcgttggtaatatatatgtcttttatggaaccaaaatagaccaaatcaacaacaaatgaagaaattgttagagtatgatacactcatatatacccaaatatagcatatatttataatataacttttggctatgtcattttacatgatttttttggcttatctattaaaagtatcatacaaactgtttttacttcttttttttcttagaatatatatgcccaaaatggaaaagaacatatgccaaggttgattttatcgcttatatggtaaaaattggaaaaacatacaaatcattactttatttaattaaatcatgtgaagaaacatattcaattacggtaatacgttatcaaaacatttttttttacattaattgttacattttttttttttgcaaatattcttaaataaccattctttttttatttactataattaacgataaaaataaatagaatataacatttcaacaaagaaatttgcttatgaaaaatacaaaaatccagttaatttttcagaaaaagtcaaatttgcttataaatatattgccactacgtttatgtgattttataagaaagagatgcagcttaccaaacgccactgtgaaaa

SEQ ID NO: 52811 - DNA, 816 bp, Arabidopsis thaliana landsberg
tgtcatgttacaaaaaaaggatcgctcttgctgcgtcgccttttaacgatttgaactccgtccatgtctattttgtagtcgcggaaagtagtcgctgcgaccaagtgccgaacaaggtcatatgtcaaatgccatagtctcctagctcttagaaaaagactgctgaaaactatattagcctcctaagtgaaacgtagcaagtgttggataattaagagagaaacaaatgttatttatgttgatgtgcatgctctgtcttggaacagagcaaaaaaagcttctcgtttcagttccagaaaatttcttagcttaaagaaaaaactcactcgagaattccattactaattttaattcagtagcaacaagagtctttttcatgatatttattaaaaagtggaacgttttatccaaggaaccaagctttacaaagaagcattgtggtgaagcagccgagaagattctggtgatcatgttgaatgattttaggcttgtttgatgagcgtcaacctccatggaatccatgaccacaaagacttggtagattcatctataaaggagatatgtaattcatttgttaacgtctttcactgcaatagcttgttgctatgcgtcactaatgacagcactggcctctggtttgaatcctatttgggacaaacaatgtataaaccagaagagttccacagactaaaaggtatgctttggatacgacacaccgaaccacaaaaatcgaggatttattatacgatacattttcgcaacagtcttaatacaaatttcatcttagagtactataacggtcttgatgtcctcctg

SEQ ID NO: 52812 - DNA, 505 bp, Arabidopsis thaliana landsberg
  unsure (1)..(505): unsure at all n locations
tcgatctatgttttagtccattgctggatctgccgctgtaaaaagggatnnnnnnnnnnnnnnnnnnnnngaaaataacgagccaaagctattgttttgaaagaagaggtagcgatgactcgaattctcctttgaaatttgcatgcccgagtcgttgagcgagtcggtttcccatctttttggatgcggtatgtagcgtcgtcaagcttccttgctctaggcaagacagtgatgcagctgaaaaacccaaagatggatgttacgctggagacgaccaaagaccgtccagacacgaggccgaaagtcctgcccatcgattcgatttgtagtacaagactaaacgtgtgtggctgagaacctacaaatgaggacatacaccacatctctaatattaattatgtgcctaatgtagacgtccacacccccggatgatgcacgttctgccgctgggcaccccgccccgcatcgcgccgcatcccgccgtgacgcaccaccggcatccggc

SEQ ID NO: 52813 - DNA, 563 bp, Arabidopsis thaliana landsberg
  unsure (1)..(563): unsure at all n locations
tgaatgttggtgtttgatgtctctgtctgtctctatatagacacacacacacacgtacgtgtgctgtgagcctgtgataccagaaccgtaagcgctccactgcagtctgcagcatcgatccggagaagaacgaaagatcaaacgcctccactagaccactactcacccggctagctgctctctctctctctctatcgtcgttctctccacggaggaatggccccgcgtacggcactactcattgccaccgccaccatggccgtcatcgccgccgtcgcattgctcccggcgaccgcgtcggcgctgacgtacatggtcggggacgatccggctgggacgtcgggccggactacgacgcctgggccagcgcgaagaagttcaaggtcggcgacacgctcggtacgtacgacgttattaccccaggcgtggacaacgtgccgcgcatgtcagcannnnnnnnnnnnnnnnnnnnnnnnnnnattcctggcagagttcctgtactcggagggctccacaacgtggtggtggtggaacgcagactacgaggcgtgcgcgtgccgagc

SEQ ID NO: 52814 - DNA, 828 bp, Arabidopsis thaliana landsberg
atgttgcctatagcacagtgaccatccatcaaggtgtgcatcatcacaagatcaggcttcattccctttcccacaactttctcaaacaactcatccgcttccctcgttttattttttctacacaggacataaataagcgacgtataagtaaactgcgtaggctgaattccatcggtcatcatttcgtcatgcaaagcaaatgctttctttgcatctccatgctggcaataaccatttatcagtatattgtaagtgacagaatccaaaactatacccttctctctaatctccctaatcaatatctcagcagcttctatcttattctccataaacaaaccatgtatcaacgtgttgtaagtataaaacgtcggcatcataccttgtttcaccatctcatccctgtaagcaaaagccatctccaaatccccattgttactacaaccacggatcaaaatattgtacgaaacagaatccggaaccaacccaatctccttcatctccctcaacacctcagaagctcttccttcattacacatccaagacagaatcggattatacgtctgcaaatctggttgaaagcctttagatttcatttcactgataatcaaacgagctccttcgattcgtcctctcaaagaaaacccttgaacaagagtgttgtaagtcactatagttggcttaatcccaaaaacctccatgatacctaaaaaccccttagccttctttaacttcccttccttacacaatacattgatcattatattgaaagtgtacacattcgatgtaatcgtcatcctatacatatcagcataagaagacccaagcggt

SEQ ID NO: 52815 - DNA, 559 bp, Arabidopsis thaliana landsberg
ttccatttattcataatttttactctctccatttcttcattacttttctttttattttccggagatttttttctttgcgcgttggtatttgctgcttttgctgcagctacagtgtaagtttgattttctgggttccttcaaactccaaaatctcgcgtcgctttttgcttcagaatcgatttgttcttgttacttccatctgttgttctttttaactctgtgcatgattcaatttcgtgttcgtaacctgttttttgctgcttgtttagttcgacaattaggtaaaaaaatgacgatccctaaaacttatgatccttttaatcttcgtttagctacttcgttcgagatcatctagggcttttgttgcttcatccattttgggttttgatttactgtaaatgttttggttttgtttatgtaatctaagcatgtaccaatgattcatgagtgatcatgtttgttataggagcagaactgatgtgaagcgtgtattttgaatgtgttcttggttttgacagagaattttgtgctttgtggtgggaggtgagatttttatgac

SEQ ID NO: 52816 - DNA, 912 bp, Arabidopsis thaliana landsberg
aaccctgcttcatttagttgatacttttttgaaacttttgaaaaaactagttataaaagtaatagccgtagctagcttttgttttcgtcgtactcaaatagatcaagaatactaagaagttgagacatgaatttaacaaacatttgacacaactcttgttttgtaagggaaaatataagacacccttgcgattagaccatcttaaagagtaactaaattgtacttgttgtttctgatgaacataccaggattttgtttctttgaacaacaatcaattaccttacctaaattttatgatcaggtgcacatacaattggacaaaccgactgtctcttcttccgttaccgtttatacaacttcacggtgaccggaaactccgatccaaccataagcccatcgtttcttacacagctcaagactctttgtcctcccaatggagacggttcgaaacgtgttgctcttgacattggtagcccctcaaaattcgatgaaagtttcttcaagaacttacgcgacggaaacgctattctagagtcggaccaacggctttggtcggacgccgagacaaatgccgtggtgaagaagtatgcgagtcgtcttagaggtttgttagggtttaggtttgattatgagtttggtaaagctatgattaagatgagttccattgatgtaaagactgacgttgatggcgaggttaagaaagtttgttccaaggtgaactagtttgaataaagacatatagtatatgtattcgggttctctatgtttcagatttctaatcactgaatgcatgttacgtaattgtcggctttcaatatttattttttagttttttatttctctaaaaaaaatagtgaagttggtttgggatgggaaaacagaatatgcttatttttatatacacattttttt

SEQ ID NO: 52817 - DNA, 1126 bp, Arabidopsis thaliana landsberg
cctttcaaaatagaaataaaagaaaagtcaaatccacggcagaaatagttcaaagttttcgttttggttttcatcttttatttgtttaaatatataagaaatgagatgttattaaaaaaaaaaaaaaaaaacaacaactggtaaacagaaataaaaaatgataaagaaggacaatgtttccatactctctagtctctatcgtgtatttatgtttgacgagtttggctcacgacagaatagaacataataataggtccggtgagaagtatagtttcgttttatatttgaacctttttctctaatcaataatgtattgtctttagcaaaacaatagtgactatttttgttagagcaatagttgtttgagtaattttgagcaatagtgactatttttgtgtattatttatcatcaaattttagatggacttatgttctataatacgttagatgatgtataaatacacatctttaacacaaaaagatatataaatacatatcgacttatggcgttcttaggtttgtcctaacataataaaaacgaaaacgtgcccacgacggagacaacccttagtggaaagtaatttgttgtttttggattatttttatttttatccaaacaactaatattcataagtggctcccgatgaaaatcagtaatcacgattgtcaaaaaaaaaatatatatatatatatatatagtaggagaaattaaaaatcgacaaaattagattcagatccatgtttacaatttttttatttttttttattttttgttgaagtcttgcatcaattaaacctaaaataatcgacaaaatcacaattgatgctccggcagtaattacagataaacaaatactacaaccagagcagagcagcagaagaatatttcatatagaacttaatgacattgtattacttaaatttaaactttcttaaatcaacattaaaaacagttgattcatgaaacttgtgaaaaacaactcagtagttttcacatggactgacaacagctgtgaaagcttttggttcaattttgggaggattttactagaatccaatgaattgtgcaatccaaaactaatatgaaaaaaaaaaaaatataggtatctcacggatatagtaaaat

SEQ ID NO: 52818 - DNA, 938 bp, Arabidopsis thaliana landsberg
acctccttgcctttagaatcaaactcatatatcatcctacggccctcccttactcatctctcttcaaatcaatcacctctcatctctctaccttaattatgattttttttttttaagtttctaccaagcagtcatttcccccccccccccccccccaacaataataataaactaagtgaaaccctaatcttgagtacttatgatatgttaaaccctacacacatgcatatgaaagaacttaatcaagaaatataactacatataaaatatacaatagataaacatatgagtgtgtatgtgtatatatatatgtatagcttggaagattgctaaaagcaatttctggtgaaaggaagggtacaatgacagagaaaatagggtgcaggagaatctaactcccaaacttagcaatgcttaggtacctttcttaattacttctctcttcttacactctttctctcatttcccactcatatactattttatcttcttatttcttttcttattatccttttatgtataaatttccatatttaatcacacatttttgcagttaacccctccttgttctatctctcatagtcgactccatttgctctttctcactctcaaccactcccactactcactctcgttttttgagaaaacccaaatcataaaaaccaaaagacattcaatattccttttcaataatcttttcttgatttccattttcatctcaagttttttaaaaacccaccaagttttttttttcgcatggatgaggagttcataactaatctctgctagcctcttcttaggttttcagaaagtttcgtaattatgggtttcgagagaacatcatcatcattatcattattatcatcatcattaccatcatcattacaaccatcagaaaacacgagagccaagttcagtctcttctatttattgctact

SEQ ID NO: 52819 - DNA, 1360 bp, Arabidopsis thaliana landsberg
  unsure (1)..(1360): unsure at all n locations
gaacagaaaactcttaccatagagaagattatccaccactaatttgtatttcaaactatataatcattcgacctttgtcataaacgacttggctaacgactaatatgtgatggaacaaatggtctgacttcactcaaacctgatccaactgatggtatcaatcaaattcaatatccaatgtacccatgaattaacagaaacatccatgaaagctttggtcacaaaaaagatatttcatgcacttaaagagattcggtgaagaaatctcaaaacagtcttattacaatcaacatttatctatcgtatataatcaatagacgaaaaaagagatttggtgaagaaatctcaaaacagtcttattacaatcaaaatttatctatcgtatataataaataaaaaaaaaaatcggtgagattagaatattgaactggaaaagaaaaaagaaaaaccaaagtcaaaggaaacgacagcttccaagtaaaacactattagaagattaagtgagaccaaactccaaccttcctcacatattttggataagcttcgcatctatattcctcctacttccatgtgccattcctttttcaattcataacacggcaccgtctaaatgcttatccacactacaataaaaatagtcatttttattatatacgcgtttcaaatactgataacacgatacagtactaatttaggggacactatatttgtgaaaactgcggactatacacttttctagtatccaaatttaattttgagcaataattttatcgtaacgtatatttgtcttataatgctcctacttgcaagtattatcctaattttttgagcttatagatagagcttttataacttttgtagggaaacatcaaacatgtattaaaatctctagtgttgcgaatttaagtttatgctttcttgagtttcttcaactgcctgccattacgatactaaaatttcacaattttgtccgttttatacataaatatacataaacaaatacgtgatttttctctctttttctattcaattcattatagaaaataaatgacgtttttcatatttgcaactaaaacattgttttctttcagttttatgtggtacatgacacctgttatgttttacgattgttgatatatattcaaaacaccatgtgcatgatnnnnnnnnnnnnnnnnnnnnnnnnnacaactatcaaaattattatatatgtgcttcgatcaaaaactatctacagcttgtaaatattgctcataagtgacaacccataacgcatgactgcctttcaaaaatgtatttgcagaaaattttatataattaacgatcaacccctaaatgttatactacatcgcatatatca

SEQ ID NO: 52820 - DNA, 621 bp, Arabidopsis thaliana landsberg
tggtactattattttttcttaaataattttatttgaatttcgttatagatagataaataaaagatttttggggtctagttggctctcatagtttgaatgcttatataaggaaacagagctcgaggctctcaataatgccacataaaacacaacaccaaagcctttataactctttctggggtttttaattctctcaacgaacaaaaaaaaaaactcaactaatattctccatcctctttcttcagatttaagagaaaccttatcgttatattctctcttctcttttctttttgactcccacaagaagaaagcaaatttctttttctcaggattgcttgaaaactgtagaaatctttaaggtttttttacaccaataagagtcagagagagagagagagagaaagagagatctattcataaaaaagacaggtaatctcaactccgaggagataactgatataacaatttgagagaataagaagaagaagaagaagaagaccaagctaaagaatggttgcttttttatcagcttggccttgggaaaactttggcaatctcaaggtttgtctttaatctttggtttgagttttgaaagatttggtttctcttctgaatctcata

SEQ ID NO: 52821 - DNA, 631 bp, Arabidopsis thaliana landsberg
tcttaaatgtagtcatatttctttttttcaaaaagcatcaaatagatcaatttgcccataagactcgatttatttttccacaaatatgggaaaaaacaactggagatttttaaaaaggaatgacatatgttttccaaatgtattaactaatgattccaacataagcaaatatattttctaaaaatagtgaaataaacaactgtgaaatgtatacaaaaagcatgaaatatattttcccaagtattggttaaatttgataaataattcaagttatttggaacagtgatggagtggaaaaataaacataagaatcataattaaaaatgaacgtagagtttagatagtgatttgaaaagattaaggaagattaggaaatgacactagttataggacgattccaaccttgagcagtggggcgggagttgtagtaacctgtcaaccgcaatatatagcctggtgctcaaaatgagacttgaactaatactaataaggggaatttggatgttcaaaggacttaccacgattgatgactaaacaaagcagtggttagctgaattactaactaactagagctagctgcctaggctagtcgaaagaccaatctccgttttgagttgccataaaataataa

SEQ ID NO: 52822 - DNA, 856 bp, Arabidopsis thaliana landsberg
cactatatttgtgttataattaatgatacttgtgttataattaatgaacttggttcgcctgttcgcttaaagagaccaaactataaaatcgttttctttgtatctatttttttttttcataggctctttttatatttcagttacccctaacacatactttcctcgtacccatagctatgaaatgtaccttcctatctttaacgagttacaaaaaaaaaaaaaaatcgtttcgaaaacatctctccatctctaattttttatgattgaatcttttgtaaatatctaatttatatttaatccgcctatcttacaccatatcatctcttatcccaacatcttatgcactttgattctctcattttcatctgatttttaaagatacatcaatatcatactgcaaaagtccccccttggtcatatatcgaacgattacttccattccgcttatatacatcgttcttgttccaacaattgttgtactttcagcatgttgaagaagctgtgtaggttttttaataattaaaaattaaacaagataataatcttttttctaagctggactgacaattttgaggttcttaacaattattacaacaattagttctttacatttcagggtaggtacgtatttgtattttataaacttcgaggggtcaaataagaaaatctgaaaattagaggtcttgtataaatgttacagattttaatgcattgctttggaataacgtccctggacccttgcgacgagacccatgaaacgttggattggatatatagcctaacaaattataaatcgatttgattcttaccccaccacaaagtctcatgtatttatgtgtgtacagacactggattc

SEQ ID NO: 52823 - DNA, 605 bp, Arabidopsis thaliana landsberg
ttcatgatgcattcacatataaattccctaacataaaatacttattttattagatatgtagtcttattcaagcgtgaaggttctaaaagaaattggtttctgctcgtcaaatttgaatttgaacattacgttgccttcagatattgtcaaccgatgatgatttttatttaactgtaacaccactacctaggtaataaagcattcatggaaaaaaaaaaactaatgtgtggcttacttttttttttttttttttttgtcaataactaatgtgtagcttactaataatgcaaaaacaggaatgtgggaatcttcggccagattgggaattttggtctcatcatttttctatgagaatttatagttcttccttttaacaaacaaaaagcatgccttcactttcgacttcctactctttatttgtgattctacagaaataaatatccattactataataatatgataagagagccacgcaatataatgctatcatctatccatgatccatggagataaaagccaagagatatataatagatcatgctcatgcatcacacgtacaatttacaactaaccatatgtaatagtacttttaaaataaacataa

SEQ ID NO: 52824 - DNA, 1029 bp, Arabidopsis thaliana landsberg
atccccaatcatatacacatacatagtccaatatgagctaaggaaaaaaaaatggtgaaaatatatagttatttacggccaaagcgatgagtcctgtgacgattccggccttaaacaccatccctagatacttggagtcaaagttcaaaagttgaatagaaggaggatttagtcctttctttaaaggcccaacctgtattaagaaacatactattaatagaaacccttgatgctcaagctttaaaacttgttcgcttaattaagtttaattatgtttgcatgtgattgttatttgttagtatataaatatgtgtatatgactgcattgctcacagtagcaatgccgtgtgctgttcctttcaccaaataagcaacaacgcaacccacaacgacgaccaccattggacccattgctgatacccaaaatagctttgggtatctttgcttctgcaatagtaacaagttttcaaacatgttaattcttgttaagcatttgagaagccatttgacttttaacatatgtgaaagggtggctatgtgaaaataaggacaaatcgtatctaaatcattgttattcaaaaaaatccaactcaaagtggtatgtgaaaagttgaggaatgattacaaaaataaaaagtgaaagattttgagagggtccaaatccaatggttttgtccctactaagtggataaaagacttaaacaaatgaaaaaaagagaagaagaaagttactatgtatcgagtggattgtagaaatacaagaaagcagacaccagccaaggtactttgccacttccactgcaccaagtaacaccctcccaggataacacaattagccactggtaacaaattcttagatttatatatttttttaaagaaaaagaaagagagatgacctcagcccggttgtctaagattgagtggagaactgatacgacatcggttttgtgcgtccaatggactagtccaaagatgcccataagctgtagtaggagaatgatgattgcggtaccgcccatgaaggccgtt

SEQ ID NO: 52825 - DNA, 1321 bp, Arabidopsis thaliana landsberg
atcgtcaagcacatgagtcgtccaaaaatgaaatcttcgttgttctttgtcttgttatgtttgtttcaaataaacaaattatgtttctgcttagaagaagaatctctaaaggttaaaaacggagttggaagcaatggattcataagtgtcactagtttcggagctattggcgatggaaagactgatgatactaaggtgtttatttatagaatcatcactatttgtatcaaagtggtatgtataacctttgttgttatgtgtatcaatatatttcaggcttttcttaaagcatgggaagctgtatgcaaaggaggacacaatagaaagattcttgtgcctcaagggaaaaccttcatgcttaagcctcttacattcatcggtccatgcaagtcttcgaccatctccttatcggtatatatatatatatatacttgtctctttctcttgtttcaaattatattggaaaatccagccctaatgtgaaaaatgatttcaatagtgatcgattttagcttatgagtagacaataactcgaaccaatgtttaaataatttggtgatttatttacattagataagaggtaatcttgtggcaccgggttacacttggtatgcgggaagatacccaacatggattagttttgacagtatcaatggtcttgttgtcaccggaggtggtaccatcgacggtcgtggttctttgtggtggggcaacgttaataatcgcccctgcgtaagtccatttgcaagatcctcacaaccataaatatgaacttcgatcaaatgtttattctcagttattaatgatgtttctttttcttccttgcttttcttaggcaatgcacttcaacaactgtaatggtcttcggatatctaatctccggcatttgaacagccctcggaaccatgtaggtctaagttgttcacagaacatagaggtcacgggtttaaggatgacagcgcctggtgatagtcccaacacggatggtattgacatatcgaactgtataggagtccacatacatgactcagtgattgccactggagatgactgcatcgccattaatagcggttcctcttatatcaacataaccggcatttcttgtggccctggtcacggtatcaggtgatttctaaattcacagattcacaaacaatcatcatataatatacagaaaggtacatgctaaatcatgtatggtatggatttgatattatagcgtaggaagtcttggagtaactggagattttgaaactgttgaagaagtgagggtaaagaactgcacttttacaaaaacacagaacggtgtgcgaatcaagac

SEQ ID NO: 52826 - DNA, 587 bp, Arabidopsis thaliana landsberg
  unsure (1)..(587): unsure at all n locations
tcatgattggagttgtttgtttcttcaggtgatgggtgcttatggatacagcattgagcacattctaatggttgacattattcctgatccctctgtacgcaaggcaatgaacgaaatcaatgcaggtaacctttatttccgatacggagggaatcagtgtctgatacttttcaggtctctaatggttccctacacatcaaagcacagaaagatttatacattttatgattataggactcagttagatgtttcgttaagagtttatgcgaagttaatttacagtttgttgacttcatttcaattttgcttctcaaatccattctctacttaaatgcagcacaaaggctccagctcgcgagtgtttacaaaggagaagcagagaagattctccaagtgaagagagccgaagcagaagcggaagctaagtacttaggtggtgtcggtgtggctagacaaagacaagcaatcacagacggattgagggagaacatattgaacttttctgacaaagtagaaggcacatccnnnnnnnnnnnnnnnnnnnnnnnnnnnnnnnnnnnnnnnnnnnnnnnnnnnnnnnnnnnnnn

SEQ ID NO: 52827 - DNA, 143 bp, Arabidopsis thaliana landsberg
ataacataaacataacatataagatatagaaaacaacaataacataggatgaatgtattaattattaataacacaaagaagaatagcaatgaataaaaagtaacaagaacataacaatattagattgagatttaagaataaca

SEQ ID NO: 52828 - DNA, 991 bp, Arabidopsis thaliana landsberg
  unsure (1)..(991): unsure at all n locations
ccgcatcgtttgggtttgtttcgttttggctcaatcagttttcttagagcaaagttatacttaaatgaagtggtatgtgtgccctaatataatataaaaagataaaacctcgaggatacctgaattttaaaaggcttgcnnnnnnnnnnnnnnnnnnnnnnnnnnntgtaaaactgtattgttaattcgttaaatggtaatgatatttacttggatatttggatcatacataacattattgaagtagatgatgatatttatttaggggaaattgagggggacgtaacgacgacggtgcatggtccatgtgtcaccgtactgatagttcggataagaaagaagataagtcatcgtatccacatggactttcttctagaacctatttttattatccaatagttatctttaaattgaaatattataacatgatagttctcttctcgtacgagtttgagtgaatcaaatccctcacggcaatttttacataattgaatgcctttttacttaaatctgaaaatacaaatctattaacttgaagaaatatttttatgtggtccttcaattaagatttatatgaataattttactagtcattcaaaagatttattcaagagagattatcgatccatacaaaataaaatttgccatattcgccgactaattaaatgcgtttacatttgtcgttttctgtaagtgcaaatttttaaacattgtccattttggattgtccgccctatcctgtagttttttgtgtgatccaaattgaacaatactagcatttttaaattatgtgtagactacttgtcgagtgtctagatcacactattggtttgaattcgtaattttactgtattcttgtttgtttgttttcggaaaatatctataacaaaataagtgataataatagaagaagaaaagacgataattatctagggaccgttttgttcagtgtcttctttatcttctttgttataaaagcctctttgccact

SEQ ID NO: 52829 - DNA, 329 bp, Arabidopsis thaliana landsberg
aaaaaaaaaaaaaaaaaaaaacaaaaaaaagaagaaaaaaaaaaaaaaaaaaaaaaaaaaaaaaaaaaaaaaaaaaaaaaaaaaaaaacagaacaaaaaaaaagcaaaaaaaaaaaaaaaaaaaaaaaaaaaaaaacaaaaagaagaaacaaagaaaaaaaaaaaaaaaaaaaaaaaaaaaaaaaaaaaaaaacaaacaaaaaaaagaaaaaaaaaaaaaaaaaacaaaaaagaaaaagaaaaaaaagaaaaaaaaaaagcaaaaaacaaaaaaaaaaaaaaaaagaaagccaaaaaaagaaaaaagaaagaaaaaaaaaaaacaaaaa

SEQ ID NO: 52830 - DNA, 603 bp, Arabidopsis thaliana landsberg
  unsure (1)..(603): unsure at all n locations
tggggaagcccctctatggggaatggcaaatggattaccattttgcttgagtactcttccattgtctgatcagggggggaactcatagggtcctacagggtagtgtactgaggaatgccttagattcacaggcagctcaagacaacggcgataatttcctcatctttgtcacggcctgacatgtcgcccatcacgtgctaggaaggcccacattttctttcgccaatcacagaaggatcaccctttgacaccgtgatccaatgtacggatcaccgtctccaaccgtgatccatcctactggatcacgattctaatcgtgatcccacaatacacccacatgtatatagacacgctcagttgcactttcttatgtaccagctacctcagctatcaatacaacttggttacactcaatacccttgagcacattaccagacgtgactacagcacccgctcagagctacgctgcctgatcctctgtcaacataaacccagcacgaccggtttatcccttgtgaaacaatactaacgtcacacgttgatagctcttgttcaannnnnnnnnnnnnnnnnnnnngagcaatataatactgtcgcaaacat

SEQ ID NO: 52831 - DNA, 1107 bp, Arabidopsis thaliana landsberg
  unsure (1)..(1107): unsure at all n locations
ttttcccctaagtaacattatgatgatcatgattattatcatcttcataatatctaatgactaaaaacaagctatattataaatcgagatctctcatcataaactcttccaatgttgccgtctcacggtggaaatcttgataataatccatgtgatccaaactttcatcatagctactattcccggagtattccctcggaagatcttgatcatcgtacccgctgctgtaaaccgccgagttagtttcctcgcctaactgatacgacatcattgattctgtacctgaccaagtcacgtgacgctgctcgttactcacgtgttggttgaccacatgatcaagattgttattacttcgatcgcttgagactggaaagatagcttctttggagattgtagtgggagacccgaaatccaaagtcaccggaccttttctgcggttggattcacctccggcagaacgtccggtaaatttctgaactagggctcggaaattgctagggtttgcgtttaggagggttgttggtatggctctcctcgaagccctagatctccttccagcagcttcatgtgccgcggcaccaccgtctccaagggaagatcccgacgatgacgcgatgttaatggcgttgaagcacggagtaatctcttgaatattttgttgctcatagtgttgtaaccactggtcttctctagagttgttcatagggattttatatttgtttgtcaatttttttttttctttggtgtagcttgtatacattgcataggaggtaggattaaggttttactttatatgcgggaaggagatgtagctaagtcttgatggtcgttgacgttgactagtacctttgaggattttaatatgtttatgtacaaataacttcaatataataaattgggcagtgtgtaaatcatttgagtgttgaataagtatttgaattttaagtattagcataatctttttcttaatttaactaatttatggtgtaagaaatagctgaggattcactaaattgatgaagaccaggatntccaaatttattgtgatcattttatttaatgctaaattgtacacttttggttatataaaaagttgttctcttgagt

SEQ ID NO: 52832 - DNA, 1280 bp, Arabidopsis thaliana landsberg
agagaaatctataaacaagatggtaagaaaatgtctttttctttgatttctgtggtcatatatgtgaagctatctgatgggaaaatacagggctttggaggagtaagaaatgccacaacaccatcgattatcagtgaagtaccatatgcagaagaagttgcatgtggtggctaccacacatgtgtagttacaagtaatactctcttattatatcgttctttctttgatattgagtttgcttgtatactgcaaatgcctgtcctgctcaaatttctttttgttattctttatagaggcccaaaactgctctttagtttctgctaaatttatgaacatattgtgtttgtaagatggtcgataacaactcatcgtttgatgtttccttcgtttttggaaggaggtggggagctttacacctggggctcaaacgaaaatgggtgccttggaacagagtaagttacataccccgaaaaaatagaatgtttccccataagatgaaaacaaggttcttgaactgtacctatactcttatttcaaaaaattcagttcaacgtatgtctcacactcccctgtgagagttgaaggtcctttcttggagtctactgtatctcaggtatcttgtgggtggaagcacactgcagctatttcaggtagcatctcttttgagtaaaacatatttgtttcctctctcattgtataagttaattcaactcaatttctgaaacttgtttgcagataacaatgtcttcacctggggctggggaggatctcacggcacattctctgttgatggacattcctctggtggacaattggtttgtttcatcatcttatcttattgatcaaatctctgaaacaacattttcaagtgtcgaagagaataaatatggtatgcttaatatgtagggccatggtagtgatgtagactatgcacgaccagcactggtggacttgggaaagaatgtaagagcagtgcatatatctcgtgggtgcaatcgtacatgagcagttcttgaacatttttgaagactcggtctcaagatactatcatatacagatgcttagtttattcttgcttaaacatctatagactaaaaaaataataagaaatttacactattgaatagcgatcaattacaccattggttctaacttgaacaatttagtaaataggtggaatattcttgtcgcgtaaattctcgattttatttatttatttttgaaaactacaacaaacgatagaagagttgaggaaatctctttgtaatcataattatgag

SEQ ID NO: 52833 - DNA, 830 bp, Arabidopsis thaliana landsberg
ataagaagctgattttgttgtttcttcaagtttaacactctcaagttggtcatgggtgaaagttctgccacaccagaacaagaagccgtcaaaatccatctccaattgaattatatacaaaaatgtcaaaaagagaaccaaacatatagaagaaatacataaccttgaggaggaaagacaccttccatgtaattagactcaagatgtagactcctaatcgatgtcgcagcatttaaaaacgggacgatactgttgtcgaacatattatgggagaaatctaaggtagtgagcttatctagtgtcccaaagctcttaaaacctgaaaacaaaaatgcaagggaaaaaaaaaaactaaaattctctttcaaacaaactgtcgaacactttatgtgcactatgtaatataccaaattacagaatcaaactcacgcgccctacccttatttcacacaatcatcaagatcttatattgaactttatacacattcttattcgataaatcagctatggctgatcttagagacaaaaccatacggtaaaaggactctgtttctattgttgccgttggaagagattttcgtgaggttgtttgtatttggttaaaaccggtttaaacctgaaccgctatttcttgttgttggtatccagacattaattagtgggaaaattgagaaatgttcggttagagagacgtaccaaggaagtgatcagacaaattagtgaaccaattccacgaaagattaaggctttggagttgaggaaaactatgaagcaaagacagatttaaagaccgagtttgcagactcaaatgcgaccggtacgagtctatc

SEQ ID NO: 52834 - DNA, 1004 bp, Arabidopsis thaliana landsberg
tgttaaagaagatgatttcatatttaatgcgatgcatttggtttaaagtcaaatgggtcaccaattgggtaagttatatgtgaagatattatcgggaaaggtctagcttgttgagttaatgctcaggtacttgttcatgcacgacggaacttggataagatcatatgaattcgatgtaggatgtggagtctttaatatcagtggcatctctttctcttacgatcgtccttactatggtgtgcacataagaagattggttaaaacatcaattatctagccaaaaattcgaaggattaatttaagagattttgaacaaagcatgattgatgtaattatagagaatgtagcgaagcttttatgaatgaatataacgtgcgaatagtttgataatgactcatgtcattcgctagtgttattaatttagttaggcagtacaaatcagcgttatccgacacaagctttggggaaaagaatggatttttttcttcaaaacttgctaccaaattgatattgttggacaatcaattggtacacatactaatcacgaaatccgcatcatcatgaaagtcacataatattggtttctcttaccaaatattctccaatcacattgatttcaaaaccaattttgaacgtaactcactatcatattcctacctttctagaaatataatcctaggcggtgttagtggttaacatgtgtaagcattaaatgtgatagggaatgctttacatttccaatttcattttgacttttagccgtaattaattttttgttgactttttgcctactaacttctaactgtatttcccttcctgtcgccacgatcaaaggacgggaaagttcgttctatctatattacaaaagcttagaattgatttggaccactagcttttaaaatatttgttaaaacactttgtaattactagttaattactacgacagtttacatgtaatggttccaataactaatgacgttttagtagaattaaactgtaaatca

SEQ ID NO: 52835 - DNA, 852 bp, Arabidopsis thaliana landsberg
ttgaataacagtgaataaccctatgggtctatagttagataaggttattggttcatatatttttgttattatacatatgtttgtacgttgtgtattcatggtcgcattgtcgtcatgtgcaagaagcgtatgaccataaactattctcactatttttcattaataactattattagttttgattaaattttaaggggattttttcatccagaaccttcccaagagatgctctattaaactaatagtccaacgccgttatatatatgattgagtgaaagtttgaaacacatccagaacagaactcgtcatggttttccggtttgacgtttacatcttttgccgaggttcaactagcacacgtttcgcttcttctttattagcggctctactcagtcggaatatagaagtctttgaagatatcgactatgtcagacaatttgagcatagagacattctggcaatagaagaatcgaaagttttagtggttgtcctcagtgctaatgaattaagacggaggtggactttgagcaagcttgaaaagatcataaacgcggaaagaaccgaacaagttatcataccggttttccttgacacagagccttacgatgtgataagcgataacgtgttagctatattaacaactttagaggacaagaaagaggcgaataggtggataagtgctgtaacaaaaatcgctgcgttacctggccggacgtttgcaaggtctccacttctttctctctatcatacatttttgttttacaatgttttaatattcacatagaaagatccttcctgtaacataaataacgtatttaattgagagaggaaattattaggcttgtgatgcgt

SEQ ID NO: 52836 - DNA, 1138 bp, Arabidopsis thaliana landsberg
aattggtatgtcacatgtaagaattgtcaataggttatcttagtgttgcgagaataattgcatgctgtggaattgttcatggattcgtttataccaatcgtatgtgttgcatgtagttagatctgatagactattcatcatgtatttcttcggaatactttgagaaacccctatcaaaatttctcattcgagaaactattaaaattttagtgggatttcttaacttttgaaaatatccactcatttatattttttttttgttttttttttgaaaatatccatatgaaaaactttccaatagagatgctctttatgatttctacgttacacacccattaaagatattcaccacagacggtacatgttatgccatcagtacaatgctagaaaaactcaaggtatacgagatgcaacaaacccgtcatcatttgtactgtacaagtagttatttttttagtaaacatttgtttaaataaatcaattttttatttttacttttttcttgcttcacatcactattcgtcagaagcccaaatattttatattggtgccgaagaccatctttcagaaaaatacattatggatacgacactatgactatgataaagtaatttgtgaaataaagacagcttttagaacaacatagtatatatttcatgacacgttataaagtgatggaatatagaactgaaaataaagagcatcaaagctaaccatgaaaagtggatttcttttatagtgaaaccatcacgctttagttcgaaacaattcgccacggttcatgtatttaggttttcgaaggtcaccgtcccatttatatatatgctttctgcctttctcttaggtcatttttctttttctttatcattgttattttcttcatgtgactaataaagaaacaaaaaaaaaacgattcttaaaaggtaatctaatttagagctggtattactttagaaataaaacactcgatgatgcaacctttttcttgttgtgtagtgaattggttcgatctttattttttgaaaaagttaaattcattgattaactaattagaagttgtagacaataaaaaagaattgggacttttacttgtttttatattttctcgtttgaattgttttttaaaatctcatttaaa

SEQ ID NO: 52837 - DNA, 162 bp, Arabidopsis thaliana landsberg
ctagaggcccccatatgtactaccggcttccccccccccgcacacccccctctcagcacgcttgcctaacacccccctcgcgggccaccccgggctgccccgtgcccggcaccctggggtcggtctccggagccacgtgtcttggaaccggacggctcggca

SEQ ID NO: 52838 - DNA, 1328 bp, Arabidopsis thaliana landsberg
tacaactttcatcatccatggataccctcctgtgtacgtttcgttctgtatcggtcttgtttctccatcgcattgtcctccgctattccacgccccttttctgcagttaaaactcagaatcaaaactaaccctaagccgttcaacacattgcttggattgaaagaaagcagttcatacctaaaatgtgaagaggaataaccaacgaagaagactctggttttagtactgttgatattggaatcaacccagtcagcccatgtatgaatagcttttgtataagcttctttcacttctaatctttcgtaaaccctatttccttcctggtaataacctttcctgcaaatcgaaaaatcggttgaagtgatacgaatcaaaaacaaagaagaaggtttttctcatagttcacatacccttcgtaggttttctggtgagtccaccagtgaccagtgttaaatataacaatgtctgcgtttttgtatatcttcgtcatcgatctttgaatcatatcgagtctcagtgtctctcttctcttcccgtatacatctacaacttctgattcttgaacgaggaatggtgatttgatgaagtcaatagagcattcaaagtcctaacagcaaatatcaaaattcatcaccaaaactaaaataaaccaacggaggattctgttctgtgagacacttacattgaacctgaaaccgtaaaagccttcgttaggaagattactctgttttccaataatcttagaaactctgtttttgtcttccaatgttgacctaagtgaacaaaccagagactcccacatgtttctattcaatgaatcaccaacaaaaacaactcttttccctctcagcatcttcaacatcttcttcccatcgaatctaaaagacgcaagacagaaacaatctcatgaaaacagagtcgcaaagggtaatggcagaatcgtaattaacacgaaaacaagaactaaccttggaatcgagcatccatgaggttgccatcgatgacggagaaaccccgaatcaggtcgaccattcttgaagcagttgaatttatcttcaacgaaaggacaataaccaggaagataaaccggttcagaatcgtcaaagacccaagttccatcaaaaatgtcgcaagaagcgagttctttggtctccgaatcaatctttggctcgttgattcttctgggagaaacagaagagagaaacatagttgtatctgaagcagaggaagtataagaagaaggagaagagaagaagtttgctgctgtgagaagacgagaggtgaagctagagacgatgagtgatggagagaaatctgagagagaaga

SEQ ID NO: 52839 - DNA, 1244 bp, Arabidopsis thaliana landsberg
gggttattttacacaaattttgatattggatatgaagttgggttctttgtacatagcatattctttttattttcatatgtgttatgttaaaattttaggaccacggtccacattgtatacaagaataatatatgtggtgtgagctggatcctttagtaataagaggagcatattctcaagttgcaaacttatgaacatcacatcattttgatagaagatttatgcattacccactaagaattgttgagaatatattaagtgatttcaatactattatgtataatagcatatcactgaattttcaatttattaggaaagacatacacaatatatatgaacatcttttatttacgattttttcatatgtcgatttaggaattaatatggtaaaatttgactatgtagtgcatatactcttgtatatcttgttctaaattgacaccatttaaattttaaaaccttagtaaatttctagggcaacaaaactttaataaaatataatcccgtgtgaattaaacttgattggttataaattataataggttaacaaaaaaaagttatcaaatttatggcccattttcattaaacaagatccatacattttcaaatgcctccacagaacagagtctggactctggactctggatcatgaactaataatctcccctaattttcgtttctctacactatggcccaaatattattggtatttaaattagccacccccataaaatagttccttaactttcgttgctctacactacggcccaaacattctacccccaaaactactctaaatcactaggcccgtcaggcatgtaatttgttaattagagaaaacatttatccaaaaaagaagaaaaaagctttgtctggtcaatcgattccagtttcgagagttacaagtaacctactaaactacattgttgcttgctctctcaaccatgtgattttaaagatttagtataactaattttctgttattcgtctttcttataaagtacaacatcagttattgcgattcgatacacaattaatacgattcgatacattgattcttgaaattgatatattagatcacaatatcagccccatgcatctctaacgtacaccacaaacatttgatacataaattattgttatatgatgtaatctggtcacaattgcctcatatatctctgacgtacccacatggccacatgctacaatataaactctatgggttatctctgccactatatatc

SEQ ID NO: 52840 - DNA, 1177 bp, Arabidopsis thaliana landsberg
gtcggtggttctgattgctttaacccggttcagctgcaaataccaaactcttcctctcaagagccaatgaatcacccattctcctttgtacctgattacaactttggaatctcttcttcttcttctgccattaatggtggttacagtagtagggggacccttcagtccaattcacaatctctctttctgaataacaacaacaacattactcaaaggtcatcgatttcttcgtcttcttcttcctcttctccaatggatagtcaaagcatttcctttttcatggctacacctccacctcttgaccaccataaccaccagcttccggagacttttgatggtcggctatatctttattacggcgaaggaaaccggagctctgatgacaaggcaaaggaaaggagatagtaaaaacaaaatgcttcctttcatctctcgccaatcttggttagtctttttctatctttttagtatctcaattcttcagtttttagaaaaatggtttatggattagttaaatgtagtgatagtaccatgttgtttgatttgttataaattttggtttcttgatttcacaaaagaaagatggtttattggggcgtggcagtgagtcatattttgttggtttcataatttcattacatttttgtgtgtctcgaagtaataatgactttaggattatataatcaatgacatgtggatgaatttgaaaagagggcttcatcgtctgtttttgtctcctcatgtgttctatgttgggattccttcttactcaacatcaccttgttccaatttgtgatcatttacttattttctctaagggtaggtcatttcattaaatttctgtcccattctgatgtatttattcattcacatgatacagtaattcacctaaaccttttgactccattgaattagttatatatatattagtattgcaagttcttggtttaggaaatctttatggcaatttattttaatatggaaaatgtactgaggtgatgaactgttttggataagaaagaagttagttaatatttaataattggcatcaaagaatcaacatttgacaaaagactctgctatgaagaaagttttgtccttaatagataaatattttatttaagagaaaaagatgggaaagtgagtgttttttgcctggccacattgttttaaaaca

SEQ ID NO: 52841 - DNA, 177 bp, Arabidopsis thaliana landsberg
  unsure (1)..(177): unsure at all n locations
cacacacacacacacacaccacacacacacagacaactaacacaannnnnnnnnnnnnnnnnnnnnnnnnnnnnnnnnnnnnnnnnnnnnnnnnnnnnnnnnnnnnnnnnnnnnnnnnnnngatacagagacacacagacaacacatacaaaaaatatacagatatatacacacaac

SEQ ID NO: 52842 - DNA, 544 bp, Arabidopsis thaliana landsberg
  unsure (1)..(544): unsure at all n locations
gatttggctgcgtcggagtctccaccgcgatctgtccctcgcaaggtgctggcaacctcgactgatgtgagagctgaagactcacggaggcgaagaatgggtgtgtcgaaatagagcatcagtgagtcgtcacaaagtgggagaagacgtcgccgaatgggtatggaaaggtctcgtcttcggggtggtctgcgattggatcggggtgctcagcgtgagtactttcatcgacgtctgggacgtgcattggagagggggacttgcaggacctgtttgagggggaagagttgaggatgatgttgttcaattttcgggaggcgggtcttattccgaaganggagcctatgtgacatttttgttgccctcgctgctctgttgcgatattgagtgaaaacgctgccctcgccctcttcgcaatagagctacgagggtanatagtgtgatgtgcactattgtgtgatggtgcattaaggcgttcgcttggttgttatttgtgattgcgctatgtaattatgttgtcctattgcgagttgcttcaatttgt

SEQ ID NO: 52843 - DNA, 1028 bp, Arabidopsis thaliana landsberg
aaattgtacgtccatttttaaaaattgattgaaaccttaattttcgctttaatgcagcgaatttttccgttggggtctaatcaaatgatacaaacactgaaagcaacagaagtctaccaacaagattacaagaaatgaaccacggaaagatcaaggaggcactgaaaattagtattaaaattttcttgtcaaacttaaaatttataagtaatcgggtcaaaaagcaatttcttaataattaagggtgggacaacgaatagtgtgacgaccagattagcaagtgacatgtggcacctacttattggccttgcctcccaaaagtcagaccgatccaacccactctttgtaattaacacgtgtcagaagctgaaggactctcctatatgatttatttaatgtcttaatagatttctcatttcacactatccttttttgcttgagaactttcttcactctttcaactgctaagaagaaatagagaaaactatgacggtacgtaaattttgttgttaattattttgctttaatccttttttcatatagctcgtaattataaatctataattgttttccgggattttccgaagatctttaactgggtgcagaaaaagctgcaccaaaatgtcatcaaaggttagttttttttttttatagataatcaatatcagctttattttataaaaaaataacaaatttgctttattttccctttgtttattagaatatcgtaagcttcactaaaatagtagtttactttttgtagtagtatcatataggatcatgtggttccctgtttaataaatagttttatattaacgtataccacgttttcgctaaagcataaattttgtccaacctatatttattttcatatggtgaaagaaatagatggtgtgaggaaaaacgagaagaagaagaggaatgaaggaataagtgagattgagaagaacacgaaagctatattggatcaagttggtttagtggatgctcttgataattggttcgatggagttctcaccatcggcaca

SEQ ID NO: 52844 - DNA, 679 bp, Arabidopsis thaliana landsberg
  unsure (1)..(679): unsure at all n locations
cccccctcccccctccccccgccccccccccccccccccccgcgcccccgcaatcccccccccccgcccccccccccccttcccccccacccccccccccccccccccccccccccgccccccgcgccccccccccctttccnnccccccccggcgggttcaccccccccccacaaccccacccccnncctccccccccccccccccccccccccccttcccccccccccctctcctcccccccccccctcccccccccccccccccccccccccccctccccccccccccccctccccctccccccccccccccccccccccccttttttcaccccccgggtttgtttccccccccccccttttcccccccccccccaccaacacaaaacccctccccccccccccccccctccctctccccccccccctcctcctctcccacccccccccccccccccccccccccccccccccccccccccccccccccccccccccccccccccccccctcccccccccccccctcntccccccccccccccccccctcctccccccccccccccctctccccccccccccctcccccccccccctcctcccccccccctcccccccccccccctcccctccccccctctccctctccccccccccccctccacctcaccccccc

SEQ ID NO: 52845 - DNA, 2204 bp, Arabidopsis thaliana landsberg
cagggtaaagtgctcaccgcatcaatatcagacgattctgacaagaagagcttcagcagcttcagtgatagcttctgagtggtgggttggaagattcagcttaggcagttcaagattgacatgtacaggaaaatatccaatatctatgagaaggtttagtgctgatacagacgttttctgtaaccccatggattttaatatctgtaaggaagcaaccacaaaaatacacatgattacaattgacagtttgcttcaataaccaaacagtgaaaaaacgatcacaagacattcgaagagaatattctttcagagatgtcgcttcgcaatcacatagaaaaaactgaagagatattaccacagaagaaatataaggttgacttaccgttccagccaatttctgctggtcagtgcttgcccatgcatcaatggcataagcttcaagtgagccaatcctatcttggactttatcatcagctagccatgaagatttagggggcttggcgtgactaggtgccttcttggcagacttcagcaattgaataaactcctgaaactctttatcttctgcctccttcacgcgttgccttcgtaaaagctcttccacctacaaaaaaaacggaagtgagatcatcagagaaagaaggtcttcaggacaaatcatgtaaagcaatagaagagtccaaactttcacaatctagatctcttagcattaatcacgtatcatcacctaacaagccaagttacatcacagcaagtatcgttagaaattttatcaacatagaattctttcttgatttcacaaacttatggagcaaatgcagctcagctgtactagatagatggaaaaaatcctaatattataggatttacactaccaagaaaggaaaaaagctacagaaaaaaaccattctagtgacatagatgacctaatccaaaagataactcaggaaaaaatgcacaagaaatacctgttcagtaggccgagggctatatattgatcgagaaccttttgactccaagatagaaaagtatatctcgtcttgtgatagcaaaaaatgagcacaatagctttcaagaggatctgcgcgaccatatatcatctgcaaattaaaagcattaacaacccacgggttcaaccggtacattaactcaaatatatagtacctctgctaactcttctggggtcacaggtttgttcttctcaagtaactccatccaagcaaactcaagcagttggggatcctgcatcgaaacaataacaataagctcattcatgggtaacaacatgacaacctcatcttagactacaactcacagaaaaaaaagacttgtaaaccttttaaaatgtcattacgtaccaagttatcttgagccctttggagaaaatcagtaagtcctgtatgatcaaaattataaacattcgggacgatgtatgtaatttgctgtggtttgatggaacaactaacaccattctgcaacattaaactttctataagtctaacaatctgcaaacactccaccgacgctagagcaagtaaatgagtagtaagttttgattgaaacctgatcaaacaccatccaattcttcttgccatcacgtctatgaacaactgccaacaacactctgtctgcgtccttcttaaactccagaagcaaaccagcctctagctcctggtttactagcttatcctctagaacctctccgtagcttgttaatttcaccctacaaattcacctaattacacaatgattcacttaattttgctaataatcagtaagagaaggatactgcgacgtactttacactggcgcgaactctcattcggcttcccttgcgtctgctgatggattcgagctcttcggaaacactttcgaccagactatgtatgcaagtcgaacagctcggagcatcactatttccgagaaaccgcctatccgcgcggattagtggaaaatttaaacgtaatttcgagaattcacggagatgagaagctctgaggcgctgaatacggtggcggaatagagagacgggaggaccgccggcggaagtggcagtgcgaatgatggagcaaccattgattgctctcaccgacatcatcgtagcttcagatgaagaagccaccgaacgatatcggaactgggctaatcgttctctctctgtgttcttgtggcgatagaaaggcaaatgaagcgggtgataaaaa

SEQ ID NO: 52846 - DNA, 1221 bp, Arabidopsis thaliana landsberg
atcctggtactcagattcttgagttgcttttgcgacttgtctctttggttgatatacaagtaagtttcttttttggtcatctccatctacttgagctactagaaaatggttactgtgctcatacgttaatgttctctccgtctttgtatacatttttgttttggtttaggtgttgccatatcttatgaagtcattggcacagctagttataaagttaccaaaagaaagacagaacgttgtgcttggtgaattgtatggtcaagtggctgagtcagacgatgtgattcgcaagccttctttggtctcttggctacagtcactgaactacttatgttctaataaccgtactgaagttttagcttctggatcaacgatagacacttcgaaccagttggctgctcgactctagggatctcctcatagtttacaaacatgtgaaatagaataaagtttgtatgacttgtatcatggaattatgttgaaaagaattataaattaacatcatctccattttttgatcagtagccaaaaatagtcaatcctgttaaatgtgttgcggtttaaatttatttggttacgaagaagaaccggattgaaagggtaagaaacgaatcagtcttttattcttggcacatgttacattgtcaagactgaatttgtccagtgtgtatcccaaaccatgttatttacatcattgccactatttcacgaagcctgggtttccacagttagagcaactatttcagacgactgtaggcaaagatgcccacacagccaatggccaaaccaagaagaatcggtaaagtagaggattcgaggttttgggttgtactgtttgttctgctgctgtcgagtctctctatgcgagtcttttctccaacatactcccgaagaagattactcagtgtgtccatttgatgcattatctgacgctgtccacgagcaaccagtacgacctgtccagatgataaaaatattataaagtcacgaagagaaatgatttatatttcaaatcgtgagcctagatctctatcttatattcatacttctatcgagtctaaagctctctttgatgcatctgatgctctgttgttgtctattggagtgaagcaatcaataatagaactgagcatatgtgattttgattttggagagttggtaaacatacctcttccatcagaggagattcccttacgagctgagatgcggatgcggagaatg

SEQ ID NO: 52847 - DNA, 1017 bp, Arabidopsis thaliana landsberg
gcacgaatccggttcgttttctccagatcgctcttgttttcttcacgttttattgtctaccgttatcattccttgtatagttttgggtggattagatcatcgtagatcgtgattgaagaagcgagagataaattaggagagcgaagatgagcgagggccagaagttccagttgggaacaatcggcgctttgagtttgtccgttgtgtcatctgtctcgattgtgatctgtaacaaagcgcttattagcacccttggcttcacattcggtaaccttttcaattcttccttcactgttacaggctcctttgattatccatgttgcgctgctgatattgtttcctctggatctattcttgtgtttgtatactaatgcttactctgcgcgattcgtttcgagccttctcttatttgatgaaattgaggaatagattgttgatcattttacttcatactatgttctgaattgtctgttggttatattttaggtcccttatggtacataaacgagaattgccttcatgattgtatatgtttaagattgtttcttatcgctttagaatttaggtgctcctcttcttttctgtatgactcaatattctttcctaggatacaccattgattcttatgtagtattattatacttgcaagacactgttttatcccattttgatgtctgtgttgccataacagcttttatgtcatcttatgcaattttgatctcataagctatctgttcttactcttgttattttgtatgtacagcgactactttgacaagttggcatcttttggtcacattttgttcccttcatgtggcattatggatgaagatgttcgaacacaagccttttgatccacgagctgtgatgggatttggcatattgaatgggatatccataggactattgaacctcagcctgggctttaattctgtcggtttttaccaggtatagctttttccatttcagttactgcatgatgtgatatccatttttaactagtgttggtctaatttc

SEQ ID NO: 52848 - DNA, 1091 bp, Arabidopsis thaliana landsberg
aaaaaaaaaagaggcagaccaaaaaaactttaggggtcgatttcgctcctgggtaatcaccatgtccggagaaaaagaagagaccgccgcggaactcaagatcggagagggtacttctctattctcttcgccatatcccccgctgtgtacctcaaaattagggtttctttgcctcatcgaattgatcttaattcaatacgatttaattgagcttaactgtatcgaaaatcccttaattatttgagatttatcatcgaaattgatgggttttattctctttgacaaaagagtttttgaaggcaaagtgcttaatgaactgtgaagtctctttgattcttgagcacaagtttgaacagcttcagcaaatctcagaggatcctatgaatcaagtttctcagtaagtataattgtgtttcatagagattcattgtatattagccatcatgaattgaagaatttagtcagttttatatgttacttctaggttagtgaatcaatgttgaatattgttgaagaagttatgtttgctccttgcagagtgtttgagaagtccttgcaatatgtgaagcgattcagccgctacaagaatccagatgctgttagacaagttcgagagtatcctttttctgaattagtttgattcatagtttttaagtaatcgttgctttgacatgcttccttcttgatgagtgagattttacagtcactggtttaattctatagttttgtgagaatatgctattccttaactcaacttttgcagaatactaagcagacatcaactcactgagtttgaggtacaatgttaaatctcttgagtttggatttttgtttatcaattaagtcgtttcggtagaagacttaaaacattgcattgttcattattgaacagctatgtgttcttggcaatctctgtcctgaaactgttgaagaagcagtggcaatggttccttctcttaaggtaaataaagattctactttttctattcagtggagataataagataacctcaaaaggacaaattgtattgttatgtaagtggacttttgagatgatgtaagcttctcttttgtgtagacaaaaggaagag

SEQ ID NO: 52849 - DNA, 1115 bp, Arabidopsis thaliana landsberg
  unsure (1)..(1115): unsure at all n locations
gatgcaagctttatttattcaacatgatgtggaaagtgtgggatttatttccatctattgtggatgtaacactatagatttaagctgccaattagagtttcaagtaagaacatgggatgagtagacgtcaatcaagataacaaaaagatttttcttcattttttgtaaaatcagtgtgatggctcctctaaactccatgctcgtaaacttgaaaaattaatttcttttgcctaggttttttgtggaaggcataagcagatagtgcaagttacatgtagaatgttgaggcaaacacgatttgtgatggaaatgatggatacaaatacaatcacttttgctgccaaacccgtctagaggttcaagaaatgattgcaaaaaaatatacattaggaatttgatcccgatgaaatccttgatacactaggagaccttgatcttttgtgactcgattttacaagaatcgagactagaatagaatcttcttgtgcaacttgcattgcttgccttaatatgcttttctgttacaaatttgactatccttgagaatagttgtgctctaataccattttttgaaatctgtttttagcatgactaaacatcaatgcataaacaaattccatacatagtcacgagttctcctacaatcctactcaagggtacattttgtgtcacaaacatccactcgatcaactgaatgtttacaatagtttctcactcactcttgtcctctctttacatgttcatcaaggtataacaaaaaccctaatacaagctacatgttacaagctacaagaatcaaaagatgactccaagataattaagaagatgaagctctcaacgagaagttcacgaaaaaagacacatgacccgagttcactcaacacccacatgaggcatcttcaaatgcctttagttgaacatgataaaatattttattntagtttttactgcattaagtttaaaaatcatcaccacaattttaagatatttttgtggtgcatgtgtcctggttggctgtgtagagtataaactttttgaaaaggtaaaaaacaatgatctcagttggcagttggcacatcatagaactcaacattaaaaattcaaaacgaaatatt

SEQ ID NO: 52850 - DNA, 1056 bp, Arabidopsis thaliana landsberg
tttttatctaaaatttaacctgtgcttttgaaagcttacctagctggcaagccacatcagcacattatagatgctacacagaacacattgctgacaaaatcaataatagttctctttttacttggacacgaacacttcttttttacttggacacaaaactcttttcttttatcttacaaaaagataaggagataagttttggatttgaactttatgcacgatatgatgaaatttttgatggctgtcaataagccaacatgttccttcgtttcagaacatctctcataagttctaaacattcgaattgttgcaattaagctcatagttttcctcgattagtaacaaatcgaataatatctacatacttgaattgtcgcaacggatatataaatggagagaactagctatatgaaaatgttattaactaaccggttaaattatgttgttgttgctgttattaccttatacaaaataaacactatggatcatagaataatatgtgtacgcatattctagatgatctataatataataactagactcatatttcagctaattaaattgtgagatattaaacttttatcaaaaaaggtttctcagtttttgtttttgttttaccttcttacaaattcttccgaagcatttttatttgaaaaaacgattgtgtaactaataggagagaaaatcaaatatcacaaaaaagagaggcaaagtctagattcttacgtttattttagaacataaaaacaataaggtgcttgttcgaaaaaaaaataaaaaaaatacattaaggtgcttgtagaaaaaaaaaagttttagattatatctaatagagtctcagattctcggatgaagatgaaaatagtaggatgagaaaaccaagttgcccatagtgtctattttaatatgatgatgcatgcatactaacatcattattatcaagaaatcttgaagatcttttgtttaagtaacaaacaaaaatttaagactcgaaataaataattacaaaaatgaaatgggaaaacagatattctctttacaatacaagcctgcatg

SEQ ID NO: 52851 - DNA, 528 bp, Arabidopsis thaliana landsberg
  unsure (1)..(528): unsure at all n locations
tggcctaatccatccacgctcgatctccagcacaaaaaaaatctcttcacgtcggcatccagcccagccatcgtacgcgcnnnnnnnnnnnnnnnnnnnnnnnnntgcctagcgagcgtctgattttttccaccgccgcgcgctggtgtccatctcctgaagattttttccactggatgcctcttcttatcccctctcctctgataattcacggtgtcgtcagattttttttgccgctaaccgtactggcttcatcggcttcctagaaaaatcacgccgctcgaaaaaatctcaccgctgaacactgctattttatctccatccgaactcctctccgagctcatccggcctctgctccttccgcttcctccatgtgctgcacgcaggttccctgttcagcgcccatcttctccagcgccggccgctcctctctgccccagcccgcctccaacttccagccggccggagctccttctcccttagccagcgcccagcccacccgctctccttcctcctccagctcgagcg

SEQ ID NO: 52852 - DNA, 593 bp, Arabidopsis thaliana landsberg
catcaaccaaattaatgaatggatgggactgctctcacgtattcacctggcctgggtgtggccgcctgcccgcctccacgcctgggcgcatgggcctcgccggctggcctgctggcgatggcaatggatgggactctggccgtggctgtctggcggatcgcaattcgcggtggcggtctgggcgtctggcggatcgcggctgcggttgggcggttggcgtccgacgatcagagattcagagatcgctgttggctgtggcgtgccggtcaggtgtctggtaaattagtgattgagtcttaggcggctggaccttatatctactatctattatatattgggcccctctctattctgggcccccggcggtcgcatctggtgtatgggcccaaggcggccctgggcgtgcacgaggtaggacgtgaatagcgccggcagcagggccaagagcccaagagcatgaaggacggggggaggtcctcgcgcgccgagcaggagagcgcggacttggcgagtggcggttcgtacgttagggcgcgcagctagccgcggacgtcgcaggggtcgaccagtgggtcggcagccagacaggagta
